United States Patent Application Publication US 2009/0119022 A1 - sequence listing, part 11

SEQ ID NO: 16167 - DNA, 2301 bp, Emericella nidulans
gccgtgccagagcgtttttcggaaagatctgtcacagacctttttgcctctcattgtggatccgacgactttgacagttgatatcaagacttcaatccgcatacctgaagatgctttcccgacaattacccgcacaccaggtagcatgatcaacttccgttattatgttgaagtggttgtcgatctgcgcggcaagctgacttctccggagcgttttcttccgcggtttaacctagtttcttcagggcgcaacttctcctcaaatgggaagattgtgcaccctgccgatacgaatggaagcgcgatcacagccaactggggtgacaacattctagacacggatcaaatacgtcgtgaaaagggagttgttgctgtgattttcgaggtggtcattgggacccaagatacacagaggcgcaagagtgaagcccggcgcatgtcatctacggcggaggaagcagagttccagcagcccgtagaaaactccgttgatggagattacgctggccacgactaccagggcagcatggcgggcccagagcccggctatgctccgctagagaacactgcatatggacctgatcacaattcgttggccagattatccagagcagtcggagcatgagcattatcctttccagccggggacgcttcccagtcctcagccggatgagcctatggacgaaaaggcacgattacggcgtgctgaacagacgctcttgcctagtcaacctccgtgcgacccggaggccgggccctcatcagcggtggaagctgcaatgcctaccgctcctgtgctccctgaagatgaccacttgaacgattatcaccaccttccgtcaacaactgtgaatggtatgactggaatggcgccagcactcatgtcagcggagtctgtgcaaacagtcattgcaggaagcagttccgcacctctcactagtccctcaagacccagtgaagaggataaacaggagttggagcgccagcggttaatgatggaagccagtgcgccaggtgacccggatgcacgtcataacgaccgcgcggatgatgggcctagtgcgcccattttccatgacgatgacgatgatcagcagctagttggaggggctgcaaatggggacgagctattaccgcggtatcaacgttgatatcgcgattaacctctctcatctcgaattgatttgctatgcattgcgattggattcagcggagataccacatttgttatacttagtcaattcttataccacattgagcttgtacaagccatctatgtattatctactggcatatcattgatttcaaatcgtctacagtacctaggttcggagtaattggagttaagcgtaccgttcccgcatttaagccaagaaggcacgcgggtggcttggcatcatccgcgggcaaggcgacacttttccacttccatcccccgtagctgagatccaaacctcccgtcttttgagctgtcaacgcttctcctctactcggacagcctacattctgattcaacaagatgacactccgctatgggtccttcgccactttcctgatagtatgccgtatgtatccccccacgcacgactcgtccctccgtaacccgcgcgaccaataaattctatctgtcccatccatgaactctcaatttatcagaaactaatagccaaacagcaacaagcttcttccttggcataatcttctccctctttccttacgactatccaattctctggtctacctcgcctaccgattcgaccgcctatgactccctcgaaacgcacttgcgcctcctccacgcctctccccctctaatcccacggatcctgcacatcgtcattttcttgggtttagcaggcttgattatgaaactatggaaaccttccgagtcaaacatgctctttgatggcgcgtcgcttgtgctctacgcgtgcgggatcacggtgtatgttgccaacatcgttaaggggctcagacttgccagtgggggtgtttatggggccgaactggccaatgctccagatgaggtgggacagattcttggacgagaggatagcttgaaggtgctcagtgcgagtaacaccattttggcgctggttttggtaggtgttttggtattgcaggcgggtcaatggtatgcggagcgaaaggatgcgcaggaggatgagtcatttgcggccgtgaagggggagggaaagggaaagggtgcgactaagaagaaagcgaactaagttgttatgcttgcgtcggctccaattgatatggagggctgttgttaggttagggtagggtaaagaagaa

SEQ ID NO: 16168 - DNA, 3151 bp, Emericella nidulans
ctgctgttcaagcgggccaacctatactgatacagctgggtcccaacgatgttgcttctgcgaccattttcagcctacagatacacatatcgaatcacattactattccagatgccaagaaaagccggtagtcctccgtacattctatcgcaaggatcacctcgtccagcatctgcgtcttgtgcacggcgtaagccagttccttccaggaatggaaggctggaaaatgcaagttgataacatcaactcgcgatgcgggctgtgtgatacgacctttgtctcgtggtcagcacgaaatgaacatattggacagcattttcggaacggcgcgctaatgaaggactggaaaggttcaaggggactcgacccgtctgtggcctttgccgtggaaaacgccatgccgccgtacctgattggcatcgaggctgtgacaccggatccgttcagcgcttcgcgctgccgaaccagtcatacccaggcgatagtatgccaactacttggccgcagctgcaaagtggtgcgaaacggtcacccttcaaccattttaccgtggatcttacaaattttgtgcgtgaagcccagtttctcaatcaacccatcacggacactgtgctccaaactgccgggcgccgaatccttttcgatgatgaggacacgtggaatcagacaccggcagacaatccagagtggttgcagatgttcaaacgagcggtctgtcttgagtgtgaaggggaggataacctatcctcaggccgcccacctctgagcgtcgaggattttgatttcttcccttcatccgctgagccgtgggctgtgtggaacattttcgatgccaacctcaggactggcgaaagcacagatgctatggaactgggtatctcgcttccatggcgggactctggcactggcgcagcttcgagaaattcttgtacagaagataagcgaaccgaacctgagagcctaccggaactcacatcggcctcacttgtcgaactccaacaatgctatcgtcactgagccaccgcttgacgtatcctgtttttcacggagggggatggtatcgcagtcaccgacatcgaggttaaccagaatggattaagccgctctctttgtggcaggaagaaatcaaacttaccgctacgcccttggcaaacttgagccgctcagctctccgggctaaaaaaaataaggtgagtatgggatttaacaccccagcaggaccctacgaacacggtatatgcgagaattttcaggatcttgcaatagctgctatgccactctactcaaaacgaagcgctgaattatcagccctgagaacagggattgaagcgttggctgctaccagattgggcatttccggaagatttaacaggatacattcagcgacggggcctgtcctagacctagacatactgctcgagtaactcaccgctttaaatgaaacaccttcaaacgaaattgatgtttcgcgacatatctcgggggcttatcgatgcagttaagccataccatgctgccccaacccttatcatatcttctggccacaagacggcgtcggcgtcggcgtcggaccaccgcgactgatcggcatcgccgttggagtagatagcttcctccactaaacatcgataagcgcgcccgcgatgccgcaatgcagtacatatagataacagcgcagcacgtaccagcaccctcgattatcaaacagagaaaatcgcatagtgtcaatcagaatgcctgaagcctacgctagccatcctgactacggctacgcccgcgactttaagggctacggcgagtccggcctgaaaatcacctggcccaacaatgccaaaatcggcggctcgtttgtgatcaattatgaagaggtacgctcatcctctcttgtctatacgtcccaatactgattgtttgtgttcagggcggcgaacggtccgtcctggaaggcgacggcgtctccgaatcaaatctgcgtgagaacccaacaggaccccagagcataaatgagcggaattacaacgccgagtcagaatacgagtacggtagtcgcgcgggttggtggcggctcttccgactgttccaaaaacacggcatgaagttcacgctctatgccgttgcgcgcgcgctagagcataatccagatgtggcaaagcgctgtgtggaagaggggcacgatattgcgtcgcacgcttaccgctgggtcaattatcatgatttcagtatcgagaaggaaaaggactacatacgcaaggctgtcacgtctctaaaatctcttacaggatacgcacccaaggggtggtactacgggcgacctagcccgcattcgcggaccctagttccacaggtttacgaggagatgggcgaagagcttctctgggcgagcgatacctacgccgacgatgtcccttactggattgatttgcccactgagcgggatctccctgctgaccgcgcgaaagggtgcctgatgattccctacagctacgactgcaacgacttcaagttccatgttccgggttccggcttcagggatccagatggattcctgacgcacttgaaaaacgcatttgatgtgctttatgaggaaggagaggaaggcagtccgaagatgatgacgattggattgcactgtaggattattggacgcccagggcggttcaaggcgctgaaggagtttgttgagtatattgctgcgaaggagggagtttgggttgcaaccagaacagagattgcagaggtttttagggagacgtttccgtataagaagggggtgttggccgaggcgacaatttatgagtgataaagcgcatcacattgtataaagtccaggatgggtaatgctagatgtgaacatgtgaaagtcggctcatgtaaggaatagcaatcggacgtccgaatacgaattccagttcaaactacggactttctatatctaggctccctatccgccttatcaagatcggatgtccgatgtccatatcttgctgcgattcccaacaggtccaggctaggttttcttatcgagccactagattcgcggcttggatcccttgtccaagcttgaaccatctatgccgtaccgcttatcacccgccatgacgtcgaccagataacgtagccctatatgaaacctgtatagttgtctggagtt

SEQ ID NO: 16169 - DNA, 1338 bp, Emericella nidulans
gaagttccgttatgcgtactgagcctgtagagggtctttcttacgccgttatgactttggacgaaacccttcagagctcgtactagggctagggctggagctatatacccacaaagaatatatatccaaatacgataatctcttatcgaatggcgaaatataataatgaggaaaagtgacacagataaaattacacgaaagaatccactattattttgatgttatgttgttctgttgttgatgttgtgctcggtaaaggcgatgtgatctacacgtgactctacacgtgatagggtttctagacgcacacaaccttaagtagctctcccgctcccgcatatccatccttcttccacccatctttcatcctcgcagaagtgtgagtaccagccctcccgcttgcctcaatggctacgttatcccattaaacagttgactaactgccacatagcccatctacgaagatgagagccaagtggagaaagaagcgcgttcgccgtctcaagcgtaagagaagaaagatgagggctagaaggtgagatttatcgcgagtttaatatgggtacgcattgaatctaatgacaatcccagcaaataaacaactcgcgccatccatctcagtttctcatggtagacttgggttgaacgctgaacacgacaatatgacgacgtcacgatgatgattttcggttatgatcgtttcgtggttcgcctcaaagatacctgtgatctggaacatacatctgctttatacatctacctattcgacatcggaatctgccgttcaacaggacgttcactcccgactctaaaaggaatgtgaatatccacccaatccctcggattcataaaacgatttcgattgttcttcaggtcacatggttattctcttgaggggtcaacgtgcttagtggggttgggaggaatcagtggaaagtgatggattaccttgtcatggaaaatcgctggttcttcttgagtttatcatggggactggtcaattctctctggatcttagaccattagcatccgttagtgcacctgggatttggagtcgtggagaggtcctcgagagtttattgccctcaatacgaaaccaaaaagttcgcaaacgcgtcaatttctcttttcgtagatgtaaaatattctgtagaccattttcttaaagtgatgcaatcaaagatggatcatgactgattgtccctaatgtgaagtggtaggtctggtctctccaccttgacattcaccgccttcagtttttcttccaacttttttcgcggaaacagccctttttcacgtaactagctcatcacttgacatatatacctacaatggcct

SEQ ID NO: 16170 - DNA, 877 bp, Emericella nidulans
gaccatatatggccggagctgagacttcacaggttcttaaagtcgtccattgctagcgctgtattccataagatgcccccaaacgaaacactctttttagagtctaccacgcgcatccagaaagattccgtccagtgagtgggtcatggctcagtccagttgattctattaacacggcctatagttcattcatggacttccaggtctgggacttcccaggtcagtttgaataccttgagtcttcatttgatcttgaagagattttcggaagccacggcgctcttgtctgggtcatcgatgcgcaagatgactacctagagtcggttacccgtctcaaccggactatattggccgtccagcagtattacccaaatatcaacatcgaggtgttcatccataaagtagacgggctgtcagacgaatttcgcacagatacattccaagatatcgtccagctcatttctgatgagctcagcgacgccggttacgaaaacgctccggttcactactacttgacctcaatttacgactattcggtcttcgaagctttcagcaaagtgatccagaaactcatccctaacctgtctactctggaaaacctgataaacaccttatccaacaattgcggctttgagaagagttatctgtttgacgtcctgagcaagatttatattgcctctgatacccgccccgttgacatgtcgtgttacgagatgtgctcggattatatcgacgtgatagtggacatttccgagctctactcctgggatcaccctgaccgcaagcccaaaggcgaacaaaaccaggaagctgaaagctacgttgcacttcatgacgaaaccatgatccatctgatggaaatgaacaagtatgttgt

SEQ ID NO: 16171 - DNA, 809 bp, Emericella nidulans
gttatttgcgagacatgtgacgctaactatccccagaagggtttggcaatgtcaacgactatgcccctcagatgaattcgataaacaaccaatctgtacccgtgcagaatgctcagttccatgccgtgccgcagtcgcaggttcccgggttgcctaacgttagcgcccaagtgaaccagtccgtcaattcccgggcaaccgcctccccttctcagtcttctgtcgctgccccgagtcccacgaacgctacctccctcgcagctcctgctccaggccctaagcgcaacacacgcagaagactgtcccagttagcgtggaggaggctgcacgaattgctgctgatgaggacaagcgccgccgcaacaccgccgccagcgcccgcttccgagtcaaaaagaagatgcgcgagaagctctggaaaagaccgtcaaggatactaccgaaaagaacgccgcgctggaagcccgtgtcaccgccctcgagctcgagaatcaatggctcaagaacctgattaccgagaagaacggcaagtccgcggaagaaggaaaaaaggcggagaacgacatctcggacatgttcaagaagtttcttgctgcacagaagaccgagggcgagcgaagtaacggcaactccaaaatcggcgttggtaccgtttaggtctcgcttagaatgaagtttgctgtttttgtcttctgttgtatatcttgacctttatgttgatatcatttgcttaagtgagaggcgtcatggtcggttggatgggcggtgggccagtgatgattacgttaatacatgcagacacatacgat

SEQ ID NO: 16172 - DNA, 1479 bp, Emericella nidulans
ctgccactctgtacggggacagggcccagcacacgaaactcgagtcgcgtgtctttgcatggggtcttggattgatcttgtccagcattgccaagtttgcgggcaagaccaataaccccttctggccgatcatgcacgcagagaacggtgggtggaacaagctaggattgcttctcgctattttggctggcatccgttcattcagagtccctgccagcagtggcggggactatttcccctccaccggcaagaaaggatcttctttgcttgctggattgggattgggaagtatgatattcttgatgcattacctcttgtctgattctagtaccatgattgcctgggtttgggagggctacccagtccgtggccccatcgccgtgcctcatggagcgcttactatctttgcgatgggcgctggactcgcgtttggcttgttttaccctaacgttgctggaagctggaccgcttttggtattggctctgttggtgcagcttttcttacaggcaccagccactggagtggattctacggtgctctcacgatttctttctacctcatggccgtttcgcctgtgatgatctcttctgcggttcgtcattcgccagcgatcacgttcggactcgccttcttcgtttatgtcttcctccttctcttccatgtgtgggttgtggcctacgctttcgttcccggcggaccgctcgtcagagagcacaccgattggctcatgactgttgcgatgctttttatcggtgcaggtgtcttctctgcggcggtgtcgagatcaagtggccctaggaccaatgccatcagcccaaacggcaggagattgcgctcatactatgtctatgtgctcgttgcattgcagcttctgtctgtctctatcgcgtacctccgtttcccaacgaacgactacacgccttaccacaaagaagaaaaggctgtaaccgccggtatctggaccgtccactttggtctggataatgatatgtgggcctctgagcgacgcatgcgtgatgtaatccaggaactcgagattgacgttctcggtcttcttgagtctgacaaccagcgcatcatcatgggcaaccgtgatataacgcagttcatcgccgaagatttgggcatgtacgccgattttggcccgggtcccaacaagcatacatggggctctgcttgctttccaagttccctatcgtcaactccactcaccatctccttccttcacctgttggtgaactcgctcctgccatccacgctaccttggatatgtatggcgagctggttgatgtcgttgtcttccattcaggacaagaggaagatccagaggaccgtcgcctgcaaaccgagtacctgtcgaagctaatgggctcttccccccgtccgcttatcctcctgagctacctagtcactaaaccgctcgaaggcaactacaacacctacgttagcgagctgagcggtatgaaggacattgacca

SEQ ID NO: 16173 - DNA, 2189 bp, Emericella nidulans
cagtgcacaactcacggtctggatcttcagatgatgtacccgcttatagtcgctgagggcgagtggaccgctgttggtgagccgactgaagttgctctgcgggttttctctatgcggtttgggtatgagaagcaagatattgttcggaataggggtctccaacttcacaccgaattcacttttgactcttcagtcaagaagatgacggttgtttacaccaataaacaaactggactcaacgaagtctattctaagggcgccccagaagcgctcattcctagcctcgacattattgacgaggaaaaggaagtaattcaagatacagctgagagactggctggagaaggacttcgcgtgctttgcatagcgtacaagaaatctcctatggacgacgagtcgcaaatatcttctcggaatatggccgagtctaacctaagatttgctggccttatagggctgtatgacccaccgcgccttgaaacagcagcagctgtccgcaagtgtcagatggctgggattacagtccatatgctcacaggtgaccatatcagaacggcgatggcgattgcatcggaagtgggcatcctcgacccgatcgttaatgcaaagtcgagccgcctcgtcatgacagccaaggaatttgaccgtctttcagatgccgatatcgacaagattgaacagctaccgttggttatcgcacggtgcagccccaccacaaaagtgcgcatggtcgaagcaatgcatcgacgaggggcgttctgcgttatgacaggagacggtgtcaacgactcgcctgcgttgaaacgtgctgatgtaggcattgctatgggcaagaacggtagcgacgtcgccaaagaggcagcggatatggttttgacggatgacaattttgcttcaatcgtgaaagctgtcgaagaagggcggcggctctttgacaatattcagaaggtattttttacctgtgggaaattggacacggctaacttgattagttcctgatgcacttgttgatatccaacattgcacaggtcattctccttctgattgcgctcgcttttaaagacgaggcggaaactcaatcttccctctgtcgcctctggagatcctctgggccaacttggtaacttcctcgtttctagctctagggctaggtttggaggaagcccaaccggatatcatgtaccgcccgccgcatgatttaaaggtaggcgtcttcactcgcgaacttatcacagacaagatggtatacgggagctttatgggctgtctctgccttgtggcgtttgcgagcgtcatctacgtccggcacgcaccgcaagcatgggagacgactgcaatgagggatggaatagcacctgcggcactgtcttcgaagcacgagctacgacttacgcaactcttacttttctgcttctcgtcacagcatgggaagtaaagcacttctcgcggtcgctattcaacctcgatccagaccgatacccgggcaaactctcagtcttccattcaatctggcgcaaccagttccttttctgggctgttattgcaggattcctcatcgccttcccagtgatatatcttcctgcggtcaaccgcgtggtcttcaagcatcaaggtattagctggcactgggggattgtttttggctgcgttgcggtttatctgacacttgtggagagctggaaagcaatgaagcgacgctttgggattgggtctgggaagaacgcgacgctgacgatggccgatgcggagatgagggctggattgaggagcctgacacccatttccctgagtgccaacgccagtgtcgaggcgagctacaatgccagcgtgacggagaagtagggaacggatgttacttccggcttgttcaaccatgccaacacacccacctggactgattcaacacagtcctgcttatcgcctttgattcgacttcgcgcttgtttgatattgaaccgaccatattcactcgttagatacatctcgctagtacgtaccaggttgaactcgtgtttttctcttttggctcgacctcgtacaacttgccagcgtgatcattcagtagactttccggcctccgagtattttaaactctccgacgaccttgacaattcatccagtcaccgcttgtgatcgtgtctttgcttttgttggaattctgcaaggagatcaaccggaggcccacctga

SEQ ID NO: 16174 - DNA, 2385 bp, Emericella nidulans
gaaattctgaactggtgagagtggaacagcggaagtcgccgattcgccggacgtcaaattgaggctgcctctcctgtcggatagtgttaaatgagatttagtcaagattcacaccagcttcgaaatttgaattcttaactttcaattcgttatcctatcaccgtatatttatttttaatagggattcacctattttcttcagtgtagggcaagtcgagcggagttgagcggcggctccagggacaagattgaatggtttgtccggtgagagatctggaaaatcggtgactcacgggatggtttgtgtgagatttcgttcgaaagctctacgaatacggagcgcgggtcagtgaatggagatctggatatgtggagattctcgagagaaaaattaactatttacacctgaaccgtcgtctgctcagcagcgaccgctatgcaacatatcgcggattagcattatgcatagaccgctcgtagagcgtcaaatcatcttcatttcgaaatcaaattaaactccatgactagttttcttccttcttcttctcatcggagatacgcggaaccggaacatcggggtcgtcggcatcaagagcgttcatagcatcttcttgggcattaagcgggtggtagatgatgtagaagagaataccggtaacaaacgatgcgatggccaacccaacgaacatccacataatagcagggtcaaatgcagcgggcgtcaaggcctcggcaagggcagagcaaaggcattagtcaagaggtacatagactgcacgaaagacttcatggatggcggcgcctttgtgtatgcgtactccagaccagaaaccgacgcgaagatctcagaaataccgatgaagaagtaggcgggcgtctggatagcaatgtggacgttgttgcctgaggtcgaaccatcggaaccaatggaagcatcacaaagaggctgctcgtaacaggggccagccgagtagattaaatgctgaacgatagcagcgtacatcatggccagggaagcaacaacgaagccgagcgagatacgggagattgggcggaaccggatgcgcatgcgacgtagaacggggtataccagggattccagaacggggatgaacacaatgatggaaatcggatcaaagttttgcatcaagtcgttagggatgccgtgcccctgcatctgagcagcctgactgacaaagttgctcgagaactgaccatagacgacccagtagatcggatagaaggcgaagacgcggcaagcgacaagggcgcgcttcagctcgtcgacaaagtgatcgtcccagggcaggttggttctgcctccaccgtttgcagcctgccatgtaggcttgggtgcatccatgttgcggttgacaaccatgatccagagagctttgaatgcgtcggtaatgacagacccttgtggaggacggacaacatagtacttgcgtcccaagacgataacggccgtgccaacggcgaacatgcaaaggcacagcaggtaagccgaccagaatcccgtgtacttttccatgtaaggggtagccagcagcgaaagcgaaccgatgttgatgcagccgtagaagatcatgtaaatgcgttgaatcgtaagcgccgggtcgatgatgactttttcgccctttttggtagttgagacagccattttcttgcgcttgtactggtccgcaatcttaggggaatcagcggtgaaccggttagagaaacctgtaggctgacttaccaatggagcaacgttactcttgattccaccggtgcccaaaccgataatgagaatggcaacgataaagcctccaagcccagctccatgttcaagggcggttggaatcgacgtgcagacgaggatcagcagaccaacgaggtagacgccgcaaaagaggacgatggtcttgtatttgccgagatactggtcggcaatgatcgcaccaatgataggtgtcactagatcccaacgttaattcgttcctaagctcgagccgggccggaagacgaaccgtaacaccagaactggaagaaggtaaccaatccggtagctccctggtgccccataccgagcgcaccagggggttgcgcaccaccgttatagggacgctgaacgtagttttggaataatccagacatgccatagtatgtgaaacgctcacacagctcgacaatagcaactagccaagcggaaagtggaaggttttcggcaacatgacgcagagtcttgttctcgtggtcgttcggttcttccccgtcgggagtgtcagtaagggctttctcagactggccgacaactttatcctgtccagccacaggaccagttgtaacgggagtatcggtagcgagagccgggctttgacaggtcagcaaaataacgaccta

SEQ ID NO: 16175 - DNA, 969 bp, Emericella nidulans
atcagtattcgtcttgccctgccaaaattcctcggcatcccggagggagctagattgtcttccaagccatttgtgcctcggtcccatttcggagactgtccgcttgggactgagtgatgaattctcggccggttgggccaataatgcttggcggattcgactgtgttggcgaagaacaaaccccgagcagaagccagtccaggtgcagaaaagcagacgaggcgccagcagacctccttagcgctctctggtcggagcatctccttgaggcaattggtactgaggctgcagtcaatcgcaagtgcgctctcggctgtactaacaggcgagattagtttcaaaccaagctttgagcaatatagaatagtcccgaaagtgcaatcccagaggatgcgcatgtcattccagatgccagctgcttcgacgttgcgcggtgtctatatacatcatatcactattcacaggcagacttctatttccaaacccaaatccaactaaatgtcgtcactcatacacgtagccacccgtgtcggaagtgcaccaacacttagacgctcgtcctaggaggcgagttgtgccgtacagaaagctccgccataccgcttccccaaagtgccaaggagtgacgcttctcgaccagtttcagaacttcccaaaggaatctgcgttcgggaccaccatctgggaatgcctcccaggcgacacgaacgggaaaggcaagccggttgatcatattaccgggggatttaagaatgtaccactcaaggctacggcagataccgcaggcgagctgatactgctctattgggctgatacggtctgtcggccgcgtatcgacggaagataatatgagacaggaggtatagtaaatgcacatagtctgtgtcaacaggaggtcggggtatcaaatttcgtaggcgtgataacggcgcccgtgcggaggtctcgacagcggaatactggaaaaga

SEQ ID NO: 16176 - DNA, 873 bp, Emericella nidulans
aacaacgccgtatagataaccgacaaaggggcacattctccggacgtccgattcggggacttaggcaatccagactaatgaataggatcaaagatggcatgctggtcattcgcactgatacaaaggtgggatgggtgggcaggcgcggcggctcggagaacatcgaccgttcaccttagactagctcccttgaacctcttagcaagctgttcactttcagatctgggagactcatgtcttgacgagggagagtaacgttttccgggttggggtacagggtgtgaagggtccagccagggacgcttggggggccgctcaccgctgtcctgaagaatagtgaccaatgttgcccatccgggagtattgatgagttgtagtccgtctgtggggttctgagtcgtagctacacggcaaaggagtgcttcttcttcctaagcatggagtgtagttagtatgcgctctcgtgcgggtcgagcgatctcgcggtaggttagccagctcaccttgctgaaagtagagaacgtgcgaaggaagcacagaagatggaagtcagatactgcccgaattgccttttggggatcaccgtgtgaaactagtttccgagcgagggagtggaattcctgtccttcgcctatgacctcgcggttttcaatcggatatgtgctgtcaatgaaaagtggcttcgattccgtagggaacccgtgcgtcagggtgaccaaaaggtactcgaccgggaaggctggcttagcgtttacctgggccgatactccatactcgttgattttccgatagaaaacctcaggtatgtagcgtgatttgttggtgtcatcgtcttctgattgaactagcatcaccgatggctctgcggacggc

SEQ ID NO: 16177 - DNA, 1443 bp, Emericella nidulans
agtctatttccaccatgcatcccaattacgacggataaatcaccaagcttggtaagagctgtgttttattgggggctagaaagtgtctgtgggtttatgcgttgggcggcgtcaatacggtgcagagggtaggcctgcaacagtggcttcaaactgagctcctagccgtattttggttttgcaggccatacgtgagaggatgaactcgaagagaacgagttcatgtaattgtgaggcttgttgccagataactaaataccatggcgtgcctctcatctgaaattgatggtcgatagagctagtgcattcattattaccaccacattattacccatactcatatccagacccacatccatcaacatcgtatcgacatataacaggtaacatgatcaaggagatatcataaagcgtcaaaacgtcctggtatatagcaactgaagacaagacgagctagtcaaggagctggaataaggccaccaccaggctgaagaaatcaacggtataaggggtataatactctttccaaaataccaagctatttttattagttttttgggggcgttttggtttctttttattaggcaagatccagattcgccaagaatcggtgggcatcacaccagagccaaagcaacggtgtgagactgtatggacattccgaagcgttcctacgctgggaatcggtaagcggcaagctgcgggcgagattggcgcttgagagcccaagcttttatggcaatgaggacaatttcccaagccatgatgaaagcagtcaagcccagagcgatgctggttgcgaacattgcatcgagctcgtaatactccagcgcctcgacaacattgcgggtctggcgaagttagctaattgtcctatctggtcttgcacttgcagagacttacactcagcatgaagatgagacccccagaaatcaagcagaacgatgcgacgatctcagttggaggacgagaaggcaggtacgaggttggaggcttcagatacatcaagacgtacgtgaccccacgagccaaggcaaagccaataagcatgttaccccacgacttgtggaccatgctagagaccatgctagtctggtgatgccctcccatcatcatacccagaaggagaatgatgagcgcaggcatcggattaagcgacacctcctgagtgtcaggggcattccaggcattggcggtttcgtgcgcttccaggcgagatggagcacgcaagacggtgctgttcagccagttcctgacacgtttcgactcgaatagcataccgcacaagccacccccgaagaacaggacggcgattgatacgtgctcaaggtcggtggcggtccaggccccaccccaaccgccgaggtgctcgaggaagacgttgtcacgccgtaggagaagatggccgcggattcggtgaactcgccgctgcgaatcttggct

SEQ ID NO: 16178 - DNA, 826 bp, Emericella nidulans
accggcagcctcctcggcgttctaagaaaaatgttagtacaagcaaccctcttcaaaccagaatactctattttgaggtcgaggagaactcacgtattcgacgtcagacattttggcgggttgttcctctcaaggtcgcttctcgaatgaaactcgaaaagcgaaaaggacgatggttgtcggatggcgtgtcgctgtttgaactttgggcgggctcgctctctgtaccgcttctggatgagggtggccgtggcgaagggctcgtctaagcgaagggtcaagccctaaagccttccacgctaactctttcaggaaacatacattcatgggccagccatcaagttcaaactgggtccattatcaatgcttttgattcggcctatcaagcgcttttttgatagaagtacatgtgactttgagtatgcttttactggtcgttcattaggccttatttacattatgtgcgattttcaggtaggcacatcatattacaaggacacataatattccgaggaggtcaagagaatctgtattgggctagcagctctttcaagctcacgtatgcataattcgtaacggcattagacaagccttagaaatgcaggctcgactattccttttagcagcgttctttccaatactgaacttaatagccagattccaatccccccgaatgatggacttttcgtctgtagagggacgcgcttagtcgaagagaccgaagcccatgtcctcatcggactcctccttctcctcctccttctcagcagcggggcctcggcagcagcagcaccaccggcagcggcagcaggggcagcaccaccag

SEQ ID NO: 16179 - DNA, 921 bp, Emericella nidulans
ttgcattttttgttcttcatgacaccggatggtgttacgagttaaaaatgagatcatcctccgccggaaataggtgggcaacaatgtgaacatgtgagatgaaaaagaacgtaccttgagaactctgtaaggacatgaaacgtcactacgttcatatcttactagagaagtgaatgatcaccagtatcatttttcatttacccaacctcatgatgggtcataaagagtatctaatacatggcagtcgtatctcgtgcaggggcacgagacgtttagtcgaagagaccgaagcccatgtcctcatcggactcctcagcctcctcagcaggagcagcctcagcggcagcagcaggagcagcaccaccagcagcggcggcgggagcagcagaagcgtaggcctcagggttggcaatacggtccttgagctcctcaatctcgggccagctgtactcagtctcaacagcaacagccaagaccttcttgtagctgttgacaacggagtggataacggagggaagggtggggtagttgacagcaagggagatgctggtgatggtgttgatggcactgctgaagaccttgaggagctgctcctcctcaatgtcgagaacggcagcgctgaaggtctggccttcctggtagacctgctggatggtcataccgtaggtgaagggggagatgttgagcatgttgagcagggtggcctcggaaggaccaaccttgttgccctcctcaacgagcttgagatcggtggtaatttcaatggtaccacgagcgatcttggtgggaacaccgagagcctggaagaaagaggtcttaccgggttccataccagtgttaccggcaggaatccagacatcggcgggagcaacggcaccagcacgggcaggggcagcgacacggttggagaggatcttgtcc

SEQ ID NO: 16180 - DNA, 420 bp, Emericella nidulans
acgaaaccttctggcccgacgacacccagtttttcctctatgccgacccaacaactcgcgggtactaccctgtctttcagtccctttcaacagacgggtttctgccaggctcgaacatcatcttcgtgaccgtagtccaggaccaggcgtaccgtgcagagcgccagtcggatgagcaaacaaagcgagaagtcctcgaggtgctccagaagatgttccccgacaaacatatccccgaccccatcgctttcacatacccgcgctggtccacggagccctgggcctacgggagctactcaaactggcccgcgggcacgaccctgggagatgcaccagaacctgcgcgcgaacgtcgaccggctctggtttgcaggcgaggcgatgagcgcgcagtattttgggttcctgcatggcgcttgg

SEQ ID NO: 16181 - DNA, 1272 bp, Emericella nidulans
gctgaatgtcagcaatgaagatattgcgaggatatttatgcttcagacctgggcgtgagttttgccatcgcctttccgattcgcggcctgctaaacaattgacaggatcctaggcaacatgtacaaaatgacattctggcttgtcgcgcatattctgcacgacgcggccctcgttaacgccataaccgctgaggtccggccggcagtcggagtgatgacaataggacaagagcaaaagatcgagatcgaccaccactatctctcagaacagtgtcccaagctggactcgctcttcagcgaggttctgcggctgaccttgacggccccgatggcgcgcgatgtatctgaaacaacgaccgttgggggccggcgactacgtgaagggaacagggttctggtatgcttgctaaacattcaatgcagatataatcttcatcataataccaatttgtctaactgtgccgcccggacaggtcctctaccgccaactccacctcgaccgtgcaacatggggtccaacaccgcaaacgctccagcctgaccgttttttaatcgacagtgggctcaagtccagcatcgcataccggccgtggggtgcaggaaagcatatttgccccgggaggttcttggcaagaagcgcagtttttacgtttgttgcatatttgcttgccgggttcgaagttcgtttgcgggagactgggactgggaagagcaccaggagtgctttcccaatggcagatatgtcgaggccgtcgcccggaatcgcaaacatcgcggatggggaggatgtcttgataagtgtgatacggagggataggtcttcgtaagattagggagctgcatcctagggctgccaagattaggatattactgacacagcgggcaaagtcatgtttatgccaatgttagagcatcttaaagtgtagaattcttaaaggaaaaggtagtctgttgcctctgtctcgctttctatgatctctcctacatgaaataaccatacagcatcaacaaattgtcagtataagaatccttcatatcctatatgatgatgttcaattgaatgaattagctaataggaatttcagcaaagtactagagcctattttctgtatattttgagtttaatgtggagattatatacataattttatagccgtaacagtttcgacaatgctgctgcctatctgcaacccaccactggccgatttgacaaaccaaaatcagatccagctagtacaacactcatcgtcgaatttggtgagtcaaataaaa

SEQ ID NO: 16182 - DNA, 2268 bp, Emericella nidulans
agcactgagtttcacaagggagcccagcagagtacgtttttttgagagcgatagactagacaaattgtcgaatataactgacgtggatgtttcagttcaccctggcctttccaacgccacccgttctcacgtcggggcctcagcaaccgtttccggtcctactcctcgtgcccccgtggctgcgccattcgactacgacgccttctacaatgcagaactgcagaagaagcaccaggacaagtcgtatcgttactttaacaacatcaaccgtctcgctcaggaattcccccgcgctcatacggcttcgaaggatgagaaagtgaccgtctggtgctcgaacgactacctcggcatgggacgtaatcctgaagttctcgcgaccatgcataagaccctcgatacgtacggagccggcgcgggaggaactcgtaacatttccgggcacaatcaacatgccgtctcgctggagaatactctggccaaactccatggtaaagaagctgcgctggttttcagctcgtgctttgtagccaacgacgctactttggctactctcggcagcaagatgcctgactgcgtcattttgtcggactcgctcaaccacgcatcgatgatccagggtatccgccattctggcgcgaagaaaatggtcttcaagcacaacgatttggtcgacctcgagacgaagctcgcatctcttcctctgcatgttccaaagatcattgccttcgaatcggtgtacagtatgtgtggctctattgctccgatcgaggcgatttgtgatttggcggacaagtacggagccattactttcctagacgaggttcacgccgtgggaatgtacggaccgcacggtgctggagttgccgagcatcttgactacgagatctatgcttcgcaggacaccgcaaaccctctcagcaccaaaggcactgtcatggaccggatcaacatcattaccggtactcttggtaaagcgtacggatgcgtcggtggttacattgctggctctgccgctttagttgacaccatccgctccctcgcccctgggtttattttcaccacttcccttcctccagcaaccatggccggtgcggatactgcaatccggtatcaggcacgccaccagcaggaccgtatcctgcagcagttgcacactcgggctgttaagcaatcattcaaggatttagatatccccgtcatccctaacccctctcacatcgtccctcttctcgtcggtgatgccgagctcgccaagcaggcctcggacaagctccttgaagagcacggcatctacgttcaagcaattaactaccccaccgtgccacgcggtgaagagcgcctccggattacccccacccctggtcacacgcaagagcttcgtgaccaccttgtcgaagcagtcaacactgtctggaacgacctcggcatcaagcgcgcaagctactggaaggcaatgggcggattcgtcggtgttggcgtggaagctgccgagctcgagaatcaacccatctggaccgacgcccagttgaatatgcgacctgatgaaaccctcgaggctgcagttgaacgcgagtttcaggccgcggttcctggcatgaaagccgggggtgcaaaggcgaagcccgtcggctcaatcgcggccaaccctatcggtgcctcaatcccagtcgcggctgctgcttaagtcgcccttgtcggtcttttatttgtgggttgtggtgtttatatatacgtatatatagccctcccggtccgctcattagttattgcgtgatcatgctttgtcgaacaatttttccgatgtgatggatgcttcagtatgaccggcccgtcatttacattaggtctaatacaaagttgtccatacactcgaagcttctcctattgtagcacgtagcgtccatacatgattcacacaaacttaagttgattttcaagattgactaccattaaatgatctcaggccagtcggatccgctcctcattggtattcgtataactaaaaaaaaaatcatctctaaacgccacatagatgagaaagacttctttttgttctcccttacaaaatgtcaaccccgtcgcaaccgaacccaactacattgtagaccacatctatctacctcctactccccccagcccgactaactttgggaaactcgacgggaatcctcagacgcgcaaccctcctcgtggcagcctcggccttcccaccccgaataccgaatttcgcaaattccgtctcccttggcttatcaacccgacatc

SEQ ID NO: 16183 - DNA, 1484 bp, Emericella nidulans
tgttttacgtacttttgtatagaaatatggcgagcgtttagatagattctttatgataacataatataatgatatggcagtgcagagcatactgttcatactctgatatcatcccacactgagactcttagtgttccatcaccgtgatgtcattctatccatactctaagagtacatatacctgcctacctacaccccatattagaatctatcagaaaagtaaatccacatcaactaatactcatatacgcaatacatatactacgctcacgaaaatgccatcaaagaggatcctcatcgtcctcagcgacgccaattacttccccctcaagaaacccgccggctcaggcgaaggctccagctccaacagcaagatcgtcgaccaaccctctggattcttcctgatggagctcgcaaagcctctccagaaactccttgacgctggtcacgaggtgaccttcgcctcacctgaaggccgagaaccccaacccgatcccaatagtgaatcccttctcgcattcgcagggaacttctacgagcgccgacgcgaaaacgagctgcttgagcgcatgaagaaggagaacgggttcacaaagccaaggaaactcaacagtatctccgatgacgagctgaaaaatttcgccggggtctttatccccggcggacatgctccacttgcggatctgggcgataacaaggacctcggtcggatattagagtatttccacaaggaaaataagcctactgccgcgatctgccatggtccgtatgctttgctcagtacaaaggtttccgggggcgagtttgcgtacaaggggtacaagatcacgagctggagcaatgcggaggagaaggtgatggagagcatgctcgggggcgaggttgaaaaggtcgagacggcgctgatgaagtgtggcgccgagatggtcgagggagcgaaggagaaggttggacagacgactctgcatcgggagctgctgacgggtgggaatccgatggcagcggatgagctggggaatcgatttgtgaagatgatcagtgtctagatatcacttacggttacctgagccggacttggtataatgattggtagttgcattcatggataattaaatatgatgaacaggttcatcgccaatctcctccatcttctcccgcgttatcctggctacgacatctgcatattcagggtcacagaccctaacgccacatcttctctattaacttcttgcactatatcattactttatcaaacactaaacaagaatgttttactccaggtttctccaaccaacccttatactcatctacggagatgagaataaatcacgtgtctggagggcggcaataccacttggtacttgctcgtggatttcgcattccggagacagtggaaacctcgacctgtcatcaagctcccacctcggatcctggttttcaacaacgccatcaatctggtgttatcctggctgatatggaacgaa

SEQ ID NO: 16184 - DNA, 1747 bp, Emericella nidulans
tgctcgtaggatttgtagtcagttgagaacttagtggctatgaccattctgtcacggttgttccgggacgtcatccattcacccagccagaactcggactgttcgctttgatagttgttggacgtatcaataaagttgccgcctgcttcgacgaaggcatccaacagcttgaaggaagactctttgttcattgagcccatgagatctgaccaggcctcgccaatggacatggctccaagttggagaggcgatacgcggattcctgcagttgacgagagcacgcggtagcgaccgagttcggtgcgaggctcgggcgccggagttatgaagtcattcattatgttgaagattgtgtttttggcgaagaatcaaagttcttgagaggtttgaaagttaatgatgaatgaaatatgttcttgtctttacaaaatggccgccatatttatatattggcgcatatttgacagcagttgtatgctgctgaccatttccgatcaatctagtaactgctaatgtcccaggcagattgtgccactcaatttgcattgttcttcaatcgtaacaaagcagctgagattcgcgacggaaatacgcagtgtatgaaagtgtgctgacagtaaagccgggatgctgactgtaaagactcgaattccgagtccgagtcagcagccggcgttaattcttgattgttcaacacttgatgataaaccacgaaaacagtcttgagcaaaatctggtcctgggataatgtagccgcgggtttagaggtagctagggttctcctagcgaattattatatacaagctgactctataagttaaccccgaatgtcaagttgtctgacggaaacaccaacaatgccagacaatggcgcacaaacagtccgaaaagcccacatacagcttgaacagctaccatgctcaacgtcagccgatcttccttcatggggcccatccataccacccacaagttgagaatggtcagattgcttgattcgacaatctggccttgttcattttttcggaccctcgccaggcggaggctgtgcagtagctctagagccatggcgagcaagggcgaaggaggaacattccattcagtcaccgaagcgtccaccaatccagtctttgcgttgaacttggggagcctgtgcctagggcaggggatgatgtgaaaaagctgcggcactgagtaaacaaaattgaatatctgcgggataaataggagcagcagtgttttgctgaaatgccctagtatcccaacaacggcaaagaccatgccggcaaagtagcagtatgtgtctcccacgaatactttggacggataccagttgtggcacagtagtgctaacgagactcccacgaacggtagtagaaaatagagagagaaaaggtgggaatccgttgcagggtgccgggacggtgtaatcagatacagcgcatcgttgatcataagtaagacagcaatcacaagcgattgagcaacctcgaccccgttgattcccgctagcatgttgatcgagtttgggcagaagatagcaactgcggccatgtagacgtagtacaagaggccaaggtcaaggaaggcgccgaggtacggccgcaacggcactgggacaacgacatgcgtaacaccaaagtccacaaagtagaccataagcattgggatggcaccgaaagctgggattagaactatgtgtctccaccggatgtcaagaagatcatcgccgatcccaagaagtacaatg

SEQ ID NO: 16185 - DNA, 2243 bp, Emericella nidulans
tgagcatcagcagattgctgaggagcctctgcagcagcggtggtcacatgctcgatactgtagacaatttcacgcagcttcgtttctgtggccataaatgttgtgaagatcttaaagcgctcctcgtcagaatcagcaacagcttcttttcgcaacatcgccacatagcgttccaaagaggactgcgaccaggaatcaagatcttcgtagcatcgacctgcctagatggcggccgaggggattctgtcgccgccctcgccgattcattgacagcatctttcgttttatccactaagtcgacgcgagtttcatttccaggtgctgtaggttctggctgttttgttgggacggattccacaagacttgaagtcatatgaggagaaactggtgcttgttcaactttgggactttgctgtaccggcgatggcttgtcatccgccgagattggcatattccatgcctcgataacaccgtcaatattttcggagctcgcaacgagagagtccgtggtataatctgatccaattgtgtccatcctaactggttgagcgggcggcggaaaatcatgccgagtccctgggctagtaggtgattgagtcgagtaattctgggatgcctcgctcactgttggttttctatagtccaggtccgaaaatgacggtgttggcgaatggccgcttccagtcatgcctgtagtaccacctccatgactcggactcaaatcatgcgtcgcatttgctggtgcgtctattcttggtctgaaagcagctacatcatcaatttcacctgcggtaggagagagatgctcccaatcagaagggccacctgatcccaacacggaaggaccagctttcggaggcacaggcggagcagctattggagactgtgacgcaggtccttccggcgaaaaggacgccgctggccggacatctacgtcctgttgaaagctgggcgctggaagggctgaagtagggcctggataactggcgccagtacttagagggtgatattgactcggggtaatattgggatacgatggtggtggcggctggttccaagcttgctgagtctgtgataccactggcactgatagtgcaggattgtgataactagacgtgtcaaccgtgaccggcggtggaggtgggggaggtgggggaggtggtaaagaggtcgcaggttgctgaggcgcataagtaggatttgatgcccattgctggtgataatcccccgatgacacccctcctccataactcggaattgaagactggtggtaatctgcgggcgttacggtcggtgactgggtatttgacggctgaccagaggtactggaaggccgcggctatgatagcgttttagcaacagaactgtacattgtacatgaatccaagctcaccggcagcggaggaggaggcgaatgcatataattttgtctgttgtaattcacaccccatgtcgccgtattaacgcccgcaaagccagtaatcggactgtaattaggacttgggccgtagttaccagtggctgggttataggacggaggtggcggcggtggtggtggtgggctcgcaactggacgacctgatggtctcgggggtgccgcgggactctccattccggggtaggggtggcagacgtcggtggtcggtgagaatgatgtgagctgggcatcgtctcaagatgagctctcgatacgctgaaagcgctggagcctttgatgacgtttaggggagctctgttgaggcagtgcggggaagaagaactggatcgctaagcgacagcgatgaaggactgacgtttggaagcttttccgtgtgaaagcagcttattagtgcaaacacagcccctcgaggcttcgtacgacccgggttgtctcgaaagcaggtggaaaaagaagtagaagtggctgctctagcagagggatgatgggttgaggcttagcgggtcaagctggtcgtttcttgtactctccactccaagacctcctgctgatcttagtctttgttagtcaggcgcattagttagttcactactgacagctgggtctacactaaatttctctctattataatatgctggcatcgcctcttgagtcgtgcacatgtcatggatggatgactggcgtcacatgagacactgtttaatgcccaacatgacttatgccatccagaataatccatgcaggataagctgcggctttatagagacacgtttggtttagacagaattcccatttcattatatgc

SEQ ID NO: 16186 - DNA, 1390 bp, Emericella nidulans
tcgaaactacaggatatccagaaatcaggaaacttaccccaggtaacagacagcacttatgtaccccagcacctgcgccccaggcgcatatcgacgcctccactcgtacctcccaacggcgcaggcctccaaaccccagtttgccatgcgaccgtccacccaaccattccaatgacacaaatagccaggacactgctagaatttttgacgaaagccccctgcccgatcctattctcctcaaccagcttcgcaagcgtatcatccggcaattgcgcttgctgagagccattcacagcgctgtacgatggccgcgagtccctccgccgccgactgccatcaccttcacgcagcgcatcgctgtatcttcttccaagcagtggcgtcgttggctcgggtgtagcggacgatgattcgcgaaggtgcgcggcggcgccgcgcgagttccgagcgcggtaataaaggcactggccgattaggacaccatcggcgatacagaagtagacggcgattgcgacgacgacggggacaagacccgcccaggcgctaccggcgaggttcgtaatgtcgccgacgaaccagacgaagaggaagaggagcgagatggcttcggcattgccgttgcggtagttttcaattagttgggggaccttatgatggagttagtcattatttgattcttggtctcgtaggtgaccgatgagtatatctgagataaaacaggacactgcacatactaagagaaaaatccagcaggttaaggagatggaaccgagaaggcctgatgcagcttctcgtggagtcaacggaacgaattccccggccataattggagggtagacactcaattatatgagtattgaaaaggtcgcatgagataatagctggtgcgagagcgccgcgcagagatttccaacatttgaaacttgagcagatcttgaggctgtcgccaacggctaattgcggggtggatccactgagcctttgactaagctgctgttcgaagacctgtatctaagtttgttctccagtgcaacttctgaaaagttatgagcagttttgctgcaattttcacagtaactgaggctcttgagccatatatgcattgtagtacaattgagcacataaaggaatgacctcataggacggtctcaaactggaatttaaccggccaataagcttcgcggcaatcttgcgtgattgcagctgcaggtgctacagaatgccaataattccacgtacaaagttaaatattcatacaaatcataaaaggttgtatttttacattaaccttcttagcggcaggggaaggggggtatcattgtccatcacgttgctgttcctccaactccagccgtgtaagctccatctcatcctgcagaagactcacaac

SEQ ID NO: 16187 - DNA, 848 bp, Emericella nidulans
cgtgtccaaacgagaagaatgctatcatggaattcatgagagatcttcctatgcgcaaaattaatggcgtgggcagagtgttcgagcgggactcgactcaatcggcatcaaaacatgcggcgacattttcccacaacgtgcctatttggctaagctattcggtgaaaaggctcttcactttttagcgcagtgctatctcggagtaggcaggacaaaaattcaaccagctgaaagctacgagcgcaaaagcgtcggcaccgagaggacatttcatgagatcagtaaacgagaagagttcagagagaaactctggtcctgtgctcaagaactagagaaggacctgtcacgtactcaatttatgggtcgtacactggttcttaaggtcaagttggctactttcgaggtgttaacccggcaatatcagcccgcaagggccgtgtctacggccaaagatctctttacatctgcccttccgatgttagagaaactcgagaaggagattcccaatatgaagctccgtctgctcggtattcgatgtaccaaccttgtgagcaccaagaaattcgacatgaatttcttcggtgccgctgcgcggagacaacctgtgccagatactgcaatcgagtctcccgtggaacaagaaataaatgcagaagaagccttcgagaaggcggcccgcgaggagctccagagcgatatgcaggctctagaaaggctcagtcaagaaacacccgaagctggaggtgaccagattgagataagcccaacgccgaccaccgccggtaaactactggctcaaccggagtattgggactgccctatttgttcaatgcctcaaatcgcggacg

SEQ ID NO: 16188 - DNA, 833 bp, Emericella nidulans
cgagaaagaagttgaactgtctaatcaagatccggaatcggcaacccgttcacaatcttcaccttcctgcccagcctatccaacgcctccttcgaattcctctcgcgcagctcactcgtctccttctcagagaccagcacgaaatcatacgtcagcaacttatgtccctcctcaaccccatatttctccgcaatctccttgccggccgtcccgatatcgataacaagactatccttcacaccaaaaacagcgtcactcgtctcaaacgggtcattccgcaaatacagcgccgtaatcagatggtcgtacccctgcttctcgaacatgaaatgcatatggctgggtcggtaggggtggcggtgtaatttcttcagcagcttaccgacgggcccgtcgtgggggatcgggtacggaaccggtgtaatagcattgaaccagaagactccgtccttgttggagtgcatgatgcatcgcccgtcggggccggagcggtctgcgtgctggacgtcatagtggcccgttgagtcggtttcccaaatgtcgaccttgacgccctcgatgggcttgccatctgtatctttgatggtgcagaccaccagtagtggttcaccagcggggtccttggacatcaagccgccctgagacagttcctcggcttcgtgggtgtggaagggaccaggaccgtgccttctgtgctgccggggggtttggggtggtcgattgagtcgacgaggatggagaggccgaggacgtcggagaggaggataaattcctatttacccaactaacgtcagtctccgttcttttagagagaatgaggaaggagaatagag

SEQ ID NO: 16189 - DNA, 987 bp, Emericella nidulans
gattgtggttcgcccgactcgctttattctcttcttttctctgtcgcgaacgagctgagttctggtctccagacggacctcctccgctcccaccacctcgtcctcttccacgagggccgccacgcccacgcccacggccccgcgcagagccgttccatcctggcctttgagacgtcggtgtctcgccttcagttgcactctcagaatctgcatcaccttttggccggcggtatgatgttgatggtatttcgggttgtgatagcccgcctccatcgccaccagctgaaagagcgagtttactctccaacatggcaagtcgtttgggatcacgatttagcatgactgcccagccctcgatggcttcgtctgttagaccagactcgcgcttgagagcattacggggctgggatcggcgcgttgctgaatcacgtgcaaacagggatggtgtcgacttgtaggcgcggaggagagtgagatcgaattcgtcggttgatgagcttttacgatcttctgcagtgccgtcgtctgtggcgtcgacggtgccaccgacatccgcgacgtcataggtatcgtcgcgttcgtcgtcatcggaatcaaaggctgcgagggcagaaaggatggctgctttgttggcggcgtgattaccgcggtctgctaggatgtcgtcggctgtttggctggggtttgcgcggccgaagtggatggtcttgttatcagcggaacgcgccaattcagcgagatccacgtctttatcaaagacgtttcggcggggctcggggggtgagaacgaagcaggcgtaggctttggagggaggggatcgcgttgtgtggctggaacagggggaagttgttcggatttgtctaggtcttgaagttccggcggaagggaagcatcgagaaggtgtgcgatgattgtttctcggttgtcgccgtagtgatcgagcagccaacagacatagccagagccgaggtcgggaaagagatctt

SEQ ID NO: 16190 - DNA, 2496 bp, Emericella nidulans
  unsure (1)..(2496): unsure at all n locations
agatgctaatttctctcgctaaacggcgactatttatcccttggctgatacatcgaatcttctgtcaaagtatctctttggactgtaaatcctagtgtaagtgcgaggttgcgtcgtcacgtcgcggattgtcgctggttacgccatgctgacagtcatgattacagcatccagaacatctgggacaatcctgaaacagatcaacagaaaatcatctaagaaaatcattttttccttcccgggctgaccgatagaatcccagaaagcgctgggtggaaccacgctacggggcctcttacacggcgcacgagcaaagcccctcgaccacttttgatgactgacatgagtgtttgggcgctccagcctccagcctcccactagagagactacgccgcagtagggtgaaactaggcacaatactgattggatagggaacagcagaggataagcgagcagaatgtgacctcggctgctttgtaccctccctccttcctgaatccggaggtttttctgcttgcggctgcaattgccacagactgtaggacacgcttcctctacaatgctcagctccttttctccggcctcgtggaactaccttaacttgctctgctcggcataagtgtctggtcggactaagactcttagcgtttccccgggttgtgctaacgatcatcccggcctgctgtttccactcagccaaacccacccttccgctagcggacgaaccatcacggacctcgcctacgggaccctacagtatgatgtcttagaatggggctccctccaccgcaagatcgctggccatcggctccatttgccatctctccttcaatcacattgtctatacgattcagattgcgcgaccacgagtcttcctgggctctgggccttcagtcgcagcctgggcgccactcgtatcggcgccgcatgagttcattattcactaaatcacaccccaggcaaccaggggcacagctgattttacctccaatgagatcctggactctaaatctccctagttggcggcgcgaggaactttttctcggtggttggtcgtatcaatttgactcttggggcctttgttgctcaggagaaagtatttatagctattgcctgatcctctagagaggctgaaagtgactcagacatattcactttgtttctccacccatctttgcatatcaccctcgtcctatccttcgctttatctttgctatttttgctttttccgttggtggaagtacagcctcaagttttctggggcagactctctttcgattgcgccagctggaaagcttacttccaaggaccctctcataaatagactgggttccccgtttccggactgcagtttccactcactcgtcaagaactcatttgagccatacagtccatgatgtatctccgatacgctgctgcactagcctcagtgcttcctctcgccgtcgctcagacatttactgactgcaatcctctggaaggtaggtgcctcctaatctaaagctgtctttattgttgattgaggattaacattgtaccagagacatgcgatcctgatccaggcttgaacagcaagactttctcgtctgattttacgcagggtgaatctgccttggacggttgggtcaaagcttctggcgatgtcactttcggccctgatggtgctgaatttaccgtggcaaagaagggtgatgcacctaccatcgacaccgacttctacttttttttcggaaaggccgaagtggtgatgaaggctgcgcccggtgttggtatcgttagcagcattgtcattgagtcggatgttctcgatgaggttgactgggtatgtcccataattgcttttttcgccgttcgcatcgtctcaaaagcaaacatttgattgtcatccgcacatgcatacttccacgcgggaattgagctaatcgccttgttttgtgcaggaggttcttggaggcgacaccacccaggttcagactaactacttcggcaagggcgacacctccagctacgaccgcggcacttttgaagccgtcgctactccccaggagatcttccacacctacaccgtcacatggtcgcccgacgccatctcctggattattgacggtaacaccgtccgcactcttaactatgctgacgccaagggtggaagccgcttcccccagactcccgcacgcctgaggctcggaatttgggctggtggcgatcccgacaacgcacctggcaccatcgaatgggccggtggccagactgactacagcgctgggcccttcaccatgtacatcaagtctgttcacatcgagaacacctaccccggctccgagtacacttattccgacaactctggcgactggcagagcatcaaggtcgatgactccactcctcctcaggaaaccaccaaaacatctagcactacgaccagcacggncgaacctaccagctccaccagcagcgattccgaaacaaccacaaccaccacctctgccactgactctg

SEQ ID NO: 16191 - DNA, 1772 bp, Emericella nidulans
  unsure (1)..(1772): unsure at all n locations
ccccaagcatacgaacctagccggagagcttgtgtcaaacggtgcaatgagtcctcaaagcctcagtcctccgttcagcggcaacaacaacggacagacgcagtactggaacacgtctggacacgcaggcatgagcttcaaggaagaagacgagtacgctatggagatgaactagactttcgaccctggacggctttcttattgttacatgtcattattgttgcataattggcgtcaacggatgtggttgaccggcgtacgtggagttgcagtggtatcatatctacggaccttttggttacgtgtttctcggttctcagtgcatcatctatgttcgcgttgcgttggaggtagaatcatttggccatttctatcgatgtgtggacactagcttgtttacttcttgtttacctctcacctacccaactcacttcggtttttttcatctttctcaccatgttcgagttgcctacagtatatctatcgagtctgcgttctttggatttctgcaccgcaccagcactgatttttgcttaaggtttgctacatcgataccctttactgtttcttgttctccctaatattagncttgttatacttactctttcggaatcacgaagttatatactctgtcaattaaactttcaatacatgcataattcgaccatggtctgctttttattcaatttcatattgcgagctttcagtcaacgaagctcaggttcggattgtaaacactaaagccggcaaatccttagttcgtgggcaagttttgcgcttatacagctacatgtcggagccttgggagtcgacgggcaatcacgccgttccttgtccagaactggtcactcattttggaacggtgggaacccccaattatgagacccgcgcatgctgttacattgcagtatatcttctatggcacattctaggaaccatctaaatcctgcatgtccaatccatctcatcaacataaacaagcgaaagcgatcagaacgaaaacaaacattttttaaacagcggttgaagcacagaatcaagcagtctcccccctcatcttcctgaagaagtccatcactcccgtaaacacaacaagcaggataccaccacccggacccaaccgcagcaccttaggcatgaatcccttgtatagcgcgccaaaaccttcctccttcatcactgtccccacagccggccaagcccagttgtacttgggcgtctgccccgcgattttagggctattctggatacgcgacttgacaacgtccatgggcgtgttcaggatcgtaccggccgttccgccgatcgaaccagcaatcagatcgttccgcgtctgttgcgtcttgttcccaggctcaggcttcggcatctgcgcgcgcacctggaaaatgcacccgaaatagccggagttccagaggatgtggcgccacaatgtactttcaagaccgttatagagcgcaagtggcccctcggcagcgatgatcttgcgcacaacatccagcatgccgttgtatttgccggctgaagcacggtcctgcaggcgaatcttgacaagctcgaaggggacgacgacgaaggattcggttgcaccggcggttgcaccggtcaggatggcgagcgactggttttgcttttccacgccgaagaggttgcggccgaaggcgccccaggaatcgttggcagcgaatttggtcgcgcgcttgggcgcctccattaggatgggggcggagatgccgcggtagaggcgggaggcacttttgggcgtcagtatt

SEQ ID NO: 16192 - DNA, 1446 bp, Emericella nidulans
gtgacgttcatacggattatatcggcattacctactattaccgaccactgatatttattgcagttcctaatctcctgtcagcctaagtagatcctggctatattagacacctgtcaaaccatccactgctgccttccattagtcgtccaatatccatgccagcgcccgagttcagccacggcaaaacgcacgaggtcctggcgcataaggtggactgtgccccgggcgttattgattcgatgtcataccttgctatgtgtgcagcacaccccggtcttgttaacggcactaatgcaaaataaacgcagtccgcgacgatctaaggcacagctcagtaagatgatggcaaggggcgcctagcaaaataaattactgctggaagcgggagtgaaattaaatgagatattaagtctatatctaatcgaagtctacctgttgcacaagctaaatggtattttttacgagtatgtagaccgatgaaatggaccactgtatccacgggacgaagcttgcttcgtccgagaacaccgcggtgagtagagggtcgttgatctcctttgcgcaaaataagcctataccacgaggtagttgttcaatccaggcccggaggcgggaaagaacggtaagagccagagtgttgcaaaggtaccttgggcatgcggtttcaccgctcaaattcgagcgatggccaagccaggcaaagcattcaagatagcgaagattaccgtatccgatgaaagaaacgtgaaaaatcacattgaaagcgcgagtgggaatcctaaagtcatgaatcgtaaaccttttttttgaccggtagaagcaatgatcctattcgctgtagctagcatcccaatacatattgacgaacgccataagaatcaagaccattgtttactcggagggaactgtgggcaatcagcgaatgacgcgaagcttgaaggggatcaatctgaacttaccgtcaatctcgccagacttgacgtcgtcgctgacgtccttagggctgcggccatcgaccttgcagccgacggagaaagcagtaccgaggatctcaaggacggtacccttgagctccttggcgagagagcgagagcgcatcttacgggcaatctcaacaatctcgtcgaaggggatggacttggtgtgcttgatgttcttctccttcttgcggtcacgaggaggctccttgagagccttgatgacaagggaagaggcggagggcacaaccgaaacctgagcctgacggttctggatggtgagacggacggtaacacggagacccttctataaccgcggaaaaccctatattaaccaccgtgttccttgacagatcaatcatggttccttacccagtcgccagtgttcttagcgatatcttcaccgatcttcttgggagacagaccgagaggaccgatcttaggagccagagcagactgggctccgact

SEQ ID NO: 16193 - DNA, 1536 bp, Emericella nidulans
aagcatggacactggaagaacgtgctgacggttttcccactccatgacgaggagaagaatagggagtacttggcggattggagcaagaagacgtttttgtcggaggaagatttagatcagatacggggtaaattcggggagagtgtacgtgtcctactatcaccggctgaatcgtactaatggttacaggtgggcttctactttgcgttcctgcaatcctacttcaaatttctgctctttcccgcagtgttcgggttctcttgttggttgctgcttgggtcattctctattatctacaccgtggttaactgcctgtggggcgttatcttcattgaatactggaagcggcaagaggaggacctcagttgccgatggcagaccaaaggcgtgtctgttgttcgctccaagcggcgggaattcaaacctgagagagaggtatatgaccaggttacaggcgagacaaggggagtcttcccggcgactactcggctgcaacggcagcttctccaggtccctttcgctttggtggcattggtggctttgggggcaattatcgcaacttgcttcgctatcgaaatattcatctcggaagtctacactgggccgctgaagtcatacttggtaaggaagttggttgccgattctatatagtatgctgattttttaggtctttatcccgactattctgctctcagctcttatcccgaccatgagtggagtgcttgtttcgatagcaacaaaactcaacgactacgaaaattacgaaacacagactgcctacgatacagcgttgacgcagaaaatctttgttattaacttcatcacctcgtattttccgattctattaactgcctttgtctatatcccgtttgccagcttgatagtccctcatctcgacgtcttccacttgaccgttcggccgtttgtgtcgaaggaaaaagcaaccactgcgcacgaaaacttcactatcaaccctgatagactgcggaagcaggtcatctactttaccgtcaccgcccaggtggtcggttttgcgatggagaccattgtgccattcttgaagcagcggttcgctcgcgaatacaaggagtacaagaagaagaagtacggacgtgtaaactctggtttagtgagcgagacgcaaaaggaaacacaacactcgtacgatgaccatgaggacgaggtacaattcctcacgcgcgtccgcaaagaggccgacctcgatgactataacgttaccgacgacttgcgagaaatgtgcattcagttcggctacttagctctgttctcacctgtttggccactggttccggtttccttcctagtcaacaactgggtggagctccggtccgacttttttaagatcatcgtcgagtgcaagagacctactcccatacgcgtggacacaattggaccctggctggacaccctaggctttctctcctgggtaggaagcataacaagcgcggcgctggtgtacatgttcaacacaagcaccaacggtccaaacggcgagcgtcagcaataaaaggatgg

SEQ ID NO: 16194 - DNA, 3408 bp, Emericella nidulans
cgcgatgtggaacttttgaagcggctaaaaatcatggattattcgcttcttgtgggtatacatgatctggaaaaaggaaacgaggaaaaactgcgtgataagactcttcaggttttccaacctggagccgatcgcgaagaggatatccaccctaatatgctgatgcgcactccatccaagctagagaacgaacgcaaggcgcgcgagcttcgaatgctaatccagaaggagcgtcccgtgccgctcgacaaggcgactgcaaagatgccagacgagatcctcgacgagcgcaaatttcatgttttttactccgacgatggtggatttcgggccacgcgtgaaaacggccagcctggtcaagagatttactatcttgggattattgattgtttgacacatgtgcgtttatcatgcgagatccatgaatatatcagctaaccatgcgtgtagtacggcaccgtcaaaaggatagagcatttcgttaaaggcctaacgcatgatcggacacaaatctcgcccattcccccggaaggctacggtgatcgcttcgtcaactttattagaagaataacgatgtccaaggaagaagcagaacgtacccgggatcaagaagtgccagaaaagcataacagtcaaccaatatcgtcaacggagaataacacatcagatcatatctcgcaaggccccacatccggccaccaaccagcagtcgctgctctcgggccaagtacattgcctattgttgacgaagctggcgaggctagcagtgttggtggacacagtcaatgtagtccgcagtctctatcgcttcaccaaaaccaagttctaccatcaccgccgaatcgtcttaacccggggccgtcagaaaagcgaaacggcacccttcaaaatggacaaaatccctcaatttcagtctgatgaacaggatttccgtttgtctcctgcgcatactctaccctcctgctctcatttttggcgatttttatgatatcccttttgccgtgttttcatctttctactttcggggccaggggataagcccttccctacccatgcaatgaacgcactttcgccatatcccacttccgagagtgttaatctgatgtttccacgattgacgcaagcggaagtttttgggctatcgagcactttactttcctcacatcagaatggttgcggtgccgaactcaatgttctgtttgcttgcatttcaagttggctttataattttggccgagtcctcgtcgtgcctttattgcactaccaccaacacgtccagacaatgtctgggctaactctccttacagtccttatatccggcttttgttttctttactctcatatgttcttaccatgtcagaagaggctggcttatcgccttcgaatgaaacccctgccacagtgggccttgtctgaaatctttcggctccttcgaaccctggattaccccatctcaattatcaaacattgatcatattctcctttgttctatacctggaattactctaaccgttgagtgtcccgttctgtctttgttttgaagctcacagtctttcctgggtcctgaggcccagtacaaatgcccactatcgtggactggcatttcaccctgggtatattatttcctcttttattatcccccctcattggtttgaatggcattcgacttgcgttgtctttgaagaaagtttttgagcggcttagcttttcagtcttgttttattgtctttcgtccttaatttctctgtttctggcgacaatgtgtttatagaaactgatagaagagatgtataaatgtgaatcgagaccaacactacaccgatgatttgggagacataaacgttataagggtcttgagtacatgtgtatcatgtgctatcccttgttgtcctcctagagtgttttgtaagaagaatatagttaatagcacatagaatggatactttaatgtatagcacacgtagtctcactccggaatttcccttctaagtattgtacagtgtacatcggctatatagccaacgtgaaatgtcaaactcataaaaatcaagatacagaagaggaggtacgcaaaatagccaaaaccaagcaatacatgcgcatagtatactagtacagaggtagacaccaaactgatgtcgataagatcaagtggggcatttgttgaaacgacctatctttcatcgaggaaacagagcactgcccagcggataacctttgttgataaggtagtattgtagcttttcgtctgatatcggaattgactccgaactgtatcccaatgacggccgaggaggatgaagcttgcgcgaacttacttcctccgattcatggtctttctgcacatctcaatcagaccggcctttgcttcgctatcaggaaacgggctgatggcagcaattgctttgtctgcatattcttgagctagagcacgggtttgttcaacaccattggcgcggtagacaagttctcgggcctaggataaacaaggttataattagtgaattatcacatcttttggagggctgggaagggatagtaggactgatgggctaatgacaagggatctatgcatactttttcaacgtctccctcccggcaaaatttacgaccgaccaaggggccaagttccgggtgttgtttccaggcgaaaagaagaggagcagttgcaaggccgagttctaggtccgccccggcaggctttcctagttcaacaccgctgactgtgtagtcaagcatgtcgtccacaagctggaacgctagtcccaaattgcggccgtaggaatacgcggcctcgaccacgtcaggagtgctatggccaagtagtgcagctgcgcggcacgacttgctgattaggcttgcggtcttcaggtaggttttttgcaggtagtatgagatagtgtcgtctgtaaaaacggggttcttttcgtcctcggcagtgtttttgagctgcataaactctccctccacgagattggcgatcaccgtagccaagagttctgtaacctcggggtctcgtaggcgggccagagcaacggaggcacgaccgagcaggaagtcacctgccaaaacagccattttgttcccgaattcgatgttcgcggagttggaggagcgacgggtgagggcgttatcaataacatcatcatggaggagtgaagcagtgtgaatcaattcggtgatttcagcaagtcgtcgctgggaagggaggatgttctcatcgccagcaaagtcgtactgaccttctgttggcgactgtgacgtgagccgatccaggtctgggttggtgtcggcaaggacagaaggagaagtaatagggtcattgaccgtcacagaacttagagctgcatccgacgtggacccattggatcttaaagtggcccatgccgtcgcttgggacataagcaa

SEQ ID NO: 16195 - DNA, 996 bp, Emericella nidulans
tctatcatgctagtatgcaaagagctgactagaatgaagatgcttcccaatcgtccccaagctcgcagcccatcaccttggcctccctctccacggcaccaaacccataaccgtcctgggaggcctgacctcattcggcggacgtgggaataattactctatgcatgtatgtctctcacttgggcctcttccgttatgcccttctgtacttggctaagcacaataatgtctacaggcgattacagaaatggcccgccaacttcgcacccgcaagcaagcttcatccaaggcacaaaacggcctcgtcctcgccaacggcggcgtcctctcctatcaccacacagtcatcctttcaacacggccgcggcaggacgcagattatccgatgtggaatccacttccatcgaatgtagacgaggaacatcctcctatcaaggagcaggcagaagggggtggtattattgaggtatgttctctatcatacttcgcataaactcgttattagtaagaaaatgcacttgagctctaacgaagaatccagacatatacagttcagttcggccgcgatggttccccggtcatgggtttcgtggtgggccggctccttgatagatttggaaatgggaatggggatcggtttattgcgaatgtggaggatgcaaacacactccagcagctttgcagtggtaccgaacaggttgggaaacagggctgggtatccacgaaggacgggaggaatttgtttgtttacaagcaagcgaagatatagcggttcggggagaggtatgaactacgctacagtttgcgttagaacaatttcctgggtttccgtgaatcacagcatgaaagttactcataccggccagcaaggacagaaatgatccatacccaattaaacgaagagagctcatatgtagtgctcgggtatatacacagcaggcataactttcccctaaagcttcgaaccaacccagttaggcttcctcttctccttaa

SEQ ID NO: 16196 - DNA, 1300 bp, Emericella nidulans
tgggcaagtgctctggttactgctcttgaaccatcggtaaagacataccgagtggaaggcatttttacacgttgcgcacgcttattgggcgtctgcatgtcggtcgagatgactgagtaacaaatagcgcactcgctctggcccttgagcgcgccctgaacgtttcggcggaatgccagcaatccgtcttctaggttgccattgcaaacatgatcactccttggatggtgaggagccagctcttccacttcctctcgtctaccaatactcggcttcggccaaagacttgtgcggggtgcaagggataagcagctgggagggttatcgatatcgagactggtggtgattcctcatcgaccggaatgcttgcaataatttctgctgtcttcgacgagaccttgacgttaagtgcacgctcttcgtcctggtcctgcgtggacatccattggttcactctttctagcgcatcctcaatgaccagcggtgagatctgtgtcggtgtgagtcatgtacctgtgaaggaaatgctacggcgcataccgatttctccgtccaagtttcaacagggcccttgatacgcttttttgcgtcgatccaccaggctttggtcaagttggcaagatgcctcagacacaaaaagtacaagtgaacaagcaaccattggatctccttctcatagctttcagacatgtctaactcgaaagagcggatgtcgaacttagacgcatccacaagctttccatggcccttctggaggaaatcaaacatgaaatccagtaacgatggcaaaacatcgtgttctttgatattagatgcgtactgttcttggagagtgaaagactacaaattcattagcgcggctgcttctcttaacgcagagcgaacacatacagcgttcacaaagtgtcgaagaccaatctccagctcagaagatacgagcgtatgtcggcccaggtcctctcatctccatacgacagggaaattgactccatagttggcgctccaagtagcagggatatcagctcatatgggagcttggcctctgtctttgacaaggccacatcaaaggacacttgctcttgtgcagttggaatgtactgatgaaggagggtgtatgcggtgtgctggataagaaggctatgagcagtcagtaaaggataatacctactgacgtcttcaaggttccttgttggcatgatctttatcaagcgacacagacgttggacagtgaggtcccttggtaggtggaaggtagtcgaggagtctatcaaatcagtatggatcacaactaaaccaactc

SEQ ID NO: 16197 - DNA, 620 bp, Emericella nidulans
tgcaaagccaaacgtgcacggtacctgacctataaggacagagtacagctagcacgtgaagggttcaactaaatagcccgagtttcttgctcagccagagcaaaaatgtcctctccagacggctcaacaacctccctttttgacaacttcgaagccaggaagaaccagttcaaagcattgccgaccgtcgtcgccctgtccccaagcacctgtttactgagccttttggtctgtctttcgcttttgatatacgagtctgttccgagatctaataggtattgcgatatgccctgaacttcatcatcgtccaggaatagggtccgatcccagtttcgcagaaatgggtagtctctgaactccctgctgacgattaaatatttacccatgtgaacagcacccagaagcatctccgggattccctcgtaatcgcagagttgcactactgctaccgcctcggacacaagtgagttccataattgatctggcggccggagctgaactagagagatgtggtgggcgaggtctggcatctgggattttatatggcttaggaggctcgcgtgaaccggagcagtttctggattggctgcagagacgcagtggcaaaggagtagctgggg

SEQ ID NO: 16198 - DNA, 1583 bp, Emericella nidulans
tatgtgctagctagccggcataaataccgcgacgatggccctcgatttttgagtgatctcagctgcaagaagatttgggttgactgggtcagacaaaatgcatgctatttcgctccttctcgcagccggctttgccgtcgctgcccccgcctacaacaagcaatcgcatgctgtaacaaacatccaggttggcccgcgacctttctggctggtcgaccagatggacgacagcccgctcaagaagaagctcgaatcctgcaccgagaagcccatccgcgattcctcctctttctccatctcccatcgcggcggcccactccaatttcccgaacacagtcgcgaggggctctatgcgggggcgcgcatgggtgcaggcttgctggagtgcgacgtcgcatttactagcgaccgccagctcgtctgccggcactcgcagtgcgatctacacaccactaccaatatcctgctgatccccgaactcgccgcgaaatgcaccaccccattccaacccgcgacagcagactccgaggcaacggcgaaatgctgcacctccgacattacgcacgaggaattcctctccctatgcgccaaaatggatacgtcaaaccctaatgccaccacgccggaggaataccagtacggtggtcctgactggcgaacatcgacctacgacaactgcgccacgaccatcgaccacaagacctacatccaaatcaccgacagtcttggcttgcagtttacgcctgagcttaaaactcccgaggtcgagatgcccttccagggcaactatacgcaagaaatgtacgcacagcagctcatcgacgagtacaagcaggcgggcatcagcccaaagcgcgtgtggccccagtccttcctcgaagacgacatcttctactggatcaaggccgaacctagcttcggcaagcaggctgtgtacctcgacccccgtgttgacacgcaagctggctacgaggcggccgtttccagcatgaacaagctctacaagcagggcgttcgaattctggcaccgccgatttttgcactgctcaatggcaccgccagcggcgagatcgtgccctcgtcatatgcaaaggctgcgaagaaggccggtttcgatctcatcacttggtcgcttgagcgctcggggccgctcaagcaggctgccgcagaaggcgagtactatgtctcaactattgcggatgtgatcaagggtgatggcgacatgtaccgcatcgtcgacgcgctggcgcggaaggtcggcgtcatgagtattttctccgactggccagcaacggtgacctactacgccaactgcttcggcctatgattccattcaccacaaatctagattatataaactaagcaataaacatagattaatcatctgactagaactttcgcttaccaccgggccctcgccacatgacatcatgacaatgacccttgagtatataaaaccccgcaccccagcccaatcgtgataactacggtctatctccccgcatattcgcaaactatcaatcagttcaacagtccatatacatttgttgagaacaatgtatgcactggtcatcaactccttt

SEQ ID NO: 16199 - DNA, 2020 bp, Emericella nidulans
aaacagagaagcagttgcaaaacttaaatagcgctcagttcgaactcttcgagttcaggatgagaccaacgattagcctgtcaagattagtaagatgcgttggcagcctttcagcttcgaccacacgtacccataaagcccaagaacttcaccgaaaatcaaaatgagaatcatgccgacgtagactctggattgctgcatgtaagcgcgaactccctgtatcattcgttagctagtttgacgttcgtggccactcggtttctgcttacggcatctccaacgattccgatcgtgtatccggcagctattccagcgaggccgaccgacagacctgacgccagatgcatgcaacccctttcttgcggttagagtaggtccgagtagagggcatcccttcacgtacgcatataagctcaatgacggttcactccctgtcggcgcagtgacatcgccctggataaggacggcaatgactagaccgtagactgcgatgataccggacataacgacgggaatcaaggactgtcatggcgcggcaattagcacggaaactaacaagagcagggtataccaagcacgcatttcctaccttcatgattagatcaggcctgaacgttcccacaccggcgattccgataccggctttcgctgttccatatgccgctccggccgctgtatcagtgagccatggtgattctgcagcaagctgcgagttttgagaacgtacatccgaatatcatctaatgcggcttcgttagtccagaagttgaataatcgcttgctggtttggcacttacggctgcagcaattcctgcctgtatttaaattgattgtcagcatggacgatgtagaggtatattcaagcgcattccaataactcacgaacgacaggaacggggcgaatttgggtgtcaactcgctctccgtcatggtgatgctctctttaatgagggaagggaggttcgaaatggaggacacaagctgcaggattgctctggtctcgatgagagatactgaacgacaatgtagaagcgatgtaaagcttcaggtagttgagtcggtatagttagtgagaactggcaaccgaacagcacgagagaagggagcaagttgcatgcgtgggccgccgtagagcggacagccacttcgcccgtctgggttaagcctgacatgtgcctgttcgacccaacaactgaccttcatttccacccccgtgctctcttttcttcacgcacggcattcccatccacgactaccggtgattccctcgacggccacctcgtttcctttgcttgacgtctttgtctggtgctcgttgtccagacttgatctctcgaccggccaatccatgctgagggaaggatgctgaggttatgaacggcataggcactggtctgccattgcgctcaaggctgctacttgattcacgttagactttactacgcggtgtcgccatttacatatcgaggcatgaattatcactgaaggactattcgtatctcacattttccttcccagatcttcgttcttgtctttcttatttctattaccatttacccttggttgccttttgatcgactatcacttaattgctgtggagcactgtctgttgacccccctcttcccccataccgccgtccccacgaatcgaacgacaacccgaaacatagctgtgcgctatttacgaccagactcgataccccccgtcctcgattctgtttgcgatttcggatccaactcgtctcctttttgccgtcttttgtgttctctacggcgatcgaatcaagagggataagctcaaaagcgcggcgaggtgatatttcacaatggccgatattgggggccagcaaggccggaactaccggcctcatggtcatccgtcctctgtccagcgtgatgctgccttttcagaaatttttggcggagcacggcagcctgggcgctcccccaccatcccatcccaaacgccccagttctaacaagagaaggctcacacgatgtcatcgcaggttccgcgccc

SEQ ID NO: 16200 - DNA, 4820 bp, Emericella nidulans
caggaaatacaaggaaaatagaaggtactgatgagttgcaaggccgtcgttatgactggagcaaagcacggccagagatggtatcatgtgtgcaagatctcaagaaattagacccggagcggcggtaggggattttgtgggggtattggtattagaacatgaaaccttgaaaagaagggtataggaacatctattgcgggtagctggtcgattggttttctgcgatgccatcatcgatcagctacataccccatagcaatcggcgtaaggaccgtcctcgtagtggtgctgtttgctggcggttgtcctccctcttttcatgttcatggctcggtcctaaacaacgcaaagacaggactggctacttacgttgctgataaacttgaccgctctgcccgtacggcgagtgcgggtagttcggagggtatcccacttgcccgttgccttggtaaggcatgccacctgcaccagcgccgtattgaccaggagcctggccatcagcaggctggtatccaatcggaggtaattgaggtcggacaccgccaggatactgaggaggctggccgccctgtgaaaggtctggcgcgcccgaagcatcaatctggctctgaacagctgcggcagctgcggcacgctcgcgctcttcggcaaccttgcgttgagcttcctcctccttcttccgctgcttccactccttacggatttctttgaattctggtaaccagtcagcagctgaacgagtgagatgcaggaatatcaccgattgctcggcaagttggcgcgctactgcgatccgcaacgctaaagcggtgtaacctgactagcgcgtgccgcaagccgcgctaactgggctatcacaggtgcagccaaacaaagtgaaaatgctcactcaccttctggagttcgcttttgaccatgagattgcatggtaacatgagcattcagatggttaagtgtgccgtatgccttttcacagccattccacccacacttgtacatgcgctcgatttcttcataccggcgacgaggtcgcttatgctgttgtgcaccgggaatcggaacgaacgagtaaacctgtggattccgtctgtcagcaaatgacccgaatcaggaaaatgatgaaataaagcgcccgcatctccacatcctgaagagagcccgaccgcagccccgacatcgggagcgtcccaagacaacaatcaaaccaattgcgcagcctttggaaacggatgccagaatcatcaaaaacatacctggccagggcgcggccctgcggtcgtagcaggggaggcgggaccaaccgttgtggcaggagagctgtagggtccaggaagaccgtgctgatgttgcggatagccatgcgaccattccggacgcgcatacatctgtggaggcggcggaggcggcgggtggccctgatactgagcggccatgtcgtggccttgagccgtataaggcgagtaaggaggaggataggttgggctggaggccgcaatcgagggatctataggaacgtctccgtcagacttcacgttcgactgattgcgatggccatttggatgcccatcgttcagagagttcatggacggacttgttgcttgagccatacctggcgcacctccgggctgagagttcggcgcgtggtggtattgaggcgggcgggccaggtactccgggtatgcgggcgagcgcgcggctggaggaggctggttcagactgtagtcagactgcggcgtgttggaggaagtgccgggtcggacctcaggttgcggtgtgtactgagggttcgggcgcgactcgggctgaggggtgtattgagcaggggcagcagcagaagcctggtctgcagctgtaaattcagaatgtgtcgcggcagatgttggaaacggtgagagcgaacctgactgcgcgtactcggaagcaggcctgttgtccatataatacaagagaggcggtcgctaccgggaaaagatatccctgacgatccttccaagctaatatagtctcgcgtgcctgttgataacacgcgtcgaacgacacaataagcttgtggacggagaagaaaggacagggtgagaggaagtacggggaggggaaagaggattggattggggcaaggtcttagtgtgaccccgagtcgagaaaggcttgagacttcctcttgttggcacgtactttagtggaaaagaggaggtatggtagcgaacaatcaacaaagctgcacgttgatgccgggggggcggatggcggataagagaagagaaaaataacggaaggatcgacgcgtaattatggtcgcgaacgagtctttccactctccaacgcagcgattattacaaattaccacggctgtggaagtatgcgaagacggttgtagtcaaggtgcaggtgcagctggatcgcgatgcttaatcgcttagttcgccagccttagggtgacggcgactggctcttgcaggtggcggagggcacggcagcacgagggccagcgggaagaaacgagggggagcttggattgtggactggcgatggagccaagcagggcgcgaaaagaaaaacgaagtgtaagagaagtggaagccaaaccccgtcacaactatacgagaagggggctaaaataaagtagaatccaccagctcgaaagagtgatagcgcaggagtcaaggcctcgatcccagtggcgagttctggtaggctggtagcacaatcaccctaaaaaagcgaccggagcgaagatggtttgactcgacccggcacgaccaggctggagcaggaaaggcgcgtcttaaagcttcggcgggcctcgttgtaatctttggcactcgcgcaccgtaggcaaagacgagagggcagagcacctcgtgggatccgaaatggtggagcaggacgtgggcctaaaggagttggagcaaagaattctatggagagagaattcgaagggaagaggcagaggtcagactcaggacggtattacgggaaaggggggtttgtattgtactgtcacagaggggctgcttggcgagaaggcgcctcattggccagagggggcggcgtgttgtcgctttctggtgacggtccccgtgccggcccactctcccctcactgttctcacttttcaaaggtcaacccggctaagctttccctctgggatattatgattattttttataggggatataggggatcatcccagtggcaaagggacgagtcatgcccaagcaaccgttttccgtggattttcggtggttatcgcgatcccgactgggcgcaatcaaccgcccaagacatgaggttaagagaaagttgatagacaatcgtggtatggatttagagcttggatggtctacccgcgatttgggcttggacggtgcggactgcgcgcgtccgttgcgagtcggtcgtaaacctagcgcgatgccagcgcaacatcgttggtcgaccgcgtggattggccaagttaaaacgcaggctaaacgatagactttggatggcgtgcccgagaaacggctggaacggtacaccactccagaagggaacaagcgagatagtgccgggctagcaggtcggccccgggggttagctgcgcgtggaggcatgacagaatatcaacctttgcgcgcatccatacgttgtcggactcatagactactacaaaatagaacagagtacatcctcaacaaatactaatggggtacggagtagggaggggaatccccgtgataatgctacgtaataagagcgatgatatcagaattattttttgtagagaaagaaaaaaaataaataaaatttttttacactgcaaaagtactgataggcaacgaaggcggctaatgccggtcatggctgatggggttggtggaaatggtggaaaaggaggtctgcaatggtcacctgttgctcgaggcttaattgccaataatggggcggggatggttgcgacggtggggaatgcccacccttggaatgacttggaatcgcacacatcctaagcatcattctcaccttcacggtttttgttgtccatccgatttcagcagtttgcgcttgtagttgaggaagaggttaggatgtcgtgatatagacgctcgataccggagccctgctatgctcgttccgcacaagtcaggaacgctcgctgcagtggagaaccgaggactgctagccaatgagcgcacgaaacgatggggccatagacaaattgacttttcggtattgccggttacggttagtaatatcaaacgcaatcagacttcaaactcctgaatcatatcaagatgttgatcagaagatagctggctgaactgacccggaggtcaattgagtttcgaactccggtcctcaatgaccggtctttgtggtaagtgatcttattcgaggagcgtacaaaatcacgacacgaagcgcggctgcagctgaaagctcccggtatcgcatgacaatttgacatgggatatgaaaaagcggggattgtggagtcccgtcgatattgaagctggaatgtctgaaggtcgaggaaggcgaggcgcgaattagagatataggggaacttgcatgcagtcaaaacatgtcgagtctctatccttgtacaaagtaccactccactggtacgtctcctgagtccggcgtcctgataatgcccgaggcttgggaagagtcagtatcgtcaggttcgcagttggtacggcttgacgcgagctagatttcaaaatgctacctattgataggacagccctagcgattggccgctcccaaacaagtcacggacttgatcacggactttaaagcacggacaatatttcttgagcctcttgctctgt

SEQ ID NO: 16201 - DNA, 1508 bp, Emericella nidulans
cgcagaacctatgctaatcatatggagctaatctataattatatatagaaaataatcttccaatatggaaatgcgggacacctttatgctcgcttcctcgtgtcatgaatcataatccctcattgatatttcagttgtatgtatgatgctccatgcaaatgccgcggcgcagctgacagccatcgccaaacccaaaataatgcaaagtaaacgcaaagcaaaatgggagaaggatgaaggatgaaagttagtaatgcatgttcgttggaaaagtaatgtcgtatattcatatgttcatttcgtatccataatcagtgcgcggcgataacggccttcagcatgcccttgagcttggtcgctgcgctgggcggaggcgtaggttcacgtctgcgatggtgacggcgccgacgttcatgctcgtctcctcgggatcggggagcctcgtcttgacactcatcccggcgctcacgctcgtcacgacgccgttcccggcggtcaggacggcgttcttctcgctcagagtgctcgactcctcgcgcttcggcaatcgcctcggagtgtcttcgagctctgcgtacttctgccctagcaggatcctcttccctgcggcgagaaccactcgaccgctcggtggtatgtcctacttccattcgagaggggtcctcttccttacgacgagatccgcttgacctctctgtgtggcctcgtgcttccagccgagcgaagtcttcttctctgcggcgggaaccactagaccgctccatggagggccgtccttcagaggggtgacgatggctgtgaccatgagaatgatggctcgtggatgagcgtctgcgcggcatatcgggaatgttcgctacagccttgttgctattgaccctgggtagtggctcattgctcgaaacttcctcttcggaggggacgtatttcaaaaagtgccggggcttaggaaccgtggactgtgagtgtttggacgatggcgctcggtcgccgtcgcggcttccccctgagcttctctgtcttaactctttggatacggaatccctttctttagtgcttctggtgcgcccaggacgttcagaccgcttcgctcgttcttgctctgcagcaagcttctggagccggcgcagttcgcgttgagatttctcttcgtattgccttcttgactcttcaagggcctccagccatcgctggcttagcttgtttcgctcggtcttttgaggggctggaggcggaggagccggttggacatgtctccgcccgcgcccttctgatgagctcttcgacggtcgtcgttcgtcatcgtagtcggccgcgtatgactttcgtcttcgtcgcctcgaacgttccagggaatctctggtagccgcagcgtacttgtcttccagcgattcatgccctccaagttcagctgatgtatcaggcactagtgtccttggcgacggctcgtcgtagacgtactcgtcttcgattgcccgtgttgattctttggcaggctcggcggcgac

SEQ ID NO: 16202 - DNA, 1126 bp, Emericella nidulans
tcaagcgttcgagctcttggcgctggctgtcccgtttttagatttcatagttcccaaggcgtcagattcgtgagcgaatctgcgtagagagctgcaacgtcaagatcatctgggaaccgcacgtacacatcgcgcatggctccggcatatccctggttccacgccgtacagtcctctcccggcttttcctctggataccgaagctgtactgcatcaatgagggctgattctacgtcttttgcggtgatggcgtgcctctttgcgtcgcgagctgcttggtgtgttctccgcactgtgtgttccagttctaccttatcaaagaactgccatggcttattataattcgggcccagtgcgtatgcaagaccccagtatgccattgcgcagttcggatcgtggctgacggcggtctggaagcatgttgctgcttcttcgtggttaaaggcgtaagtccagatgagaccgcggttgaaccatgcctgcgcatgcgcgttggttgtgcttactgcgcggtggtaagagcccaggttgaagtagtcatcatcggatggagtatttgtagaagtcattactgcggttcgtggtcctgagggttaaacgatatagttatggtatgatacagtcatagttgctgtgatagtcatgacggttgtcgatgggatgagagtggggtagctgtcgatggcatcgcctaccttatccatttgagcagtacctagcctacgttcgcgaaagtgttattttcataggacaagggtagatttccaccgcatctattgaaatacacggctatttttgtatggaacattatcaaaatctcagtcaacagggtgtactggcgctgtgttttccaacacctggtaaagcaacgcagtaacagcgagccgctcattctcgctcacacaaccatggcatagtcctcttattttctgcatgcacagttcacagtccggaccaaaaaccagtattatttaaagctgccgaatgtaacacgtacgccacggaccgaaaaactggacgaaaaccgtgtgctgaggtaggtgaactggtccgagccgtccattatcctatcctttttctatccttataccgcatacacagttggcgaccgaaacgaaaagattgg

SEQ ID NO: 16203 - DNA, 470 bp, Emericella nidulans
tggcactagcgcccagtgcatccatatcatggcccgtttgcccatctaattctttaattgcagttgaaattggcttgctgttgaaaaagaataaacgaattgagagttaataaccggcgtcaatagaagggagacatattaggtcgtaattaccgctcaatgaaagaaggaatctcgtccacagacatggtgccttgaagaactcctgccagattgtcagtttaatggatatgaatatagagtgtgcgtttaagggggcggtgcttacggtagactgcagtaaacaatgggaactcttcttctaaaccttgctttttcaagaaactgttgacttcgactgcagtcaaagtgccttgcagcttctggccgttcaactctgtctcctcgattttctcaatcggctggtttctttcaatgctaagctttgcgcagcggaagtttcgtccgccactgcaactcgtgattagatc

SEQ ID NO: 16204 - DNA, 435 bp, Emericella nidulans
gcttcgggctcctggcgttgacgctcctgttcctctagtggttgttattcatttcggtctgacgggcacgctgtccagcacgtccagcagcctgtcgagaatggtcccgtgacgtgggaccggtgccagcaccagctgtcgtccgcgccgcggcaggtgcagcatttttcggcttaggtgcaacattcagaccggcggagagcagctgtctcttgtcaacaacttgcccgtcatcattgacggcaatatgagcaccgcgcgcgtttagctctgctgcgatttgtgcctcggtcttttcgtcctcttgcgttgtatccgtcggtacctcaccaccattctcctggatcttccttgccgcctcctccgtcgccttcatagcagcatcatgctgctcttcaccgcgcgccaacaggtcgtggtagaacccaaccatgc

SEQ ID NO: 16205 - DNA, 408 bp, Emericella nidulans
ggtctcgattccgaacttcccgcactgttcccatcttcgacctcaacagccgcacagagacaagatgaccaagcgcactaagagtgagtatagccacggaatttttgttgaccttttgaacagaaaaattgaaaacagaagctgacttgcttcgcagaggtcggtatcaccggtaaatatggtaccaggtatgctttagccagaaaccctcccacgactccggattgaatcgagcacgactttttcgttcacatcacggcgaaatttggcgcttcgataatcaaacaacaagcgattggacatttgattgactatggttcgacaatagatacggtgcctccctgcgtaggcaggtgaagaattgggaaagtgtcccagcacgcccgctacgtctgcaccttctgcgga

SEQ ID NO: 16206 - DNA, 495 bp, Emericella nidulans
attgttgtgatgacatctaatctcggcgccgaatacctagcccgcccaacgaccaaggacggtaagatcgaccctcagacacgcgaactggtcatgggcgctctccgcaactacttcctccccgaatttctcaaccgtatctccagcatcgtcattttcaaccgcctcaccaagaaggaaatccgcaaaattgttgacctccggctcgatgaggtccagcgccgcctcgagcaaaatggccgcaacgtcgtcattgagtgtactgaagaggttaaggactatctcggccagtcaggctactcgccagcttatggtgcccgtccgctaggagcatcatcgagcgcgaggtcctcaaccgcctcgccgtcctaattctgcgtggaagtatccaagacggtgaggttgctcgcgtagttatgcgcgatggccggattgacgttattccaaccatgaaatggccattgatgaagaccaggacatgacagatgaggacga

SEQ ID NO: 16207 - DNA, 285 bp, Emericella nidulans
tttggtcaagcgtaacacccacggtggtgttcaattctcgcgcgaccctctgaatgtgctgaacaaacactctctcaaggtaagagacgcctagttcaagattataaccaggataaggaaaaacatccactgacggtaactgctatgctagtacgctggttactccaacaccaaggtaaatctcgcaagcctctttcgatgatcaaactctcgcaagaatgggttttgactagcaatcaggccattggcgtccaggccactgagaacggtggtgttgttaccatc

SEQ ID NO: 16208 - DNA, 409 bp, Emericella nidulans
ccccgtccggctaccgatcttgctataaccgatagagatcgtaaaggccgtgttgtcagtaactcaggggctgacttcggtctccgcgtccgccaagggccaaatttgtcgtacggaaactacattgctggtctgggtgttgggaggagacgagacgttagcggcaaaatggctgaggagggccgaggcggtatcgatagccctaactccaaaagcacgagcggaaacggaaacgccaactccacgcctagggccgctggatgggcgagatttgctgggttgtgatttgataagatctatactcagactgcactttcggcccaatatgattgagtgaggaaagcaagcagagaatatcattgcatgtaacatggagatggaattggaattatttactgaaatgaaatga

SEQ ID NO: 16209 - DNA, 1026 bp, Emericella nidulans
cagagtgcaaaccaaagtaactttcagggctctatgttctcgggctctggcggacgtggtgtccaggctggaggcaccagcaacttcgatcgtgcgggtggtcgtgagcctgagaagggaaccgctgccagtgccctagatgacacagacgttgccggtgtgaacttcaacaacttcagtagagacgcattgatgaggaaacttgcaagaacagatgaacctgctgagccctccgcagacgacaaacagcaaaagatactccttccgaaaactgaacccaagcctttaccggttaatgtcaacatggcgagtcggtgtgttttgcttcgcaacatgtttgacccggctgagttcgtacaccctacctgcatctataacgctgaccttgctgaccaaatctgtagggaggagggtgaatcctgggttaaggagctggaggatgacgttcgcgctgagtgcgaagaaaaatatggccatgttgttcacattgcactagatccaaattcccagggcgacatatacctgaagttcgaccgcgtccagggtggagagaacgccatcaagggcctgaacgggcgcttcttcggcggcagacaaatcactgcgcaacctgtcgtcgatgctgtttacagcagcttgttttcccgaacaaaagcaatctaatcttcatcgaccccgcttattatcaacaagaccgcctaccacaagatcgccagtcatggtaggtatctatctaatttgtctgccaggtgctacttgtgatcgcaagaccaatcagactacagcgccgttaaccagtcctgatacttgatatgggactcgcaccatgtttggtcctgtataacactacccctggtaggtgctagttttctctcgacatcttgcttcctacggttttgaatgccgaaacggttgatgcgcaatgatttgtctatagggatctttttatatttgtcctagcgcgaaacttatttgtctatatattaccgtgcgtatgtctaatttataacgatgaaagttctaaaa

SEQ ID NO: 16210 - DNA, 516 bp, Emericella nidulans
ccgtccaaaccccctatattcgctaaattcgtaactatcgtcccaacctcagtgaattatttcatgtcctttccattcccacctcctgaatatacgcatcattcccggttattccgtgttccattcaatacaggtccgtggcgccatgcttttggtatcacagattgtcacatattttgcatcccttccctggcgttgaacctcttcccgcttccgatcttgtctcatagtttttgcatttctaccctatacagctgctatccccatttttgttcattcaatacacggtctcctacgcgttcatatcgtctactttatctatttatgctacgagtcttggcggtctcaataaatacgagaattgttggggttgggtgtatttagtgaaccgagctttgggctttcattgtcattctctatggtgttccgtcaaatatctgattctttggcttctacgcatgcacagacgcaagtccatctatcttttcatgaactgactatacctagacttgctcg

SEQ ID NO: 16211 - DNA, 567 bp, Emericella nidulans
tctaccgctctccctccagcaacacctggatgtatgttactcccccgcaaaatatcgaggctagcatgtcagcacgtgacgcattggaacagtatcttcggtgaggccaagatcgaggacttgaactcccaggctcaggcttccgctgcccagcagctggctgccgctgaggctgcgggtgagcacgctggccacgatcacgaccacgacaagggtaagggcaaggcgcccgagaccgaggccaagaaggaggaagaggaagacgacggtgaggaggtcgatgagaccggtctcgagcccaaggacatcgacctcgtcatggcacaggccaatgtctcgcgcaagaaggccgtcaaggctctgcgggagaacgacaatgatatcgtcaactcaatcatggccctcagcatatgagctcgatccagttaatgcacactgttaatggctgaatgtgtctgtcctgttgtcgaatgggttctggggtttggaatcaggctgatatgtccccggatgtccgtccaacttcatagtgtatatcatttagtccaaaagcaaaatcaatgaaca

SEQ ID NO: 16212 - DNA, 206 bp, Emericella nidulans
ctccagggcctgctctttggccgccctaggctcgaccgggcaaccatcaagggatataaggaagagggaagcaccacaactccatttgacatgatgcttgtgaatgaagtatcgcggtaccacgtcgcgaaggcagccgtcacgggaggagcgaggttcaatgagaaagtcaagctgcggcaccaggagctttgctctgaattcga

SEQ ID NO: 16213 - DNA, 743 bp, Emericella nidulans
ttctccgcacggggaagtgcaattatcgcagcacggggagacggctgacggaaaattgtatctcgatttgaaggatccgtcattgcttggggaacactgccatttcggaaagacctccagtcgattgtgtgtatattttcgcggacaggtttctcccagcgtggctggtttgcactcatgtccaatgagccgtgtgagcagaaaaaagaaaaaaattcatgatcaccttttccagctgttacgtgtctctaaaaaaggatggctgggagttattacatgtttagtatgatactcttttctcaatctccaggtcaagttccaggttcagatggaaaccgatctctcccttgtgtgttcttgcctcagaaccatcgacttactgccctatgcacatagaaatccgacactctacgcaacgctagatttatacgaaatataggtttgtttatcggcacgacatatcagaacatggtcattatattctatatatcctgacgctatacagaggcgacccaggtcgccatctatgcataatatagacgcccattgcaccagtgctcttaccagtgcacagaaagagcagtccaaagtacacaaaagcatatccataacgcgagtgtcccaattacacgtatccagcttatccaccaatgtccagatcagagcaactgggagcgccgcactttcacctttcgcactgctgcctccacgcgcggccgcattgtcccggtaatgcctggttc

SEQ ID NO: 16214 - DNA, 200 bp, Emericella nidulans
tatctccgaatactgggccttgtccatcggggctttcatacagcttgcagttgctgtgtacgggacttggcatggtctttgaactgctgttgactattttatatttttttctgccatggcatttccctaagaaaggcttctatggactgtcgtcgtgtatatgtcatggcattcatctttaattagacttgattgcttca

SEQ ID NO: 16215 - DNA, 200 bp, Emericella nidulans
gaatactgggccttgtccatcggggctttcatacagcttgcagttgctgtgtacgggacttggcatggtctttgaactgctgttgactattttatatttttttctgccatggcatttccctaagaaaggcttctatggactgtcgtcgtgtatatgtcatggcattcatctttaattagacttgattgcttcattactgc

SEQ ID NO: 16216 - DNA, 200 bp, Emericella nidulans; identical to SEQ ID NO: 16214

SEQ ID NO: 16217 - DNA, 200 bp, Emericella nidulans
catcctctaagcttatctccgaatactgggccttgtccatcggggctttcatacagcttgcagttgctgtgtacgggacttggcatggtctttgaactgctgttgactattttatatttttttctgccatggcatttccctaagaaaggcttctatggactgtcgtcgtgtatatgtcatggcattcatctttaattaga

SEQ ID NO: 16218 - DNA, 200 bp, Emericella nidulans
cctaggcatgccaatttacggccgtgcctttcagaacaccgatggccccggccgaccttactctggtataggccaagggacgtgggagcagggtgtttatgattacaaggcgctgcccagaccgggtgccaccgagcagctggataccaacattggtgcgtcctggtcgtatgatccttcgtcccgtgaaaaagtatcgt

SEQ ID NO: 16219 - DNA, 200 bp, Emericella nidulans; identical to SEQ ID NO: 16214

SEQ ID NO: 16220 - DNA, 210 bp, Emericella nidulans
aggtgacatgtgaggcaacaaagaaggtataaggcttgcccagattaaccgtgaagaataagaaacccatccaacgccgcgcaggttggctaacccgtagatgagccgtaagatcgaaatcaaagagagtcattaattgccgccgcggagacggaggaccaggtggagagtactctccttctggatattataatccgagagcgtacgtcc

SEQ ID NO: 16221 - DNA, 210 bp, Emericella nidulans; identical to SEQ ID NO: 16220

SEQ ID NO: 16222 - DNA, 212 bp, Emericella nidulans
ggtgtcccatcaaacaagattatcctaggcatgccaatttacggccgtgcctttcagaacaccgatggccccggccgaccttactctggtataggccaagggacgtgggagcagggtgtttatgattacaaggcgctgcccagaccgggtgccaccgagcagctggataccaacattggtgcgtcctggtcgtatgatccttcgtcccgtga

SEQ ID NO: 16223 - DNA, 212 bp, Emericella nidulans; identical to SEQ ID NO: 16222

SEQ ID NO: 16224 - DNA, 231 bp, Emericella nidulans
ttccaaagtggctctccattaatttaaggggcaatggagagagaagaagagtaaatgtaggcattgctatttcccatagctattacgatcctctgtgaaagctagtcccaacctgcaaatgcgtactcggggcggatgtaagatgtttccaaaacagaactgaatcgaacgagcaaggaagggacatccttgctgtattccttaggcagcgctttccacggttgtactcgc

SEQ ID NO: 16225 - DNA, 234 bp, Emericella nidulans
tttaccatcctacgcagcctgcgccatggatccgaactcaatcatctcatagcacaggtgtcttagttgcacgagccagccctactccgcacccatctgtccagcttcgatttaccagctcagctaggggcgcccaagtcaccaacttagaatatcggaaattatggattatgcagcaatcgatagatttcggtctgttacgtcaggcccggcctgagtcgggaagcagtgtct

SEQ ID NO: 16226 - DNA, 235 bp, Emericella nidulans
tctggtagcgctggctactttgttttgaaatgtgtttctatcagtttgttgatacccccgtcggcgagattttgaagagttgtgtcacccctggttctggcctggttttaaggacttttgatagacctacagcttcgtgctgccttcttgtcatgatatttcatgcaagtcactgtaattgaattgatctattacaaggatagtggttgctactaagcatacaccacttaccgtc

SEQ ID NO: 16227 - DNA, 263 bp, Emericella nidulans
ggtggtcccttccacttccgcgctccttctcgcatcttctacaaggccgtccgcggaatgatccctcacaagaccgcccgcggtgctgctgctcttgagaggctcaaggtcttcaagggtgtccctcccccttacgacaagaagaagcgtgtcgtcgttcctcaggctcttcgcgtcctccgtcttcgccccggccgcaagtactgcaccgttggcagactcagccacgaggttgactgcaagtaccaggacgttgttgccag

SEQ ID NO: 16228 - DNA, 314 bp, Emericella nidulans
cagtctgctgacgagaatgccttgggctctaaactatgggcttaaacaatggactcaaagcaatggttggattactcgaaacaaaagacacccctttgtagtatatgtaagagcgttggcacgggaccagtcaggtgactcaggcgcggggttttttaccctcttcaggaggttcgcaggcgcaacctgttgctaattgggggttatagtggagtttatctcttgagggcttgaacttggcaagattcccctggtcggaccgatcttttttttactccgtacagagtgcttcggactgggtctgtttctttata

SEQ ID NO: 16229 - DNA, 362 bp, Emericella nidulans
tccgctcctggagttcataaattactgacattgaggcacaggctttcttggtggtgcagcaagcggaagccggacgctaacaggcgatcctgagagaaagaagcggattgagaatgccttccggagcttccgtgcggacacgctgcgaaaggaagccgatgagctagagaagggcaagtcagtcacagacgagatgttctgaggtgtaaatcggagtgttgaaagcagtcttgactttctgaccgattgaggaaattgatttatgtttagccccaatattggtgacggctctgtacgattatgatgtgggggacgatcttaatcctcagtatatgtactatatctcaaagcgcacaatttga

SEQ ID NO: 16230 - DNA, 388 bp, Emericella nidulans
ccccctctcactctctccttgaacagcactacattgaccttaaaagaagcctttcttccccggcctcgttacctgtgagtttccacgcctcaagtaattgacgcttgtgatcgcaatcttataccagaatagacatgctcagcggccctatcgtcgccatggtctgggagggtaaggacgtcgtcaagaccggccgcaccatcctcggtgccaccaacccccttgcctacgcccccggcaccatccgtggtgacttcgctatcgacgtcggccgcaacgtctgccacggctccgacagtgtcgagagcgccaagaaggagatcggtctctggttcacccccgaggagatccagaactacaagctgaacgctttcggctggatctatga

SEQ ID NO: 16231 - DNA, 414 bp, Emericella nidulans
attgaagaggacggtcaagccgatgaccagttcatgaacaggtctagcaagagacgtatccagcaggagcgggacgatgatattctctacccaggtcaaagtaaccctgaagggccacagggacgccagaaccacaatcaccgcggcaataaccgtcatgcgcacgatgatgggcatcgtcgtggaggataccgcggccgtggccgtggcgccggtccgcgcggccgaggaaattcccgcggaggtggccgtggtaggactcgcggtcgtgatacgggccatccggcgtactataagtcccttgatgaccagtctggacatgaagcaagtggtggcggttacgacgacagaccaggacagagtgtcatgaactattagcttctcaaattgtatttgaaatgtcatatttgtctc

SEQ ID NO: 16232 - DNA, 428 bp, Emericella nidulans
taatcacgagttgcagtggcggacgaaacttccgctgcgcaaagcttagcattgaaagaaaccagccgattgagaaaatcgaggagacagagttgaacggccagaagctgcaaggcactttgactgcagtcgaagtcaacagtttcttgaaaaagcaaggtttagaagaagagttcccattgtttactgcagtctaccgtaagcaccgcccccttaaacgcacactctatattcatatccattaaactgacaatctggcaggagttcttcaaggcaccatgtctgtggacgagattccttctttcattgagcggtaattacgacctaatatgtctcccttctattgacgccggttattaactctcaattcgtttattctttttcaacagcaagccaatttcaactgcaattaaagaattagatgggca

SEQ ID NO: 16233 - DNA, 451 bp, Emericella nidulans
ggagggcctgtccttctactcttcccaggacaaatccagagactaccagttaccaacaaaggtggcatgtgcgcactgtcgcagcccgatcctagacgaaggaaagaatgtctgtttgattttcccggagttaattgactatgaggggtcgggtacggatcacgaaacctggaggaaggcttttgagtcaaagtatgttctaatctttggctctcttgggcatcttctgggaatagatattaatccgatattacaggatgcatatcttctattctgctcgtacaatggatatcccggacggtaagccgaagtgggctggaatggatgaacagagcgaggcgcttgatgactatggaaagccgaaaaataaggatgataattcgcggatttaaccgtctgcgtagtggctatgtatgaatatcaattgaatgtagttcaagaaggaattgtc

SEQ ID NO: 16234 - DNA, 475 bp, Emericella nidulans
cgggaatacttccaggcaacgctgcaaacgctcgaagggtccgggaaggcgaccttccactgatggtgtgcggaagtcgaaaccatcgcaaggctcaaaaccacgagagaacttgacggaggagcaaaagcgaagcaatcatatacactcggagcagaagcggagaaatcttatcaaacaaggatttgatgatctgtgcacgcttgttcctgggttaagaggtggcgggttcagcaagagcgccgttctcactcaagccgccgactggttggaagatatcattaagggcaaccaggccctgaggttacaactagcacaacttccggatctgagtaccatggacaactcgatgatgcggccacgaacatgataatcgataatgatgatgattcctctacctttccttacttttcttcactggaggtctcctttttagcattgatcaaagcgatttaccgttcttgtcggacgcagg

SEQ ID NO: 16235 - DNA, 500 bp, Emericella nidulans
agaagggagaggcaacacctacccagtttgctacccccgcctcgccaactaggccccaaccaactttccagctccaaccgccacccattcgtgtgcaacacgcaaccccaaagtcagagcaagaggagtttcctgcatctgctcctacgccatctccaccccaagaacacatgggtgctgcacccggggagcggacgtacgaagctgtgccgatcccagtcgcctatgccagcccaatgtcaccgagctttcctcaaggagcccgctagtagctagtatgttgagtggcttctttagcgctctacagaaacatgacctgcagctccttatgccctaggaaggactaaaaaaccaaccgaagaaaaagcctggtgagaactgccaggcatggccgggtaacccactctagaagtactctgtatttctggacgggacggatctgctcaacgtacatatttcttgtgaccaaagcgtggcggtggatgctgactggactggtc

SEQ ID NO: 16236 - DNA, 588 bp, Emericella nidulans
ggttctgttgcatgttgcatgaagacgaccaattcagcccagcagttccgcaaggccgttaccgagtatatatccagttacaaggaagtctatagtgacaaaggtgcatagtgcgaggtatcgttgtgcacagcactttactaaaagcacttgcttattacttgatgtcaactctgcgacttcgtttatagcgtgtgcctgggaaaagaaatcttcgactcttctggcccttactttgcttcctgagcctgctgcgaagccaataagaccgcattgagcccctccacaacggagtccgagaaacggttcccgaagcctcaacggagtaaagataatcgcgtcgcttgactcgcttccacagccgagctagatcaagctaactcgggaacaacgggcacaagaatgtcagaagcacgaagggtcccgcatcttggacgatccaagctgcataatgctcagcatatttgaactgcagtataatgcagaacttaaacagaaagtaactgacgtcgctacggaatactggatcaatgaattcatcgtctgtgggacgctctacaacctggtggctactgtgcacggataatg

SEQ ID NO: 16237 - DNA, 591 bp, Emericella nidulans
gtctcgccatcatcacccgcagctttgcccgtattgtaagtctcatgcgtctcattcagactaaggagtatttggactaacaaatattctccagcacgaaaccaaccttaagaagcagggtatgcttcccctcaccttctccgaccctgccgactacgaccgcatcccccccgacgccaccgtcgacctcctctgcacggaactcgccgttgacaagcccatgaccctccgtgttcaccccaaggatggtgcctccttcgacgtcaagctcagccacaccttcaacgagtcccagattgagtggttcaaggacggttccgccctcaacaccatggcccgcaagtctggcaactaaacgacatcctgtaaattatgtcttgtgctttgatcagttagcagcgagcaagaaaaggcagtactagagctgctaatggtctttctatgattgatatcacggagtgaggtttcgaaaaattttatgaatcgctttctgctcaggggatgtatcggcaacctttgggcggactacatggatatatcacctgtttttgttacatcgtccattgtatgttagggattggatgcatacca

SEQ ID NO: 16238 - DNA, 640 bp, Emericella nidulans
gaaccgaaatccaaacctcaatactggccgcaccggcaacagcagtttcaccgaccaattcaacgcaaacgtcgactatacccgaagtaaaatgggccagggccaggatgatacgaccggtatgggtcaatccgagacccagacctacggtcagaatctagctcaggctcaagccgatgcgcagaatgaggcgcaggccggcactgctcccgcttcacgtggtcctgccgttgggaccggcagctctggtgctaatgtgggggatgattttagcaaggttggtcgtttcgcctgattcggaatcctcctgtttgcttgcttctttcatgattctttaccggaggtcttagcaataatagagtgcttatccagtatctggtattatactaacagtcgagaagggtccctcagagctcgagactagcattgacagtaccaatgcgggtgttgaccaccgccggactagttactcgtttaccgcggcgactctggcgcaccctaacgacagggccggacctgatgaatgattctcatatactagtaaactgatggcttgacgagtcctcgaactctaaaatatctaccttagtttgttacgccgcttgcgtatttgaagctaatgttaaatatatatctttga

SEQ ID NO: 16239 - DNA, 651 bp, Emericella nidulans
gccaagtcaaatgatgattccatcatggatgctagcacgctgatgaatccggactatatgcaaccactagttgcctctgaccttacagctttagtccagagcctcttcgatcgcgagaccatggcctggattcggcactctgctgccaagaagcttgcacaacggcaaagggatatcttgtcccgccgaagaaaccctctacaagacgaggctttatcatttgcatccagtgcgtatggtatagaacctagttatgcgatggctcgggtgtcagatcattctagacacgaggagaagcgtgcccgaattcaattggcaaaatgggcatcagacctgcaacaaagtcttcaaaacgaacgagaacgatatgcagcattggcaaggaacgagcgagctgtctggttgactgagcgcctaggagaatgtgttgtagatggttctcttgttccggtcacgcaaacgcccgggttctgcgggcttcacatgccgtccgacaagccgggtagaagtcttctcgtccaaaccagaagcggccagcgtgttgagtatcacattgctaacgtcagctcttttgaccccctcggagttgtgcggtggttggatgaccttaaacaacgaggttgggcaatcgttcagatcgtggggagtttc

SEQ ID NO: 16240 - DNA, 667 bp, Emericella nidulans
cagtcacgtactgaccctgagatcagatttctgaggaattggttcaaaatcgagttcttgccgctcgtcaatcaagtgaaacctatccttttgatcccgtcaagttcatccctcggtacctggccgagtaccagctctcatggggtatccgtggcgacaacaacccggaatatgccaagtacctgggttacctgttggccaaggatctgtaccctgaattccagcccatagacttcaaagactatcttatcgaagtcttccagggaacagcgaaaggaatctacacagaccgcaccatctccaaggcacaacagcgcatgttcccacgaagcgagtcgaccgattcgttgcagggtcgattcttcccgagaaccgaatccagcgactctctttatatgtcacgatagacgcacatccgtcgcaaatgcaggaacatttcacgaatattacgaggcgtgccagcaggtctcagtactttgtttttcagcatagaacaatttccttaccaaggtttcttggtacttgcttttcatttggctatccgtctctagattgcggcgtttggacatcacacgaggtctattgtatcagagatcttttatatacctgtggtattgcttcatttctttggtcatagatatatgcaatagggatcagacaaatcccc

SEQ ID NO: 16241 - DNA, 710 bp, Emericella nidulans
ttatcagtccaccaccctccccgccgcacggctgggtgatgcgccaggaggaccccccaaacaaggaggtccatgctagtgatcttgcgcaggcgctggcaaaattgaaaacgcagacggagggttctacctacgctacatctaccgtaccggcttctcagcagcagacggatccggatacaccgatgtctctttcgtccgacaagaggacggggagctggccgttgttgcagcagcgaagtaggagtagcacgcttatatataacccggaggagcacggcggcagccccaacctccccgctgtcatggtcgaagatacgagcgccgacccggatgatatggacgtggagatgagcccgattgatatgcctgtgaagcaaacgccgccgttcaagactgctcgaccgcctgttgagttgatggtttgattacttacgaccgggttcttgcttcatgtctggtccactgcaattgcattctaagcgtttgacttggagttggctgcttgttgatgtctgtattgttttttattttcgactattgtgattgcatcaggtttctctctttttctcaaacattcattgcgaggcgttcgggtgatagtttatcggcaatctattcatggcgatggcaataatgtgtgcatttacggttctaaaaaccagtactaggcatacgatgcttacttaaatataattctttagtatctg

SEQ ID NO: 16242 - DNA, 743 bp, Emericella nidulans
tccttgcaaaacatcctcgtcgacgccgtcaagtcccacttcgacaaggacgacgacaaagacgacctgaagccagctctctcccatgcctccgccaacgcttcctccgaagactccaatctcttctcacaagctctttcctttatcaaccagcgtaagtctgaaggtgtccaagatgacatcgacgaggagcaggctgtgaacgcccatcgacgctacgagcaaggcggaaacatggactcaaaggactttggtgctggcgcggcgttgcaggcgctgaagatgttcaattcaagctcaggccaggagacaggtggtggaaaggataagaatgcgttcattgggatggccatggcgcaagccgcgaagatgtgggaagagaaggctggaaaaggggaggctgtaagtttgcgtcctttctgtttactgttgcatcttcatgtgggtttgcgatgaatgtcattgtcagctaacgattgtgcgtgcagagcggagacaagcagtccgctattaaccaggcggcggaaatggcgttcaagatgtacttgaaaagtcagatgagtggaagtgagggcactggtggtcccggcgggctcatgagccttgctagcaagttcttgaaatgagctggctagagttgcagaacgatctgctggcattgttcggaacccggtatgtgattgggagttgctgcaatctatagttcattgcgctagcttttggtgtttttacatacgaagtca

SEQ ID NO: 16243 - DNA, 747 bp, Emericella nidulans
ccttgcaaaacatcctcgtcgacgccgtcaagtcccacttcgacaaggacgacgacaaagacgacctgaagccagctctctcccatgcctccgccaacgcttcctccgaagactccaatctcttctcacaagctctttcctttatcaaccagcgtaagtctgaaggtgtccaagatgacatcgacgaggagcaggctgtgaacgcccatcgacgctacgagcaaggcggaaacatggactcaaaggactttggtgctggcgcggcgttgcaggcgctgaagatgttcaattcaagctcaggccaggagacaggtggtggaaaggataagaatgcgttcattgggatggccatggcgcaagccgcgaagatgtgggaagagaaggctggaaaaggggaggctgtaagtttgcgtcctttctgtttactgttgcatcttcatgtgggtttgcgatgaatgtcattgtcagctaacgattgtgcgtgcagagcggagacaagcagtccgctattaaccaggcggcggaaatggcgttcaagatgtacttgaaaagtcagatgagtggaagtgagggcactggtggtcccggcgggctcatgagccttgctagcaagttcttgaaatgagctggctagagttgcagaacgatctgctggcattgttcggaacccggtatgtgattgggagttgctgcaatctatagttcattgcgctagcttttggtgtttttacatacgaagtcaattcg

SEQ ID NO: 16244 - DNA, 791 bp, Emericella nidulans
tccagcgacactatcgacaatgtgaagaccaagatccaggacaaggagggcatccctcctgaccagcagcgcttgatcttcgccggcaagcagctcgaggacggccgtaccctttccgactacaacattcagaaggaatccactctgcacctcgtgctccgtctgcgtggtggaatgcagatttgtaagttctttcgccacttgttggccaccggtcctgcgacatgctaacaatctggcagttgtcaagactcttaccggcaagaccatcactctcgaagtcgagtccagcgacaccatcgacaatgtgaagaccaagatccaggacaaggagggcatccctcctgaccagcagcgcttgatcttcgccggcaagcaactcgaggacggccgtacattgtctgactacaatatccagaaggaatctacccttcacttggtcctccgccttcgtggtggtatgcaaatattcgttaagaccctcaccggaaagacgatcacgttggaggtggaatcttcagatacaatcgacaatgtgaagtcgaagattcaggacaaggagggtattcctcctgaccagcagcgtctcatttttgccggaaagcagcttgaggatggacggacgctttctgattataacattcagaaagagtccacacttcacctcgtccttcgtcttcgtggtggtatgcagatctttgtcaagacacttactgggaagactatcacattagaagttgagagctcagacacgatcgacaatgttaagacgaaaatccaagacaaagagg

SEQ ID NO: 16245 - DNA, 804 bp, Emericella nidulans
cctatcatggattcccgaaagtttacttcacaaattcttctaccgcgacctgcaggatatcgccccttccggcggtctgtacactcagaccccaatggcgaacagcgagctatttgaccaaattcgtgaagggaaggcgcgctggttgcgtggtgacatcctctctgtcaaggaagaaggcatcttattcaacaagcgtagcaagggtgttccgcaaggcggtcctggccgcgaaaccgtgattccaggcgatgtgatcatccaggcaactggcttcaagcgtccttcgcttgctttccttcctgaagatgcgtttgaggagccatacggcccgcctagttggtaccttcaagttttccctccgtcgtaccccagcatttgcgccaacaacagtacatatgtcaacgcaatcggcactgttggtaatatgcatatcggcatctatactcggtttttactcatgttccttgttgaccccttgtcgcgccctaccgagggccgcatgaagacctggattgacttcacccgctttatgaaacgcctatctccagttggagcattcgacttctttacctatgccgagctgatctattggtttgtctttgtcattcttgtcaatccctttaggtggaaatgggcaccttttgtcttgttcggcatcgggagaggtctaccagcgcaagttgtaaagcaagaggaagctttccgcaatgccctaaggaagcagtacgcaacctaaactgccgagactcctagactcctagataggagatacttcgaacgatatcgaccaagctggatgaa

SEQ ID NO: 16246 - DNA, 818 bp, Emericella nidulans
gactaaccctgcccaactcagcaaagcaaccatctcatctcatctcatcccatccgttccgaacacagaataaccgaaccaatatgtcagaccccatcccctccgccacgacaaccaccacctccgaactcccttcagcctcagcggccgctgaagatcgcaaagccgccgccgccctctcctccttaaacaccacagaaatcacctccgaaaccgcagcgtcagaaaccaagcagccgtcctcagcagatcaggaggcgctgggtaaggcgatgagtcggttggagattgcggcagagggtacaaagagccatgctggttcaaaggggaagggcgagggtggaagtaagacaagtgaagctaagaagaaggctgctgctgttgcggctgtaaaggtctcgggggacgatgtgtctttgttggtatgttctcctgtggcttatattgctgaaaaggttggaattggaaggaagctgattggcttacttccccagatgaatgagctagaccttagtaaaatcaaagcgacggagcttttgaaagcgcatgagggggattcaaggaaggcaatccgggcgtttattaggccagcaactgctgtggcctaggtttatgttgcatttgcttgggcttcttgggttgctgggagtaggtcgtttggtatacagtactgccatactttcactggagttgtctcattgggttgagagagtcaacgggcttggctttgagtctggtgtttggttcattcttatactacggagctggtaaatgaagagctatgagttagttcttcgttctaactgatatttgattga

SEQ ID NO: 16247 - DNA, 831 bp, Emericella nidulans
gaacctttgttcgttgatgtgaaggatgcatgaggtcgaatatatcgcatttgagccttaagtcaggccgtggttaccaggatcgacctttctggcggagatggagaatcgtctccagccctggtcattgtctagcttgctaaagtgcgtacaatgatgaggaaccgaaaagcgtgaagattccacctgctttggtaccctcagctgccagggctctgtgcccttctggattgctggaaatcgaagacgaacagaatggttcactatggtcatctccgtgatcaacatacatcggtgcccgcctctatgagtgttaccttgtggatccgttaaggactgcatcgtgatgtttcgaggatcatgtgctaaacagctagtgtgctaatcatgtatccatgctgtgcgttgtttttgtctcatgtgagagtcgactttgcggtttcgtctaggaccacatcgccttgacactttgatttctgaaggccacgcttgcttttgaccatctctgatgaaggctgcagctggctagaccctttgttgaatttcgatgacggtgactcgctcctatttctctcagtcgcacatcgcagtcaatcgcgttaagtgttgctggacggttttagacctgccttatgaacaagcattaataaggcgtctttgttgcacttgatcttgtttagataccctttgggctgcatcattaggagttttatgatatcgtttggtttgggatatgagatttgtttttgaattttgcgtgcgtggcgtacattggcgtactgaattacttgactactcatccattagctattgaatggctgttgttaacca

SEQ ID NO: 16248 - DNA, 1103 bp, Emericella nidulans
cagcgtcttttcgtagctcacgaagacattctgtctcgatctccgtactttgatacggtgcttagggatcagttcccggccggaagcgtgaacaaggctttgattttgcccgacgagtatgtataaatgcccgtgtcagtttttataaatggcatatttaacgcaatgcagagagccagaagttatgtcctgcgttctcgagttcctgtataaaggtgactatactccgcgcctacaacccaaaaagggccggaagacatgggaactcgagagcttccaggacgccaaccacccgggcggcagcggcctgagccagtcgacgatctttcactctggagtgggagatctcgttctccgggatactgcagtgtactgcgcggccgagaagtatggtctcgaagggctcaaggaccttgctctgcgcaagcagggcttgcatactggtatcccaatcgagatcctactccggtctgcgcgatatgcgtacgataatacaccggactcagagtcccgtctgcgcgcccattacctggccatgatcattcggacccgcgacatcttcaagcgcagcggaaccatgcaactcgagatggaaatgggacacaagttcttctttgatctgttcgttgccatgtgtaatcatatggacgatcttggagagatgaggtactcttccgtatatacatatactcatattcagcgctaacattcaagctctcagctggaagtgatctctcccggaatctacatggtgcacaacattcagaaacagaaaatccaaaaaaaaaaaggagaaaagaattaatctctataccgaattcaaagcacatcatttacgccagattgccagaacaacatgcaactttttttccaactgaaatttgcgcttttccaagctggctgccggcatcggcgccatgaaagttgcctaattacttatttgcgtcgactgcaccacgcccattaatatctgttcactgctctggtctgtgttttgcgagttaaagagactgccaaccacctgcccactgttatttctgcacctttgtgtcatctccactctttgagtcgctcatggtacttaaccactgcctggtctgaag

SEQ ID NO: 16249 - DNA, 1353 bp, Emericella nidulans
cttagccctacctatctcaacgccatcacatacatacttccacaacaacctacgacacaatgcgcagcacactttcccgcacccccccactagtcgcgtcgctctcagcccgaccttctatgtcaatatcagcatcagcgtcagtgtcatcttcatggtctcgcgttcgctctccatacgctgtctcccgcttcacctacaaaacaacaacaaaacaacagacaccacaagagaccaaccacatccaagcgcgtgcacccgacatcaagaacctaagctctaagccgcggttccgcgaattcgacctcgaaggccgcgtctacgccatcaccgggggcggacggggtctcggtctcgctatggccgaagcgctcctcgaagccggagctaaaggtgagcattccctctattctctgagcacataagaggagataatcctaacgagccgaaaagtatattgcctcgaccgtctccaaaccccacacccagactttgaggccgccagatctcatgctgaatcggcctacggcggcagcctacactaccaccgcattgacgtgcgcaacgctgctgaaacaaacagcatctttgcaaagatcgcctctgagaactcgcgcctcgacggtctcatcgccgccgcaggcataaaccatctggaacccgctctctcgcacagccccgagaaactccacgaggtcatggacatcaattataacggcgtctttcatagtgccactgccgctgcgcgtcagatgttcaactaccagcaaaagggttccatcctgctcgtggcttccatgtctggccttatcgccaacaaggggatgacgagtcccgtttacaactcgagtaaggcggcagttgtgcagcttgctcgcaatttggcaatggagtgggggaggcatggcattcgggtgaactccttgtgtcctgggcacattgtcacgccgatggttgagatggtcttccagaaggagccggccgcgagggcagtttgggaggctgagaatatgctgggacgactggcgacgcccgaggagtttagaggcgcggcactatttgcgttgagtgatgcctcgagctttatgacagggagtacaatgctgattgatggggggcatacggcttggtgattttctatcctattctgtttgcatgggccttggcttgaaaataatgtaccatatcacacggcatcgtctcgtctgcttactacgtgggatggtcttggtatcactgagcgtttgaatgagcgttgtttcctgttgattcgtttgtctgttcagcccgggcacatacaggggttttggttgcattacagtgtaaaatagtaatccatctatttatctagtc

SEQ ID NO: 16250 - DNA, 1382 bp, Emericella nidulans
gccggtttataacccgtatgcgtggaactccaacgcttccgttatcttcttggaccagcccgtcaacgttggctactcttacagcggcagtactgtcagcgacactgttgctgctggaaaggacgtttacgccctgcttactctgttcttcaagcaatttcctgagtatgccgagcaggatttccacatcgctggagaatcctatgctggccactacattcctgtttttacttctgagatcctctctcaccagaagcgcaacatcaacctgaagtccgtcttaatcggcaacggcttgaccgacggtctcacccagtacgaatactaccgccccatggcctgtggcgagggtggctatcctgctgtgttggatgagagcagctgccgctccatggacaatgctcttggtcgatgccagtctatgattgagtcttgctacaacagtgagagtgcttgggtctgtgtccccgcctccatatactgtaacaacgccctcctcgctccttatcagcgcaccggacagaacgtgtacgacgttcggggcaagtgcgaggacgagagtaacctttgttacaaaggtatgggttacgtttccgaatatctgaacaagcctgaagtccgtgcggctgtcggtgccgaggttgatggttacgactcctgcaattttgacatcaaccgcaacttcctcttccatggtgactggatgaaaccttaccaccgccttgtccctggcattcttgagcagatacctgttctcatctatgctggtgatgccgatttcatctgcaactggctcggaaacaaggcctggactgaggcccttgaatggcctggccacaaggagttcgccgcagctcccatggaggatctaaagatcgtcgacaacgaacacactggcaagaagatcggccagatcaagacccatggcaacttcaccttcatgcgcctctatggtggcggccacatggttcccatggaccagcctgaggcatcccttgagttcttcaaccgctggttgggtggcgagtggttctaaatgagacgagccaaagcgccttaagtcagcggatcctctgagttgcttttagtgctttagaacatctttccttgctatagtcttttcctgttttctcaatgcgaagatgtttcctttcacgctcttgtccgctgcatatacggattaccactagtcttcatatctttcattattggttgtgatatcgcgttgacgtgcataatcagggtcatctctaatactgcacttcatcacattcgcaattccaatgcgcatagaggattgcaattctttgtcgacatggtgtagtctcaacgggactggtatggagtttatataatacagacagcttcttccttaggagtgc

SEQ ID NO: 16251 - DNA, 1463 bp, Emericella nidulans
cactccaaacgccatatccttgaatctacgcttgctggcctcgctacaaaccgtgtcgtcaatggatcacgctctcgttcgagatctcgtaaacgctctcgctcccgttcccgctccaagggccgaggcaaggccaaggacgccgccattgcgggcatcctagctgctgcagggaaggaggcctacgatcggttccaaaagtcccattcccgatctcggcctcgtcaccgctccaactctagagatagctacgacagttacgggtctcgtcctcgccacaagcggagcaagagcgtttctgactatatcaacaaaggtatggcagctctgggcctcgacgataagagtgaccggagcgacaaggatgatcggcgccgtcgtcaccaccgatcttcacggtacgatgattactcggatgatggctacagtagtgacgaatattatcgccgccatccgagcccgccgcggacaaggcattccagagatgtgagtcgagcttattacctccccgagccgggagccagagccgaagggaactacgatcagacgaccgtggggcactactcgcgccctggctcccaaagcacaagcacacaagaccaatcacgcgatacaaagcagattgattctgacacggatgacagtaccgatgatcgcaagaaactcagcaaacttaatcgggagacactatgggctaccggcctcgcggccgcggcaactatccacgcagctcattccctaaccgaaagcatggaaaaacacaaagaacgcgcaaagcaggtgagagagggtgagatgtcaagagaggaggcccgccaccgccgacgaaagaaccagctctccgacatcgccagtgtcggggttgccgccctgggtatcaactccgccatagcagaatggagaaacttcgaccacaaacgccgtgagcgagctgagatgcataaagtctgtaaagaacgctccaagtcaatgtcgaagggccattcccgctccaactcgcgctcccattttgattcgtattcccgcccacaacgcacccagagcttaaaccaccaaacgccaaggacgatctatcctgacgaagttgaagagaattggtccgtttctgacagacgctccatgcgtgggcggtctcctggcgtgatgatctaactgcattttaaatacctttcatgcgttctttctcttcttgcaactgtctgatattacatgattttgaccatgactcatgatcccatgactcttacatgaaaaatgaattgtgaatgacccgccacgaccacgaacgaccttactgaccttatgacatttatgttgaacctttctacagactgtcattaatacaacctgacttctgttacaatcttgtgttccatgctcttgcgtccattgattccgggttgatttcttgtgcttctataatgcttctgtattgccatacatgataaatgctttgaaagcga

SEQ ID NO: 16252 - DNA, 200 bp, Emericella nidulans
tcccgacagtgcatgtttacgacggtaaggatccacggtggccagcagggatccagttagcggagttttgtgctgacagggtggagtttgatcatgaaggcgggcatgatattccgcgggggtcagtggtctcagagagaattggaggtatgattcaggatctattgagaagggtctagctacctacagcagtaaatttt

SEQ ID NO: 16253 - DNA, 200 bp, Emericella nidulans
gtgcgttggggcttcacgaacgccgctggacgtggtaagctttctcgaccgcattaactggtataggtgagcagaagtcggcgtaatcactaagacggcaatgtacctccacggcctcgagttgtatacgctcggacgcatagtcgaagttcttagcgataacgacatccgctacagttcctggctcgctgcgcagtgtg

SEQ ID NO: 16254 - DNA, 207 bp, Emericella nidulans
atcccggcctgttctttgctattatatccttattcctattttttctttaccgttacagagcttttttccatcctagatttgttacatgcattttgggcgttagggttgtctctttagctttatttctgtgcacgttgtgctatcatttttttttcaacatgttgatgaattgcatcgtccctgcatcaatttcaaatatcatctttc

SEQ ID NO: 16255 - DNA, 219 bp, Emericella nidulans
tcgggagcaggtgtggttggcgctgggttggcggcctatggcgtttttgctttaaacatttttgctgaccgtcggctgagttgcgggagtcgcagtcatgggctggctatttgataaacgttttgattcctcaaatgtgtcctctttatacctttcttatcgggtcatgtgttcttatatttgtcccgtaccgcttgggtacataggtgggaaggacca

SEQ ID NO: 16256 - DNA, 230 bp, Emericella nidulans
cggtgaagaactcggcctcaacatgcacgtatacgggcctgaaatgcacgtcagtggtatcgtgcctcttgccctccaaggcaaacaaactgatatcaaggagctttgctactgcgtaaacaaaaacggggcgttttctgatctactaaatttaattctatacgaggttccttctcaactaacggcataacggctttctttgcatcattttgttttcttttcttagtaaa

SEQ ID NO: 16257 - DNA, 238 bp, Emericella nidulans
cgacgagcgtgttcgacgacatgatcctccccgaaattctgagtcaataatcgatagaactcaccattttgatgtggttgccgggtggtcctcgatgtcgggagagaagattgtcgtttgcgtcgtcggccgtcaaactttggagatcgcgagagtcgctcgttgtggtgcggctttcgctcttggcatgggtgccctaagcgagccctaactagctctttctggtcaccgcccaccg

SEQ ID NO: 16258 - DNA, 242 bp, Emericella nidulans
cgattgaggtcatgcgcgagtcacgaccaccagcaaactatcacctccacgacccgcaaccttaagaaaaggcacgcctatcaaccttcgcttctttcctgtatataatttgtctgctaccccgagccctgttcctttgttgtttgtcatgctgttacgactagacccgattttccctgaatagattatctcttcggagttggaagtacacggataccacaatatcatcattgtttggcccg

SEQ ID NO: 16259 - DNA, 246 bp, Emericella nidulans
cctcgcacatctgccaaatggaagcctcactctacctttgcgaccgagatggtatgactgagaaaaatgcgagtacaaccgtggaaagcgctgcctaaggaatacagcaaggatgtcccttccttgctcgttcgattcagttctgttttggaaacatcttacatccgccccgagtacgcatttgcaggttgggactagctttcacagaggatcgtaatagctatgggaaatagcaatgcctacatt

SEQ ID NO: 16260 - DNA, 247 bp, Emericella nidulans
ccagcggcaagagtcaagggaaattaacattccattattgaatgatgcagtagtgtgataattccaaagtggctctccattaatttaaggggcaatggagagagaagaagagtaaatgtaggcattgctatttcccatagctattacgatcctctgtgaaagctagtcccaacctgcaaatgcgtactcggggcggatgtaagatgtttccaaaacagaactgaatcgaacgagcaaggaagggaca

SEQ ID NO: 16261 - DNA, 256 bp, Emericella nidulans
tcgtttctgggtctcgggatcgacaaaatgatcatagatctttgggatcgggacgttgctgttgcagctacgaacttcatattctctgcctctagcggcgcgatggaggtgcccactttgaccgcgaagcgctctcttactcggatgacctttactgatctactgggtcgtgagaatattggttgattcttcaatcttggcgacgcttgggaagcgaattctctcgtcagccattctgtcaatggatagagatgtg

SEQ ID NO: 16262 - DNA, 258 bp, Emericella nidulans
aggtcgaaatacttcaacttgagaatgcccttcgtcgcgcccggactcgtctgggagaaatgcgcaagatttcctatcaggaggattagatcaccggcccatgaatccgaagtagtggtggtgcagaatattatattgactcctggcagctccagtatttggacacagtgtctctcgttatgctttcatttccttctctactgtactttttacgttcatttcattttggctgttttccactatggcttgttataccac

SEQ ID NO: 16263 - DNA, 261 bp, Emericella nidulans
tcgctgatcgtgattttgctcaggttatgggttgtctaggtaccaagtgatcttcgccctggcttttcggatgagcgattacggcttattctgagatgtctactgtgtttgagaatgtatgttcggcttttgctcatgcagcaatacttgtctcgttgccgtttgggctggtctggtctgcatccctggctactatgttagccttcgcttctttggactcttggatagttcaaatccactagcatatggactcagaaagca

SEQ ID NO: 16264 - DNA, 294 bp, Emericella nidulans
tcgctggtaagcagctcgaggatggacgtacgctctcggattataatatccagaaggagagtactctccacctggtcctccgtctccgcggcggcaattaatgactctctttgatttcgatcttacggctcatctacgggttagccaacctgcgcggcgttggatgggtttcttattcttcacggttaatctgggcaagccttataccttctttgttgcctcacatgtcaccttgacggtgttatgatagttctatcctttatctactgaatgaaacacatagactgtttcttg

SEQ ID NO: 16265 - DNA, 295 bp, Emericella nidulans
catcaagtctggtgatgctgctatcgtcaagatgattccttccaagcccatgtgtgtcgagtctttcaccgactaccctccctttggtcgtttcgccgtccgtgacatgcgccagaccgttgctgtcggtgtcgtcaagagcgtcgagaagtccaccgctggtgctggtaaggtcaccaaggccgcccagaaggctggtaagaaataagcggacattcgatttatgccgttatgacttccttaaaaaagcctttacgaatgaaagaaatggaattagacttgttatgtagttgat

SEQ ID NO: 16266 - DNA, 297 bp, Emericella nidulans
ggaatcccgccagaccagcagcgtcttatcttcgctggtaagcagctcgaggatggacgtacgctctcggattataatatccagaaggagagtactctccacctggtcctccgtctccgcggcggcaattaatgactctctttgatttcgatcttacggctcatctacgggttagccaacctgcgcggcgttggatgggtttcttattcttcacggttaatctgggcaagccttataccttctttgttgcctcacatgtcaccttgacggtgttatgatagttctatcctttatcta

SEQ ID NO: 16267 - DNA, 297 bp, Emericella nidulans; identical to SEQ ID NO: 16266

SEQ ID NO: 16268 - DNA, 297 bp, Emericella nidulans; identical to SEQ ID NO: 16266

SEQ ID NO: 16269 - DNA, 300 bp, Emericella nidulans
ggaatcccgccagaccagcagcgtcttatcttcgctggtaagcagctcgaggatggacgtacgctctcggattataatatccagaaggagagtactctccacctggtcctccgtctccgcggcggcaattaatgactctctttgatttcgatcttacggctcatctacgggttagccaacctgcgcggcgttggatgggtttcttattcttcacggttaatctgggcaagccttataccttctttgttgcctcacatgtcaccttgacggtgttatgatagttctatcctttatctactg

SEQ ID NO: 16270 - DNA, 300 bp, Emericella nidulans; identical to SEQ ID NO: 16269

SEQ ID NO: 16271 - DNA, 301 bp, Emericella nidulans
tcgtgacgacgagccggttttccggtggcgaacaagttagagagccacacgcggtcacgtacgccatgacagtcacgctgggctcgagaagtaccgaagcgcgggctactttgactcagggagttgctggtatgttcctatttcatcgggtttgcgacttaatcatatgctaactgagtctaggagttttgacatctctagagagactggcgaaaacatcggctaatcaaggtgttgtgttgtagaccacttagaacacattgtgattgcctacaaatatcgataatagcatctttatgta

SEQ ID NO: 16272 - DNA, 316 bp, Emericella nidulans
cctttctcgtcattttgggctggataatgaatgtggagatgacactacatttccatatttttgaaacccgtggcatttttcatctcggggctggttgtcgccttccttatccaagacggcaagtcgaactatcttgaaggctgcttgtgcctgggaatgtaagtactattctattattctaaagatttcgctgactggtataggtacttgattttggcgctggcgttctacgtgtatccagacaacgtgaatgaggatgcgcttttccacgccttgaaatagtggcacttctcgaaccctgctctttccgcaggca

SEQ ID NO: 16273 - DNA, 330 bp, Emericella nidulans
tagatccgaaggagaagtcaaaagttggaggttggttcggcgcgaatgcggtgccgcagttggaagacatgattcaacttaagacattagatccggcactgctgccggccagggaggcgaaggaggatgatagtaagcatagctcaaggagattagttattgttgcggatgcgcacgggtgcaaggaggagtgtgcgtataccccagtctctttacccattattttggtggcgctgacatctaggcaaacagtggaaaaactcctcgacaaagtctccttccaggaagaacgcgaccacctaatcttaccggcgatctcattgaaaaggg

SEQ ID NO: 16274 - DNA, 332 bp, Emericella nidulans
cctcggcgctcaggttgtcatgagagactggagcgaattccctgaatgcctcaagaagatcgaaggcgaggatgcttccgtcgcttctctttaagttgctttccaagtttcggttctacacgatgtcacgacagcgggcgcatttcctttcttcaatttcgggtatttcatttcagttttctgaagattactctacaaacatgctcccgcactttgcttttaccaaccgcgggagacggtcccgctctcctttttgcggccaagtcttagcagggagcatatctgcgctcggccttttacatccagattctttcgggtgggtagacgaatta

SEQ ID NO: 16275 - DNA, 337 bp, Emericella nidulans
gccaagtataatcatcgttactaaggggtctgctgagctggttgtcgagaaagagacgaaattggaggcccatgaggggtcagtatggtttgttggtgccggtgtaccgctggatattctgtccaaggagggggcggacgtgtatagggcctatgcggagtaacggccacaacactgcaaaggacggttatgaggtgatttgatggataatttgcatgtacagactacagaatacgagagtacaagattgattgcaggatgtctacgtacatcggccgaaatactgtagctcgatccatgtccaacagcgctaaatcgaaacaagctaattatccca

SEQ ID NO: 16276 - DNA, 338 bp, Emericella nidulans
cagcgccctcacgtcatcgttctcgacgaaccctccaattacctcgaccgtgactcccttggcgccctttccaaggctctgaaggccttcgagggtggtgtcattatcatcactcactctgccgagttcactcagaaccttaccgaggaagtctgggctgtcttggacggaaagatgactccttccggtcacaactgggttactggtcagggaagcggtcctcgtttggaggagaaggagggtcctgatgagattgtcgatgctatgggtaacaagatcaaggttgagaagaaggtcaagttgagctctggtgacaagcgaaaacagaggaaggagcg

SEQ ID NO: 16277 - DNA, 345 bp, Emericella nidulans
ctgacaatcagtctacaataggcgttaagtcatttgacgtgaacctttattctcagacagcatgcgttgtcaccgatgcctctgtgccgtacgagacggttctcgcgacaatcaagaagactgggaagaccgtgaatgccggagaagctgacggcgaggccaaggatgtttgaataatatgattgcctagatataacagtgggatccgacagctatgatagattgggtgaaactgtttaattagcgatcgatatggtcatattcgtgaagctatgacaggaggcatacacacgccacacacaatcatagggtatattgcacttgataaaaggatgttttcttgta

SEQ ID NO: 16278 - DNA, 350 bp, Emericella nidulans
tcgcggcggagaagaaggtgacgagcaagttgcttgagcaagacacatctgcagagaagctttacacattgaacgagtacgtattgtctttgggttttaggatttgaggcgttcatcatcggctgatttgcttgcagtaacatgatttgtgctgtcgccggtatgaccgccgatgcgaacatcctgattaattatgctcgacaagcagcccaacgctaccttattacctatggcgaagaaattccttgcgagcaactcgtccgcagactctgcgacttgaagcagggttacacccagcacggtggtctccgtccgttcggtgtttcgtttatctacgccggctacgatca

SEQ ID NO: 16279 - DNA, 357 bp, Emericella nidulans
gcccatggcccctctaccttttacaaaagtgagctccccatcaagtcgcagttggagatcaatgtcagtatccgctctagtgcaagaagtggctaacacagctacagtgaagatgggtgcgctgatgggatcaagtaagtagctctttctcctggcttggtcgacgaaatcgctaataactttacttgcagctgttggcggtatcatgggattcatcatcggttagtcctttgatatatcggtcctagcggagtactcatcgggattgcaggaactgtcaccatctttcaatatggtgctggacctaacggcgttatgcgaacactcggcaaatacatggttggctctggagcgaca

SEQ ID NO: 16280 - DNA, 372 bp, Emericella nidulans
tcgacctcaacagccgcacagagacaagatgaccaagcgcactaagagtgagtatagccacggaatttttgttgaccttttgaacagaaaaattgaaaacagaagctgacttgcttcgcagaggtcggtatcaccggtaaatatggtaccaggtatgctttagccagaaaccctcccacgactccggattgaatcgagcacgactttttcgttcacatcacggcgaaatttggcgcttcgataatcaaacaacaagcgattggacatttgattgactatggttcgacaatagatacggtgcctccctgcgtaggcaggtgaagaattgggaaagtgtcccagcacgcccgctacgtctgcaccttctgcgga

SEQ ID NO: 16281 - DNA, 377 bp, Emericella nidulans
tgcgagcaaatactgataccaaatgctacaggtaacggcaccaagacccccggtcccggagcccagtctgcccttcgtgtctcgcccgttccggtatgagaatcggtcgtattgaggacgtcacccctactccttccgactctactcgtcgcaagggtggtcgccgcggtcgtcgtctgtaggtatgtgcgagtctgcagcgcgcatctatttgtcttgtattccggttggcagagttatttacgccatgtggctggactttatgggacatggatttgctagctaggcttattacctgctgaatgtggatggaataaacgcgaagaacggcaattttgcctggtcttcaacttatcatgtccaatatatgataaaaa

SEQ ID NO: 16282 - DNA, 380 bp, Emericella nidulans
aggaacataaaataattcttatccaccaacagcacatttgtctattcctctttacacagatcaaaccacagaccaactacagggacaagccaaccccaacactacacagtgttgccagcaagccggcgctgcgggtaccacatcaggaagcagtagcaccagcaacaccggtcctgcgatgacgaccagctttgcgcagagcagctttcccttcgctatggatgcacagggttagcgtttgagcaaagaggaggcggatcggctctatgaagaacgtatggaggacgagtatgcaaagagagaaggcggcgcttaggtcacatttactctgtctttacagttgctttgatgagtatgctaggcctgcttcacaaaggact

SEQ ID NO: 16283 - DNA, 380 bp, Emericella nidulans
gctggccggcggcttacatatgagatccacttagtgatcgaccgatccataccacctgcactcaacctgagctcaccatgattgtctgcgaaaaatgcattggcatggcacagacgaagccgacatatcagtactcgtggcaagtgcctggcggagggtgggagcggtgtgagattgacggatgctgggcgtatatgaggaagggagacggtgtagttattcccggttaattttcttaaggattttcggggcaactgagtgtggctatctgaactatgtctcaacgccatgggtggttgtggggggtctctctgtaccctgaacaatgaaatcgtgcatcctgtatagtctcatcaagcggagtgcaggtaacgatctct

SEQ ID NO: 16284 - DNA, 382 bp, Emericella nidulans
ggtcatgatgaccggccgttgtacaacggaatcgagcctgatagtgaatcctatcctggaggaatgcagcgcaggccgtcctatggaaagatcttctcttctcgatggccccgaccagatggcttataagcgggccaacgggcggatggtctcaaagcctgccaccatgcgttaaaagaattctgccggcgtttatttgtcatagttcttggcgggttctggtatagggaacggcgtactggcgaaaagatcatgcttttgacaatcagtttcttgcggcctgaaataaggctcctttgatttatactcccacattaaaggtccaacgttataccttgctcttactcttcgaaagttgtatatgatcctgcctatacgttcg

SEQ ID NO: 16285 - DNA, 389 bp, Emericella nidulans
atgctagctagacggatacatagcgagattgagaaacaacatgcaactgccgttgctgggtaataatagtaaacagtaaatgctccagacaggctaaataaccctgagggtaatggagaccagcaaaagggtatcaaagtgtccggagactggggtatcatagaatttttttgagaatggtttgttgtttcaaatcagaacaggtagaagtgaccgcccggtgagctggacaggtcggtttgaaaagaagcgaagcgacggattaaaggcgtagaatgtgatgtcgaatagaagatgaaagtgagagatggtgatctgacagaggaaaacgaatgagtgagaatgaaggaaatcagagaacttttggtggtcgtaaatcgtcgtgatca

SEQ ID NO: 16286 - DNA, 390 bp, Emericella nidulans
ggtcaggacggtgcagaacaggaatgtacgatctgcatggaagagtacgaagtcgggcagtcgctggtccgcctagagtgtctctgtaagttccataagaggtgtattgtggagtggtttgaacggaagagagagtgcccgtacacaaaacatcctagcagcctctcgctgtccatgtttgtgcttgtgcggtgcatgcacgttgacttcaccttggtcttttggctacatgatcccctttacgtttcagcaggcgttttcttttgattgctttgacagagcctctcccttgacagtttcttttctgctctccaagttggcgtttcagatgggcgtggcatattcggcatttgattgcactcagttaacgaagaattatcgcattagaca

SEQ ID NO: 16287 - DNA, 393 bp, Emericella nidulans
gccggccttgacgatgaggacggctccatgaaactgcgccgcatgatctatatatttgacagcatgtcagccgtcgaattggacagcgacggcaagatctttgacacacagccgagccgaatggttcgtattgcccatggtagcggcacttcagtgcgcgaagttgaggatctcctgtcacaacaccgcatgatggccgggatggcgaagcgtgtcggtggccagaagaagcaaatgcaacgagcacagaatatgctcaagggtggcaacaaggatcaacagcttgctgctatgcagaagcggatggcctcgatgggtggagctggtggcatgggcggcatgcccggaatgggcgatatggcgaagatgatgcagatgctgcagggccaaggc

SEQ ID NO: 16288 - DNA, 395 bp, Emericella nidulans
cgctcaagtaaccggcgcaactgacttcaatgttctccaaaacaatggtcgtattgcgcaccaggttgttgatcatgtatgttgcacagctccatcaccactgtactgtcctaatcgtttccaaaaacctaatgaacgcttttgcaggtccacttccacatggtacgttcagctactggtattcatttcactgtactaaaccttacttttacagatccccaagcccaacgaggaggaaggccttggaattggatggcctgctcaggcaacagacatggacaagctcaaggagtactacgagtcgatcaaggctaagatgtgaagtggcagcctgcgcattcttgtacatgtgggcatgcgtatcctgtaggtacttgagtctatgtgcccgggag

SEQ ID NO: 16289 - DNA, 395 bp, Emericella nidulans; identical to SEQ ID NO: 16288

SEQ ID NO: 16290 - DNA, 397 bp, Emericella nidulans
gcgaatctctcgcccagcaaattctctgtaacgtgttccgataggcagcttcctcagaatcaagcattcgagatttggatcttcccgcgcgcgcttggattccacggtgggtataacttgacattgagcgcttggctaatcgccggagttgaactccggctcaatcgcagattcgaacagacgcagcagtcccccattttgcaaaaggatctcaatcaaaagtactatgggcttgtttcctcattttctgggcgcgacccgcaagagtgtctggatgctgagactgagctccggaaaaggaatggcaggattggcaatggtgacagaagtaaccccccgtctcttcccagctgtaagcctgatgtctgacaggtttgacaggtggctcgccgttggt

SEQ ID NO: 16291 - DNA, 397 bp, Emericella nidulans
cgcttcccaatgcttcaataacggcgcaaacccgtccacacacttaagacgtcaagaacctcctctacataaagccatgtcgctcacggagtccgtggcggcaatggcgactcccattactgttgcgacccatcatggaacaaacaatggaacggccgatgatggacccggacggaaatgggacgatcaactcaagggagacctatatacacagctcgtcatcagcttggcgttaggaataactgcgtttctatctttttgtgtacgtggaatcctttgcgtgaatacaacctcggtgcgcaaaggactaagctaataatgattcgtgaggtagtttttgcggcccaaatggacagagttatacgcggctcgaaggcgacaacgtcgcgccgcacta

SEQ ID NO: 16292 - DNA, 412 bp, Emericella nidulans
tctctcgcggcgcagcaaattcagcttcgattatgttaaaacgaatacaaagcctggttgctttgacgtctcacttgagcaagctcgccttgttttctcgttgttttcccgttgctttcttcctgtccctgaatttggataaaagtatcggagcgatgtccgacctgttactttatccgcgtttgtttgtccccagcctggacacgccaatatggctgtcgaggtgttggtattctcacaccatttatttcttttcttcatctgttgcgaaccttcagagttttttatgtttcctcatgacccaaacaatgtacccctccctttcgccctcgactgactgttacccttggcgacgattgatttatgtgttttattagtgatgtggccatgaactcgactcggctgaaggccg

SEQ ID NO: 16293 - DNA, 417 bp, Emericella nidulans
tttgcaagcgggttggggtgagttgcgctctatggccgtatctgatccggaaaccggacgcactctgatttgacctctggacttgcagcgcctgtgcagccggtctagctcgactgatcaacgcctccatccactaccacaatacagatactttttgggtccaggggcgaaatgcagagttctcgtacgttgcaagacaacgaaccctcagtccacagccccagccgcagtgctaacaatcattcgcagaatagtcgagatgaacgttgccattattgttgcgtgcgcgacctccctgcccacattctttacccaggtgcgctcactcggcgggtcaatctacgactcggccgtgtctctgctacatatttctcgggagtcggcgtcaaagaggacttcaggctctctaacggagga

SEQ ID NO: 16294 - DNA, 435 bp, Emericella nidulans
cggccctgggaagaaggtcacagccaaggacgtgctcctcccaggtaccgaaatggttgccgcgggcttcaccatgtacggcgcctcagcccaactcgtcatcacgatgaagaacggcggcgtcaatggattcactctcgagaactctctgggcgagttcatcctcacacaccccaacatgaagttgccccccagccgcgcgatctactccgtcaacgagggtaacagcatgtactgggacgactggtgcaacgcctactttgactctcttaagcgtcccggtgagggcaagaagccctacagcgcgcgttatatcggttccatggttgcagacgcttaccgtactctgctctacggtggagtcttcgcttacccggccgactcgaagagccccaagggcaagctgcgtatcctgtacgagtgtgcgcccatggc

SEQ ID NO: 16295 - DNA, 447 bp, Emericella nidulans
cgctatcaacgggttgggttggtatgtctcagtcaatcctaggcaactggtacaatacgctaaaacactcatagttcttcttgcctttgttgtctgcggtggacttgtatttgagttgctgaggatcgttccacaattgtggtccgcaatcgcgtctgttttcaaccgactgctggcgtagatgctcctttctctcagactggctctgcgaagcaacagctggcttataaaattatttatgcatttgcacctctatgccttgttaggggtgaaataaatgctactctccgaaagaccggcaaatatccagccgtcactatgactgagccctacgtgaacagaggcgggtcggacccttgaacctctgaagcccagctgagtacaaggaaggcatcgattaaaaatggcatatcttgaaagtaaactctgtgtatatttgtcttctca

SEQ ID NO: 16296 - DNA, 448 bp, Emericella nidulans
ctctggcggccccgtcactatccgctctgagggcattgtccccctggtcaccgaaaagtccgtgaccggctcgctgtcctacagctccaacgaactgaccatcgatgtcgacggtgctgaggctgccaagatcgagactgtcggggctcagctttccaagctctccaagcgcaccagggtgtcctcctgctcgggcactcgtgctaccgcgctccagacagcccttcggaacgctgcttctctcgcttcccgtgccgccagtgcggccagccagggaggctcaaccttcacaactttcttcaagagtgactcttcctctacacggaacgccgtcgctgctcgcctccgcgccgttgcatccgagtcctccagtacctctagcggatccactacgtactattgtactgatgtgtacgggtactgcagcagcaatgtccttgcttacacg

SEQ ID NO: 16297 - DNA, 448 bp, Emericella nidulans; identical to SEQ ID NO: 16296

SEQ ID NO: 16298 - DNA, 450 bp, Emericella nidulans
ccgccaacgctcgcagaactccctcaacccccagcggggcgaacagtcacggtcagcacaagtccagcgttcccaccacgctcgacgtggacgaaacatgggatgattgggatagcacaccgcagccgactaaaaaatcgcatactccctcttcgagccgctccactatcgagtcgaggcaggaccagtcgcctgtcactcaagcgagtagtccacgaacaagcaccaggtaggttggctgtagatttaagctgtgagagtgaagtaatcattctctcgatgcttaccttttcatgtgcatttctaacttacaatcccagcttcggcgactggcaccacgacatccccgaccccagcgtctcagacggcattccctggcctgctctaacacaagccgcgccttccaaactcaaccgaacagcctcgaatctcatggcagaatgggagcgc

SEQ ID NO: 16299 - DNA, 456 bp, Emericella nidulans
ttaccgttgaggacagtatttctggtgctctgagtgcaattcgcgccaagattgcagtcattggctacgtcggcagctacaccactcaggagaagcaggaagaaatggccaagcgtctcactgacctcggcgctcaggttgtcatgagagactggagcgaattccctgaatgcctcaagaagatcgaaggcgaggatgcttccgtcgcttctctttaagttgctttccaagtttcggttctacacgatgtcacgacagcgggcgcatttcctttcttcaatttcgggtatttcatttcagttttctgaagattactctacaaacatgctcccgcactttgcttttaccaaccgcgggagacggtcccgctctcctttttgcggccaagtcttagcagggagcatatctgcgctcggccttttacatccagattctttcgggtgggtagacgaatta

SEQ ID NO: 16300 - DNA, 461 bp, Emericella nidulans
tcgcgaccgtattgtcgaggcccgggaagaactgcaacgcatgtgaacgaggatgagctccgtgatgcccttttgcttgttttcgccaacaagcaagatttgcccgtacgcaccaccttgacctggtcgataaacattagatgctgattcgaattttcctagaacgccatgagccccgccgagatcacccagcagctcggtcttcagagcctcactcgtcgcccctgggtaagttgacccgatcattctggtttatcatcgatatctaacacatttctagtacatccaatctacctgcgccaccaccggagacggtctgtacgaaggacttgaatggcttgccgagacgctgcggaagactggccgcgactaattgcggtagttgtgatgaatggatagatacctgaacttttgactgggagttggggatgatggatggggaactgggggccgacggacac

SEQ ID NO: 16301 - DNA, 465 bp, Emericella nidulans
ccatccgaccaacactctggctctgagaacaattcatccgctcaggacacaattgacaccactaaaccgctttccccgcacccaggcaccatcaacccaaacgtcgacgacttcctctcaacttggaactttgtctacacgcctgagcagattgatgcggttgtgggactggctaaggcgaactttgcgcagggcgagcagcaggttaagcgggttgttcgggcagtttatgagcggaagaagaaggatcgcttgcagagggaggaaagaatgcatggtccgcataagacggggctggtgctgagttgattagataacttgccattcggttgagctttcctcttcttttctttgttgcatcattagcggtttgacctggacataatgtacggactttacgatatatgatagatttagacataaagcagacatgcctaccccttgccataatatattgctagggaa

SEQ ID NO: 16302 - DNA, 477 bp, Emericella nidulans
agggctcggcgtcctcaatgtcatctactactctggatctccgaaagcgttgttcggaccatacccgatcgaagacaaacattttttccttctattttctgcgatttatattcttgggatcttcgtgatgtttgacgccctacttttttgaccttttgttgcatttgggttggacctgacgaatgggcgagggacggcaactgtgttacgattaactgatgaaacgactgacatggtttatgaaccgaaatgtccttttaatgtctgatgatacttctttactttttattcttcctgtttctggacagcggggctgccacactgggtggtcttttcatttttaccctaccttccttctctgatcttcatcattttcctttgtttgtcattatatactccgacagggtcaccctttgctttgctttgctttttctttttttttctgcaccggaaaaccaatccggcctgctcgcctct

SEQ ID NO: 16303 - DNA, 478 bp, Emericella nidulans
acgacgactccgtgcgcaaagcccaaaccaaggccagaaccagccgtctagcttcacctcgcgaaacggcttctcgatatcgtctacctcaacctcctcgcactcgccgtcgaactcgcagtctcaatcacccctgcaagtccagcagacccagagccggctctcatcccttgcctcgctcctcccctaccgccgtcccagcacagcgtcctcccagccgcagtcgcagtcacaaccaccggcatcgccgggagcgcaacaatgccagctggctccgttcactcaatccccgcctccgctctcacaaccgcgcaccgacactccaacaccacgcccctcctttgaagaaaccctcgagcttcagaacgcgctgaaccgcgagcagagcctccgcaaggcagcagagaccaacttacgcaggcaagcaccgagctggaagaattgacggcgcacgtgtttagccaggcgaatgaaatgg

SEQ ID NO: 16304 - DNA, 484 bp, Emericella nidulans
tgatcatgccgaatatctgggcttttacacacgacgcctctcactataaagacccggcgaccttcaatccgtctcgcttcctaggcgacactcccgagccagatccgtctactctgacgttcgggttcggacgaaggatttgtccgggccggctcctcgctgattcgagtattttcttgaccattgcgcaatcgttggctgtcttcgagatatcgagtgctggagaggacgcagcgaaggcggagtttctgccgggcgtcatcagccatcccgtgccatacaggctggatatccggcctcggagtaaagggcacgaggatctggtcaagagaatcgcggcggagagtccgtttggagaaggaggtgcaaaggagctggaagagattgttgtgtagcataagggcaatggtatgggcaatgaattcctcaacgaagcgctagtcggtttcttacagggtagagaacgagagatcttttcaagagt

SEQ ID NO: 16305 - DNA, 500 bp, Emericella nidulans
gtacgccgccctgtccgatgccttcatggccgcatgatggcgcagtcaagcccgaacccgctgccgaagaggaggctgctgaggatgaggagattgagaagttcgaccgtactgaagcccctgcccctcaccccgaggacgatgtgagctctgaagctgattctgcagtcgaagagcttccctcgatcagacaggttcgcagcaaggcctcggcccgatcgttcgcttctcacaagtcgcataaatcactctatgagggcaacccttacgatattgaccgcgtgaacacgcgcgagtcctttggaggaaaatagagttcagcacttggtctccttacttataccccgatacatatagtctttagtctgcatctttgcattgcttttgcgctttacccatttaatgtgtccatgtgtgatgcgatggaagcgaaaagtcattttgtctctctgcattgttgatatataccctgcatgatttgttgcatatagacagtgatt

SEQ ID NO: 16306 - DNA, 524 bp, Emericella nidulans
cggttacccgtctcaaccggactatattggccgtccagcagtattacccaaatatcaacatcgaggtgttcatccataaagtagacgggctgtcagacgaatttcgcacagatacattccaagatatcgtccagctcatttctgatgagctcagcgacgccggttacgaaaacgctccggttcactactacttgacctcaatttacgactattcggtcttcgaagctttcagcaaagtgatccagaaactcatccctaacctgtctactctggaaaacctgataaacaccttatccaacaattgcggctttgagaagagttatctgtttgacgtcctgagcaagatttatattgcctctgatacccgccccgttgacatgtcgtgttacgagatgtgctcggattatatcgacgtgatagtggacatttccgagctctactcctgggatcaccctgaccgcaagcccaaaggcgaacaaaaccaggaagctgaaagctacgttgcacttcatgacgaaaccatg

SEQ ID NO: 16307 - DNA, 535 bp, Emericella nidulans
ttcaatccacaagaaccatacaaaatggtgtgtacattcctaaacattggtattctatgctagctaattgctaacgttgcggttcaacccagttctctcagaccctccgccgtgccgcagctcagtctgtccggtcatctcctcttgccggaaggtgagaactccccgggcgaagctatgccacacatactgtctataccttccctgtctacctacctacctatattcttgatgtgatacttctgcggcagactactgggtatctgtgacaatcaatttagccgttgaacacggacaaaagcacgcaccaagcggcaaactaactacacaacccaacgcgacgagaaccacaagccccatgctacgtaactaactcgaatcaaacacacaggttcaccccctcccctcacattggcggctataccatcaacgacgctaccaagctgtgagtgctatatccccaaggatccgatcaaccgcctcggacaggaagagtccgactaacccatgacattaacagcggtggaattgccgc

SEQ ID NO: 16308 - DNA, 536 bp, Emericella nidulans
agcccctggaagccggacagagtgctgaattcactgtcaatctgaaagcacgccaggcgtctagggtctgcaatctcatactggcgaatgaagcttgcggacggcacaccctttggccaccggttgtggtgtgacattcaagtccgtgaggatttggttcccgctgcggacgaccgcaaagacgacaacaacataatttctagcgaaaagacccctgagcccgccgcggttaacaattccgacatctccgagagtcatatggtcttccctaaactggacaaggagtcaccagcagcaagcacacatgaggcggtcaacgtaccggccaccgctccctctgtgactgacgcttctgagcgtgatgtcttcgacgatatggccagcttgaccctgggagaagagacctcgactgagactgggttcttgactgatgaagaatatgatattctggatgctagtgatcaggagtttttggatgccaactcttctcgttaataaatgatggcggtgatacttatgataagaatgaaactgtg

SEQ ID NO: 16309 - DNA, 544 bp, Emericella nidulans
gtctcctaccacctgaatatgtactccatcgtcaataacgagccgcccagcacacaggttgcagccgcgctgttccaggagctatgctatgagaacaaggacatgctaaggtatgccattcttgtgccatctcagaatgcattgtttgattaacttgcgcatcaagtgccggaataatcatcgcgggctacgatccccggcacggcggccaagtgtattcgataccgctgggtggatcgctgcacaagcaggcatactccatcggcgggtccgggtcgacttacatctacggttactgtgacgcgaactggaaagagaacatgactgaagaagagggtgttgagtttgtcagaggggcactgcgggaggcaatcaagtgggatggcagctcgggcggcgtgatcaggatggtagtcttgacgaagaatggagcgcaacgacacctgtatctgccggacaacggctacactgcacccggacgtactaactgaggctttcgcggtgagcaatgatcatatctcaatgctagctaccagctaaaggt

SEQ ID NO: 16310 - DNA, 555 bp, Emericella nidulans
cctgataaggcaggtctcagggatcacaaaagaagaggctgagaagaggatggctggtatcaacgaggcttacgaagtcctttctgatcctgaacttagggcacagtatgacagtggcgtcgatcccaatgatccagaatcgcagaggcagaatttccacggaagcccgtttggtggaggtcatcaattctttttccagcagggtagcccgcagtttaaattctcctctgggcagtttaatttcccaggtggtttcccattctagcaatcttgattggctattaatttaaccatgattcacacgcatcaaccatgaccccattaaaactagctctgttttgtttttctacgcaatgaaatccgacacatccatatgttttgggcggtggttctgggagtgctcattttattaattgtcaccttttgcgccgtatcgcttccagctctgcgaggggcttcagtggcatagctgcaggcattgctgctaccagaaaattccatagcatatcgcagaactcaggtcttcaatgctttggtgggtcagtgagagggacg

SEQ ID NO: 16311 - DNA, 557 bp, Emericella nidulans
ctctgcggcttcggcgactcgcgacccctcctatcggcccatacgttggaatctggtaaccccgtgatcagttgtgtcggcgactggtttcacttctaaaatgcgctctcggccataaatgcccgccatcccctccttggcttattttttgggttctgggctctcatcttgacactggttttctctgcgtgctttcacgtagaatttgttcgctttttctcaaaccctgtttttctgtgatatccctctgatcgagaccactcggtcagtttacactttccgttctcagtacgttctcagtacgcacagaacaatgagtcctccgccgagatgcgccgccgtggttgttggagccggcccagctggattagcggtcgttggcaatcttcttgagaagcaacttgggaacatcgtctgggtcgaccctcttttccagggcggccgcgtaaatttgaagtatcgtgaagtcccgaggttcgtgtttctgtaatccgatcgctggcgtctgcccacgttagataagaagctctcctggctgaccggggttggtttcgatc

SEQ ID NO: 16312 - DNA, 563 bp, Emericella nidulans
tgctctcgaaagacaactgtcagcaaggacgtcccttattcctggtattggaatggcaagtcccttcgctccgggtataaacgaggcgaatatatccgcgaagtacgtaccaatttttgcgaacctgagccatgtggctactattcggatcaacattatacctactgcgaacatactcaccgctatcggcacgtatatgactatagtgcttcgccgagacggttctcctcgaggagcgatcgatatagccaagcatcctgttatcatccaccgagggactcgcggtggtgccaatcaaagcgctattgtgagcctcaatgctattgtcccagcttctgatgtggatgatcactcgtttctcacccatgcgtatctattattctaaacctggtgtatgatttggcttgcgtatagcatagtggaggtttgtgagtggcaaaccgaggcagttgttccggccagtcacatacgaatccaatgaatgtccgcgcactatagtgtctagacaggtcccggttggataaacatgttgtacatagttttatctagcatgctgttcatat

SEQ ID NO: 16313 - DNA, 576 bp, Emericella nidulans
atatcacggtgcactataagggcggtctcgtctatccacagcggatcgagagcgcgaacaccacaactgccgtgcgccagaagggattcaatatcgtcattgcaccgggcttggatggctctgctcatggagagctttaccttgacgatggcctgtcgcaggtgcaggataaagtctccgagattgactttagctatgtcgatggcgtctttgagatgaagggctcgtttgagtatgacccaggcgtcggaatcgagcggattactattctgggtgtgggggccaagcccgaggtggcggctgaggacgcggaggtcgagtatgatgaggagaatcagaagctggtgctgcacgtcgatgtacccttgacgcgaaagtcaagtatcaagattgcttgagtgggagggatggaatgacagggagaggccatcaagttgcttgctgcctacttagcctagtcaggcttggacgattgcgcatacctctggttaaggcagatgttccctgatcagtggagcaaccattgccccccgttcacttaccacttggatatgcccatggctctaataggaatac

SEQ ID NO: 16314 - DNA, 577 bp, Emericella nidulans
tccggctcttcgctctcgttctcagttcctcgcaacctcatcatactgcacatactccgagatgcctgacccaagtgatcgcaaggcggtcacccgctaccttgagcagacccatgataaaatcttcgagagcaatcgtgcttgggttgcttcgaagaagggcgctgacccagagttcttcaacaagcttgctgctggacagtctcctgagtacctgtacgttttatgccgtctcttgccaaaagaggctcatctgacattttgcggcgactagctacatcggttgctctgacagccgtgtccccgcgaacgagatcatgggtctcgatgctggagaggtctttgtccaccgcaacatcgcgaacgttgttcctaccatcgatttgagctccatgtccgtcatcaactacgccgtcggccacctcaaggtcaagcatatcgtcgtctgcggccactacaactgcggcggcgtgcaggcagcccttactcctacagacctgggcatactcaacccgtggctgcgaaatattcgcgacgtctaccggctacacgagaaggagctcgatgcgatcgagga

SEQ ID NO: 16315 - DNA, 584 bp, Emericella nidulans
tagacgacgaggttgaattccaaggcattaagtaccgcgtgcagaccgacgatctctctgatgaggtcctgacctctcttgcccccggtgccagctttgaggatgagtttgacattgccgccacctctgacttgtcctctggcggccccgtcactatccgctctgagggcattgtccccctggtcaccgaaaagtccgtgaccggctcgctgtcctacagctccaacgaactgaccatcgatgtcgacggtgctgaggctgccaagatcgagactgtcggggctcagctttccaagctctccaagcgcaccagggtgtcctcctgctcgggcactcgtgctaccgcgctccagacagcccttcggaacgctgcttctctcgcttcccgtgccgccagtgcggccagccagggaggctcaaccttcacaactttcttcaagagtgactcttcctctacacggaacgccgtcgctgctcgcctccgcgccgttgcatccgagtcctccagtacctctagcggatccactacgtactattgtactgatgtgtacgggtactgcagcagcaatgtccttgcttacacg

SEQ ID NO: 16316 - DNA, 588 bp, Emericella nidulans
agcggacgctgttccctcgattcaacgtatgcgggaaaagcttgaaaaagacaccgaagcacaaggccccgtagcgggacactctcgcagctccgcgttgtttgcaggcattcacgacgagcttgaggatcttactcccgacgaacgcgaccaactcgtccagcgagctttccagcacgatgcccttcggtccaaacgtcccgttatctggattcctcgtgatgacctcggagtcagtgacgacgagatttaccgcacccagcgcttcagcaagcatatctggattagtaacgagtaccaggcacttgatggaaagtgccgtacaatcttcagccgcagtccacctgacttctcagaagttgacctcatccagttatagaaagtttttccttcttacaagtcacttgtatataacgcatacggcctatctcgacaattctcgatgtgatgattgactctattcccctctagcgaatggcgttttactgagacgggcattattttccctgctgcttgttgtcattatcaatgttctatattctggggcatggattcgcatccctgaccaagggcttttcagatcgagcg

SEQ ID NO: 16317 - DNA, 601 bp, Emericella nidulans
gcaagtctgatgccaagctgctcaaggtctttatcgacgaggcttacccccgccacatcggtcctggtgtctacgacatccactctccccgtgtccccagcgagcaggagatcaaggaccgtgttgaggagatgcttgcgtacctgcgccctgagcagctctggatcaaccctgactgtggtctgaagacccgccagtggcccgagaccaaggctgctctctccaacttggtccaggcggccaagtacttccgtgagaagtacgccaaataatttttaacaacttaataatgacccaaggtgggggcgacattgtcaaccatgtcgtcccgagaaggatgaaaatttttttctttcctttaatgagttatgatgatgataccaaaagttcaacatatgggttcggggttatattagagatatcctgggggtaacggagttcaacattttactacattcaacatcggcgttagccaagcatcgacatgattcccctggcgtgggtttcgttttaatcttattgggattgcaggagcatgagcgatggtcggttgggccgatgtccatatatttcaacaatgtgtataatcacactaggggcc

SEQ ID NO: 16318 - DNA, 615 bp, Emericella nidulans
tcacaatcgactgcgcgatacagattcagcaccatggcttctgctactacattttatgacttcgagcctgttgacagtaggtcctcacccgtctcttttgtgtaccccgctctctttcacctccgccagacaaacactaacctccactctccaatagagaaaggcgaagcttatcccctcaaccagctaaagggcaaagttatccttgtcgtcaacaccgcgtcgaaatgcggtttcacgcctcaattcaaaggcctcgagaccctttaccagtccatcaaagccaagcgccccgatgacttcgttatccttggtttcccctgcaaccagtttggcggtcaggacccgggctccaacgaccagattcaggaattctgtcaattgaactacggcgttaccttccccgttctcggcaagacggaggtcaacggagataatgcgaaccctctttggacttggctgaaagagagccagcctggtctgttggggttgaagaggataaagtggaactttgagaaattcctgatttccgcggatggccaggttggtgggaggtgggctagtaccaccaagcctgacggattggagagcacgattttagaggagattgagaag

SEQ ID NO: 16319 - DNA, 615 bp, Emericella nidulans
gcagcgcgggttgtcgagatcatcgcggcccgtagatgagtgcgacatctgtccaatctgcgaatgcgagctaccagcgattggcccggatggagccgaagatgctcgagaggcgcatattcgggactgcatagcgaaccacggccgcccgccgagcgatagccctgtctcgcagtcccagctcccggtgcggatgctcgcgttcaccgcgaccgagaaagattgcattggtcaggacggtgcagaacaggaatgtacgatctgcatggaagagtacgaagtcgggcagtcgctggtccgcctagagtgtctctgtaagttccataagaggtgtattgtggagtggtttgaacggaagagagagtgcccgtacacaaaacatcctagcagcctctcgctgtccatgtttgtgcttgtgcggtgcatgcacgttgacttcaccttggtcttttggctacatgatcccctttacgtttcagcaggcgttttcttttgattgctttgacagagcctctcccttgacagtttcttttctgctctccaagttggcgtttcagatgggcgtggcatattcggcatttgattgcactcagttaacgaagaattatcgcatta

SEQ ID NO: 16320 - DNA, 631 bp, Emericella nidulans
cccagtgccgctccccctaggtctctatgacgaggtcgaccacgtctcattcgaactcgtccacacggaacaagcacattcgcctcttcactacaactccgcgatcccccttccaagcgcaagcccaagctcgaggcctagtctgggagcccgggccggcaacaacagtcacgcgcccaatctggaggtctgcacagtgcggcttttcgaaaagcccgggtgcagcggcttcgataaaccgctgatccagcgcgagttcggtgtcggtgcgggcattggtggaagcagtcggtgtgtaaagcgcagttcggagttcatggagcttggggaggtgtttattagggttgactgcacagatgggagtcggccttttcctgcaactggcgatattcgaggagagctgccgcaggctggtgaaaatgggaccgttgcgggtgcttggggatcacatatgaatagcactactacgactagtactactaccacaagtggtattggtgccgtggttggaaggtggcagcggaggaggttgtcgcttttgggtcgttaaagtcggctgattggtgttatgctggattcatgtattgaagtgtttacaatgaatgaatgatttgcaatgtaagctagcgat

SEQ ID NO: 16321 - DNA, 633 bp, Emericella nidulans
ggcccagattccagatctatcgcaagtcaggactgccgcaatcgcatctctcacatcttctactctcgtttattttgcgttgttacacgcacagcttaagttcctcggtatacccatgccttttcgaatttaggcgtggcctgaaagtatatgcgactctgacgtggtcgtgcaggcccagctcggatctatttcgccatcttagccacagcggacctgcctgtggcggagcgcctgcatatctcgcactataccgcttgggcatgtacaccttgtcgcctatttcttattgctttgccttgtcatgatcgagctgcagcttcatatctaactagctgcctcatttccccccccgcgacatcatctatgttctgttggagaggctggtttccttttctactcaacaaagtctgtggttgcattcttccgtctttacaagcttagatctacatcgctcgcgcgaaccgcacttttccagtttcatacttgcagatacacccaccatatccatgtttgctaggtgctaagtgtgctcctttcttctcgcattgccgacaatgcttactggacaattgtttccagattcttcataatatagctattcaactcaagacggaatgattctaccttaca

SEQ ID NO: 16322 - DNA, 636 bp, Emericella nidulans
tgaggaagagatgcaccaggtctacgtggaaacatgcggtcctgctaggctagctcaaggtgcgggtgtcagtttcgagcagttcatacgttttatggtcagcgtaacggaggatcagaacactgcagaacaggtatttcaaagcttccgagaggtcgcagatggcaaggtatgtactttcggtggtctgaataagtagggcccaaattgaccttttcaatatagccgtacgtcacagagcttgaccttcgacactctctcattccggacgagattatcgagcaccttgtcaagactatgcctcagcacgaaggtccagatttgttagaagacagagaccttcccaaatatgactacatcagcttcatggagaggatgatgaacgacaactccagtcagggcaatgcgcctatcaacggcagcgtgtgatccgttcttaatcaattttatggtctttctttaaattaccgtcttgtttgtggtataggtgttgattggtactcaatggcgttggcgatggccatctttgcattgtgatatttctcgttcgttgtcttctggtttacatggagacctacgcatcacttgcactgtgtagacaatccgaagatatgaagcagtaattcccaccaaaaa

SEQ ID NO: 16323 - DNA, 639 bp, Emericella nidulans
cgctccaaagaagcagcaaggtgccctattcttcttttttctcgagacgctcttctcgcagtttgaagctaatgtcgaacagagctgcaggcgcaatacacaaacttcaagaacactctgcaacagctagctcagaagattggtgatattgagcaggaggctgaggagcacaagtaagcctttctggcctttctacctttgggctccctagagtctcgagcgaaatgtggatgatgctaatagttgtgcccttcgaagactcgtgatcgataccctggagcccctacctcaagaccggacgtgctttcggatggtaaatggagttttggttgagcggacagttgccgatgttctacctacgctgaaaacaaactcggatggcttaaagcaagtattggaggatatgctgaaacagtacaagtaaaagcaatcggagctggacaattggaaggttcgtttgccgaccttaatgagcagtcccgtacaaatcgttcaggaagtcgctaacttttggcacaacagaaaaagaataatatccaggttgtacaaccttaagagacgatttatgaatgaagaatctcgtttgaccacgatgtatgggctgtctacttagccgaatgtactataaacctttctccc

SEQ ID NO: 16324 - DNA, 647 bp, Emericella nidulans
cgcatcgaatcgcctcccacatcttcgtgtccacgatacctgggcatacgcattcaccgtgatcttgtcgtcgccatctccatggccattgcctgcgtcagcccacgcaccgcccacttgctggctgagtagatccccattgttggaaacggcttgtggcgacgatactcgccgcgccgaggatcttgtacacctcgacacccgcggccgccttggggtcgccttgagcgatcatctgtcgcgccgcggccgtatagcagttgaaaacgccgttgaagttgacggacatcacgctgctgatgtcctcatcagtaacggatagcagcggcttgacctgcgagaccccggcgttggcgatcatgagcgtcaaagggccgagcttctcggtagtgtctctgacgagagaggagacggacgacgcggacgagacgtccgctgggataccgataacatttgcctgggattgtgatttgatttcagagacagttgcctcgattgccgcctgggagctgggtatatcgttaacgcagacggagtagccatcgcgggcaagtcgggaggcgattgccttgcctctgtgaattcgtgttagtcccatggtgatgctgagtgaggtatggggaccccatatggggcaggcctggcgt

SEQ ID NO: 16325 - DNA, 661 bp, Emericella nidulans
tgtcttgctatacactcgttgcactttgctgagagtgcatcaatatagctccgtcagctgaacgctatccaccgtgcttctcgtccttctcgtcccgacaaggcccgtcgtctcggttacaaggctaagcagggatatgttatctaccgtgtccgtgtgcgccgcggtggccgcaagaggcccgttcccaagggtgccactacggtatgcattcctcgaatacttcatatggcacagagagtaggaggttaattgaagttttcgcatttagcaagcccaccaacatgggtgttaaccagctcaagtaccagcgtcgtctcgctcgtaccgctgaggagcgtgtcggtcgccgttgcgccaacctgcgtgtcctgaactcctactggatcaaccaggactccacctacaagtacttcgaggtcatccttgtcgacccccagcacaaggccatccgccgcgatccccgcatcaactggatctgcaacgccgttcacaaggtacgtcgtcatttatattggaagctcatatatctgtttgtacggggcatttgctaatgtagatctcatatagcaccgcgaggctcgtggtctcacctctaccggcaagaagtcccgtggtatcaacaagggtcaccgctacaacaacacctctggcggtcgcc

SEQ ID NO: 16326 - DNA, 665 bp, Emericella nidulans
cgcgcgcttcatatacagccaacttcatctcctcggagagactattgctgaagggcggcaaatgttgaagggtgagaacgatatcgttcgaggcaagtggtgggagacaagtgcgcctgacaatgtaagatacggcggatactcgttgcttgcgatgactgactggagtaataggtgttcgacccacctttaccaccacatctttctttccacctgtcaattgcagactccgcgctggtgctgtatctcaggactcttgagtctacaacacaggcccacacgcctactgcatttgcgacagacatctcgttgaccggattctctatacgtgatcgactattcggctctcgtggaccttctcatgacgaggctggagatgtgttctcgtggaagggagatgaagtcaaagtcagggagaaagtacgcgtagagagccaagatcccagtctcatggcagtaatggccaagttgagcgcacttcaccacgaggtgatcaaatgcaagactgctctcaaagtcctcatgggtagtgaggacgacacggatatctagctaagcatgataggaacctttgccttccctgaactactggagtcgctgaatatacaagtataagctttttgctatctaactcttgcttgccggtccttgcttaagctctctat

SEQ ID NO: 16327 - DNA, 680 bp, Emericella nidulans
tgacaccacccttcccgcaaaaatcgtccgggtaatctccaaccgcaaagacgcttgtggcctggaacgtgcccgacgtgccaacatctcccacacagtatcacaacctcgtgaagtacaagaagcaacatcccgcgacaccggagggtgtgcagcgcgcaagagaggagtacgatgcagagcttgcacgactggtcttagaggataagccggacttggtcgcctgtttggggttcatgcatgtgctttcggagggtttcttggggcctcttgaggccaagggtgttagaattgtgaacttgcatccggcgttgccgggggagttcaatggagcggtaagttgttaccttgtgagccatactgagctctgttcggcctttggtgctgactggttttcctacagaatgccatcgaaagagctcatcaggcatggctcgacggtaagattgagaggacgggagtcatgatccataatgtcatctcggaagtggatatgggaaaaccgattcttgtcaaagagatcccatttgtgaagggagctgatgaggatctgcacgcattcgagcagaaggtgcacgagattgagtggaaggttgtcattgaggggttacagaagaccatcgaggaaattcggtcgacgaagtcataggctatgggttgagggttgggatgtttttggc

SEQ ID NO: 16328 - DNA, 682 bp, Emericella nidulans
ccagatggatggattcgcagactaacgttcactactgactcttcgcacgtcacccgaccatcattgtctcattttatggctatcgtgatccttccatcctcgttctaagttggagtactaacctcttgcagcttgcagaacctcgccctacttgccacttgtgaacgctcccatggaacgtccgctggcccagtctgcacctaggatttagtccacctctcaaacgcaactagcgaacctatccctgcaccataccctatgtggcggtccgatcacggcaagtcaactccacacagaagccgaaggcccgctcatggaatcttccacgggagaagcccagccaggcggtgagcgtcccctgtctaaccccgacggtgcggcgtgcgcagcgttatgctcatcgcatcgcgcctagaggatctcccttcgaggatacatagaagcaacaatacgggtctaggagagcttctggttcccaccctgcagcatgaagaattgcccgtgtggatctctattttgcactcttgaagcttcgccccggattatatagaggtcccttcccgagtacaccgtatgctcagcattccgcaaagatatcttccgtgggttacctatcgagccttcgagatatgttgatactacgtaactgattatgcacacgccaattacaaatcttggaaac

SEQ ID NO: 16329 - DNA, 694 bp, Emericella nidulans
cgccatcagcaatgagctttatgtgatgaacgaggaaaccgttgcagccttctgtttgctcagtgttttcaccgctgttgccaaatacggtggtcctgcatacaaggaatgggctgaggctcaggtccagaagcacaaggacatcctcaacgctgcccgtgccgaccacaccaacgctgttaagcagcgcatggagaatgtcaaggagctgtctggtgttgttgacctcaccaagcagctctttgaggtttccaaggtatttaaacagcaacagctctcttgagcggtccctgctcgaggtgaaagcgtggggagattacagctaacatttgataaaggaaaccgccaagctcgaggcccaggcctacgagctcgagcagcgcaccgctcttgctgccgaggccaagcaggttcttgactcgtgggtccgctacgagggccaggtcaagcagcgccagcagcgtgagcttgctgagaccgtcattggcaagatccaaaaggagctccagaaccccaagaccctccagcagatcctcaaccagagcgttgctgacgttgaacgtatgttacaaccccgatagaacgctcacctgagtccagctgacatcttttgacccaggcatcatgtcctccaaggctcagtaaatggagtttgcttggtagccctgctatcgactcatgtacaaattaagac

SEQ ID NO: 16330 - DNA, 698 bp, Emericella nidulans
cgccgctgtgtgctgacctcatatcgtggaacatcaaacccgactccaccaatagagccacatcgggcattattccctacttcagaagagagcaaccccttctggtggactggattattgttcgaccatcaacagcaatttatgcaaatcagcgaactagctattgcacaaagtagcgcccttggagaactcaatcgttgcgggtttgtcgactcccaagagcctctttagagtgccgagtcgaatatcctatcaacagaattgaatataccctttgacaagagcgctccattgagcaacgcagactcatcaagagacactggtcgacgcgtgaaaccgtctgaaagagttttgaacccgtttgcaggattccaggaaaccaaaatatattcaccgactagcttggagccgggtcctgacggactttatcactgtccggaatctggatgccgcagcaaaaagagctactctcaaaaatggatgctccggtgagttctattggaaaatattttatacatgtctttgactgaatcaaacaggaagcacctgagagaacatatcaaacctgtcttgtgcagcctgtgccctcataaggctggcacacaacgcagcatgcgccgccatgtggaagcaaaccataaggaatgggccaagcagtattgggaggtggtatcatggtcttgcgatgtatgtggcga

SEQ ID NO: 16331 - DNA, 731 bp, Emericella nidulans
cacccctgggacatgaatgacattgtcaagaacttttctcccatgatgctcctccacggagagcagtacatggagattcgcaagttccccattcccactgaggccaagaccaagacctaccccaagctcattgatgtcatcgacaaaggcgccgctgcgctcgtcgtcgctggctacaccaccaaggacgtcgccaccggcgaagacctcttctacaacgaatccaccgttttcatccgcggtagcggtggctttggcggctctcccaagcccactgctcctcgccccaaggccgctgtcgccgcctacaaacctcccaagcgcaaggctgacgtcgtcgtcgaggagaagacatctgaagaccaggccgcgctgtaccgcctgaacggcgaccgcaacccgctccacatcgaccccgagttcagcaaggtcggcggcttcaagatccccattctgcacggcctctgctcgctcggtgtctcgggcaagcacgttttccagaaatttggccccatcaagaacttgaaggttcgctttgctggtgttgttctgcccggccagactctcaggacggagatgtggaaggagggcaacactgtcctcttccagactaccgttgttgagacgggcaagcctgctatctcaggtgctggtgcggagctgctggagggtgccaaggctaaattgtaaactatggatgtctatgcttatggttctaaattgtacataaa

SEQ ID NO: 16332 - DNA, 736 bp, Emericella nidulans
tcttcttttgaaccattctccttcccaaattatcaatcagcaacgactcgaaacctacctctcctcttacgggcaaccgaatctcgatattgaagagcacctgaactcgcccacgagctctcaacaacaccgcattcgtaacggaggcacagatacaccaaaagaccttgctgcacgagttcggctgatcgagctgtttaccctccatgttctcccaagaaacgaagagtgggactatgccgaggaatttatcaatttgagcgaggttctcgatgaggagcgtaaggaagtcttcatgcagacgctggaaggactcaaagaagagaaagaacaaggcaaactacgtgctgcagcactacagcgcgaaaaggaagccgaattagagagacaagcacaggaagcagatcgtcaaagagcagaggaggctgttgccgcagaaagagccgctcaacaaaagaatcacaagatgaatggtagtggggtggattacgggattgagaaaacccatccaaatgggagcatccgaggcaaaaagggcgagagggtaggcagcagcaaagccggatcgtcatcacggacggcgctgtcaccccccagctcgaagaacctcaaaaagccggagaagcctgagactcgggcgagacaatcacgagcgctggccgcagggtccaaaatctcgtgcagtacttgggcaagtcaatatccaagaaccctctttcgttcttgaggttgctgc

SEQ ID NO: 16333 - DNA, 739 bp, Emericella nidulans
cacccctgggacatgaatgacattgtcaagaacttttctcccatgatgctcctccacggagagcagtacatggagattcgcaagttccccattcccactgaggccaagaccaagacctaccccaagctcattgatgtcatcgacaaaggcgccgctgcgctcgtcgtcgctggctacaccaccaaggacgtcgccaccggcgaagacctcttctacaacgaatccaccgttttcatccgcggtagcggtggctttggcggctctcccaagcccactgctcctcgccccaaggccgctgtcgccgcctacaaacctcccaagcgcaaggctgacgtcgtcgtcgaggagaagacatctgaagaccaggccgcgctgtaccgcctgaacggcgaccgcaacccgctccacatcgaccccgagttcagcaaggtcggcggcttcaagatccccattctgcacggcctctgctcgctcggtgtctcgggcaagcacgttttccagaaatttggccccatcaagaacttgaaggttcgctttgctggtgttgttctgcccggccagactctcaggacggagatgtggaaggagggcaacactgtcctcttccagactaccgttgttgagacgggcaagcctgctatctcaggtgctggtgcggagctgctggagggtgccaaggctaaattgtaaactatggatgtctatgcttatggttctaaattgtacataaatgagtagc

SEQ ID NO: 16334 - DNA, 759 bp, Emericella nidulans
cctcagatactggtcacttcagtatggttaggtaggctttagcttttttgactgacggcgggcacatgctcactccgattcttatacagggcactgcatctagcagatcttgtcaccgagcttaatggtaagaaaccgttccagtttattttccgtggagtgatagctcactaaccttattctagggttctgcggaggcacgtcgacttccttgttgagattcgtgtgaacggctactaacccgtaaaacagtaatgtctgtcttttcgtcccttcgctactgcctcggtgacccccatgactatggcgctatctgggcggctcttggatttatgccattcgggctcttcttcgatttcatggacggcaggatcgcgaggtggaggaagaagtcgtctctcatggggcaagaactggattctctcgcggacctggtaaggcataatactttcgttggtagttaccacggctaatcgacggcatctagatttccttcggcatggctccggccgccgctgcatttgcgcttggaattcgaaccccgctcgaccacctatttctcacgttcttcgtcctctgcggcttaacgcgcctcgcccgctttaatgtcaccgctgctgtcctcccgaaagacaagacaggcaagtcgaagtacttcgagggcacgcctatccccaccacactaagcatagttgcggttatggcctactgggtgtcgcaagaatggatcttggaagacattccgcttggcgttgctgc

SEQ ID NO: 16335 - DNA, 765 bp, Emericella nidulans
tcattactatcggcgtccctatactacttcatctgatcttctaccggacggtagcctcgccgccgtcaagcaatttcctccttctaggacccagtggagcaggtaaaactgctctgttgactttggtatgtatctgcccgcggacgtcgagagtgaatgctatttttggctgaccacttgttttggacagcttgaatcaaagtcatcatttgccgcaaagccgaaatcacaacctacacatacttctcaaacctcaacccttgctacgattcgccttcctgtctccgtcccaattggatccaacaagtaccggtcagtcaatgacacatccttgaaagaggctcaacggaacccgaccaaataccgcgttaaggatacgcccggccatggaaaattgagaggttcgcaaggtctctccgagctcgtatcgatgtccacaacaaaagataccaaatcgaggctgcgtggtgttcttttcatggtcgacaccgcggccatctctgaaactgaggccctgcgagatgccgcttcgtacctctatgatgtgcttttgatacttcaaaaacgtgcccttcagcggggcaagtcgtcggccagggctgcagctgaaatccctgtgcttattgcagctaacaagcaggatcttttcaccgcgctgccgcccgggtcagtgcgcgagaaattagaagcggagattgatcggatccgtaagtctaagagcaagggtatcatggacgccagtgccgacgatggtaatggtgaagg

SEQ ID NO: 16336 - DNA, 789 bp, Emericella nidulans
taattgatcgattaatagtgaaatcggcatcgggaacgacgtcacaggaggatttgacggatcttgccaggctgcgagatgaatgggaaatgactcgccagtgtattgatatctgctccaaagcagataaccatttcaaagaaaccatcacaacagtggacaattacgccacgggcgatgccgtacagttcatggtctcaactgatgggcaggtcatccacgggagaaatcacggacttgggtggaggtcaagacaggttggagggcaccttaacgacacctctctacagcagttgtccagagattttacgactataaatatccaccatactacgaataccgactcatcctcgcccaagaatacacctgcaactgcggacgatacggcctcgagtgaatccgcttcagaatttgatagacgatatgggcgaggatctcaactcaccccaaaatctgctccgaacataactacatcttggaagagctcgatggaaagcgggcttggtcgagcatcgaagagctagccagcttgttagcttttgaaatcgtttctcattctgcaccagaacttcactgccgcgcaaatggtccgctgattgcagtcatacgaaatgcagcttggaatctacattatttgtccgacaatctaatatgcgacaacgtcattgtaaggtgtaagtccaggtgatgtctaggatagatatcctgagacacagaaacttgaaggcgtcaagtttatcgagttggactgggttgggttgaattcatccaaagcctggactagccgcc

SEQ ID NO: 16337 - DNA, 813 bp, Emericella nidulans
acgcaaacgcccgcgatgataagcggatgagccacccgaccgctattccactctatccgttacgtgtgatcgctccacttcgtcttcaaggtgggcaatactacacccgcatttcgttgtaatttcagttcgagtttgtcgagttgcccaagctaccttacttggtaaaccgcatttgtatcgttgcttgcgtcgggagttgggttgctgctgcatagcatgcaaccgttatctttaacgcattttgcttcatccgtgcagttctactttctttttccctgttgcgcattcggctagaatctctgcgatgcaccataaaccgcgaggtgccagtcttttgccttttgtattgtttacctaatttcatgtcttatgagatggcttgcggcacactggacatttatcgtgcgatgtttcattgcagccaacgcaattatgtcaagtgattggctctcccatgataataatgttcgtgggtgtttcctttatttcttacttagcattatctcatctcgctctgtttccgttgtggatgcatttggccagccaggtttctcaacggcgtgcgttgtctgagactcattccatgttcaaaagcccaagtctggttgttaatttagtctgctgatttgttctatgcatggcgttaggaggttttgtccgttcctttacggtatttatcttgctcgttttcttagggaagcgttcggtcgtttagctgtatttacggttcatttcatgggagttttgggatcatatcaattgcgacagatcgcaatcactacacagaaacagactgattgaatcatcttc

SEQ ID NO: 16338 - DNA, 829 bp, Emericella nidulans
tggcttccgtcccgagtgtgcaatgcttcggcaagaagaagacgggtaggttttcgacgtcccgcatggcttgaaaaaagaagacgagttgaggctaatcgcattgaatttctttagctaccgctgtcgcccactgcaaggtatgagatattgttttcgtttttatacacctacacaactagatatcgccatcgcgtccgcacgagtttgggttctgaaacatggtctggttatgtgcgtgcgggattcgggtcgggtagacgacggtttggtactgcgaattggatatgtgagatttgacttggggcaaaataaatatggtctagcgaaggaagggatcaagaaaatcaagagacgggcattatcttacccgacaccccgatcgcacgccaaaaagactctgaacccgatattcgaacctggccagaacctgacttgttttgaatcgcgaacactacacttggacatgtggaacacaacgaagctaatagtcacatagcaaggcaagggtcttatcaaggtcaacggccagcctctccagctcgtccagcctgagatcctccgcttcaaggtacacccaccaccaaccaaacccggcttcacctgaagacaaatctctctaacatcacatggaataggcctacgagcccgtcctcatcgtcggtgccgacaaattcgccggcgttgacatccgcgtccgtgtcaccggtggtggtcacacctctcaggtctacgccatccgccaggccatcgccaagtcccttgtcgcctactaccagaagtacgtcgatgagcactccaagaaccagttgaagcaggctttcgttca

SEQ ID NO: 16339 - DNA, 833 bp, Emericella nidulans
accatggcttccgtcccgagtgtgcaatgcttcggcaagaagaagacgggtaggttttcgacgtcccgcatggcttgaaaaaagaagacgagttgaggctaatcgcattgaatttctttagctaccgctgtcgcccactgcaaggtatgagatattgttttcgtttttatacacctacacaactagatatcgccatcgcgtccgcacgagtttgggttctgaaacatggtctggttatgtgcgtgcgggattcgggtcgggtagacgacggtttggtactgcgaattggatatgtgagatttgacttggggcaaaataaatatggtctagcgaaggaagggatcaagaaaatcaagagacgggcattatcttacccgacaccccgatcgcacgccaaaaagactctgaacccgatattcgaacctggccagaacctgacttgttttgaatcgcgaacactacacttggacatgtggaacacaacgaagctaatagtcacatagcaaggcaagggtcttatcaaggtcaacggccagcctctccagctcgtccagcctgagatcctccgcttcaaggtacacccaccaccaaccaaacccggcttcacctgaagacaaatctctctaacatcacatggaataggcctacgagcccgtcctcatcgtcggtgccgacaaattcgccggcgttgacatccgcgtccgtgtcaccggtggtggtcacacctctcaggtctacgccatccgccaggccatcgccaagtcccttgtcgcctactaccagaagtacgtcgatgagcactccaagaaccagttgaagcaggctttcgttca

SEQ ID NO: 16340 - DNA, 846 bp, Emericella nidulans
caaaccaaaacacgccccgactctagtgcccatatcccaaaccagcctccatgacagcaaagaaatagtgagatgtgtggtgaatgtgtggtgaggtgaagtaagaagtggaaatggaccaaaaagagggtacaaatatgaagcggaaaataaagaatcgaagaaaaaagcaataagaaacgaactgaagggagaagactgcccccatccaggtatatggttctgcactgactctgttttgcatgtatttgcatgcaggtgcaagcgtaggatagcatgctagaatagctagtaaaaagtaaggataagtaaggcaaggcaagatttggcaagtgcgtaagcccgaccagagtcgactgaaacccttgcaaccgaggggcgctggcaattcatgccacatgccttgccatggcaatgatgatatcgactaagcaaagaatatccaaccatatccacagctttaccctgagggcccaaccctcagatgataactccaacagcgaaagcccggctgattgtgtctatcaacgcgatgagatcgtaaaatcgtacaatccgtcgtatatgcaagtcagatcgatcgtaatgtcaatgtccccgtccagtatgaaatgagaacaagtatggttgattcagttcaggttcagcggatgatgtgaaaaggggtaagatgatggtgcgaaagggtggatatatgaggctcggcgaaagaagcaaggcaccctgattatcgtgatttcccaggcaactcatgctgatgcgattgataatttttacgcctccaaaacgcccgacgaagactgctgcgccgcttcggagcttgcgcgtgggctgatccggtcccaa

SEQ ID NO: 16341 - DNA, 885 bp, Emericella nidulans
cctcaatgcccaccgcctcaacgttccccggcccgcaaacatcgcatcactcccggtcttcgggccatgtacgttctgattcccgtactcgccggacggagcacgtctacctcgctgagataagaacgtcaaaactgcgaggtgagaggtccgactcgggctacgcgagctcaagcccaactccagagatccctgagatttcgccgaaagcctcgcgctataagactgggcctgaaccagttctcatagagcccaggtcacagggaccaccaccaccgccgcttttgagacactcaagaacatactcgccgcctcgtcaagatcggccgaatattgtgaggagcactacctacacttaccctgtcgactcgtcgcagtcctctcgccgaccgctctaccgggaactcgatccggtagatgcacgcatcaaagagagagagttaaggcgagcaagagatgttcagtacatcccttctgcgcatgctgcacgctcctccgactatacccggcccgttggctctggacgacggacatctgcttatgcctagaactacagtttgatagtttcgacccctacttttatcttcagcctcgtgatttatctctcaccccatgactctacgataacgcattttacccggttgcatactcaggttatctttagacattgattcggtctgcactcagacaccatctcacttatagagatattatcagtatgatgttttctcacatttttctttctcagcatcgtttattccgtccatttgctatatctggcgcttaatcggtttactttggatacatatagttcttatcatttttgttttatgttttatttcggtgagttcgcagggtgggttaacttggtggcctggggctcag

SEQ ID NO: 16342 - DNA, 906 bp, Emericella nidulans
aaagaagtagcgagattgcttcgtcgcatatgttagctattctacatcattatagcatccatcattagcaaattcttgccgagtaactcagaagaacaatctattcacacccatctagctcagtactctgtaggcttcgcaaacatcaaacgaagcatatagcctgaacgggacccagagatccagctaaggcggctagtccaggctttggatgaattcaacccaacccagtccaactcgataaacttgacgccttcaagtttctgtgtctcaggatatctatcctagacatcacctggacttacaccttacaatgacgttgtcgcatattagattgtcggacaaataatgtagattccaagctgcatttcgtatgactgcaatcagcggaccatttgcgcggcagtgaagttctggtgcagaatgagaaacgatttcaaaagctaacaagctggctagctcttcgatgctcgaccaagcccgctttccatcgagctcttccaagatgtagttatgttcggagcagattttggggtgagttgagatcctcgcccatatcgtctatcaaattctgaagcggattcactcgaggccgtatcgtccgcagttgcaggtgtattcttgggcgaggatgagtcggtattcgtagtatggtggatatttatagtcgtaaaatctctggacaactgctgtagagaggtgtcgttaaggtgccctccaacctgtcttgacctccacccaagtccgtgatttctcccgtggatgacctgcccatcagttgagaccatgaactgtacggcatcgcccgtggcgtaattgtccactgttgtgatggtttctttgaaatggttatctgctttggagcagatatcaatacactggcgagtcatttcccattcatctcgc

SEQ ID NO: 16343 - DNA, 908 bp, Emericella nidulans
aatgcgctgcggccaaactctttagaatacttcgaagtgcttagcttttctcatctaggtccccggtcaatgagcgcgttgagaacacagaaggactccctgacggagctgaaattgaccagtctcaacattgaaacgatacgcgaactggcctcattgggcccattgcccaaattagaggtcctgagcctaacggactcagcgccggccgcatgggacgagccattctacgagactcttgatgaatcagctgattggattgggacctgcacaaagttaaagcgtctcgaagtcaggagatttatgcacgattccagactgttaagcaaggtattgatgaacgacaacatccacctcaccagcctatcctttgccggcttcaggttacaagagggcttcagattcctttacgaccttaaaaaccacagatccctgcaatatctctacctacgcggcgaaggaagtccagattccgcccagaacaacttactagtcgagagcgtaggcgacctccacgagcttcgcgaacttgaactcaaagatgtgtccgacttcttcaccatggaacaagctggggaactcaccatgtccctccccagtctcgaacgactttggatcagcggcgaagcattcaacgattctatctggcccgccttctcgtgtctctcgcaactcaagagtctggccatatatgcccttagcaacttcacagcgggcggggtcatcgacttcatatcgcaacttggtcctggaaattatggactgagtctgtccattctcaacgcaacatctgctgttgaattcccgggcgaaatgcaggtgaagattcgggagatcttggcagggagtctggaaggctcgtttgattttggcctcgctcaaggtgcgatttattacagtcgtctgcg

SEQ ID NO: 16344 - DNA, 913 bp, Emericella nidulans
ccccacgcaagaccacgagaaacccgacggccccaagttcaaagtcgacgacgtagttttcggcctgatcgattattcccaagatggcgcagcagcagactacgtcctagcgaccgaagacgaactctcttataaacctcagaacatctccgccgctgaagcagccaccctccccctccctgccctcacagcctggcaagcactcttcaaatacgcgggcctcgatttcactgcacgcaaggacctccgtgtgctcataacgaatgcgcacggcagcgaagttggcacccaagccctccatcttcttcgctccaagtccctattctcgcgctaccgcccctggatctgcgtcacttgcacatcggaagacgcagcaaacgaacttcggcaagtccatgtggacgaaataattttcgtccagcaccctatgccgaaaaacttcgacctcgctgccacgtttcgtaaaaaaaaatggggacccgtcgacattgtcctcgattgcacgggcgaggacatcctctaccaatccaaaggtccggccatcatcaaagacggtggcacagtcctttcagctgtagatgctaaccccgttctgaacatcaacccgaacaacgacgggaaaccacagacgcgtttcgtccatgttgaaccggatggcaagaaagtgcgcttgattgcgcgtatggtggaggacaataccgttcggggacgtgttgaggacgtcgtcgaccttgtcaatggagcgcaatttcttgcttctgatgctgcggctgcgggaggacacaagagaggcggaattcatgtacttcgtgtgaattcttgacctatggttgtttgtgttctttttactgttattgtggcatatgtactatatagcgttgcactctttcacatgtactcttctagctattag

SEQ ID NO: 16345 - DNA, 927 bp, Emericella nidulans
tagcattgccatgccattacattattctaatttttcaaaagaaaatctactaacgtaaaccatcaggtcatcattacattatctttcgaattctacataaaatcatcaaacttaattcacaacaatggggataccagtcgtcgacatcatatttgcgaccgagagagccctctcaatacctgaactccttgagcagatcctcctccatctggacatgcaggatctgctcacgtccgcgcaacgagtaaacaggcgctggctacatatcatctccacgtcgccacggttacaacagaccctcttcttcagaccgatcgcaccccccgccagaccatcgagacagtataccgcgttcccaaagacacctctcggcgctgcgagacgacgagagctcagcccgtaccgcgcccaagtgcgcgctacgctgaacccgctgctcgtcaagcagtttggccccgaattcttcaacaccggctcagattcctgccaatgcctctcagactgggtctacctcgacgcagggatgcaagcaccctggtccgtcaaggtcggctccagccttctccggcctgacgaacggggtgcgcgagaacgagccttcaggaccccaatgcctcctggcgccgcatgctcgtctcccagccaccgcagccaggggtggggtatgtccgcgatgtgcacgatcacgagtcgccgacctcagtcgccaagggatacattgatgcttcgcacgagggagggctccggttcgggctgctctatgacctcgtccagacactcgcggtcagtcggtggaagaagcatcataccccgttccgggtctcctggggcgccgtcgggagcgccgatccgtccgttcgcgtccggaagggctgcatggagatgctggaggagacgctgttgttctggctgtacactatgaaccgc

SEQ ID NO: 16346 - DNA, 929 bp, Emericella nidulans
attagtctcgagtctcagggctagagaaggaaaaccacagaaaaccactggcagcgtgccgtgcgctgccaatggactcgtcgatcatgacaccatgacccaaagcttcaagagtcaaaagcaaaagttttcagtctgacgaaagaggcaaaagacagccaatcgcgttgtcttcgctctggcttctctctggcttctctctggcttcgcactggctattaataggaagacttttcgacgctcccagttgacgctggaaacgaacctcgggcgcttaaccaggagctttgatatggtaccagacccagaagacatgacgatggtttcaccctagcgcctagaggaaaaggctttcagcagtcgcgaaccaagagtccccagagttcggtagcttcagctcagcgcgaagtcaagcaaatgaatggacgagcacgggcgttggggatatattttgcggtcgtcccaccagacgacgaacaaggttatgctacagtaacattcaggcctcaccacgcgatcatagacccagagttcgagaaccacctgaagtgaattggatctgatcgttcgtcgacggccaagatcggctcgataaactgggtatctacctttctgggctcctggctccttaatgctggccgccggcggtaatgaggtatggagtacaggaccgggtcccagcacgctggaacaaagaggcattaagattaaagcacaggactaacggacgcggacggggacgggggccgcctcccgccgggaagtttacgaggaatcaggaataattgggaggtataagttcagtagtgtagttagtctggttcctggaaactgggaaaggggtcggttataaccgtccgcgtcgacgagtagagtttaaagcaccgcagtagcgcaataccaagcggaccgtcgtcgagctggactcg

SEQ ID NO: 16347 - DNA, 946 bp, Emericella nidulans
accactgtcttcggacagataccataaagctatgatcgcacaggcctagacctccagacaggtacgtatcgaagcggataatggagactgtgccgccgtcctatgaaactgcaacgaccagggacgcttggaccataatcgcccaatacataccatcgagcgacctctgcgctgctactctagtctgacgaagatggcatgcagtgttcatgccgtttctctggggaaacccagcatctcactttggaacggaaaatgatgaagtctacggtaactgctacccaaccgctctataatatactaacattctgatctctacgacagtcgctttgacgagattcagaaggaccctcaggtatgcccgtcctgaagtacggaggctaacgcacaccctccatatgcctccagcgctttcggagatttatggcggcccacgtcctgaatggctgcgagagatcttcgagtacctgccatgtctgcagtctctgatagtgtctgaattgccgttcttcgaccacagtgccatgatggctttgcggggtgctgtgtcggggggagtatcatcgcgaacatacaatacacgcctgctcatagcggagcgcgaaccgaacacgacgtctttgggcatagcggagacattgttacgctttccggagctgatatatctcgatttatcgtaaacgacatctgcgaaagacctgtccagtcctattgtcgttatcccgactagtgcggctgcatgtgctcaagctgcgaggtatcgtattgatgcatattgattcagcgtatgtggcaaatgctagcggccatagggttcggttccttgacctgcgggagaataagcttacgtacgcggctcttcagccgctacttcatgcttgttttgggccgccaaaccatgatcatctgcgtcctcaatcaacaattaaccgatcgcccgggttgg

SEQ ID NO: 16348 - DNA, 974 bp, Emericella nidulans
tcaacggcaaatccgcattcatcaccggcggcgcttcaggcctagggctggccacagcgcggaaatgggcagaggccggggtctatatcaccatcgccgacatccaaccgccaacgagcccagtccagcctggactcgcgcactgttttcactatgtctactgcgatgtcacgagctgggagagtcaagtggccgcctttaagagcgcccttcgcttctcacccagcggcgccctggatatagtcgcctgctttgccggaacgtcatcgcccccggaaaccagatagatcacgtccttgccgcgggtgttcccagcctagaggtcgatcctccccggccgagctccagtgtccgcaatatcgaggtgaatctggtgggaagttacttcacttcctggctggggctgtattacctgcgtataccaggcacgggaactgaccccgagttgcccagcaacaaatgccttctcttctgcgcctccatcgcagcatatatggacagccccaaggcgtccacgtacccggccagcaagttcggcgtccgcgggctgtttcgcagcacgcgttctcagaccaagcagttgggcgttcgctgcaatctgcttgcgccgtggttcttcgattctccgctcattgccccaatcaagcatgcgatggcagcgcgtggagtcgatatggccaaggtactcacgtttacgtctattgacgcatgcgttgatgccgggacttattgtgttgcaagcccagagatacatggtacattttactcctattttctcttatatcttattggctaggctgggataatactaagtggctctacaggacgtgccttggcagaacagtcggagggtacttttgacctgaaagatgattaggaggacggatggggtgggaatcaggtgaggcctattatgcaactgcggcggtatgctgggttcgatgtctgattatatacacattcccacggttatg

SEQ ID NO: 16349 - DNA, 976 bp, Emericella nidulans
cgacgcaggtgatgatgaagacgggtatgtctgagacgagtctgccccgcatccgtagcgatggaacccggagacaggccgatatagttggagcaggatacgcccgttggacctgggacggatgctgatactgcgcctcctcaaatatagggcacgtggaaaggacgaacgaccgtgactatgaaattgaagaacggtatgaaaacttgatattcgcggcggctgtgggctgtggtttactgatccccatgcagacgataccggaccatggaggccgctgcgaatcgcttacagaaggaggctaagggatacttggactcattgcgaggtacggcaattgtaaagcgagttgatgtgcggtcggtgtgctgattgttcgctcagccatgacggcttcgcagatgcgcattgcggaaacgatagatgctttctacggtgatgccggggccaaagacggcgtgagcaggagctacaaacaggctgtcgaagacctggatgccgagaccatcaaagcactggatggtccttacaggtacgattctcgtttttctgcgcagagtgtttcgtcgctgactgacatgccctaggacaaccgtgcttgatccgatatcccgcttctgtgcatacttccctgatgttaacgagtgcatcaagaagagaaacaacaagctgctcgattacgatgccatgagggccaaagtgaagcgactggtcgaaaagcccgacaaggacgctacgaagctgcctcgcactgagcgagaactcgagatggccaagcaggcgtacgaacagctgaatgaacaactatttactgaacttcctcaacttattgacttgcgtgttccgtacctcgaccccagctttgaagccctggtgaagatacaactgcgcttctgtgcggaagcatactctcgtatggctcaagtgcaacagtatctcgatgccgagacaagagaccaatacgcgcggggtgatt

SEQ ID NO: 16350 - DNA, 994 bp, Emericella nidulans
tactcttattcatagtgaggtgctcaagggtggctatgctggtacagtcctgggtctcatcggtggctatgcaggtgtcttggccgcatcccgccgctatcacactatccgcaacatcagatttcccatgaaagcatttctcgtcacatcttccggaaccttcgttagcattagtggagctgaccgctcctcgcgcagcttcgaagctgcgcaaatccagaaccgacaatggtacgaaaaccgcgaggacactgcgcgcccaggaacttcgcggtatgagctttagcgatcgcgccctcgcctgggctagggaggaacgctacacaatcgttttctcgacatgggttgcttcgatgattggtagctttgcccttgtcgggcggaacccttatctttcgggccctcagaagctcgtccaggctcgtgtctatgcgcagggtgctacgcttgccgttcttatcgccagtgctgcattcgagatttccgagaggaggagggtcagacgggagcttgatgcgaagtctgcgagtgctaaggcggactctaagttgagtaacaacactggtgaagataccgagctatggaaggacatggtcgctgctgaggagcagcggttgaagaacaagcaccagtcgctctatgaaaagcatcagaatgacgccggttctgaccctgatgctgggtctaccccgcctcaacaaaaggctgaggctgagaagctgcctagtgagcaggagcaggagcagaagagtgaggagaagaaggagaagcagaagtaatttctcttggctgctagggggactccgcataaaagaatagattggttgtgtataacatttcttgtttcctttcgtggttgggcgggtttctcgtaccacgattttacacttgtttcatcttcctgtttgtgattgtacactctctcctcttattcatgtcttttcactatatatatggcgggcgtttgtcattgcttttcttctggggatgtcca

SEQ ID NO: 16351 - DNA, 994 bp, Emericella nidulans; identical to SEQ ID NO: 16350

SEQ ID NO: 16352 - DNA, 994 bp, Emericella nidulans; identical to SEQ ID NO: 16350

SEQ ID NO: 16353 - DNA, 1004 bp, Emericella nidulans
tcaccgccgtatcacggcctacgacccctctgaggccaggctctaggtcttccgtccgcgaacgcatggatatgacaggaagattagcagggtgccgtatacccagcccgctattaatgcccttgagccgcagtttgcggatcttgccgaccgcatggctgagctcgaggcgaacttcgacaaactgcagctaatgcatgagagtctgacgcgcttcagcgagagctttgccagtttcctctatggattgaacatgaatgctttttgcgtggacttcccagaggtatgctaataatttgcgtggctcagatctcgcgtacaacctgaccagcgactttaggcaccaatcgccgagtcatttcgaagagcgaaacaagctgaggcacagaagggtattgtttaccccacacaacgcggatatcaatccttctaacaaattgcagaggctgaagaagaagaatcagcgaaaggcaacgaagccgacatgacgtttatgtgagttgcggaattcaatcgtctcaggctataacccccatacacgttgctaattacaactcacataggacctcggacaccacctttatcgaacaccctccaagcactgtttccacaaaacaagtacccaaacccggaacatcccgtggaagagtgagaggaactagtactcgcgggacgacgactagtcgttatgcaactaggggtcgaggtcgtcctagcgcattgcctcggggaaagagcatgcggtgatcttgcgcagtaaatgtacaatccaaggacgctcgaacatcaggattgcggaaattttaagggcgcagacggtgcactaaaatcgtcccgagccattaaaacgccctttggtcgccgggcgacgttggacgactttggactgagtcatcacggggcactctaaagtaagaaagaggggaaataaaggaagaaagaaggggcccgaatgccgtgcgattggacctgtatcaactggcacaacggcgaattgtaaggca

SEQ ID NO: 16354 - DNA, 1041 bp, Emericella nidulans
  unsure (1)..(1041): unsure at all n locations
caagtgcatcgcctatcaatcatgtttgaggtgagcttgttctccgggcgcatcattcgtaccacccatgtacaacactatcgaccgtcgtttactcgctggggactctcaacataagactaatatacatcagcgtcgggcagcagagntgtatcgcttacggatgcaccgtgcccgtaccgttgctttgacaaatgatgagattgtggaagtacgggcagcacaacggaccttcgaaggcgcctatatccggacagctctctctcagttctcttttgcccttgtggtccttaagatatttacgaatgagttctacagtaccggggctttattcgccgtctatggtacaggggtacttatcatcggcctttttcgacgccagcagggcaaccgacagttcttctctgaggtaggagacgacggagtacatcgacataagttcagaaccagcgggaatgcggtagttatcctgacggccctgagtatcgccgcttacgccacgctgatcgctttaacactgaggctggacaagtaggcttaacagatccgagctcgtattgtcatggaaaatgtatgcgaacaaccttaacagtgccaactggaaaccaccacgtacgtaccctccagcatacggtggctgccaagcgccaagaattccgcagcataccaccgctatggttgctacctgcttcccatcccacgtcaacagcagccatacttgacgagtcggagcggacggggtgacagccttgagctggaaatcatgagactgtccacgggactggtgccgagacccgggacatgatttcctgatgatggtgaaacacacaactcagcggattgggggccgtcacgcagaagggccccgggtcacaacgcctcaccgtcggactgtaaggcggcaacttgcgagtttcaaaggcgcacgacttgctcagcctcagttaccgcgagctaagcgagaatgcttgatgttcagttagtatattatagcgtccgaacagcagccggcacgacgtggaccaatgggggaaggcggaa

SEQ ID NO: 16355 - DNA, 1045 bp, Emericella nidulans
tgcgttttgcttattgtgcttagctattacgctctgcctggctcaaaatttttttgcccccctgccttgattttggcccggcgcctgtgtgagctactactgatcctgcaacagcgaatcaggcacctgtgttgtccacagccaactgctccgaaaccaacagcatcgtcgcggggacggaactgcattcccaccaggcaattgttgcattctggtgagttcacccaattatgcttagatgcactctacgcattttcatatgcaggtttccttgctggatccttcgagcacgtggtggatttcacgagctgctaactgacgcagggatgttagatccccaaaccagccacgtctcgaatacgtggaaagccacaacgacgacgtaactgaggtacatcaaatccaggccaagtagcttgttgaagtcgctaacactcgttactaactgatagcttcaataccacccaaaccgccacaacatcctgctttcaggaagtaccgatggcttggttaacatctacaacacaacaatcactgatgaggacgaggctcttgtgcaagtgatcaaccatggctctgtgcatcgtgccggctttatcaatgagcgaaccatctacgccttgagccatgacgagacgttctcgatccacccagctacagatccagacgaggaagcgcaggagccggagccgattcaattcggcgacctgagacagcctctcaactgcgagtacattgcgcagctctgcctcggcagccaggggccatatatcgccgcgggtaataaagtgtacgtgaagggccctaattgacttttgctactcttttattactcttgctgatacacgcttaatgatacagtgataaacgtctcgacctgattcccctcgcacagtctccctcgtggcgcttcgacgagcagaatctatggcgcctccccggcggtcatggcgaggaagtcgtgcgctccatccacatcgatgagcaggtatgctcttatatgttttaacttgtatgctcaggaactaacgtatccagaatcaat

SEQ ID NO: 16356 - DNA, 1045 bp, Emericella nidulans
tctcttctagaagggttcaaggatgaaacgaactatttgtgagttgtctttaccttttccccttctcgggttgcatgcttttgcattctttctgcttacttgctgattcaatagggtttggtcccaaatttcgtcttctgtcggcaatttacggtctgtcttctcacagaacgaagaggtggctgagggcctcaagaagtttgctcgtgaactttcggcccccgccgcgaatatgatcggctgggagttcaagcccactgatgattatctcactctgcagttgcggaagcttctgatcgcgatgtcggggcttgcgggcaatgagaggtgctgtcattctgtcaccttttgtcttcctttcgaatgtgactaattgttctcagtattgtggctgaagctaagaatcgctttggtctgtgggcaaccgcaaaggacaagagcgctatccacacaaatctccgctctgcaatcttcagtattgctgtctcggaaggtactagagaagagtacgactctgtgaaggacgaatatctcaagaccgattctgttgatggcaaggaaatctgccttggggctctgggacgtacgaaggatgctgcacttgtcaatgagtatctggacttcgtgttctcggataaagttgctattcaggacgtgcataacggtgcagtttccttggcggccaactccaaagttcgtcatttgctatgggagtatatgaagaacaactgggactccgtagaagcacgtctttccgcaaacaacgtcgttttcgagcgtttcgtgcggatgggactctcgaaatttgctgatcatagcattggcgatgatattgctgcattcttccaggacaaggatacaactgcgtatgatcgcgcactagtgattgtggccgacagtatccggaccagtgccaactacaaagaaagggatgaaaagcaagtcttgaaatggctaaaagagcatggttatgcttgagggtaaggttgaggattctaaacgcgcttgctcttctgaatgacgggagtgaacactatgcatgccg

SEQ ID NO: 16357 - DNA, 1072 bp, Emericella nidulans
tcatcagccgcactgttgaccccgtgcgcaaggcccttaaggacgccaacctccagtccagcgaggttcaggacatcatcctcgtcggtggtatgacccgtatgcccaaggtcactgagtctgttaagtctctgttcggtcgtgagcccgctaagtccgtcaaccccgatgaggctgttgccattggtgctgcgatccagggtgctgtccttgccggtgaggttactgacgttcttctcctcgacgtcacccctctgtctctcggtattgagactctcggtggtgtcttcactcgtctgatcaaccgcaacactaccatccctaccaagaagtcgcagaccttctctactgctgctgacttccagactgccgtcgagatcaaggtcttccagggtgagcgtgagcttgtcattttcaacaagctccttggaaacttccagcttgttggcattcctcctgcccaccgtggtgtccctcagatcgaggtcaccttcgacattgacgctgactccattgtccacgtccacgcgaaggacaagtccaccaacaaggaccagtccatcaccattgcctctggctccggtctctccgacgccgagatccagtccatggttgaggatgctgagaagtatggtgctcaggacaaggagcgcaaggcggccattgaggctgccaaccgtgccgacagcgtcctgaacgacactgagaaggctctcaaggaattcgaggaccgtcttgacaaggctgaggctgagcagatccgtgagaagatcaacaccctccgtgaattcgttgccaagaaccagtctggtgaagtcgctgctaccgctgaggagctcaagcagaagaccgatgagctccagactgccagcttgaccctcttcgacaagatgcacaaggcccagtctgagcagcagcagcagcccaaccagggcgagaccggccagggtgagaacaagccctaaatgtaccatcatgattgacagtcatgcgcaactgcatggtttgtcattgtattttctaccatttccctactgtttttttttagatatgatctccttttatttccgca

SEQ ID NO: 16358 - DNA, 1109 bp, Emericella nidulans
ctagtgaatcaggtaaaccatgacttccgtcgacatgcgcgaaagtgtggctgacccgtctatctaataatccccaggctggcaggaaatagttcttgggtcggtggtcgagcgtaccatagcccagggtacatcttctgtgtactgcctggacgaggcgtggcccgagtttgtggtaaagatggaaatggctctgggtatggcatcggcggcactctccgcgtggcctgtgatgctacgacggattgtggccaagtttctacctgagtgcctggagctctaccgcatcatgaaatctggccgagagctcatgagccgtgacatgcgcaggagaacggctctgcaggcatcaacaggcgaagaaccgctaaacttctttgaatggttcaaagaagcctcgcacggggaagaatatgacgagctcatacttaacctgcggattgcctttgcgtccatgcatggcctctgcgaccatctggttaagatcctcctgcgcctttctgaggatcctcagctcgtcagcgaccttcgtaaagaggtcatccaagtctacgagactcatgggtggagcaaaacggcgctgtaccacttgaaactcatggacagtgcctttaaggaagttcaacgggtagatccaatcctgtttggtatgccaaatcccttctcctggttcggacacaccctaactatcagacagcagttggcagggtcgccgtcgctgacgtaacgttgaaagacggcctcatcattcagaaaggccagtctatccgcatatctggacacacaatgtgggatgaggacaagtatcctgacgccgcgcactttgacccgtatcggttttacagactccgacaggctccagggcaggagaatacagcgcagtttacatcacctacctccgatcacctgggattcggctatggaggccgcgcctgtccaggacggttcttcgccgcagcggtgctgaagatatctctgtgccacgtgttgatgaagtatgatattaaaccggccaatggggagactgggcagcacagtgtaggagtttgcggcagcaatcaacgaaacaatggccgcaaaggagctagtaagacggcgacagccggaga

SEQ ID NO: 16359 - DNA, 1169 bp, Emericella nidulans
tttttacggcttgattcgttgtgtagtctctttattgaggcttgacaaggatgcaggcattcggtatgctctgctctctggaattagccgcaatcactttccccctgcaatgacctcattgtttggcgcgactaacctgtacatgcgcagtcccaaaaaacagaagggcaagtctttctacctgcttaggtctgagatatgataaccgttttcatagcctaggtttgagttgatccttcgagtgagcctcaccacctcccgatggtggcctatccaacactgactatttctgtaatcagatcatcgacctcaacaatatccctctcgttagcggcacagcttacattaaatggcgactgccctcggcaaatgcgaacgatcatcatggagtaaccgataaagcccttatcctcgaccacaaagcgtcctggaattacgaaaaggtcctgcaagttaggatcactattgatcgcgaccagacgctccacgaatgcgaaattcagttcgatgtggtacaggaattcttatccggagtccacacagagaaaaatctgcttggaagggtgaaacttaacctcgccgaatatgtagacaaaagcgacgacgaccagggcattatccgacggtacttgttgcaagatagcaaggtaaatagcacgctaaagattgggatagcactgcaacaggtggaaggagataggaactttacaacgtgcgtcaatcgactgccccgctcgtttcggcgctgttactgatgttatacagtccgcctttgagatctgcaatggctttcggcggcattgcgggagttgtggcttcggagcaagctgagggtgatgactcgggccagatacccttgatgaacactcaaagcagggaggttgctgatttgcaagaaatgtatcgacggaccctggcggcttcttggacttctcgcgcggacgacatacctgcggataaattgattgaaggcttattttctggaagttatggtcgacctgaccaacatgatcttgacccagggcaggcagctgagggtcatcatgataggcgttcaatctacgcgcagccgccgctgggcagagcgggtcacgcaaccttctgtctccgacgtttgaacggcgcactaagagttcgagtcgacactccaacggaagcaaagcgctgga

SEQ ID NO: 16360 - DNA, 1321 bp, Emericella nidulans
cgggacggctattgcccaagatggtaagtccttttcgctggagtggattgagagcatgtaacttacttatttggctagccatcaccagcgatcaatggctcatcacactcaacacttcaatcttttggccaacgtccacggattacttctatggtcccacaaccggacctagcgcatccgccgtgacctgcaatgccgcttgggttgagtatgcgcggcggtctaccgagctgcggtctttagggcccacggccacaagcccttcattagtgtcgtatatgacgagcgaaggagcctgtcgaacttcagtttcacccgaggcgtggtcgaatacccattctggtcctcttaccaccctctgcgatggcgcgcctcgtgcattgggacccagggaaatagtgacagcgtactatcccggcactggtccatgcgccagtagttacataactaacacttacactgagaccttctaccgtgaaccgtcggtcactccagactgcactctggagacgactgactgtgtttcaatctggcagacatactcgagcatttccagttcctggcgggattccgtagtcacgcccacacccggtgacaccaacagtccgatcccaccatttgactgtccaacacccgctcgcacgtatccagaagaaaacccttgctccaactgccactttcttcctggaacagcaactctcttctactggcccgtcactaccggagctggtgatctctgtctgcagaacggaaccaccgtccctgcctcgggtcccagcaccgccattgtgaacggagagactttcatctcacccactgtttacctgtcgttcacgtctatctacgcttggagcaaccgccgcgctcatccgggaagccaatgcggcgtggaccacagcaacaccatcgtttccctgcacccctccactcttacgtcgatgcgcaaccaccggaacgcgaaatacccaattataggaaccgcgtatcctttcaattttgctgagttcatgccacatgaaattggaaactatactcagtcattgatcccatggccgcagtaccgcggtggccagcaatgcccgattccggacggcaatacctgtaccatgattcgggacgactatatgccttggctgatgattcctgaggaagtaagagatattgacccagggtggagtgtttgcgataacgactggtatatcccgcctgttacaatggttgcgcttgataagccagagataaccatcacgccggctccggaagcaagcgagtttaggctggatgctgcggcggcgccgaaggagggactcgcggcgacaac

SEQ ID NO: 16361 - DNA, 1360 bp, Emericella nidulans
gggtgccgctgctacatcacgccaggatggacagccgcctggtcctacaacacagcctggagtcgtggaaaatgcccagactaagaacccgaatggctccactgagaacaatgacgacgacgatgaaggtgttttggatgttgcggctattgttagcggcaacaccagcgagttccttgccgcgcgggagaaagagaagggaaataaaaaaggcgctgatcagggcgcgaaacctgttcgtcttcccaactctaagaaggagaaggccacgttccagtaccaggagttcgtcaagttagagccagagaagcatgcgcctagcggtccttcacgcttcatccgccagactagggatattgaagttggcgttgagcggttctttgctgcaacaccgaagcaagatactggagacagattgtctagcagtattcttgaggatatagcaactcagatccatcacaccatcctggccgtgccggatgcgacaaagcgcagtgagctatgggattcactgatcgttgttggtaacggtagtaaagtaaaaggttagtctttctctctcgaagcattcctcgtcccagtttatttactaaatattgcaggcttcactcaagccctcatcagcacaatcactcagaagtttgtcctctcgccgtccggcacaatctttacttcagaaattccatccaacttctccactccccttcccaccggcggaacaaatacccccgccccgggcttccctggtcaaatgcaccatcccggcggacaaggtgtaaacccccttcttgtcgccgccactcactccggcaatcctatgcctccgggaaccccttcaatggaccctctctcccatcaccgctccactggccactcgcagactccgacctctgttcgcaccgtaaaaccaccagagtacttccccgagtggaaggagcaaacagcaacccagcagcctgcccagaatcaaccaggtctcaatgggcccggcggtccggcatctagtggcagccaccgtggtatggaagaagcagttttccttggagcgcaggttgcctccaaggtggtttttgtgatcgatcagggcctcagtaagggttttatgagccgtgttgagtataatgagaatggcccgtcggcgattcatgagtatgttatgtgagcttcggctaaaccgattatatggatgccaatccactttcgcctcatctgtcattcgacgtcgagctttttacttctcctcttcagtgcttttatgtatcgtggtttttacgaggcgtggtctgttatttcagaaaagcaatctgttaggatcatggtaggataggcggagttagtcaagtagtagatatcaatgtat

SEQ ID NO: 16362 - DNA, 1377 bp, Emericella nidulans
ggcaagcagcccggaaaagagcaccttgacctgccgccagtagtcatagcccgatatggcaacgataaaaacaagaacacgattctagtgtacggtcattacgacgtgcagcccgcattgaaagaagacggttgggctacagaaccatttgagctcgccgtcgatgacaaggcaagaatgtttggtcgcgcaagcactgatgacaagggcccagttttaggctggcttaatgtgattgacgcccacaagaaggctggcgtcgagctacctgtcaatcttctctgctgtttcgagggcatggaagagtatggctctgaaggcttggaggaattcattcattccgagagcaagggattttttaaagacgcagatgctgtgtgcatctcggacaactactggctggggaccgaaaagccttgtttgacctatgggctacgaggatgcaactattactctgtcagtgtctcgggccctgctcaagatctccatagcggcgtctttggtggctctgctcatgagccaatgacggaccttattagcgtattatccaaactcgtggactctcaaggcaatattctgattcctggcatcatggatcttgtcgagccggtcacggaagaagagaagtctctatacaccaacataagctacacgatggaaaatcttcatgagtccttgggcagtgaaactggaattcatccgaccaaagaaaggactctcatggctcggtggaggttcccatccttgtctattcatggcatcgaaggagcatactcggctccaggagccaaaactgttattccagcaaaggtcattggcaagttctccattaggactgttcccaacatggagagtgcggatgtaaacaggcttgtgtttgattatatcaagtccgagttctctaagctgaacagcaagaacacgttggatgtttggttacagcatgacggcaaatggtgggtagccagcccctaagcattggaactttgcggctgccagcaaagctgtgaagcaagtgtttggtgtagagccagacatgacccgagagggtggaaggtatgtgttcaaaatggcggtctcgtcgaagctgcaagtatgcagatgttgatcaaaacagtatacccatcacattgacttttgaggaggcgaccggcaagaatgttttgctgttaccaatgggaagctcaaccgatgccgcacattctgtcaacgaaaaactggacaagaggaattatattgaagggatcaagctacttggtgcttatctgcattacgtcgcagaagagcctatgggggcttaggtactgcacagtacaatagcatcgactggtaaggggcaaacattaagtctcaaagcatacaaggtccacagaggtg

SEQ ID NO: 16363 - DNA, 1391 bp, Emericella nidulans
ccgaagaagcattatttagcctcagagcgtcactgctttttccagatctcttttttgacatcagccgaatccacaacttcgcccgcaaaaagcgcaaccccgccaaaatgtcgctcacaaattgtcggttctacgaggagaagtacccggaggttgacagttatgttatggtcaacgttaagcaggtatgagatcggattgcaaatatagccatttggaacagcaaattaatataccgactcctcatatctagattgccgaaatgggtgcctacgtgaagcttctcgaatatgacaacattgacggcatgattctgctctctgagctttcgcggagacgtattcgtagtatccagaagctcatccgcattggccgcaacgaggtcgttattgtgctccgtgtggacaaggagaagggtgagtgcaacgtgagcagctagcgagagaatttctaaccctttgtcttcgacgttaggttacattgatctgtcgaagcgacgagtttctccagaagatgttatcaaatgcgaagagaggtacaacaagagcaaggctgtccactcgattctgcgacatgttgcagaggcaactcagacccctcttgagacgctataccagcagatcgcctggccgttgaaccgaaaatacggccactcgcacgatgctttcaagatctcaatcacgtaaggctcttccagctagacgtcagaacttcgcgtaactcatattattcttataggaaccccgatgtttgggccgatgtcgaattccccaatgaagccgtgaaaaaggagctgactcagtacattggcaagcgacttacaccccacccgacgaaagtgcgcgcggatattgaagtcacctgctttggttatgatggtatcgatgcggtcaagaacgctctgcggaccgctgaggcagagaacactcctgagaaccaaataaaggtcaaactggttgctcctccgctctatgtcttgactagccaatgtctggacaagacacacggtatcaagatgcttgaagaagccattgaacggattgagaccacgatcaaagcgtctggcggtggctgcactgttaagatggctcccaaggctgttacggagcacgatgacgctgctcttcaggagctcatggagaagcgcgagcgtgagaacatggaggtcagcggagacgagagccagtctgagagcgacgagggtgtccccgaataaatatgtgcgtcattgtttaagtgccgctttgagtcttccctcaggaagatggggtggtcggcagacgcctcccgcgttcgtgtcatgctgtaagcagttctgagtcgggttgcacgctgcgagatgaagtagacggacaaaaagttcattagaaaggtttcgaacgtggcacgaa

SEQ ID NO: 16364 - DNA, 1435 bp, Emericella nidulans
ccgcattctgcagctggtcaagtggatttattggatggccatcttttattgaaacattattactgccttttgctggggatagtctgtcactggaggaccaagcgatcagccaactccaggtcggcattgcatctcagctggcaaaactcgctcccggattagctgacgaggacgaagacatgccggaatcagccgaggacgatgaggaggaggacgagtttgagatgctccgcgcgaagaagcgcgaagaacagaaggccgctgaggcctggcacgtcgccatttctgcatcgccggccacggctggaatcatatttaaatattcccgcaacatattctctggcaaaccagccaccgatgctgctctctctcagtggagctctgagaagcactactcattgccaccagcgaacgagccgcgctccgtacggcttgaaattactagtaccgttgatatgaacctgtcgcttagatggagtgtgcacggttctcgacaggttagcgaattgacccgcgtgggcttcggagtcagtttacaacctcagggcctaataatgtcgctttcctgggccaggcttgggcagagaataagacttccaattgccatttgcccgattgatagtgtcaatgcggactcggccactctggcagttctcctcccgtggttaacatactgcgcggttgagtttggatttatacggcccagggaacgacggaatcgccggaagctaattgctaaacgacagaagaaactcaggaaacttgttcctcagaagaggttggaaagcacacaagccatcgaactcatggcagatcaagtgcggcgacggcaggataaggagtacagtagagggggtcttgtcattaccaaagcagaatacgggcattatccttcaaagcggaatgccgacaaaggcgccaaggagcccgaggtgacagatgttactatccctgtggctgcgttggtggatcatggccagctcatcatctctaagaagacggctaaggtgcgtttttaccactttctctccagttcttgactcttgtcagaatactgactttcagacagttccagattcttggcttccatgacccggcgcctctactgccgaaaacactgaagatatggtaccaataccatgggaaagaacattatgccgaggccacggatgcagagggcgtcacttgccccatgcgctctcatctgcttgcggcttgaagcctttgggagaaattaaaccagtcttgcttgcccaagactacgcatatcggctgggtacagcgacctctgtataagatctcctctacaatacggctattaggcaaactcctctcctctttgtatcatctgcttcgattttggaccatatactcgtcactgtgggagatttgaagttttttttagatgtattagcgacctgttcttgcatagata

SEQ ID NO: 16365 - DNA, 1680 bp, Emericella nidulans
cccaacaatccctggcctccagtgatacgccgatgactgagcttctgcagatctacgcacggctgaagcagacccttcggctgaatcagatctattcaacctttagccatccgccagagactctgggcaatgatgatattattcacacagactctttattccagagcttcggcttcagtattgctgcggttgaaatcgctcaacgtggtgttgaatccgagccaggctgcacgctccttgacaaaataccccaattaacgttgacgcaccttcgtgtcctggctgaaactgcattgacatacgcatcagtcggtggtttacagagcaaaggcggaaaccaaagtcggtccctggaagagttccgtgagatgcatcaccagaagctatgccagctgtttgtgggccatccattctttgaaggtacatcactcctcgctgatgtccaccaaatcgagccactattcgcgaaggacacgttcgtgtttcttgccgaatgttcacttgcccttcttcctgtcctggatattgatgtccgccacttggtgcagatgtgctatgtcgctgagattgtcaaggttgccaccacgtacattgtctggcccataggactaaaggaagagctggcccagaatggtgatgcgcattacttgttagatatggaactttctgacgaacggtttgaggtcactcggcagttcttcaacactgtggtctcggagctcaaggcaaactccgtaggcagaggaatagggtcttcgcatccaactgaactaggctatgtcaaagagggcgaggattcagcaacccccggcgtgatcattgctctacaccgcctcatatcaacgtacgccctaaccttcctgcgaaaagcggtcattttacttcatgtgcaacatggcgtcgagttccccagcacaggcttcggcgacgtgggcgcgtcagagctggatcgcttaaccaagattctgaatatgccttctcttgacgaaatatttgcttcagtgaagcctgctcgcaagagcggtaagcccctcgacgccatgatctcaggctggatcttccactggaacgcatctcgtgctggcgttcgtatcggagaccacaaactatggcctagcctttcgcacccagccatcttcgaactagtcggcctacccaagtacttcgacagcttgattgagctcgccaaccggcgccggtgcccaaattcaaagaaggagctcaccgatccaagcatctgcctcttctgtggagacatcttttgctcccaggccgtttgttgccaggatagcaacaccagatggggcgggtgcaaccagcatgttgtgaagtaagtcataaactccagtgcattctgttttcgccctactctagtaacctaattagcttactaacccttcgtcttcaggtgcggcaaaaacatcggcctcttcatcaacatccgtaaatgcgccgtcctctatctccacaaccagagcggctcgtggcacaacgccccctacctcgaccgccacggcgaagttgacatgggtctccgccgcaacaggccgctcatgctaaaccagaaacgctacgatcggcttcttcgcgacgtctggttgtcgcatagtgttccggcgaccatcagtcgcaggatggaggctgacatcaataatggagggtttgagactatctgatccc

SEQ ID NO: 16366 - DNA, 1729 bp, Emericella nidulans
atgattctttgtttggaagagcccagttattcattgaaacaataacaacctccttctctccggttttgctaccgtcgaattatccttatcgtttttgtcctgttccagcgcctatccacatgaacacccgaatgcctgaactctctgaataacctcaacccaccacattacactcacgctcaccacgtcaccccttcatggattcagaagcgaatccttctacagcagaagcacctgctgctcctgaaggcagcacgtcagaacccccaccgctcccatattccctccgagaccggaaaaagtcgattgcattcttctggttcctatttgtcctcgattgcaccgctcagccgctcggcttatattttgggctttggtatggcacgaacttgtcgcataatctgggtacgtttatcgcggaatggcctgacttcgaaagacattgcagccggctaatatggtcgctcattagtcttcaccatcgtcaccatttcactgggcggtatctcagtattcgagtacttttatcggctctataacctcttccgctccgattctacaacccggccgttaaatgctaggaagtcatgggtaggcgcatagcaagatcattgaataggctcgatgctgacttcagtagctggactttttccagatcaatttcaccattgtgtggttgatattagctgttgagcttatcacgtacgtcgaagacccacggtagacagagttttgctgacaattctcaggggaacggtgccagaagagccttatggtgaggaccagtcccaatgaacatctttgaatagatgctgatagctgcttagtgcgcctcgtcgccatggtccttccgacagtgatgttctatttcggtgccgtctacctttcactggatatcctccgcgcgtgcggattcagagcaccattccgaatttcctcaacacccaagggggccgttatgcccacagccttgtacgttcttatcgaagatgtggttgcagttgatggagctggaggtcagatgtaccgatacgcccttcggacgcggtacctttccagcccatatttccgccggatgctcgtgcagatgaatttcttctgggcgggcggttccattatctgggctgctgccattacggcgatggtgtttacaacaccccaagacgccgccttcgttgtatgtactataccccactttgactcaatatgtctgctaacagggctttcaatgcagatcggatggtcagtgccatttgtctgggcggccctttggaccgttattactataccctgggttcaaagcgatctccggcgcgagaaagaagcgtggcgcaccaacggggcccaaggaggtgagccctatgccgacgatatcaacgctccaagtgctaggactcgccttgagtcccttcatttccctcgcttcttcccgcaaagactagtccgagagaaacggtctgcacagtcgatgtcggaaacgcaatcgtgaacgattgtcattcgagcatccatgtgatagtccacaccacgtattggaacaaaccagttccccagtgacgttgtacgattcatgataaccgcgatagataccccacgtctttctattcgttcttgtattattgcaacgcgtccatatttccttaagataccccatctcaccgattctcgtatcccgacgggggagcaagtacagcttaagcctggagcaagctgtataggggctcatcgc

SEQ ID NO: 16367 - DNA, 1797 bp, Emericella nidulans
tctttaccgccaaggaccttgcatttagggtagtaggagctggtctcaaggctcgagatatcacggtctctgagatcatgacgaagaacccactatgtgcgaggacggatactagcgctacagatgccctcgatttgatggttcggaaaggattccggcatttacctgtcatggacgaaaaccaggatatttctggtgtcctggatatcaccaagtgcttctacgacgctatggagaaactggaacgcgcctacagctcctcccgcaagctttacgatgcgctggagggtgtccagtcagaacttggctctagccaaccccaacagattatccaatatgttgaggcccttcgttcaaagatgtctggtcctacactcgaatccgtactagacggtatgccgcccaccacagtttccgtccggaccactgtgaaagagctgccgcattgatgaaggaacatcacacgactgctctgctcgtgcaagatcaaggatccatcacaggtatttttaccagcaaggatatcgtcctccgtgtaatcgccccgggccttgatcctgcaacctgtagtgtcgttagggtcatgaccccccatcccgattttgctccaagcgatatgagtattcaagctgcgctccgcaagatgcatggtcagtatccacctgcttgtagatccgattagagttaactagatttgcagacgggcactacctgaatctgcctgtaatgaacgaggggggcgagattgtgggcatggtagatgtgctcaaacttacatacgctaccctagagcaggtatgtggacactccgcgcatgtctctatagggctgccactgaaactgctttttagatcaactcaatgtcgacccaagatgatgaagggccagcttggaacaagttctggctgtcaatggaccacgagtccgattcgatggtttctggaagccagagccaccaaccgcatcggtcaatagtcaatcccgagtcgcccaaagctagcttcgacgcacgggatagcgttcttccgaatgaatccgcgtctcaccatggcggagacgagcactctgagttccaccacggagaactctcgccgttccccttcaagttcaaagcacccagtggccgggtgcacagagtaaatatcctccccgctgctggtatcgccgaactcgtggctcaggttactgcaaaacttggccccgaggttgaagctgttggtggtgcggccagttgtgcggatggcgtacttagcaacacaggctacgctttgagctatgtggacaatgagggggataccgtttctatcaccactgatcaggatctcgttgacgccgtgtacattgctcgtcacgctcgtcgtgacaaggtagacctcttcgttcacgacccagctcaacctccagttattcctgcccctgtggaacccgcccctgtcaagcctgtggaggttaagacacctgcttcagacgaccaattatcagaagaatcgcctatccctaagccccgagcaactcaggcgtatcccgcccatcctcccgaagagcaacttattgcaggcgttcccaatgacttattgctcccaggagcaattgtcactttggcggctgtcattgccggagtgtttatcctgagccgcgctacctcgcggtaaaagtcgcgttgtacatcaactcgaagattagacgtctgcatctattcctttttgtctatcattttttgtacacccccaaatagcgtgtttgtgttcatttcgtccatctccgctgctccgccatttggtcgcttttgtgtatcga

SEQ ID NO: 16368 - DNA, 2093 bp, Emericella nidulans
cgcgaatctgaagcagccaggaattgctggtcgggcccatgacgactctattcttctcgctcctcccggaggctctatcccaactacacgatgccctaggatgcctagcaaaatacagtgataccgtcggcattgaagccgaatttgacttggtatgttagtggggacgttagagagctaaatgaacagttctgaccatggcctcagcttcgtctgagctcgctcaactccagcaagactgcatactcatcctttgcgtttgaagcccaaaacttctttgaagcatacgaattcggcatgaatggtaataacagtgggcctcggaaatttagctgcgaagtatatttgaaggtgcgggttctgacttcatttttgagttccttatgctaagagcctgcaggcgttactatccgtcttcgccgggaggacaaatcgacgagataaagatactgcagttgaacgctgcgagtttgaggttcgtgaagatccagacgtgactgaatgccgtctagttattcggatgatatgcggacttggttaggatccttggttgattatctggttcgtcgcttacagtgccaggcgtgatcaaatcatacaagctcacttacgagtcaacgacagtccaacatgccatctttgaccggtcacaatctactaatgaatggaccgttgagccggccttcctaaaagagatagccgtgcatttcagtccttcggcggacgagttggatatctattcagagaattctaaggtgatctttactagctttacgactaaaataacagacgggaagggttcgtctatccagaactttctcttacttagaatgtactgatcttggtctagacaccctccgacaaccagtgcacacgtcagtcgccgttgacaaaacagattttgaaaactaccttgccgacgacggcgtccacatcgccatcagcctaaaggacttcaaagcagtgataacccacgccgagacgccagagtcctgataaccgcgcgatacacccgtccatgccgacctctgcagctcgcgtacgactttgacggcatcagaacagaattcaccctaatgactaccggcgaagcaggcccagaggaccttcctagttccgcgaggcctgtccgggagctttcagctagacaaacgcctgctcctcggcctgcgcctgtacaagctcctcctcaaacaaataacagcaactcagccagggagagacaaacggctccgccgcgtggtagacccatccgccctcttacagggacatccacgcgaggcacgcaacaagatacacaggctacagttgcgacgcaacaggcgccgtccaccaaatttgatagtctttttgtaccgacggatgatgataggcagtgggatgtcgctgaggacgaggaggccgaggcggaggatatgctcggctgggatgcaactgctgatccagtatgatccatctttcgccttcattagcagtgttcttctaacagcagcagggcaatcctgagagcctgggtccgcttttgcgagatatcgagccgaacctgggaaatggcaaccaaatggacgcaggcaacgacgagatggggattccgccgacgcaacgaatgtcccaggtaagtgacactcgcactgcaactgcgttcatgctgatagccttagctgcatggcctcggacttttcgactagaattgtcgtcacgattaccactccctcacactaaaatgtgctttgcaccactcaagccgcaataatccagctcgtcgcacagcccgcaccaactccaacgaccttaactccctcaggtagcgaaattcgagcgcaaacgcctttaacatctcctctcgcatccgtctcaggcccgcaattgccatgctcaccccatccaaacgccacaacgctacaaccaggatcatcgtccagcattgcaaggcaatgctcacttcccacggccacttctcgcgccttatgcaggtttgccggcggcaactgaccgcggtcattgcgtccccaggcacagatagactggtctttttgatgtacatagacaccatgccagctagcatgtatacgcaaataccccttaacactttc

SEQ ID NO: 16369 - DNA, 2192 bp, Emericella nidulans
tcatgcagcgaaagcggaggaagttgacaaatgaagagacgtgccgagatcgtacacagagtcaaatcaactcggaagcgtccgcagacatcaacctgtgcggcaatgaagacattctcctggagatatcccaccgtggcgacaatcaatcttcatcttcatactggcgctctgttccccgacagaagcacaaatctgagcctataggacgcgagcatgaaggagacaatgcccagagtgtatctcagaaggatgatccgacttgcacacggaaacggttagtcgactcactgggcaccacaggtaatgacggcgcagttattattccgatttcagatgctgttcctaagtcggcgcattcttcccaggttaatgtctctaatgaagcggagttagtctctacacgtccgggttcaaccagggaatcagttaaaatagtgactcgtgatcctgggcgtttacaaaacttaacgggccccaaacctcccatatcccgatcttcgagatttacgtattcgcgacagcgctcgttcttgaatgacccactcagcttgactgactccgagccacttggtataggaagctcctactactttgatacggaaaaagaactgcgtagtgcgcatgtttcgcgcatacctcccgcagaagatgatacacatgatatgaaacctgttcggagtattcacgagcttcgacaggccggtgacaacgcccgattccgagaagtcgttgactcactcttcgaggacattgaggatgcacatactacatcatcggggaggtgccgtgggcttgctgagttatgcgcaaagctcctggactccgagttcgtctatcgtttctctgagcaaggctttgacgaacgtttggtcaactgcacaccaaaaagcctcgacatagtatccgcctcgcttgtgctcagtgcttacaaactcataataattggaggtcatgcttcttgtatattttcagaagccgtatgggcaaagatcctcgaactcttacctcaattcctagacatggatgccgacctcaacactttagcgcgagagccttcaatcggcctatcaagaacagcgcaagcttcagtcagaggtattcggagtcatctgctacctgtcataggtgcaccttcgccatacctgtcccctcaattattagcagtcgactgcaccgaatcatccttaaaagttcttcgacagagcagtcacactatctgctctattcctgcctccctgttaaataggcttgttgactttttgatagcgaaggcttctgcgaacatgaatggtcatacactggcaaatgaaactcactttttgctggcattattctcaattcttgagaattactctgtgatatctgagccttttgaccgtgatcaccgcctatgtttccaacgcctttctcagcttcacggtctcttattcctggatcattatgatcgctcccgtcaggtttcaatgtcctacgttcgggtgatattgaatcttactaacagggagccaacactctgcgccagctttgcgtcccaagaacttgtttctggacttgctaaaattgttgttggtaattttagcaatgtttccaaccgctctcttgttcaggagggcgactctctgaatgaagtcatcttggctctgggcactctcataaatctatcagagaagactgagcaggccagagctatactcgtacatgccgatggcagtgcggttcccatatttcaccagctgttagaacagttttctagtagtataaatgctatggaccaggtaagaaatatgctctttttgatcattcttgtctgactgaataaaggcgcactccgtgcctgaggtgcataagaatgtcgtcgcaggatatttatctatccttttacttacggtttgtcacgatagacaagcccgcttttcggttaaggattctctagatggaggtatactagccttaattttgtcaaccgcggaaaagttcctgcagtaccatagagaggttgaaaagggtactcgcttatttgagaggtgtgaggaaggggaatctagactcacagaacgaatagagcaaatcatcagccaggtacgcctgctggagagacctgctcatcagatgtagcgagatctaaagagaagaccggcgccgcctcgattgcgaagatggatatgctcttcttctttattgacaagatg

SEQ ID NO: 16370 - DNA, 200 bp, Emericella nidulans
cgttgcctaattcggtacgtctagctgatttgcatctcaaagaagaatcaaaactaacaggcgaaggttcccgataccggctccagcggtacccacaagacccatgcccttagcgtcggcgaggactcgatcgtccccaagggaattcataaggctgtccacgaaaagcttgagcgcgctctgcctaacaagatccacaa

SEQ ID NO: 16371 - DNA, 200 bp, Emericella nidulans
cagccagtacgacaacctcaaggctggcttcccgtcgtcctagggtaaggttagggtcgagtttctctccgttgacatgccatacttcgttacgttgatacgctcgcttatatgtacatactactatcgttactaggataccggtagaccggctagatgagttgttttgagattttttcattcatattgcaatacctctt

SEQ ID NO: 16372 - DNA, 200 bp, Emericella nidulans; identical to SEQ ID NO: 16370

SEQ ID NO: 16373 - DNA, 200 bp, Emericella nidulans; identical to SEQ ID NO: 16370

SEQ ID NO: 16374 - DNA, 201 bp, Emericella nidulans
ttcgtttccttgttgttggccttacgtggcattggcatccttacctggttgacaggctgatctgccctgacaaagtagatccttaacaattctaaacctaagcgtctcccttttgaatcacctcccaagtttttggctagaggttcgctcaacatgcggttccccgttgacggctgggagctatgtacactgacagtgtat

SEQ ID NO: 16375 - DNA, 210 bp, Emericella nidulans
cgactcgatcacggatttgaaagtccccaggcgagtttcttctccaaacgacgttgaacatgtctggccgcaggacggaacttgattgtgcatgggatacggcgaatatggtctcggcatggggttatgtattatggaaatctcggtttagcgttatgatttgtatgtaatcgcttagatgcagtgcactaagctaatgaattgatgatc

SEQ ID NO: 16376 - DNA, 215 bp, Emericella nidulans
  unsure (1)..(215): unsure at all n locations
cgtgtccaacgctctgaagtcnggtaccgtctggatcaacaactacaacatgatcttgtaccaggctcccttcggtggctccaagcagtccggtctcggccgtgagcttggctcttacgctcttgagaactacacacagatcaagacggtgcactaccgcctgggtgatgctcttttcgcttaaagctaattgtatgatttgatgaaattgcgaa

SEQ ID NO: 16377 - DNA, 215 bp, Emericella nidulans; identical to SEQ ID NO: 16376
  unsure (1)..(215): unsure at all n locations

SEQ ID NO: 16378 - DNA, 225 bp, Emericella nidulans
ggaggcgtcaataacttggatcgcacacagaacgccatcagctaccccgacagccagtacgacaacctcaaggctggcttcccgtcgtcctagggtaaggttagggtcgagtttctctccgttgacatgccatacttcgttacgttgatacgctcgcttatatgtacatactactatcgttactaggataccggtagaccggctagatgagttgttttgagattt

SEQ ID NO: 16379 - DNA, 225 bp, Emericella nidulans
gatgaggtgcaaggtgcatatatgtctggggctattggagcggttgcttctgaaagtaagctctaggtatatatcgttcttggaaaaggatccggagcgttcgataccatgactgtgttctggcacgccaaattattgtaatttgttcgtcttagcacgtgcggggcacaaattatccacttgtatatagcccttggaaatataattaaaacgactgcatgcttt

SEQ ID NO: 16380 - DNA, 230 bp, Emericella nidulans
ccgagaaagccaagctgtagaccagctctgtcttcttttccgctttcatcctgcaaagactgttttgtctcgttgctgtaaaaaacctagacgattcggtttcgtcatggccatacaattgcatagaagtttgtgtttgtcccttaagagatatctgctctagctagccagttgatattaatgttgatgtattctatgtcatatatttctatttgatatcttttatggca

SEQ ID NO: 16381 - DNA, 234 bp, Emericella nidulans
ctggcattctcacttgatcgatccttactgtccctacggttcggagtccagatatcgaatatcaggctcttcgggctcctcaggctttttaggctctttcatactctatcaggctcggttcggcgttggcggatttcttcttgatcatatgccttgacggctttaatcatttcttttctcccttctctcctctttgatgtattatgattgtgatggatgatttttagcgactgc

SEQ ID NO: 16382 - DNA, 244 bp, Emericella nidulans
tgtgcatttggtgatctggtttgcgagggcacgctcgtcattactgcggctcatcttagttacattgatgatgttccggatgctgctgactttcttgttgggaagctttaagtagctcaccttcaagtttctgcatctggggtgagcctggtttccagaccttggggattttttgctggaattcgagatgtttgttctttattggcgaggccgccgacaatagtcctgtatggatattgacgca

SEQ ID NO: 16383 - DNA, 244 bp, Emericella nidulans
tgagtcaggtcatggttctcaacatgatataaccagaaatctgctttcaaatcagatgctgacaactgcgatgcagttttgttcatcggtccaaccgaagacgctgtattctgagcaccacaaaatggcgcgagacgccttatacaagggcgaggctagctacttgtaccattactgcaccgctgcgctcgcgattcatgggctatatgtcctcgcacatttgaagtgcggtttgaacatccat

SEQ ID NO: 16384 - DNA, 244 bp, Emericella nidulans
cgaagaacgaccaaaaagaataccaatgtctctgtgatccatgataagaggaatgaccctgcatctgcatcgctttttggatcttattgtatatgggggcaaacttgcatcgtttaatgcttactctttttctttcatctttatcttctttatttctgtttctttgcctcccttcgctgtatctctatttattttatggaagttgaatgcagggtgttgagtatcttctgaagcctaggaccaa

SEQ ID NO: 16385 - DNA, 245 bp, Emericella nidulans
tacttgatagattcaatattgtacttgacaaaagtattgcaatagaccttgcagccagtccttatttcttggaatatcttaccttagctcatcatatcaatgttctggagtcaagatctgtgagcatgcaagtatacagcttaagaatatgtattatacttgccttacagataatttatagactactttgcaagatattcaacacagaattagtaaaatcaagaaagatgcaactaaagatgctg

SEQ ID NO: 16386 - DNA, 248 bp, Emericella nidulans
tacttagatgcataaaactgatatattctcaacatttgttcacgacctgctaaacaccccacgcttctagatatagattataatgatcactatttaccaaatttctccttctcccagaaccaatgatacaggctcttccactctctcgcctcgtcctccacataatcaccgaccaactccgccgtttcatttgatcccagcgcgtcaacattaaccggattagtattagatgtcatgtcgactgctgc

SEQ ID NO: 16387 - DNA, 251 bp, Emericella nidulans
tgtgcatttggtgatctggtttgcgagggcacgctcgtcattactgcggctcatcttagttacattgatgatgttccggatgctgctgactttcttgttgggaagctttaagtagctcaccttcaagtttctgcatctggggtgagcctggtttccagaccttggggattttttgctggaattcgagatgtttgttctttattggcgaggccgccgacaatagtcctgtatggatattgacgcagaatgaa

SEQ ID NO: 16388 - DNA, 253 bp, Emericella nidulans
caatttccaccatgcacagaatatcttcactacagtgatccagacagagccaccctactaccaacctaatcctaggccacctgcacctttcaacaatcaagtcgggaaatacagttcagatccagcctataactgtaatgatgcaaattttaatggctgcgacgaggcctgggcagtcatcatcacagagagtcaaaatatccatatcggcagcgcgggcacctactcctggtttagtgcatatactcaagac

SEQ ID NO: 16389 - DNA, 256 bp, Emericella nidulans
tcggagctccagtatctcttggaatattattccctcgtgcgagagggaaagaccaattacatctgtacgactgcgttccacgacgtgactggaggacacccacaagaaccagtcgactttttcaaggtttacgcggaatcgctacagccaaagcacaagagcaagcggcgcaagttgagcacgggcaagaaatagactgagatgtacaatcgaacataattctctacttcagataatatgaaatgtcatctatacc

SEQ ID NO: 16390 - DNA, 266 bp, Emericella nidulans
atttcttcagcctggtggtggccttattccagctccttgactagctcgtcttgtcttcagttgctatataccaggacgttttgacgctttatgatatctccttgatcatgttacctgttatatgtcgatacgatgttgatggatgtgggtctggatatgagtatgggtaataatgtggtggtaataatgaatgcactagctctatcgaccatcaatttcagatgagaggcacgccatggtatttagttatctggcaacaagcctca

SEQ ID NO: 16391 - DNA, 270 bp, Emericella nidulans
caaagttgtctcagcgcctcgttgtcacaactacaccctcccttatcgcgtttcgaacacacgcttactcactgccatgaagggagccgactcgatcacggatttgaaagtccccaggcgagtttcttctccaaacgacgttgaacatgtctggccgcaggacggaacttgattgtgcatgggatacggcgaatatggtctcggcatggggttatgtattatggaaatctcggtttagcgttatgatttgtatgtaatcgcttagatgca

SEQ ID NO: 16392 - DNA, 287 bp, Emericella nidulans
tggtccagatggagtagctgctcagagagccccgtggtcggctcccagttgcgggtggagcaggtcattaccaggtgtagtcagtggtcagtggtcacatcatcctctgaatctctctgccttgctgttcgcccgttagtcaggaaccagctgaggataatcggccttgatcgctcgactttacttccaagctcgatcccaagtaacgttctgcagtagaaatcagttcgacgagagctttattatttaaattattatttacgagatatttcattatctcgaccttc

SEQ ID NO: 16393 - DNA, 287 bp, Emericella nidulans
gcatcgccatcctactcaatccgtctgtcattaaccgtgcatggcgtgactttgtttggcgcaatcccgagttcagtcgtccgtatcagttgcgcgatggtccattcagttttgttggggagcggctgattctgttgagggttcatggttgggtctgtggggcgctagcgacaattaaactacgacgaaaaataccgggctgtaatttattcttttcattattttgtacttgttttgcacttgcttaactttattttgtacgtgtttttaaacttgactttgtactt

SEQ ID NO: 16394 - DNA, 290 bp, Emericella nidulans
gcctcgttctgtttcttccttttgttatgttatctggctataccacgtctcgccctgttccgtcctgtcgttgttcgaaaagcactcaatcaaaaccgttgtctgacaatgacctactgatgatcatgtacagttgcatctatgaggcggcttgacggttcctgtcgctgctcattggttaagatgcgcatgttattgtcgctgtatatattagactcttcgcttggtttcccttggcgctagaatttacgtgatagtcatcacctaataatcttaatatctttttgtta

SEQ ID NO: 16395 - DNA, 297 bp, Emericella nidulans
cagaagtcgccgcttatttgcgcgaggtggctggtgtatccggtgatatcgagggcaatggcaccttatcggttggagatgctctgaaccctgctccaccgcttcctccgaatattaaggtgaatctggggacaatgtctgagcaggaggcgaatggaggcattggcgaggtagatccggaattcaagaggaggattgatgagcttgccgcgcgggaagacttccaaagtgaagcgagccagaacgagctgcggcggcttgttatggatgcgatccaaggatctaatattgaaacgc

SEQ ID NO: 16396 - DNA, 302 bp, Emericella nidulans
ggatctcaaactcccgaaaaatatatggtactaatactgtgtttacgtagctcacggttgctcctgcggtgcttcttgccagtgccctgccggccagtgcaactgcccggtatatactcccctcctgcgcgctgactgtccaatccgctgatgggtttatgtccctctccagaagaactaaatctcgaccctctttgaggtcacgatggtcacgatgagaggggtcgatgcggctgcggaataagagacgatgacgaagtatgaatggggtggatgatagtgccttgcgatgattttgttca

SEQ ID NO: 16397 - DNA, 302 bp, Emericella nidulans; identical to SEQ ID NO: 16396

SEQ ID NO: 16398 - DNA, 308 bp, Emericella nidulans
cagaccggatctcaaactcccgaaaaatatatggtactaatactgtgtttacgtagctcacggttgctcctgcggtgcttcttgccagtgccctgccggccagtgcaactgcccggtatatactcccctcctgcgcgctgactgtccaatccgctgatgggtttatgtccctctccagaagaactaaatctcgaccctctttgaggtcacgatggtcacgatgagaggggtcgatgcggctgcggaataagagacgatgacgaagtatgaatggggtggatgatagtgccttgcgatgattttgttca

SEQ ID NO: 16399 - DNA, 310 bp, Emericella nidulans
acagggccgaccttctggccctgccgatcgagaagccaacgagagtggcgacccgaagaacaaatccaacaaacgagtcccgacggcctccagcctagaaggaagcgagacggagctctcacattatctccattacgaggataacgcctgtttttttgcgccgagttggcaggaccgtcatgcggggcatgatcgagctcatactgcgcggtcatagactattcggtatgtagaccatgcagtgagttacagctggactgatattgagggctgccagtaccgtaaacaaagcaaggatgcagtggtattg

SEQ ID NO: 16400 - DNA, 336 bp, Emericella nidulans
ctgacatccatgcagagcacggcggccgccgtgaagacaaccagccagacaagcgcacgcagcagcaccagttcgcctacggcaaagtcgacccgcaccaggctggccatgagggcggcaaggtcggcggccacgctgggggcgtcgcgagcgggaagggcagtgcgtccaagtacaaccagcagggacaagagcagctcgaggatgaggagccagaatatgaggagtaattgtatttgtgtacactaaataatatgtattggctattttgtaactaggaatcaatatttgttatggagaaaataacaaaatatcatattcctaatgtttgctctt

SEQ ID NO: 16401 - DNA, 347 bp, Emericella nidulans
tggttcatcacggagagacaggagtcggtcaacaagtgatcggcattctaggcgacgaaaatatgagggtgacgatggcgataggcgagacgatcgatattatcgtgaccgagaccgcgagcgtcgttcagaccccgttagagaccgagatcggaaccgggatcgaaagagcagatattacgatgatgacaggaatagttcatggtattcatcatcgactgcctccagcaagcagcggaatcgggacagagacagggaccgagataatgatcgtgattcccgtcgacggaagtagatggaagaatatcgcactccgcttaggacaaatacttcgtcctcagtttatt

SEQ ID NO: 16402 - DNA, 351 bp, Emericella nidulans
ccccgggtcgaatataaagatcggaatgtgtggctaagatatgaaatgcgcagccccattttccgcgctctaggtaaactttcagccgcttagttctgcgtcaaggaattcctaacaaagttctgatttagaatgatttcctcaaggttacatagtagttcacaaggctggctgccgcggtaatggttttggggtactctaggtttgctcaagtagcaccagtgagccgccgacgaaggtaagtcgacaaactcgagcccatcgtgggcttggccattcagtttcagtataaatgaggtcacaaagcaaggtagtaagattaatttagtgtcctgaatggttgaagagcgt

SEQ ID NO: 16403 - DNA, 359 bp, Emericella nidulans
gcgtcgggatagcgacatatcccttcaagataacgaagactattcacggccagttcttcgagtgagtcttctctttctgcgcttcaggatttggccatactgaccctggtttagctcaccaatcccgactagtcgcccaccacttccacgattttccttgaatcatgcatcgaatttcccttattttattcgattttttgcacggcgaaacagcggtgttatgatacccatttgaccatcaactgttattgatctaggagagggcagctcttagcatctcctcggcgtgtctcgatattggagtagtgtattatcagcattatggaagcatttgatatattggttatttgaagcgagcc

SEQ ID NO: 16404 - DNA, 370 bp, Emericella nidulans
aggtcctcataacccctgctccacaggcaacggcgccgagcctgctaaccagcctgatgtataggaagaccttattccagccaaagcgaacaccgttaacatagaaaaaatggctcacaacgcttgccccaagtgcggtgctagtatctccggcgacaacaagagctgcaactcctgcggaagcgtatgcctacctcccgttctggctttctgggcaaccatgataagagctggactgactgcttatcacagacttgccctgtctaagtcggactcttcatccggagggatcatgatggtggaggtgaactttttatctgcgtatatgggtagggctcagggtgcgggaacggtagcccgttcatgaata

SEQ ID NO: 16405 - DNA, 372 bp, Emericella nidulans
cgacccgtgctttattcatttttccgttcatcggtgctcccacagcgcccgtcttttttctattttgaatttgcccacttacctatactgtgatatactggactctcctttcctttcctctcactacctctctcccgccctcctttggctcaccaggatttcctttacaattttctcacttttttatcctccgttctacgtatactcggcgttctaaagcattggatctggagataggacttgggtttgcggtcattgtgcgctttttttttttttggcagggttcacccgatgcgcccgtttttgctcttgttcgaattactgttatggaagacataagtaaccataatgctattaagctgcgtcgattcg

SEQ ID NO: 16406 - DNA, 373 bp, Emericella nidulans
tttgagcaatatccaaaacagatattatttgtgctgctaaaactacacatagaaagtacaggtcttagaaaagagaaagtccagaaaggtacgcaatgatctctgaaacatcacgctgactcctcagtatcctcgttttgaggtcggtagcctttcttataaagattctgagcgtcctcccaagcataccacctttctcggagaacgtgcttaatgttaagttgcgtgacgcgaatctatgtggcaccgtcagttttcatcatatttcaggacttaaggaaatcatacagtgcgaagccgctggttggcttcccattctccgtagcctgcctttaggcgcttcctctccaaatttgaggtggctatacggttc

SEQ ID NO: 16407 - DNA, 375 bp, Emericella nidulans
acaaccccacgacaaagaacaccgaccttgcatcccaagcacagcggaagctggatgacttgagccaggcgggcaaggaccaggccgcccgggcacaacggaagttggatgacctaagccaggctggtaaagaggaggcaaacaagctgagccatgatgtagaggcgaaggcgtctgaggcgaagagcacagtttccggctggtttgggcggaagtgaataccctctttatctgagttgttgttccttggtgttatatgatgatgattgcatgaatttctgtactgcggatgcggagtactacaggctggtcggtgtagctttacttcggtagtcggttagtctaactcatttggcatttatcaatgataataat

SEQ ID NO: 16408 - DNA, 379 bp, Emericella nidulans
gagaaaaagcaatgggacctaggatacaggtcctgtgagcagttggacgtccatctccccgcgttcccattcaccgtgcacacccagccatatctgagggatccagctccccggcttacggaagaaccgacatatgtcagatacgtcgcattcgatcctttcaacattaacatgctagggagacgccgggcacaagccgaacgccccgaccgatgttcgcactggacgatctccaacgcagttggcaagctctgaacctgcccgtacaaatatttgagtcgcaccacgaccgtacagcgagactccagatgaagctccgaggatagtgaagcaaatgcggttttgaggggttgcgggcttttattagcgtcgctgagcc

SEQ ID NO: 16409 - DNA, 387 bp, Emericella nidulans
acctatgcgtcggatcaaatatcgaaaggactgaaatacgcagctacctggggtggctttcgagttcgtccgaaaggccttgaacacagattagaagactttgagctcgcacaccaccgacgaggaacttacgtcagaataggaaacaggagtgtacccaggagaagcggtgccattatgaaatgtttaacctagtcgatctgataagagaaagggtttttcgcctaccagtactgtcgctgactgaagcaattctgattaacctgtgcctgggttctacaagagtggtaaacaactatacttgctcaacaagcaatgcggatcatggaaatatcatcccattaaggagttggatctagatctactttacgtttctcagattcctga

SEQ ID NO: 16410 - DNA, 390 bp, Emericella nidulans
gtagtcggggacacggatctcatgcggtctgggccgtcgcccgttatgggcgcggagctgggaaggatgaaccgacatacagaatttgtgacgggcgtggattggtgtctttttgggagcgaggggtggtgcgcaagcgttgggtgggatgagagcgtttatgtatgggatgtgcgtgcggtgatgggatagatggcgttcagtttcccttcccctacaactgggtcctctcttcattggatatttagattgcatggcatatgataccttcatttttcctcgctattttctggctatcaatttgcatgtttactcttcgggccaagatagtggcagcacgttggttacccagttaacctatctatataaaagatccacctcttctttcca

SEQ ID NO: 16411 - DNA, 397 bp, Emericella nidulans
tgcttaccgaccgtcgtactgtcgacgatcgctctcggcctgagcttcgcgcgttcttctttgctttcagtgtccaacgtgagatcgtatcggtcagatttctatgcaactgaggaaatgttagtcggacggaaacccaagggaacccaatggatgcagtactgcggtgtttccatggtgcttcgaactattttcccagctatacgccaccagtccgcccaataagtccagaagaatagttgaaaaccgagggatctccgttgtattccccgcgctaaagaatctagagaatctcgcggaatgttttatttattccgaggcttgcgaggaaactcgcaagcctcgaatggtccatcgaccttggcggggccgcgctggaatcaaggtcgatacatca

SEQ ID NO: 16412 - DNA, 400 bp, Emericella nidulans
cacaaggtcaaccatggagtcctcggcgcgattggtggcgcgattgtcggaagtctcgcacaggatgcgctaaagaagaaagacaagcacaaggatgaaccctactacgatcagcactctcagtacggcggttcccaccactctggccaatctggccactcttcaaagctggaccagctcggcagcttcttcaagaaatgagcgatgaacatttgacacggccgcttgactttcttctgttagtcctatgaggttatgattgtggaataccattactcgcttttttctttgtctctctcgtcgtctgaagggttctatctgtcgcctgggctggttagaatgttgggacggggcacgggtttttttgtctcttgtacacgatacattgttatgcattttt

SEQ ID NO: 16413 - DNA, 403 bp, Emericella nidulans
tagtcgaaatgcgactcgtgggcgggggcggagcagcctctcgtcctatgtcttcgagagcaccagtcagtctcctatgtgttggttacctggcgatgacgctctcggcataataaaagttttcttatttcttctgaatcgtgcatgcgacttcagtgatgtcttcttactcttcgtccactcgtcttgataattatcttctgtttctctactcaactatgttcttgatcaaccgttagctggcagttctgaccgtctcccggacagggattgactcgtggcctccttactgttgtatgttttctcttttcatctttccaccagattgttctgtttgagtgctgtccactctcttaattgttgtgccagaatatgattattaccaatccattttattgttgca

SEQ ID NO: 16414 - DNA, 405 bp, Emericella nidulans
aggatgatctgtccgacctcgagatcaaattggatcgttccaagattcttagccatggacgcccagcggtggaaaaataccttcagaagctacacgtctacaagagcacggcagatgttgaagctggaaaagccctttacgatgatatcacctctgttgacgagtggtggggcaccaaagtccgcgatatcgttctgaagaataagattccccgtaagatatttgtgcaagccaacacaattcttgagggtgacgaagtcattctcaaggagtacgagccgacactcgagggtattatccagagttttgctgagcgcagtgtctaattagatgctcccaatattctaagctacctcaactttaattcaccaagtgacttagaaatcaacaatcacctttttcagg

SEQ ID NO: 16415 - DNA, 408 bp, Emericella nidulans
ttcttcttttcccgctttcaaacgattgcttatattagctttgcttaaagagatgaagttatggccgagtacgggaagggattgaccgctcgacccgtgctttattcatttttccgttcatcggtgctcccacagcgcccgtcttttttctattttgaatttgcccacttacctatactgtgatatactggactctcctttcctttcctctcactacctctctcccgccctcctttggctcaccaggatttcctttacaattttctcacttttttatcctccgttctacgtatactcggcgttctaaagcattggatctggagataggacttgggtttgcggtcattgtgcgctttttttttttttggcagggttcacccgatgcgcccgtttttgctcttgttcgaa

SEQ ID NO: 16416 - DNA, 409 bp, Emericella nidulans
tctgtgaattaccctggactcaactctcatccgaaccgtgaaatcgccgtcaagcagcatcgcaagggcatgggaggcggcatgctgagtttccggatcaagggaggtcacaaggccgcccatctgttctgtgaatataccaagatcttcacacttgcagagagcttaggtggtgtagagagtctctgcgaagttccttcaagcatgacccatgctggaattcccaaagaagagcgagaagctgctggtgtttacgatgacttggtccgcatgagctgcggaattgaagatgttgaggacctgacggctgatacaatgcaggcacttgagagggctgtggctgcaagccaggcgctggagaacggaagtgcttgattaagacacaagtaaacttgacgacggtagagca

SEQ ID NO: 16417 - DNA, 410 bp, Emericella nidulans
cagcgctactcggagatcatagctattaaccggagacagggacgcatactaggtgctgtcttcgggtcgacgttaatatcggtattagcggtcacgggtatctacttatggagacagccaacgactagactcttgtcgctggcaagtttcagaggcgccttacagggtgctctacagggcgccctaacgggaactgcgtagatgtatttcaagtatgttcatatcaatctgtcgatgttgggaggggatttgcaaagttggtatacacactagattgtagaggctcagactcggtttgggctatcttgcatcatctcgttgtttgtgcctgccgcctcttgtggcatattatacgtacactctgcttctacggtagctactacgactaaaatagatcttctcttctctga

SEQ ID NO: 16418 - DNA, 411 bp, Emericella nidulans
ttggaggagatggaagatggtacgtatttcatagtgcaggtatacaataatgctgacggctcgcagtattcaaatcgaacattgctcggtttaggaaagatgaagagcgtgctgaggatggagctcctacatatacgcagtgagactgcgtacggctgcgagcactcaatgatcgatcctggtctatagttgtatggtagtaaagtggaatacaatgaacacaactgatcttgcaaatcactcgatattttctttctgaaatttccacctgatgtgtgcccgcatacaccgggaggctcaatcctgagcgcctaagctagggcttcaacggtgaatatgcatataatgagtgtctaatattgagtaacacgctaatgatgtatatacaaagttcataagtcatgacacatg

SEQ ID NO: 16419 - DNA, 423 bp, Emericella nidulans
gcggttagaagagcaagagcgtcgcaagccgcgagagaaggcaggtcaactccagcgcggcaaaacaccaacgatgagggatactttgcgtacatgcagcgccaggtgcaagagcgcacggagaagctttctttcgctggcgataacatggacagattggaggagacaagtagcggctgggcgcgggacgtcaacaaatacgtccagaaccagaagaagaaagcagttcttggtggtaagtgtcttgcgagctcgcactatccatacttaatgccaaccatttcgctaataaccgatagttcttgggtcgaagttcggtctttaggcggcttttctggttctgctcctcgcaagatatcataggtagttgggcgtttggtataattaatattagtctatgcttaggcattctatagactcgcg

SEQ ID NO: 16420 - DNA, 429 bp, Emericella nidulans
gctttcaacctcactttaacttccttaatgatgaatcgacataaaaaaaagacaagcatatgtccaagtcggcaccgccggctaagacgacaattgtcattactgacacccgtcatatcctgtttactcagcgaagtcttgtcggtcccagtactgatagctcgtagtaagtaggaaaattgacatggccgtctttgactgcgccctggattgtgagtttccctcctttttttttccccttttacaatgatgatttacttttattttatcacgacggtcaacatatgtctaccttgatgaccacagcctgtgacagggcatgtaactgaaactgtctcccttcacttgtctcttttcatgttcagtgcggaaacaaacactaacatgttccagtctcttgtaggtcaatttgccttgaattcattcgtt

SEQ ID NO: 16421 - DNA, 443 bp, Emericella nidulans
tcgaccaattctccaccttcacaccccacgtcgagcagatgcatatgaccgagaagctagcggattgtgactacatcgtgcagtttgttatggatgatattaggcagtttacaagactctgggaggacgaggagttccggaaaactgttaagccggatcatgtgaactttgcggacgagagcaagtctgggttagtccttctttcctatatttcaaggcaaaagtgtgctgatgagtttggggggtaataggatatcgattgggtacaggacgagattcatctcgccggaggaagggttggggcagttgaaaaattgaggacaggctcatttcactacattttgaccataaagaatgtttaatgctagagggctggatcgagctggacagttatagattggttgatacttcgatgagatagatttatatataatgctgagtaa

SEQ ID NO: 16422 - DNA, 447 bp, Emericella nidulans
caggctgaagagaaatgtagcagctcggcgttgattggcggtggtacaacatgactggatacaggcagtgcggcaatgaagggtacctaagggattgaagtttgatgttaggtgttggtgaaaattaccctgagccccggctttcgatatcatatccaaattctccacaacaaaagccataaaccgcacagagagactggggtcattatcttgaagcggcaaagtgatggggctgcgaagaatgtctgaattacggtggctttttagcagcctaggtgtcaagcttggattatgactgtcaaactaaggcgcgtgtctatttgaataacctcaactgtaccgtattaggaagccacaacccggcggtccgcttcttcaaccttcgtcagagccgacctattgattcagctctatagccagctgtcatcagttcatggcagacgctaa

SEQ ID NO: 16423 - DNA, 452 bp, Emericella nidulans
cgaatctttgtgagccataccagacaatcattcgattcgacgcctgggcagcagaacgtcttactgaaggtccttttcaccgtcaccggacggctggcgccgctgatggaaacactgtctgagaatccgcttacgcttaaggaatcaagtgctactgaacgaagcaccctcaacccacctttcgtgttcggacaatgacgttccgatgggcgaataacatgcaaactggacccttgtcccttttcaacccttggatacccttttgtcttgctctcatcgtttgttcagctgacagatatcttcacgtcttctgtacctcaactttgtctcgggtgaaaattgctatagattctggcgcaggtggctttaatgtattgataccagcatgcaggtgtcctttcctttcctttcttctcttctctttttttttttctctagacattttgtaaggt

SEQ ID NO: 16424 - DNA, 457 bp, Emericella nidulans
taagctgtggaacgtggagaacgacaagccgagcatggtcgtctcgcggaaactcgaggtcggcaaggtcttctcgacgaccttcgcgccggacgcagaagtcggcttccggttggctgtggctggaagcaagggcactgtccagatctgggatacatctactaatgctgctgttcggagggcatttgtgtctcggctgccgtcgcttcaaggagaggtgcaggagcgtatggttggtatgcagcctgatcaggatgagtcggatgatgatggtgcaccggagactggcgcggctggtggtgcggatggttgggagtcgatggacgaggattagatgcgaggcttgcctatgtctaaagatgagcatggcttactgaggcgacggctgtttttttgatagtttctactccgtccatatatagcgcgtcttcgtaactgtcatagctttcatccgctt

SEQ ID NO: 16425 - DNA, 458 bp, Emericella nidulans
accctcgacagtagctggagcccgcgtttctgacgggccctctattttcttcaatatctctaattgtcttatagatatatatttctttctctcaagatttctgggccttcccgctattgccgcagagctcggatacaactaggatatagcaactacaacgaagccacttgatgtccgggttttctccgttataaccgaattagacgatcacgcgtggcgtttccaagcctagcaaccctcagcgttttcgtctcggcagccccatcccaacttaaaagtgccgtgccttttagccgtttaaaaccttcctgctggattttaactctgagttgtccactattacactctactctccacacagacacagaaccctgtcatgtcagttcgctcgtgccagcgcgcttgtatatgcccgtacgctctatatacttacccaaagatatgtatacatatgcagt

SEQ ID NO: 16426 - DNA, 467 bp, Emericella nidulans
ctgcagttgaacctgaacccggcacgcagccgggtccgggatcccgtccgttgagaccaaggtccgtctagcaataacaacgcaggagctctggcacatgctcagtgacgaatttgggtatccgatgcgcggtatgggaccggcagagtggttggacgctatgcgggctgcagtgcatgcgcaaggcgagtcgcatcgtctctggcctgtactgcatttcctggaagccggtggtgggtatatgggcctacctgtaggaggttgccagttgcagggagcaacgggagcggatcaagagtcggaaaaagaagagttactggcgtcactgaggaagagtatcagctatatgcgccagattggctatcttcagagtgatgcgccacacgctgtggataaggtagtgtttgggcgccgcaatgtttagttggatgagatgtctttgtctgtttgtttgtatataatcaatg

SEQ ID NO: 16427 - DNA, 468 bp, Emericella nidulans
cggttagccaaggggtatttggcctgtcggatggacaagtgcgttcctaaccctgttctgttctactccgatgaggttgtttgcttactgaattggcgtttcctgtctgtgtaggaacctcatggcaccagatgatttcagaaatcttgggcttgtttttgagaacgacggcgatgggtcacacgcacaagcacaggcacagacacaagtacagacacaaagtgggtcgagttcgggttaatagcagatttggggttgcattgaggctttggtggaaagcttggtgcacggttgatgtttactggtactcccgctttagctcgcgccttgcatgacatggcgggctgtatgaggtcgatgaggtcgatgaggtcgatgaggtcggtttaaactgtacattacatgtatcatagggttgtttttctctgtatctcatgagttatgatatttctcctacctcctgcagtg

SEQ ID NO: 16428 - DNA, 477 bp, Emericella nidulans
ttagtcctcggcgtcaaatcacggacattgctactggggaacatcaagatcggcgatattcttagcgaagtgctatctatggtccggcgacaccacgtccgcttggaaggggactttgtcattgtcgtcatctccattctcctcctcgaaggcattggccggagcatggatcctgatctcgatctctttaagaggttagcgccgatattccctgccttgctgctcgtaatcatcgagctgccacccgctcaaaaccccctcttttggtaatccgcagaactgactcacttttccagtgcccttcccatcttacggaaactcggttccaatgccactttcctaaagacaattcggtcgggcgacacctcaatgcttcgcgtctgggttggtcttgaagctcgtggcttacttagggcgagcattgagagtgtggagaattgtgtgaagtatgatttactgtcgcctaatgtctagatg

SEQ ID NO: 16429 - DNA, 478 bp, Emericella nidulans
gacacgtctgcgtctgtttcgctcccgctgcataccaaatctccatcttcctctacttcctcttcttccacaccggctcaaggtacattctcaccttcccagttcacgtttctctaaaatacgctgaagaagattaagactaacgatgaacagccaaagaacagcccaaaatgcctgtcgccgctcctgcctctcccaatcgccaattcggcacggtcaaatggtacaatgacgcgcagggttttggctttataacctccgactttggtggcgagctcatcctccgccgccagtcgatcactgagcacacacagcgcctgaaggaggggatgaaggtctcctatgaggcggtacatttgcccatgttgctcatggcagagcaggtgcagccggaggaatagctgtctgacttgaggctataagcctgtgctcattctttggggtttgggtttggttctaggttttggtttcggtttga

SEQ ID NO: 16430 - DNA, 478 bp, Emericella nidulans; identical to SEQ ID NO: 16429

SEQ ID NO: 16431 - DNA, 478 bp, Emericella nidulans; identical to SEQ ID NO: 16429

SEQ ID NO: 16432 - DNA, 478 bp, Emericella nidulans; identical to SEQ ID NO: 16429

SEQ ID NO: 16433 - DNA, 480 bp, Emericella nidulans
tggggtaagtgcattcctgttggttttggctcatagagtactaacatgatcatagatgatgagactaacctccaggagatggaggccaacgttcgcgctatcgagaaggacggtctcgtttggggtgcctccaagttcgtcgctgttggtttcggtattaagaagctccagatcaacatggtcgtcgaagatgaaaagatctccatcgacgagctccaggcccagatcgaggaggacgaggaccacgtccagtctaccgatgtcgtaagtatagatacccgcccgttatatacgatgctaaaccccttctaggctgctatgcagaagctgtaaatgaaatgaccattataatgaatgtcaattgagtgatgacgacgttgccggtatcaaggaaaatatttatgtcatgaacttgaatgcctagaatgtggccaggcaatcctggttatcttatgaactaaaatcaacattatacccgac

SEQ ID NO: 16434 - DNA, 480 bp, Emericella nidulans
ttgcttgtggtgatcatcgtccctgctggtaagacccacctgagttccgcactactggaaagtaggaaaacttgctcgcaatgctaactgctgtttcttgccagttgttacaaccacgcgctaagctacgacacttcaacgacggtcatgttatccagcccgacccgggacctgtgcgaatatcgttgcagctttgttttcagcctctaataccttgtgtgctttttattgggcgtcgattcctgctgttgtcacgaataagccttattttagcaggccatggacgcgatgaattgatttggctcttcagatgcgggctatgctatgctatgccacacgactcgtcgacggcgaagatgtaaatgatactctggtgtttgttgcttttttttgtctcttgctactcgactttcccttctcatgtgctactgtgctgtttgtctagcattctataatgaacctatcatacctgtctcttca

SEQ ID NO: 16435 - DNA, 486 bp, Emericella nidulans
cctcgctcaggtcctcattgcatggggtctgcgccgtggctacgtcgtcctgcccaagagctccaaccccgcgcgcattgagtccaacttcaagaccatcgagctgtccgacgaggactacgaggccgtcaacgctgtcgccaagggccgtcacttccgcttcgtcaacatgaaggacacctttggctacgacgtatggcccgaggagaccgccaagaacatctccgcctaaatggttacacgattctctgttttgggtggctggtagggatttttttttttctgtttggatttggtagcggcttcatgttatgcaggtcatagccgcagctcgtccattctcctctcttcttaccctcggctatatctacggatttgctaccgagaccgaagtagcaggagggcatgtgagccgagcgaagccaggaaacgatgtaaacgaaactgaagaactagctttctctagcttgaacttgggatagaacg

SEQ ID NO: 16436 - DNA, 493 bp, Emericella nidulans
caggtgctgagccgagtatcggctgctggcttgctcactgttctcgtgtcgttgatcgatgcgaacagttcatccttgctgagcaccattacctcctctacttcctcatcacagccatgtacccgcgcttccttgtcacgctcgacgaagacctccagccgcttccggtcaacgtccgcgtcggacaggctgttgatgttgttggacaggctggaaggccaaagacgatcactggttggcagacacagagcacccctgtgctgctttcctacggtgagcgagcagagctggaggatgagaaatatattcctctcagtagcacattggagggtttggttatcttgcgtaaggtaagtcatcgcagcttctctgtattgtgtacgaacatttctaacattctcacagaaccctaactgggaggaagaaagctccgcctgagcaacagtgtcctgaatggtatctagtgagatagaccaaacgcaatatctggcgt

SEQ ID NO: 16437 - DNA, 501 bp, Emericella nidulans
taatttttggcggcaacagcgtggcttcaatacgtttgtcctaagaccacactgtggcgaagccggagccaccgaccatcttgcagtcggattcctttgctgccatagcatcagtcatggtattttactccgaaaggttcctttactgcaatatttgttctatctcgaccaaatcggcattgctatgtcaccgcttagcaataatgccctattcctcacatatgacaagaatccattcgcccacttcttcaaaagaggcctgaatgtttcactgtcaacagatgatcctctgcaatttgcgttcacaaaggagcctttgatcgaggaatactctgttgcggcacagatctacaagttcagcgcagttgatatgtgcgagcttgcgaagcattctgttgagcagagtggttttgaactctcgttaaaggaaagatggcttggttcaaactgctccttggctggtgtcgcagggaacaatgttgcaaagagtaacgtgcctga

SEQ ID NO: 16438 - DNA, 503 bp, Emericella nidulans
gcttcaatccggccatctacggtggtccccgcctcataggaatcccacattctggaaggagaatgcccgccgaatcctggatgagaacagcggagcgcttcctaagaagctcaaggagataatctctaagagctgggaaaacgacaagcaggtccttgccattgcttgcaacgatgtgggacatttggttaaggaactacccgaaaggcgggggcagctggagaaactaggtttcaagacacgggtgatggaactgatggccgacaaagatgagtcggtgcgatgggagagcttgcgggcggtgggggagtggctccgttatacctttgatgattgaattgtacatcctcttcctgtcgcatgtcggataggaagtaaaccaccactgctttccctttttcttcttacaacttgtaaacattcgaagcgtgtcgcctcttcagtgtacggaggatttacgtgtgtatagcttcatagagcttcaagcaattgaaacctcgact

SEQ ID NO: 16439 - DNA, 508 bp, Emericella nidulans
gtgtctttgcctctggcttcagcaaggtccttatacaagacgatcaacgagaactttggaaccatcgttttctgtcgccgctacctggaccgtctggggttgcagcggtatctggcgggtgtacgtcggccttcaccgcaatgactacagtcactaaagaaactgcagatgaatactctcgtgcagcacggagttgtcgacgtttatgcacctcttgttgacatcaaggggtcgtactctgcccaattcgagcatgtatgttcttagggccctcgaccgtaattcaaacatgaactaatcatactagaccgtcttgttgcgagagtcaaataaggaagtcataagtcgcggagacgattactgagctttctaaccggaaactaggcgaggcctaaggctaacccaggtctctgccaacgtagtacaacactactctttcatctgtgcgtgattactgaagcttgctacctactatattcgttccttcaatctatcgaactcagctcga

SEQ ID NO: 16440 - DNA, 515 bp, Emericella nidulans
atgcggtacccccttctactcctccccttcagtcgcctacgacccgcaaagaatcggcatgcagggcgaattcggcgggatcggccacaatgtctcgatcgagaacctgtggaacgtacaagcggcaatcaacaccatcccagaaacatacgagattgacgaggacttggatacttggaactaccgcgcgcactatctgctctctgagttgactgagcaggttacaaagtttgcgtgcagcgcagcggtctggactcagaccactgatgttgagggagaagtcaacgggctactcacgtatgatcgaagagtgcagaggacggatgtggagcagtggaaggaggatatcagagggctatataaggctgcgagggatagggcttaagctgatgggcaccggaatacatggttatgatgatatgacaagtggcgtttatgttcatcttgatttgacatgattcctgtacattcattttgaagtatatgttctgcatttctattgtacatcatttgga

SEQ ID NO: 16441 - DNA, 520 bp, Emericella nidulans
caccgttccaaggataccagcgccgtcagatctcagggggggggagaataatccgatccaaccaagcagggtcgtccagtggtacggcctcgcagtcataaagtagatgggatctgattggttttgctgggtagtcgcttagcgagatccatccgttccgagtcttccaagctgacgacctccccgatagtggtactcatcccggccagcaccagaaaacttcgttgttatggtttgactggtaagggacagactacagagcatgaaagcggttccacctgtcgctgacaagccctgctgggcgcagacgtcatgtctagcgatgggccacaaagtccagcctctagactgctctgtcaaggggcctctttcatcatagggccagggtctgactggggcaccgctattcatggaaacaatgacgctgttggactggctttgtgcgactgtgaagtaattcttattaagtctagtcatatgcagaatgcaggtagaggattataaataaattataccaagt

SEQ ID NO: 16442 - DNA, 528 bp, Emericella nidulans
gatggactgaaggcaacaccgccatccagatcatcttcgtgatgctcatcttccccgtcataatgaatgctattcagtattatattatcgatattttcataaagaagccactctccgtgtctcacgacctcgagagtgccgataccgcaagcgacaacgacgccgacgaccggcatgcattgctggccggattggaggatgatgatacatttgaccgtgatgggtcgctaggaagtgacgaaagaacgttacatagccccgtgcagtttaaggaagctctggaccatctgaatgctgctaaaagagatccggtgggttctctggactctgcatcaacgccaacctccagtagcgcacgcgaaaacgatgacacgactttgtctacagaaatcaatgtgcaaccgaaagatatgtaatgatttgttttataacgttctgcgttggcgtttggagatgacggctcgcaattatgttagggttgccggtctagtttacttatatcactgcgtatacgaaaacatatttctc

SEQ ID NO: 16443 - DNA, 539 bp, Emericella nidulans
ccaagattaccggcaaagaaggaaccaaattcaccggaaaagcgcgcgttttcgacaaggagtaccagcttaacgatgccttgacgcagggcaagatcccccgcggagaaaaccttgtgctcatcgttcgctacgaaggtccaaagggaggaccaggtatgccagaacagctcaaagccagtgcggcgcttatgggtgcaaaactgaccaacgtggcattgattacggatggtcggtactctggggcctcgcatggctttatcgttgggcatattgtgccagaggcagcagtgggaggccccattgccgttgttcgtgacggggactctgtcactatcaacgcggagaccaacgaactcagcatggatgtttcggatgaggagattcaacggcggttgaaagaatggaagccaccggctcctactgtgacgcgcggtgtgcttgcgaagtatgcccggctggtaggggatgcttcgcacggtgccatgacagatctgttttgaagccaatcaattctacaaactagcccctgcgttttt

SEQ ID NO: 16444 - DNA, 545 bp, Emericella nidulans
tcccgcaatctgtgtatgacatgcagagcaacttctacccgacaatcaagggtcaatacggagtgccactggatacccgccatcaatacacgaaaggtatgtggccatctactcgtcgcggctgtataattgacggtctcaggtgattgggagctcttcacggcggcagtcgcatcagtaagcacacgagacatgttcatcaaactacttgcccagtggataaacgagacgccaacgaaccgtccacttacggatctctatgacactgtaaccggagagtaagtgtacctacctaaacctaggagacgctttgctgattcactcagctacccaccggtagttttcatcgctcgacctgtcatgggcgcggcattcactttgttgcttctcgactgaaattctttccaggtacatacatgctttatcaggacaaaagagcggctaggcggtccattcccagtatttgtgttagatgtgatatatatggtcgtgtttaagttgtgtaatattgtgtggtagtatatagcatcagttatagccttttt

SEQ ID NO: 16445 - DNA, 545 bp, Emericella nidulans; identical to SEQ ID NO: 16444

SEQ ID NO: 16446 - DNA, 551 bp, Emericella nidulans
cgaattgagcgatcaaatatacagtgtatgttaataaaaatacttataactaattgtcaagcgcttgctaactgattagaaggatgaaaatattctgattccacttaccgacgcttcgaggaacccattgaaggtcttgaagttggaatatagtaatgatcttcctgaatatccattaactgacccaaatggatatggctatgttataaacgtgccccctaatcagcggagggaaactgtcgaggacatggtcaacagcgtaagtacttgtcacgtggctgttgggtgcttaccaagtgattactaactacttgatagattcaatattatacttgacaaaagtattgcaatagaccttgcagccagtccttatttcttggaatatcttaccttagcttatcatattagtgttctggagtcaagatctgtaagcatgcaagtatacagcttaagaatatatattatacttgccttacagataatttatagactactttacaagacattcaacacagaattagtgaaatcaagaaagatgcaactaaagatgc

SEQ ID NO: 16447 - DNA, 561 bp, Emericella nidulans
gagaacttggctcccaagaacgccggcggtggtgagcctccttctggtgctctctccaaagccatcaacgagagcttcggtagcctcgagaatttccagggccagatgaacactgctctcgccgctatccagggaagcggctgggcctggctggttcaggacaagcaaactggcagcatcgccatcaagacctacgcggtaagttgatactgggtttctcgtggtggcagagacgtagttacttatccaagtcgcatttcagaaccaggaccccgttgttggacagttcaagcccctccttggtattgatgcttgggagcacgcctactagtaagtgtctttggtcccctcggttgttcttctccgctaacccgtacgcagcctgcaataccagaaccgcaaggccgaatacttcaaggcgatctgggaggtcatcaactggaaggccgttgagaagcgctttgcgtaagggttgagcgcatgtcgtattgaattgttggatataaccccatgtaacctgtagttgtgacaatcctaaattatgatacgtacttgctttcc

SEQ ID NO: 16448 - DNA, 565 bp, Emericella nidulans
gagaacttggctcccaagaacgccggcggtggtgagcctccttctggtgctctctccaaagccatcaacgagagcttcggtagcctcgagaatttccagggccagatgaacactgctctcgccgctatccagggaagcggctgggcctggctggttcaggacaagcaaactggcagcatcgccatcaagacctacgcggtaagttgatactgggtttctcgtggtggcagagacgtagttacttatccaagtcgcatttcagaaccaggaccccgttgttggacagttcaagcccctccttggtattgatgcttgggagcacgcctactagtaagtgtctttggtcccctcggttgttcttctccgctaacccgtacgcagcctgcaataccagaaccgcaaggccgaatacttcaaggcgatctgggaggtcatcaactggaaggccgttgagaagcgctttgcgtaagggttgagcgcatgtcgtattgaattgttggatataaccccatgtaacctgtagttgtgacaatcctaaattatgatacgtacttgctttcctatg

SEQ ID NO: 16449 - DNA, 567 bp, Emericella nidulans
cagcaacaacagtatcgctgaccagcatcttcactccaccccctgcctgcttaagtagctggatctacgaagcttcggactacagcagcgttgagagcgtcatcctcgtccaaaataccattaatcccagcgaggttgtttttttttttttttcggctggctttaatcacgccgaacgcgacaacgatgatgttatcttcagcctcggggcgtgcctagatgggtatacgacaaacgcccaagcgactactgtggaagcgacggtgacggccagttgttatttaaggtgcgcagaactgttctcaagatcctaatattttgacatcccagtactgacgggtggtgtgtatgtacacagtggctactcctaccgctcgaactacggcaagcccgagcaaggctgcgtcagtacgacacgggcattacacatgtggctgcaagggctggaggtctaggtacaacggttgactgcacaactagcacgacggtattgggcacattggagatgtggcccagccgattaggatcatgtaccaggagcgcgatttgagcctccaaactacgcct

SEQ ID NO: 16450 - DNA, 583 bp, Emericella nidulans
gtgggtttttcttcgagcagaagccgagtggagtaagtcttcctgcacaaggctgaggctaatgaatactaatgagaatttgtccagttcgaaacagccgtgggccagcaccgagtgacgtcctacttggggagtacaacgacaaactggacacagattgaacggccattcaccgtcaagctgagttgttcttatttaatcaagttatatagacgagacgaccttgtattctccctggatatgttgcaatcgggactaatgcctccgtcccccttttcttcacattttgctccgtcgtgccaaacattttttccatcgcgcttcagcattcttcatttcttgcgcattgttatacattggggatttcgttgagcaaacatttcccgtgttcattattttccaatgtgatccaggaggatctgtacctttttctttaccgtatcatatgggcaagcgcgttgacggagcttactctcggacataatactgtctttctttgtggatctttctcttctttattattgtgacacgagaaatggacaggaggatttaataggtctaatcgttgagcgcatatgaaatg

SEQ ID NO: 16451 - DNA, 592 bp, Emericella nidulans
gtccccgacagcatcaccgtcgccgaaggaagctctaagtgtggtgaccaagcccagctgtcctgctgcaacgacgtcaagtacggcggagacactaccgttgtacaaaagggtatcgccgctgggctgctgagtgacctgctcggtgccggctctgccgccgaaggcctcggtgctttcagcggttgctcgaagcttgatatctctcgtacgttttcctatttccttgagttttggttttcggttattttcttcgggttgcgtgcagggtgctaatgacgactacagtacttatcggcatcgaagatatcctgaaccagaagtgcaagcagaacattgcttgctgtgcgaagagtggcggcagtgcggtatgttcacattgaccctataactctaaagattagaagacggtgctgatgatctcttaggacggcgacctcgtgggcgtacgctcccctgcattgcccttggctccattctgtaatcgctggtttgctcatggtatttagagggagaaggtgaaggcaggatgtgcggttgatgttgtaacttcagactgtcataaaaattcgttcgaataaatacattaata

SEQ ID NO: 16452 - DNA, 592 bp, Emericella nidulans
caacttggctgtgtcagctcaagggttccgcagaggtgccaaccgcgtgcggaagcaaatgtggtggaaggacatgaagatgcgtgtttgtctgattatttgcattatcctcttgcttgtggtgatcatcgtccctgctggtaagacccacctgagttccgcactactggaaagtaggaaaacttgctcgcaatgctaactgctgtttcttgccagttgttacaaccacgcgctaagctacgacacttcaacgacggtcatgttatccagcccgacccgggacctgtgcgaatatcgttgcagctttgttttcagcctctaataccttgtgtgctttttattgggcgtcgattcctgctgttgtcacgaataagccttattttagcaggccatggacgcgatgaattgatttggctcttcagatgcgggctatgctatgctatgccacacgactcgtcgacggcgaagatgtaaatgatactctggtgtttgttgcttttttttgtctcttgctactcgactttcccttctcatgtgctactgtgctgtttgtctagcattctataatgaacctatcatacctgtctcttca

SEQ ID NO: 16453 - DNA, 604 bp, Emericella nidulans
caattgagctttatatacaaactcttcacttcaattaacgcctaatactccttgaccatttttgaatcactcatcgcacaatgtcctttacacgcacccccctccgcctctcgcgggctatcaagaccacacgcccccaagtcacccgccgtacatacgcctcagagcctgcgccgcaacagggcggcaacaactcgacatggtatgtaccagcactgcccgcatcataccaactcttgcatttacactatctaggatgatcattaccgccgccctcggcatccctgccgcgtattatctcttcgcgggtcgcggagatacccacccaaccccctctgagaaggaccagccagcgagccgaaaggctcctgctggagggaacagcatgtcgtcgaagcaggaaggtctgagcaacaaggatacgagcaacccatatatcaacgagcccggcaagagtataacgggcgaaggcgagacagagtcggccaaattcaaggggacggtttcgccgcagaggccgcaaaactgagcacgtgctctttgtatgatacgaaactattgagggtccagtaatagaataagcaattgtacacatttgcataaa

SEQ ID NO: 16454 - DNA, 611 bp, Emericella nidulans
gtcgccgctacaccatatttctacatacaaccagagtcccatccaagcctaccagtgccatacattttattacccccttacactgcttctcctcccttaaagacagccctactgttactgacctttctccctcagatctcccttccacctcccgtgtctgaccatgtttgaaacccgcctctgcggcgcttgtggcgagcctgctaccggggttgccggcatttcccagagctggtacgaaacctgtccggggtgcgacgcaatcaacaatggccttacaatgtgtgatgtgtgcatggaaggcgatgaggagattgaaggggtctgctggaggtgcaacgatgaagaatggatccgttgttcttatgaatgtgagaatgggtatgtacaaagggttgagcggtgtcctagtgagatgcattgtgatcactgggagtatgaggatgactgagggtttagggcattatatggtagttaaggatccctgtcttgtcagggcctaggactctttcgatgggctatcgtcagatgtatggagatgtgaatacagtctctgtgctttgttccttggcctctatcttccagaagctcgttctagatgcactttttgg

SEQ ID NO: 16455 - DNA, 615 bp, Emericella nidulans
tatcccagctagttgcccaccatttctttcatcttccgtcgacttttcgggtcttttgcccccgcctctccagctacaatgtcttccgcaaaggtcaaggcccagcaaatcattgatgagaacggcgttggtatgtttttcctccgatcccgcgataagactagagcgaggctaacagggtcgatttggtaaagtcgtcttctccaagtcctactgcccctactgcaaggccagcaagagcctcctgagcgaactgggcgccaaatactacgcgcttgagctggataccatcggtacgttgcgtttacctggctccgttattgttgtaacttagatgggtaactgtgaaccgctgctaacgactttttttcatagatgacggagctgacctccagaacgcccttgaggaaatcagcggccagcgcaccgttcccaacatctacattgccaaaaagcacattggtggaaactcggacctccagggtatcaagaaggatctgcccgcgctgttaaaggatgctggagctctgtaaattggctttagctatataagtgaatgtgtgtcgttggagcgggataatagctcgctgataatataacatatatgcatttcta

SEQ ID NO: 16456 - DNA, 633 bp, Emericella nidulans
aagacatattttcttgtataataattgctatattgtgagctccttgcaagccatgtcatttcttttcagcttcgttgggaagaagattctcgctgagtctgcgagaaaccattttggacaagaggtgagtccaaggctgctatgatccattcgtactgtgtctaacagaagccaacaccataggatccctactttgaagaagtccctgcatcgcgacttggccgcgcttttggcaagaagacacagaaaagacgcaaagccatcccacctggcctctctgaaaatgatagtaaagtcctcacacgcgttaaacgacgagcctacaggctggaccttgctctatttagtctttgtgggttaaagtttggatggggcagcgttattggcttgatccctttgtaagtcaagattccacgagtcacgacggcttcttcctgactagcttctagcattggagacgcagccgacgcggcgttggcaatgatggttctgaagacctgcgaaggcatcgacggagggcttccgacttggcttcggacgcggatgacgataaacataataattgactttcttatcgggttggtcccgtttgtgggagacatagcggacgccgcgtacaaatgcaatacgcgt

SEQ ID NO: 16457 - DNA, 635 bp, Emericella nidulans
ggtctattgtgccaggtgctggtgtttctgccgtgaaggtggagcaagtgagagggatgaagacaaggtcgtcggttaagcggctttgtgaagggtgcaaggtatgcatattgtcctaaatgttgttcgcaggaagtgggaggtcaagattgaggctatgtgttccgaaggtcatgggctaacgggcgctgcttggaatatagcccgttcggagaaagaaccgggtttatatcatttggtgagtttggttgtcgtggctctagtgtgttgggtgatatgatgctaacagccaaccttcgtgtagctcgaagaacccgaaacataagcagcgtcaagggaaatagaatgcaagttttgtgtttttgagaggagaggacaggacgatatccattcaattatgagatgggcgcttcacctctgagtcgggagaaacagacctcatgggtgtactgctttaacaacttcgagagtatcatcttcttgggcttccagcctcaggggttggactattctcgacgcttgtctggacatttttcacggttcaatgggacatgaccaactggttggttgcggcgcatatgttctgtgttgtattatttgcgtgtaaattagattttgggcaatatcattttccc

SEQ ID NO: 16458 - DNA, 646 bp, Emericella nidulans
tacagagcaatctaagacatattttcttgtataataattgctatattgtgagctccttgcaagccatgtcatttcttttcagcttcgttgggaagaagattctcgctgagtctgcgagaaaccattttggacaagaggtgagtccaaggctgctatgatccattcgtactgtgtctaacagaagccaacaccataggatccctactttgaagaagtccctgcatcgcgacttggccgcgcttttggcaagaagacacagaaaagacgcaaagccatcccacctggcctctctgaaaatgatagtaaagtcctcacacgcgttaaacgacgagcctacaggctggaccttgctctatttagtctttgtgggttaaagtttggatggggcagcgttattggcttgatccctttgtaagtcaagattccacgagtcacgacggcttcttcctgactagcttctagcattggagacgcagccgacgcggcgttggcaatgatggttctgaagacctgcgaaggcatcgacggagggcttccgacttggcttcggacgcggatgacgataaacataataattgactttcttatcgggttggtcccgtttgtgggagacatagcggacgccgcgtacaaatgcaatacgcgt

SEQ ID NO: 16459 - DNA, 646 bp, Emericella nidulans; identical to SEQ ID NO: 16458

SEQ ID NO: 16460 - DNA, 656 bp, Emericella nidulans
cgccgtacacatagtgagacaagcgaatgttactccgggtcaaaccgttgtagtctttggagctggtccagtgggtctattgtgctgtgcggtagccaaagctttcggtgcgatcagaatcatagccgttgatatccaaaagccaagattggattttgcaaaaaaattcgccgcaacagccacattcgagccgtcgaaggcccccgcgaccgaaaacgctacccgcatgattgcagagaatgaccttgggaggggtgctgatgtcgcgattgatgcttcgggtgttgagccgtcagttcacacgggtatccatgttctccgccccggtggcacctatgtacaaggtggcatgggtcggagtgagatgaatttccccatcatggcggcttgcactaaggaactgaatatcaagggaagcttccgatatggtagtggtgattataagctggcagtacaactcgtggcttctgggcagatcaacgtcaaggaactgattactggcattgtcaaatttgaagacgccgagcaagcttttaaggacgttaaaaccggaaaaggcattaaaacgcttattgctggccctggcgccgcataagcgcttgatgccgcgtacatagtgaatctgatataaccattttcaatttactaatttacac

SEQ ID NO: 16461 - DNA, 658 bp, Emericella nidulans
cgccaccgttccttaattatcggcttttcactcaggcaactcataacccccgaaatccatacagtggcttgagcaacgtcatcgctttagcaaatactcaacactaaatcagtcgaggcctccaacatgcgcacctgactcccactcggcggcactccgttctcccaatggatttctggctccgaaggctcgatgctcacaatctgcccctggaaggggtcaccaaagacgtcagaaaggtcataccaaaccaggtcctcgacaagattatacgcaaacacagtctgcggggcgctggtgtacaggccgtctttgacggtggtaatcttgatcgcgattcctccggtctgcgggtcgcggcgaaattcctcaacatattcctcgcccggattgatcatgtactgtggacttatgtcttggccgacagaccagaggtagattggctgctcgcagaggttcgcgacgatggcgtgcccaattgcaatagtctcattcgtggctggacgcatcataaaaggacgcttcatggtttccatcccgttggttttcatgctgttgggctcagtcatgacaatgttggtgttgtccatgttgttgagtattctggcgttggagatgcctgcaaaggcgagaggtgcgagggagaggatagctgcaa

SEQ ID NO: 16462 - DNA, 665 bp, Emericella nidulans
agcagtcggatttcatcgtcgcaacaactgcctccgagttccgtctgccagaactgacaattggacttatccccggggctggaggaacacagaggctgaccagtgcgcttggcaaataccgagtcagttaagattctactgactggcataacaaatccacattcttattctcaagcgctgatgttgtcaaaggctatgaaactgatcgtcctgggtgagcctctgtccggaactgaagcccacagcttgggcttagtttgctcgctcacggaaccggggcaagcattgcagagtgcgctgggtctagctatgaagctaggctcacggagtcagtcagctatcatgctggccaaagaagctatttgcagaggtagttactcttactggattctgggccaaatagccttgtttgtgctggtatatccgaagctaacagtgggcttctcatcctagcggacgagctagggcaggatgaacgcttcgagcgagccctttattatacggcgtttggcacccacgataaaagagaaggggtgtcggcatttctggaaaagagggctccaatctggggtgtgcagtcgaatgagaaataagatcatatctatctaacagtaccaccagaatgaacttcccctagtttcagtcaatcaaatatcttttcgcgc

SEQ ID NO: 16463 - DNA, 665 bp, Emericella nidulans
accagcatggcattgaatctggcccgccgcacagcaatcgtgaccggctccgcacgcggaatgtacgccaggcctgccccatatggggtccccatacctcactcagcatcaccatgggactaacacgaattcacagaggcaaggcaatcgcctcccgacttgcccgcgatggctactccgtctgcgttaacgatatacccagctcccaggcggcaatcgaggcaactgtctctgaaatcaaatcacaatcccaggcaaatgttatcggtatcccagcggacgtctcgtccgcgtcgtccgtctcctctctcgtcagagacactaccgagaagctcggccctttgacgctcatgatcgccaacgccggggtctcgcaggtcaagccgctgctatccgttactgatgaggacatcagcagcgtgatgtccgtcaacttcaacggcgttttcaactgctatacggccgcggcgcgacagatgatcgctcaaggcgaccccaaggcggccgcgggtgtcgaggtgtacaagatcctcggcgcggcgagtatcgtcgccacaagccgtttccaacaatggggatctactcagccagcaagtgggcggtgcgtgggctgacgcaggcaatggccatggagatggcgacgacaagatcacggtgaatgcgta

SEQ ID NO: 16464 - DNA, 679 bp, Emericella nidulans
caaaaatgggtgccattccggaagccgaccctgatgagcccgttgagaccaagcccttcaagttcgtactggtgagtttcttcttccgagcccaattttgttcaattgcgcttcgatagattcaattgctaaccactctctagccggtacgttcttcacagctatccgaaccgattgaatcgcttttcaatcatttccgcaaggtaaccgaggttactggagctgacaatctcgtttaatcgttgctaggctatgacgcccgtttccctcaacagaaccagtacgttatctcaccaaattacttccgggtcaatatagtaacactttcctaggaccaagcactgctggcaaaactacgttgactaccacaagtgcgtgaacgccaagggcgaggacttccgcccatgccgccaggtaaactcccccaaacagctctcaaatttatcaggcatgctctaacaggaatcatagttctacctcgctttccgttctctctgccccaaaccttggactgatcggtgggatgaacaacgcggtacgttccatttccccgtaaattcgctaagcaaacatatactgatagcaatcacagaggctggtaacttccctgcccgcctggaccggtaaattatataagatagcacctagaactcaagcgttgatttaaccttgaatggtt

SEQ ID NO: 16465 - DNA, 681 bp, Emericella nidulans
ggccagcccctgttatagtaaaatcggtcccttgttaacaaccctggtggctttcgcatgtgtcgcttgatttcaggacgactgggagggggttgagaagcttggttcggagcatacagtggcttgcgattatacgaacactttccgctcttcaggttggtcagtccttacacagagttctcgttgctatctgtggatggggttctgcataatggttatgtagggttagccgttcgctgcctgccatttacggcccattatccattatccatacttctctgagcgctgcgttgaaaacattgtgcaaacaagcagcctctctcccaccagctggttacttggcccccaccatattccgttctacacctattgcgcctattgttcccatgatatctagcctcatcagttatcaccccgattccccagcgcaatccttccgttcaatgtggccttcattcccagtctcttctcactccttttataacagctctcatcgtctgaacttggcgttggaagtcgaggcgtcctgttttggttggctctggttcgatatgttctttttatgcgctctcaattgtcaagttgctctcatgccctacccatttattgtgccattttagcgtcctcgtttcgctgagtcgtggactacatagcacagatatatccaatatgaagatatat

SEQ ID NO: 16466 - DNA, 696 bp, Emericella nidulans
gttttggagtttccctgctgcagtcatccgtgccgaagctggcgcggtccagctgcagggcgcaatacaacagagttggttttatcaagccgccgacgccggtcgtctgggcggccaggacgatggctggtccagcgaatctgaaagagaaactgcccgagaaggatgggaatcagcgattccgggagttcatgctggaggggaaagttttcgcagtgactggaggggcacggggactgggcttgacgatggcggaggctctggttgaagctggaggagagggttcgttcccagtcatatagatcctatgagaatgttgaggatgctgaccagtgcagtgtactgcctcgacagactacccgaaccagacgacgagttttacgccgcacaaaagcgcgcgaatcctgacttcgggggcgccctccactaccgccgcatggacgtcactgacgacgctaacaccgaagctatcttggatgatattgcgagcaagaaggaccgcctcgatggactgatcgcagccgcgggcgtcaaccacgtcaaagatgcattcgacctgacgcctgagatggtcgataagctcatccacatcaactataccggcgtcttcaggagcgcggtagcagccgcgcgcgcaatgacggctcgaaaatgccccggctcaatcctccttgaggaaagcatgagcagtctgat

SEQ ID NO: 16467 - DNA, 727 bp, Emericella nidulans
tcccagtctaggaagcgtgtctcggaagtcgttgaccattctcttgtcgacaagcctcctcttagcaagaagtccagaaccaatgctccagatgtcgctggcttcgataattcccgtccagaactcgtggccagaaaggaagactcaaacggagacatctattgggaaatctccaaaatgcgccgcgtcactatatcttcgtttcgaggtaaaacaatggtcaatattagagagtattatgagaaggatggtgaagagctccctggaaagaaggtattttcttcaaaggcctgatgctgctgagataaacatacctacagtactaacattccgactcagggtatttcgctgccaatcgatcaattttcctccctggtgactctactgcctgaaattgagattgttttacaagagaaaggtctatcaatccctcggccgaaatacgtcggccagggtacaagcaccggtggcaatgataagaaggattcgactgatggactcccaatggctcgccctcgcgggagaacattgaagccacaagtgacgaggatgaggacgaggaatagtcttcctaaggtggagcggatattatatctaggtactgtgttcttgctgtgtgctggcccggacactaatttcttggagggacatgcttaagctatgcagtaagataggcacggccccttctctaatatacttagtagtttgttctttcctagttgaggca

SEQ ID NO: 16468 - DNA, 739 bp, Emericella nidulans
cagcatggaacttgacgagaagggctaagaccgaatcagcctttcagcaaaggtgtttttaagactgcagagggcttcgaaccagccttcgaggcgcaggttgtgggcaccggcaacgactacatccacgccgaccctgatggaaagcatatgcgcctgaacgctaatggcgttatcaagtatgtctccgcttgaacttgacgaagtcgctgataatacggtgtttaattctttaattcccttcgcagaacccaggatgacgccgtaagtcacccaccggatccagagaaactagtcaaatgaagacctgacgtgaactaactgccgtcctgccatcagctcatctacgtgaactacactggcgtcgttacacttgctgaagcagagcagaaagtcctctccggaacagcggaggagggaagcacgccatttgggaattcttgtgggtgcaccatgacttcctttaacaaggataatgctaatcatatgatccgtacagtcacgcaccttactgtcgaggtgagaaaatagtctacctttccaggaaagtatcaacggaccctaactaatgttccgcgatagaccggccacgaacgctacaaggacctcgagaaccgtgtctttgtcggcaagggccgcttcaatgtgcagaagggaaagccggttgtggtcgagtaccgggttgctcaagttgtgcatgcttaattgagtacttttgaggttgagctcgataggcact

SEQ ID NO: 16469 - DNA, 741 bp, Emericella nidulans
ccgcacatgcaattttcttaaccggtgtgagcaccagcccaaccctcccgctatgtctcctcggcacggccgacgccctatttagcgtctccttctgggccagcgtcgtgcgcagccttctccccttgtctcttcccaccgaaacgcatccccaaaacacgcctcttctaaagactgaggacgggcgcacagagcaggtctatgtatcaaatacggtctcagacaattccgagtcggccagagaaggttttgcggatgaaagaagggcaggcgggcccgccgtgcgtcgcagtgatgcagtacgtacactgggcctaggaataatgtctagcatgctaaataccagcacggcggttattcctgttgccctggcggtgatggagaatctagctgggctattgggactagaggctgtgtttttgacgctagcgctggcgggatttctggcgactgtgagattggcgtggatctgagaccatgtctgcatcgtgctaaacgatctttgtcctaatgactcacgatgctatagatttatgaagatttgcagttcggaacagtgatgatgatgcatgggtgagtatatggtgtctggccatctaacccaccattcttggtaatctggcagacttcgaaaggttctagagtggctctgtttgctttgaggttttgatgggtctgatgctccaaggttcttgtataatttcctatttgcgccttttcctccacgcaaacttagcaatg

SEQ ID NO: 16470 - DNA, 772 bp, Emericella nidulans
gcctctggaatcaaaaattcattactttttatctattttattgattttgttgacttttttcaccacaaatatccaacagaccaaatcagcaacaatggcaacactccactgtgagcttctaacgacacccttgttcctaattaacgctaagaattgcagacctacccccggtgaagccctccgctatcgctgcgggaaccatatttacccacactgcatctctgggcattctagcccctgtctttggcgatacatatcaccgcgcccaggccgccaattcgaaggaggaatttgttaggtctaaggaggctgctggagctgcggcagcttggggtagctcccttgttgggagtgccgtgcagacttatggagttgcggccctgattaatgcgactggcacccttagctataaaggagcagcctaccttggtagcttgattttcttcgccagctccgctcccagtgtatgttttccgctgccagtctacgcatgctatctaaccggatattttagttcgtcagccagatatttaccgagaagaggcctctagacactgttgccgttggtgccgtcgcaagagtcttcgagacagttggcctgagtttgtttctcacttggtggggaacacgcacgaacccatttgattaagtaggcttctgaacctatcttgtactctgtgctgtgatgtctgcctccaatcagactgaacttcgatgatgctatgtttgtgacctactgtggattgattcttgacaattatattacattaaa

SEQ ID NO: 16471 - DNA, 777 bp, Emericella nidulans
atcaactcgcgatcccgttcgcgcccatcgcccatcatgtgtacgtgctacatctggaatccctttcctgctctatttgcccactcgactgctttgctcgctctgctcgattgttctctgaggatagaatttggtgacttcggaggacggttttcacgaatagcagcgggaacagaacagaacagacagcgagatgatttggatttcacccatctgttcatcgaacaccactagatggcaaggaaattaggctgactgggtttctttcacagcgctcgtgtccggcgagaagacgaacttccagtacatccttcgtctgctcaacaccaatgttgacggcaaggagaagatcatgtacgccttgacccaggtcaagggtgtcggtcgccgttactccaacttggtctgcaagaaggccgatgttgacctcaacaagcggtatgtgggcaattttcctgcagctcccttggaagaaacgcacacagcgcttctaccccatgacagccgcaaacgcattcaatttttgagatatccatctaacgaacttctctcatagtgccggtgaacttaccaccgaagaactcgagcgcattgtcaccatcctccagaaccccacccagtacaagatccccacctggttcctgaacagacagcgcgatatcgttgacggcaaggactaccaggtcctttccaacggtctcgacagcaagtaccgtgaggatctcgagcgcctcaagaagaaccgctctcaccgtggtctccgtcactactggggtc

SEQ ID NO: 16472 - DNA, 779 bp, Emericella nidulans
gccacaaacactgtgcagaacgccggcgaccaggccacgaaaccagtcaccaagacagtcaatgagacagcgaacgagacaactaagccaatcaccaagaccgtcaacgacacgacctctagtctcccgggtacattccctaaagatgagccgcccacgaaccagaagaacaacgtcacgatcccttctttcagtgacctctgggcctccttcatcgcctggatgaagggccttattccccggggagtagacatctttgaagccgccgtccgccgctttatcctatggctcatcccgcctgagcggcaagcgaagctgtaccaggcgagtatggagcacccgatcgctgcgacgttcgtgacgtgccagctgctttgcgtggggatcccattaatactcttcattgcggggacattactctttgctgccgttgcgctattggtgtgggttgtgttgtcgattttactcctcgggccacttatgctggtggccagtctgatgggggtctcgctctggggatggggctggtttgtgtttgggctggtcaggtggttggaccgattgctgcttgggggaatgatggagcggtattggcaggcacagattgcgcagcaaaaggcagaggaggaccaagagaaagaaacggaaggcacgggcgagggagagggagaggctcagaaggagacgaatgaggagaagagggatggctaggctgttctgaccttgattctgctgaaccgctgtctacttatatgtgatttttatcgagtatggaaaaa

SEQ ID NO: 16473 - DNA, 780 bp, Emericella nidulans
ggcaatctattaggggcacaagaactcattatgaggtgcccgatgcttcgtgtcccacctgagcggctgaagactgaattgtatgaaaggacaaagttactcatactgcgaaaacccaaaacgcgtcagacgttcggcaagtgattcacagtcctaatgaaacaccagttgcgggtcgcgatattgcaaaaatatcttatggtacggctttcttgtttgcgccaatatgtatcaatatccactgataggacttatgctacaacaagccaactctacaccggaaggcaataaaggctcaactcaatcttctgagccagctaaagactctaggggggttgaggacagcagtctacctgcaaatcaaataataacttccccggtgcggtcacctgtcgctcggcgtgacataggcagcatcacttactgtgagttatttcgttattattggacatggaaatagaagctgctgcttacagctttgttcaactaggaacttgaaccgggaagagcttttgttgtgctttgaccatgcgtgggatttactgtaaatgcgagagtccgtatcactatagaacggaacgtaccttcctgttcagaagtccagtacatgcctttacagttggtcctggttattttcaagtctcgaagcccctgtcctgtatgtaaatcggaacgcagagtgcaatcactgggagggtgttgctgttaggacccgtttactcgtcttcttcccagatgagtgctgtatattatactcggcgtcatttgagggttgcttgt

SEQ ID NO: 16474 - DNA, 800 bp, Emericella nidulans
tttcgagctcaactgactgcaatttggttgacatcagcatacaggcccaaactcaaacatatatatggcacaccaactatttcgccgcatcattcttcatcccctcctgcacccatgccctcccctgcgccgcgatctcctctgccttcttcttatccttcaacaaatccttaatcgtatgcggactaggcacatgccttcccttctcaacgccttctctagcagccaatctctcctcccaagccttaagatgcgggaattcgtcgatatcaaccccggcccatcccgctgcagcaacccaaccccagtgcgagatgtccgcgatagtgatatgatcgccgacaaggtaccccgattttgagtttgctaaatgcttatcgagcacgccgtacaggcgtcgggtctcgtttacgtatcggttcaccccgtactcaatgcgctccggcgcgtaccgcgagaagtggttcgcctgcccttgcatgggtcctacgccggcgttctggaaatacagccagctgattgtctcgtagtactcccgggtgccacgagggtaggagatcttgtagtctttatcatattgctcagcgaggtaggtaaggatactaccggactcgaaaagacggattttctgcccgtcggtaaaagtgtccgtcagggcggggatgcggccgttggggtttatttcgaggaaccagctgttgcaatttagttctgaggtatgttgtagataggaagtgagttatacggctccttctggacgttcttgctgatgtcgatcttctcgactttgtaggggatgc

SEQ ID NO: 16475 - DNA, 802 bp, Emericella nidulans
ctgtagactacatcagtctcatataagctaaccatccagtccattctcacggagctctggacctcgcggatgatccagaagacctggtctctctctgcagtcgtctggatcggccggcgcctggtcgaaacccgcttctgccgcggccatgtcaacgcagcgatccagctcggcaaagacatctgctataacctgcgccaagtctggggcaactgtgacccggtcactctagaaatgaacaagctgctgtcgggcctgtacaccgcatctggaaactatctcgccgctgcaacattacacgagaccgcgctgtcagagctcctcaacagcgatgaacatgggaagaacggcgccgttgaagccgtgacgcagcatctcgagctcctgcagcatgcgcagatgcgcctcgcgaaggaaggacagagtgcagcgatcgatgcagcgaccgcgcacgagagagtgcagcagattgcgaccaagttcggcctcccagttgagcggttgcaggcagcgaccgcgtcgtcggacgagtcggtgggcatgtggcagcggccgaggcgtttcagtttggatgtggaggaggtagagaaccatgagaaccacctacggcagtcgagcgggtcagcgctgttgtcggggaatgcgggagcaaagaggatttcgatcacggcgctgtaatcgctctttcagtaccctcttgtcgctaatgtttacatatctgctatatgttgttgctgttattgtaaccattgtactgtagccgcggtttgagtgtgtagtaatgtatgtcatgtgccgcttt

SEQ ID NO: 16476 - DNA, 811 bp, Emericella nidulans
gttacgcgaaagggaaacaaggaaagagccaggatcgaggcagcagacccaaacgccaagcgttgatggaagagtggatatctactcaggcccagggagatctcgatgaagactagattggggcttgggaattgggatacgcccggacccccgaatcagcaacgtcagccgactgtcggctgaagatgatctagcgtggcgcctgcagaataatctttccatccgagtgcgccgggtgttactttttcagtctgcttgacctcaagggcgcattgcatttgcgcacgcacgcttgtcgcaactctcacagtgctggcaggacgatggaacagttaacttacgacaccccccggtatcactagaacaggaatgacatgctctgcgacttgcggctacgccgataactgactattctcgatcacgtacataatccgatgcagggacaagagaggagctgcgatgcctttaaccgaaacgctgcctgcaagttacgtcccggccagccctagaaggccacattcatgtcttggataaactagatgtggtttcacgcgcaagacatcgagtcaatctgtaacgacgtcccggtatcagcatgcaggtggactgttatcaggccagatatcgggaagcctgcaatgacttgtccagcataaccattccagatttgacgaaagtgctcgaaatcggattcgcattgcgccgagacccgtctagcgctttaattctgcaggaagaccaaactggattgtggcgtcatgtaaagtagataacatgtactctatacgtccgagatcgaacctgatgccat

SEQ ID NO: 16477 - DNA, 820 bp, Emericella nidulans
gaggatcctcatcgtcctcagcgacgccaattacttccccctcaagaaacccgccggctcaggcgaaggctccagctccaacagcaagatcgtcgaccaaccctctggattcttcctgatggagctcgcaaagcctctccagaaactccttgacgctggtcacgaggtgaccttcgcctcacctgaaggccgagaaccccaacccgatcccaatagtgaatcccttctcgcattcgcagggaacttctacgagcgccgacgcgaaaacgagctgcttgagcgcatgaagaaggagaacgggttcacaaagccaaggaaactcaacagtatctccgatgacgagctgaaaaatttcgccggggtctttatccccggcggacatgctccacttgcggatctgggcgataacaaggacctcggtcggatattagagtatttccacaaggaaaataagcctactgccgcgatctgccatggtccgtatgctttgctcagtacaaaggtttccgggggcgagtttgcgtacaaggggtacaagatcacgagctggagcaatgcggaggagaaggtgatggagagcatgctcgggggcgaggttgaaaaggtcgagacggcgctgatgaagtgtggcgccgagatggtcgagggagcgaaggagaaggttggacagacgactctgcatcgggagctgctgacgggtgggaatccgatggcagcggatgagctggggaatcgatttgtgaagatgatcagtgtctagatatcacttacggttacctgagccggacttggtataatgattggtagttgcattcatgga

SEQ ID NO: 16478 - DNA, 822 bp, Emericella nidulans
gccaaaaccacctccacataaagttgcgcctccgtccgagcaacaggcgtcacctcgtgctgcatcaaccaaatcggacaaggaggaactggagaagctatgggatcacgagtggacaatcgaccagctggaacactcagtcaacgatttcccgcaaaacatgcttcgactgacctcgccggttgtggtgtttcttcgacataatcaagaacgagcattgatgcggcctttccgccaaatatttccgaacgctcctacatctattcttgactcgctctgcgccgtgctgatagcgaagaactatctcctttcgttgccatcgctcagccgcaaaacgaccaatatgcaactcagtgcgcagatctcaaggttggatacagtgccagagaaggcaaactcgatccttgggatgaagttcgcacaaccacagccttcgcgtatccgcgaccaggttcttggttcccgaagcagcaaactattggaagatctcgactcaatcctggacaacctgttattcacccttcgcggtcctcacgatgaggcattgaagtctgccgtgttagttctgatgcaggtcctggagaccaaagcataagcgtcccctctttccttccattgcttaccaaaactactttcactctgatttccttttcttctacctcacagcgatccaaatctagactagaccttgccgttcactgagccatttcctatcattacctctttttgtctcccatggaatactctttcgcactcgtttgacctgatttcccctttcttgccccttgctgccggcgaagtcatctaacagagctgtgtgcg

SEQ ID NO: 16479 - DNA, 839 bp, Emericella nidulans
tcaatttcattaccgggaacaagaataaattagctgaagtcagagctataataggcaacgtggttgacgtccagaaccaaacagtcgacgtacctgagatacaaggcactattgaagaaatagcaaaagagaagtgcaggcatgccgccaacgcagtgagtggcataaagtagcctactttggagaagacatattaaccgtacaataggtgggaggcccagtattgaccgaagatactgctttaggttttcatgctctgaaaggcctgcctgggccgtacatgtacgattatctttgcgcgtcaagcaatttgatataatttactacgaactgacaccgtccgacatagcaaattctttcttgaggcattgggtcatgaggggctgaacaaaatgctggacggctttgagtcgagaggagcagaagccgtgtgtacttttgcattctccccaggcccgggatcggagccaattctatttcagggacgaacggaggtatggcagtaactctataactgttatattataaacaaggatctgatttcgactctcaagggagttattgtaagccccaggggaccggcaaattttggtacatccctacctgatcaccgacgactgattctgacgggcttattactaactctctttttctcacaggttgggacccaatattcgagtatgaaggccagacgtacgcagagatgaccaaggaggaaaaggtgctgccctttacctttttctgcgcggtgctgttcacatttttttttcaagtagctaatgtacaaacagaacaaaatatctcacagatacaaagctctcgtcaagctacagcagtgg

SEQ ID NO: 16480 - DNA, 847 bp, Emericella nidulans
gctgacaatgggcactctttgttcagttcatgggaagaaatgatgtgtccgacgtgatgctcaagttgcgaaacctcgcttgcggcgtatcgtaatcaaacctcagaccaagtcattcgtaactgggaccctggtcttgatggtcatttttaccaccacaattgttggcactaacctggcaattatcgcaactttgatcgcagttctttgagagagtagggataaagaaaatggactgtatcttacgcctcgtcgattctgctctctccacagcaaacatggatgctgtcgatgcactccgagccttcttcatcttcgcagcttgtacggtatgagctgcacggcatcgtcggcgattttcttctagaatggacgagaactaaattccccagatcttctctgttagtctgccagattcacttcggtcgcggtttatcccctatggtgctcgtgcgacaaaagctgcagccgagtcagagacgtccgcaacctcgacctcggcctcgaaatcgacctcagccgcgcccgcgagcgtgtccgcggtaacacgcgcccttgattacgccgctgcgctgcgagtccctcacagctacttcacccagttttacgtcatcttggttctatcgtcaattttctgggctctgcagctgctgtctcacgggcgcgcgttccaggccatcgcagctcgaatccggccagaacacttggaccaagcaatctcaataaaccaggtcatgctgtgttggggcttgctgttgacccaagggctgagacggctacatgagtgtcttagcttctccaagccatcgtcatccacaatgtggttcgttcattggttcgcaggtct

SEQ ID NO: 16481 - DNA, 854 bp, Emericella nidulans
gactggtgctctgcatttgttttgcattgttcgttcagtagatcctacatagaataatgcgtgaaaactacacaatcaccgcaaagtattattttgtattatttcatttcatttctgtcgagttattgtagtaatataaagtacaaccccgtcatatcccgtcatcatcacggggtgcgaaccgtcatcatcgtaagaggaacccgctcggaaggtatagaaggtacttcaggttgggttgagtcggtaggtagaccaggtaggcatcagatttagccagaaggcaacatgacctgaggtccgttcataatatttctgtcggcgcccttttcccgttgctgcaagaaacagaagtggtcagcattgatcaataacgctaagaggaggagaaaagtaaacatacagtgtatccctgcaactcgccgtgctcaaggattttcttcacgcattcctcgtcattgtacgtgccaaactcgttctcgagagaggacttctggcgccgtcgagaatgccttgagaaccgtgcctagttgtagatgttagccttgctttatttgggatatagtcatcgtctaggctaggtagaaatggtggtaaggcggagcgtacttgtgagtaacgaagatcttccacccgtttacgacatcagagaggggaatcgttcgatcgttcttccaattcttgagtgtcgctgggtcctcgacgaagacgataaagtcgtcggatttgcccctgtagaaaactttggaggagggatcgttggcgcgcattgtggttgatttgtgaggttcgtggatatcaaggagaaaagtagatggtagggttaagtatctagtaacgtgcgttgaatggtt

SEQ ID NO: 16482 - DNA, 857 bp, Emericella nidulans
attccttttgagcgcctaccgagctggtacttccactcatcacaagcgtcaacaaatcaatccattcatcaaacggactttgtctcggtcttcgactgtctgctcagcctcctctgctcttaggtagtccaaagcaaaacaaacacacctatctgtgcactcgcacctctgctactctcccaaaatgagtcgcccaaacactccccgctcgtaccccgcgggtatcgacacatccgtcccgcgcgactcgttctcatccacagaaagccctagccctcttcaatcaaccccgcgtcgaactggctcgagcaaatcgcgagccagctctgacagccgccggcgttacgacaacactgtctaccactacggtcgacactcaaactactggctcttcggggggttcagcgtccgagacactgtccgcgacggcgttgactggatccgccagcaaaagaagggctgagctgaatcatgcaacaacttcaaaaatgtcaatttatcgaacaatcgaatctatgcgcctcctccatcatccaagcagatagcttgcgttgcgaccgccatgcaatgtttgagaacatatcagtctcgttcccaacacaatttcgccatgatcaagcttccctatccattcgtcaaaccagatgaaaaaggagccaagcgaaagtcaatggtagcacagtgcgcctgtgacttttgcagatccagcgtcaagttaggagaaatccgctactgaagaggagagattcgcttcaagagagaggtccgagaaccctcgttttgtcaggatcttgttattcctctccatgcccttatctatctatacatattctacgaatggaatattggttcttttc

SEQ ID NO: 16483 - DNA, 857 bp, Emericella nidulans; identical to SEQ ID NO: 16482

SEQ ID NO: 16484 - DNA, 857 bp, Emericella nidulans; identical to SEQ ID NO: 16482

SEQ ID NO: 16485 - DNA, 869 bp, Emericella nidulans
acgaaactactaccgctttttttctgcgtcccagtttgtccgaactacgttcaaccccctccccttccaaaatgcgccttcacctgtgtccatctccatcttcatctccgaacccactgcgaacaccagcacggttacagaagactaacttacgcgctgaaataactagattagagagcagcttccgccaggaatatccctgcacaaagccgatgatctgcaaagttgggaaatggacatccaggtcctagacgacaaccctctttaccgaggcgagacatataggctcaggttcacattcagctcgaaatatcctattggtaaacctttccccttcctcgctctcttctcaggcttttgcctcgcggtctatcaccacttgtgctttccggcgcagttcactaatcggccttgctgcttccagaacctccagaagtccagttcattacagactcccaatctcagccgcaattcactcgttcctccgctccatcgtcgacagcaggtgaacaccaaccatcgaatgccgagcatcaaacatcaaccgctgccgtcaagcggcccattccaatccatccgcacatctacagcaacggcattatatgtctcgatctgctgagttcagcggggtggtcacctgttcagacggtcgagagcgtctgcatgagcatacagagtatgctaacggcgaacacacgcaatgagagaccgcctggcgatagcgaatttgtctcttacaatcggcgtcgcccgagggatatcaatttcatgtacgatgacgataatgtttagggcctgaagataaaaaaataggccttgggagtattcggttccgtaatagtttgggcattgttgcgatggtctctctg

SEQ ID NO: 16486 - DNA, 879 bp, Emericella nidulans
atcaaaaggaggctctgcaaaaatggccgtcacaaaccagggtatgtcttacggaaattccgtcggctcgttttgttttccacgcttctgatcgcctctgattgagttgggattgttcttcgaagacggcaatggcgattagaccacccttccacgccaacaaagctacgggatgaatgctgatgttttttcttcgaatagcaatctcctcctcgcgccggaagtcgcgcaaggcgcacttcaacgccccctccagcgtgcgccgtgttatcatgagcgcgcctctgtccaaggaactccgtgagaagcacaatgtacgatccgtcctttccatccatcaagtcattctacaacgatcttccccatgcgcatcttgggcggttgagaaaagggtggactgaagattgatttgaggaattgggaacaatggcaagaggaccagagctgacggatatcaacctaacaggtccgctccatccccatccgcaaggacgacgaggttaccatcgtccgcggcaccaacaagggccgtgagggcaagatcaccagcgtctaccgtctgaagtggtgcgtccacgtcgagcgtgttgtccgcgagaagtccaacggccagagcgttcccctccccatccacccttccaaggtcgtcatcaccaagctcaagctcgacaaggaccgtgagcagattctggagcgcatcagcaagggtcgtgaggccgtcaaggccaagtccgcgtaaggaactggaactgggacttgcattttgtgtttctatggatgaatggcgtgggagtacaatgagatcctgctgaatctgatcttatcttgattctcttaaatgagcaacatcaaaaaagaaatatacctgctacgaccaga

SEQ ID NO: 16487 - DNA, 889 bp, Emericella nidulans
cgcaacctccaaagtactcccaagtgggaactatcattgaaggtccgacagaattctttagtggtcgtatccccaagcgagatcgcaaaaagacgtttgttgatgaggctttggctttggagaaagagaccaggcgctttgaaaccaggtacaatgatgtgcagcagaagaaacgaagtgggaagacggctttctacaagagtttagtggccaaaagaaaaggcaggaagaatcgacaatgatatattcaacaaccaagctgtccaaactccaaagagaagtacctccacggacggccggatcttaggaatcggtttatcccctccgctcctgctgtggtagtgtcatgagttgtgacactagaaaatcttggatatgacatgcacaaccaacttctaacaaggtgtcaattctcaacatgggaaaagagaacgcactagcacttacctgcatgtcctgggctgcctcccggccagcttcgagcacctcttcgtggttggctttaccctcttgcaggatggcatctaactctttcacatcccttccctggatgagatgatcatccccacggggaacaggtgaaagcacagcattatttgtcaccaaactgaatgctatgattcgcaagccgcagtgccttgcaaccacaatctcggggactgtggacattccaacaagatccgctccgagctggcggagcaatcggcactctgccctcgtttcgtaactgtggccttgtcataccaaactcccccagcagccattggggcatatctgcttacctcggtccacaaacgaaggcatacacgccctcgtgtaaccttcgtttactgcaagggtccaggtattttctccaggcttcatgtacctgacgacgcaaatcaagatc

SEQ ID NO: 16488 - DNA, 896 bp, Emericella nidulans
aacaacgccagaccagaaacaatgagcgattcgctgaaccctccgctttcttatgaagcctccgctacaactacccatcgccatgttgcaactaccctcccaccggaggtttcatcgtgcctcaagaactcccgcttcgtaagttgaactaaacactcttgatcctttctgtttgtcactaacgcaaaaaatgtctgtagcttcacttagcaacatgtgatggcctcactccacacatttccctaatgtcctacacatatctgccctcaacacccttcgatccgtaccccacgattatcatgaccaccaattcctcgtctcggaagaccactcatctacagacgaacccacgagtctcgctactagtacacgattgggtgtcacatcgtccgcctacccgtgcttcaaaccccgggaatactcgcgatggatcacctccacccgcagcaacccggtcctctctggctagtctgctactgaacctcaacacgagtgcgctgtccagcatttccactactattacgggggaagctcgctttttgcagccgaattccgaggaggaaacatggtgtaaagagagacacttggaaaataacacattcgaggaagaaatgagcacttttggccaggcacagcaacctggtcagcgccggcccagtctttcaattgacgatgatgtccgagtcatcaccatccgggtgcgcgagggccgactggctgattggaaaggaggcgtgcgagattggcttgtcgtccaagagggcgaagaagggcccgacgaaaccactcctaacggtgtcgtactgtaggagcttcgtgctctatttggattgttccttatatgtccgatgatctatggatcttatatgtattgaaaataaaagagcattcaagtc

SEQ ID NO: 16489 - DNA, 908 bp, Emericella nidulans
accaggaaatcgaccaagccgtagcacaacggacggatcgtgacgaattagggtatgtaataccttgattttgccatatatagtaaactgatttatctagtttctttcgtttctgtcacttgcattcggaacagccgccggacattaccggcttccaacaagatagtgatgatgaggcagttccccctccaattgcccgacacagaacagagacaggtcgagcggacagcgtagacgaaaccggattaggtttcattggaggacctcatcgtccagaagtcgatgagctcggatatcctacagcgccgccacccagtgagcctatcactaccttctctttccgaaatttcttctcggccatcaactacctccacataatgcagaaaatcactcgcgacaaagcccaccgttgcctgcttcttgtccagtacaaatccagtactatcctccgcaaaggactcaagattcccgaccccgatctccgcttctacaccctgaagctcttcaagtcgcaagtcccctattgtggccgcaaatggagacagggaaatatgcgtgtaatcacagcgatatatctttactgccgccctgagctgcgggatgactggctggctggatctgatattgatgcggaggttgaagaggcgctacctctcgaacaagccctccgtggtctaacacattggtggcatctacggcgctacaagcatgtcatgggcggtgaggaaggtgcgactatcatggacgaagagcgggatttcttcgtccgtgagcttgaggccatggggtggggctatgctggagacgagctgttgaatggggtggctgatgaagccgagctggctgcaggaccgctggcgaatgggacggaatgggatggcatgctacaggtggagggggcatagtag

SEQ ID NO: 16490 - DNA, 909 bp, Emericella nidulans
caagggcgagcactaagaagccgcctctgcccgcaataccactcttgatagcgcccggtgcattgcgaatcttatcattcttcaccggcaacgctggggaatcgaacgtatggccccatgtacaatccagtgggtcacaacagcgctatacgccctactaggagctcttgactcagctgagaaccgagctgcatttaccgagctgtgcaccactgcccgggcattctcgaggcggtacccgttcgcgaaaggcgtcatgcgaatgctccagctcaccgcaaggcagatgcaagtgacactacccgaggatacggatgctcttttcagctcctttgccgctgagacatggagcgaaaaggaccgagagggactcagcagcttttacccgcactggggaacggtgatccggaatggcccaatacggcaagaagatgttgtcttggaccggttcctgcagaaatgggacaagctcaccatctcagacagcacacaagacaccacgcccgaaaaacatgaaccagtcccaggaagctgaatattgacggtggagcatgtctggtacgacactggtgttaatatagtgggattccatttaatttgttaacgcaacccagagcctaaacacggtagtcctgtttggacgtcatggtagcaacgctagcttatgcatatggctagggatcccaactattcctctagtcatgtgtagtacggttgtccacgatttaacgtgaccgaataatttaaagtcggtctcgtcctgaaggctctggctttattttccgttcctttgcttaagcggccgttctttggcagccatcgcgtgtcgcgtcattccctgccactccgccgagaatgcaaggcaatggatattagtagaaatactgcctctatttgaccttgtataat

SEQ ID NO: 16491 - DNA, 924 bp, Emericella nidulans
cgaggctttgccattatctcctattactgaggagttatatgcagtcgcttgctttccgcacaagacagtcctacaacaacttcctttgcccgctgcccgctgcctgaagcttgagcttgacgcacctgcgtctccgcagtcatgacggctggtctaaaaacaatcatcgctctctccttcgtacgttgctcagttccgcttaaaaaccggccgctcatagtttgatcacgtacaggtacttgcgattggatttctccttgttatactctcttcggctctctggcacaacttcctgccgctgactgttgttgcgacatacgttattgcgccgctccccaactggatctgctcaagatgcgcgaaccctgatgactttatggacagctctggcaatgccgttgccgactttggccggttcttgaccgggttcctggtactcatgggtgttggtaagttgatctacccaaaatgatgaggcattgtcggtcaggaaattgccatttttcgattctgatatgattttcctatactatgctatttgaacggggctaatttgctcatctttacagcgctcccagccgtccttgcgcacagtggtgcaattcaagtgcccgccatgatcatgtccatcctcggaggtctactgatttatggaacaatcatcagcttttcaatgtttttccgggaacaagaggaattctgagctgctgagatttgtttgatgaccgagtgcaagtttctgataccagattatgagccattatcgggtcaggtgatcctcatgcttgtgtcatatcatggccctgctccgacttgaatttccatgtctcaatgaatatttgctttcttctacgtgcgctaggagttcttgatgtgggctttacatgatgttctatcttggagcatgttgttattcggcgatcc

SEQ ID NO: 16492 - DNA, 945 bp, Emericella nidulans
agcctccatttcctctctggaggaaaagaaaaccggactcgaagagcagatcaaaaagctgaacgagcaaattgaggaagaacgcgtagcccatagccaggaattggacaggcaacgagcagagatggaagcagaaaaagaagaagctctcaagacgcagaagcaagagctaactgaactctttgaggagatcaaggctgaagacgagaaagcagcggcagaggctttggcggctcgtgaagctgaattgctcgagcaacaagaggcaatgaagatcgagtacgaacagcagaaacagcagatgcaaaactcgcatgataccctgcaggccgagttcgacactaagctggcggaacttgcaactacccagggtgatcttgagaagaagcaccaggaattggaagacactcgacatgcgcacgttgagcaggttgaatcacttgagaaccagcaccaagagaaaattaccgagatggaacgagcttggactgaggagaagacgggcctggagactcagctttctgagaaatccgaagagcttgccaacagcgagcgagagaacaaacgactagaggaggatctcctttccaaggagaaacaactccagctttcggtggacaacatgcgtcttactattaacaatttggacaacgactgcgacagattgaggaaaactctccacagtcttggagaagccactgacctcaagaacacaaaaggcgatacattcttgtaagttgcctaggctgagatctgttcgggtctcagttgttcattccttgcattctcgaaataatcatctacgaccacatttctatttgtccatatttccttttctctacgacagcattcgccgctctttatatttttcctttgttttcaccatagaatgacacgaagaccatgatcatgttgataacgttataaatgtacctgttctgatac

SEQ ID NO: 16493 - DNA, 948 bp, Emericella nidulans
cgactaatgggagtcgtggtgaagtcaacatcgacgtcttgcttaaaggcgcagagatactttgtaatgtttagtgagttgggctttccaggcatccctacctagatttctgactgtcgctttaagtcctgtcgctggcgctcaggataagattgccagcctccgctaccgcaaccaagtcatttcggagtcaatcgcagagttggaggagcgggtagcgaggaatgcttcagaattggagagcatgagccaccttcatgatgatgactacgacgaactagacaatgccagctctccgagtgctggcgtgttagacgttacggatgcggacattgagcgggaattgaaagagatacgggagcttgaaaggagaaagcggaatcttgaggaccgcgtcaacggcatggagcgcgatttgggcggcctttcgtgatgactacatcaaatattctcagtccaattactgcgcactgataccacaacagacacgcgagagatatacgcgctgtcacgacattctctttacccaacaagaacgctgggaaattcgtcggctccggcaagcagcgttattgctcctatcgagcgaacgaggaaccacgcatcaacaatcgcggcacatacatcagatcgaaatggcagaggaaaagcccgttctctggtaattctgctgggcgtggtatactggtgatagtcgttgccactttcgagtccatgctgattgccataagtgccgcttgagcactacactccgacatagcatgcatagacaacgccgcattgaccgatagtcccaatgcgggaataattgctctactcaggtcagtctcgtgtaaagagagcgagttgatccgttgattccagcttattgacctgatgccatgaagacaacttgtaatggtagtttgatatagagaagcagtttagcattaaacaatttttacatat

SEQ ID NO: 16494 - DNA, 957 bp, Emericella nidulans
gccctctgctcttcattcagcaaccatgattgcccagcgcagtgtcctccgcctcgcccagcgttccactccggttcgctctgccatccagcgccgcttcaacagcactgacaagctgccctcctgggcagtcgacaacgagttcaaccgcgagcgagctgctgtcaagcaccatgcggcttccaccagcagtacgtttatgccatccgagccttactggcctatctacacttgaattttgcggacccagaatgttactgacccattggcacgctctaggtctttggctcaagctttccatcttgtacgtcactggaacccctctagcctgactcaattggacttatataactacagtgccgttattccctgcttgattggcggtggctacaacgcctatgtccagtggaacgagcactgggagcactgggagcacatgcctcctcttgaggaacgcaccgagtacccctaccagaacatccgcaccaagaacttcccttggggagacggtgacaaggtcagtctacgatttaatacagacattgccggccaagtaactaaccaaaccgctgtcgcagaccatcttgtaagcctaccgttcgcgtcaatttcacgctcttccgatccgagccctcgcttgggccgtggttatttttagtcaagtactaactattcgcagctggaactccaatgtcaactaccacaacaaggacaagaccgcctaagtgatttttcgtgagttaggactacgccaacccgaaatacgagacatgtacaattatacaggaaggagggcgaatccggaacatatagtcacaaggctctgttggcgaagcagttacccatcggctattactatgcttctttgagtttcctttgtatgccacaagctcatccgccgttttgattgattataaacaagattccattattttcgaatatcaaaggccagttaca

SEQ ID NO: 16495 - DNA, 959 bp, Emericella nidulans
tactaccgtgcgccagaaatcatgctcacatggcagaaatatgatgcaaaggtggatgtttggagcgcagcgtgcattttcgctgagatgttgctgggagcgccattgttccccgggaaagaccatgtcaaccagttttccatcatcacagagcttctcggaactcctccagatgatgtaattcagaccatttgcagtgaaaacgtgagaaacagctccctgccatcttttgattttggaatcgcgcgctaatagacttctcacaaacagactctgcggttcgtcaagtcgctaccaaagcgggagcctcaagatttggcgaaattgccgaagttcctggcgctcgtgcatcccgacaagaaacccgaagaggatgaagattataaaaacagtacgtgtcccgcttttgtattcatatatgcttgatggtggcctctaacggaaaatagctatcaaccttcttaaagcaatgctcgtttacaacccggaaggaccgaatcagcgctgaagcggcgctcgcggccccatacctagcgccataccacgatgagacagatgagccggtagcggaggagaaattcgattggtctttcaatgacgccgacttgcccgtggacacgtggaaaatcatgatgtgggttgcattctgtttatcaacatctattaggattcttgaactaactcggcactcaggtattcggagattctggacttccacaacatcgatcagggcggcgacatcaaccccgcccttgtcgagggagccgggctcaaccagcaaggtttccaataaagccctaatgaatcgcgtggatgcggcgctggtagcagtataagcacgatatcgtgggctttttttccttttttcctctatctctggcatgtagactgggcgcgagagctgtgatgtggctatatgttttatttatgaacgattatatttatgtcatgcgcgatgt

SEQ ID NO: 16496 - DNA, 968 bp, Emericella nidulans
gaaccaaacggacaagcctcccaatccagctgtgccgagtacgacctcaacattgaccaaggatttccccaaagctggagagaagaatcctccaccagatctcctaaactcagccgatccgaactacaagcctgtggatacttaccccgggaaagttgaacactacacgggaggcagacagcagcatggagcgcagaagccagaacttgaggttggtgagatggagggcatcacgttcaaggttgagccactgaggcgggttggggaggatatatcaaccatgagggctcgcctgctgtgttagttaatctctggccctctttgtctttcttaccggacgtcgtttaagacggaagctaacttacttgccggaactcagaccagagtcggaagcgaggtattctcgagtccgacctgctgttgtctacttttgccgacgtttatttagccgacatgaacaaggagcagctgcaagaatacgatcggttccttgacgagaatgactgggacatctactactgggcgacccaggatcccccggctgagggcggcgctaaatcagacgtttccaaggacaccccaaccgaaacatggcaacgcaccggggccaaaagtggcgagtgggcgcaaacagttggtgcctttaaggctgcgtaccggccagtaccgtcgcgatgggcggactctgatatcctgagactattgagacagcatgttcgggataacagtgccaatggtttccatgcggcaaagaacaggaagacgggcggaggtggcttgaacagaatgcctaacatccagatcttcaacaactgaacggcccagttatcaagagctagcgcttgagcttgatctttgtacaatatggtttcctgttttgtttctggggggaatatatatgggcgcttcaagaatgctgcatagaacagaatttacaattaaaacaaatatataagacgtaccaaaag

SEQ ID NO: 16497 - DNA, 973 bp, Emericella nidulans
  unsure (1)..(973): unsure at all n locations
gttcagaccggcaagaagcagcgnnttctatcgccgacgtggtgacccgcgagtacaccattaacctgcacaagagggtatgttaaactgcgaaactcgtcattatctctcctcccttctttcggcggttcgacgcacaatcgaccaccgagctgtgatgctacggaagacaaggatgaaacataccttctctttccgacaaccgtgaggcatggatggagaacaaggacatgaaacccgcgccaaccagcgataagacaagcgcacgatttcccttaactgaagaaaccttcacttgagaaaagaaaggtggaagccgcagccttgcgggggaagcaaagcaagtcgtcgcgcatgcaactacagactggaaccaggaatcatgcttcaccaatctgaaatccaagtaattgggtccagatcatgatgaacctgtgaactgagtgagaaggtcgtcaaacgcaaaaaaagaaaatgaattggttttatgaagtccacctcatggccgcaatcgcagcaagaaaaaatattcctcttttcaagatggcattcgggcggaagactgattcttctttttttgttactcaatagacgcacggtgtttccttcaagaagcgtgctcctcgcgctatcaaggagatccgcgctttcgctactcgcgccatggttagtcacttccgtcccacaagaaacccctgtgaaatttgagcatgctctaaccaccttttgtccggtgggcagggcaccaccgacgtccgcctcgacccccagctcaacaagaaggtctgggaagccggtatcaagggcgttcctttccgcctccgtgtccgcatctctcgcaagcgtaacgacgaggagggtgctaaggagaagctctactcctacgtccaggccgtcaacgttaaggagcccaagggtctccagaccaccgttgtcgatgaggagtaaacgggtgtttcgttcctaccggttc

SEQ ID NO: 16498 - DNA, 995 bp, Emericella nidulans
ttgacaaaaatccccaaagcactgtattggccagctgctatagcgtcagcatggatttggcgactctgaatggcttccactactgcactacgaacggggccggtaagaatcgcgcatgcctgtttctctgagatagcgttacttacttttatgtttcaaattaaggagtacagtggtatccctgaggttccctcagggtcgaagactgccaatgcaagtcctcccctcgatacttcgctcgcttccacaatggggggcagttatccagtgaatcattcgctggagcaaaaaggggaggcggcgcatactattccggaagagtgtgagaggctcttttgcgatgccctttctgcgattttccttggtgagaggttgtccaggcaggagttgcttggggtagatgcgtccttaactcagataaataatgcggacggcgaacattcgcggattcaaatgtgggtcgaagtattggactatactactgacgccatataccgtgggttcgtaactgatacaaacggtgagcggacactgtttgtgttcttaatggaaacagccgttggccacggcctgaaatcagggtatgtttcattctcgacatctcagcacttgcgaaaacgagtgttgtttcgtcttactgatctcgtctacatgcagtttgatcgccttgttcgaactggccagcgtcccggctttcggatgctcgcagataattgcttgcgtgccgcgttcgaaagacggtagcgaactggaatccgtacggaacctcggatggtgtgggtttagtttgaccactctggaacagtttggtgctaggaacgggaactgtctcagcaacagatggctttttttaagcgcagaagcttgagcttggtttcatataattctctgttcttttgttctattacctttttctttcccttctctttttagtttatttatataatacttgtgcattaggatttcaggactagtaattgagcgtctgactgatc

SEQ ID NO: 16499 - DNA, 1000 bp, Emericella nidulans
accacctcgagtgctaatggacaacaggaaatggccaccagcacggcgtcggcagacaacgactcaagtaagaaggacggacctaatactgctgccatcgctgcgggtgtggtcattggtgttgtgggtctggctgctctgataggtgctggcttcttcctctggcgcttcaagaagcgcacccagctgatcagcggatgcgcgaaatgagcaacgttgaacaattcggcaaacccatgtcgcaagactccatgtctgaccatcggtttgatggtgactttatggcccacaggcgccagagcaacggtagcatcgatgatgaccgagatttctctcgccgggtcttgcaagtcacgaatcctgaccggcactaaccgttgtgtctactacccagtatttgcacctcatgatattcggtttgcacctccggatttacattcacgaactcaacctgtcttagcggacaatatcgccttctcggataagctatcgaatccgccccatagtttcaagctccgcccattggtcgtcttccacgagtttagggtgccttggaattcctcgctagactcaacgctagattgacagagcaactttaccgcggatcgcggatgagattttggtatgaaggcgtttgggctggttgacctttttattctaattcaaaatatttcgtatttattctgttacctgtatgttcttgaattgagaaccacattttttctcatgtcctttttggttctcaatcatgtcgtgcaagcatgcagtctgcacgcctggctcccaacagggatgcgcttcgttcaattggcacgcggcatatagtgaatcgtatcctccgtgtgcatgtcctaagcgtctcccctttctcttcccacccactcaactacaatcagacgcatactaggcacgtccctagtcttcgtcaacaaaacattgaaagcgtacacattcgtcttactcatggtgaagtgtgatagtgaatgaaacccctccagtc

SEQ ID NO: 16500 - DNA, 1025 bp, Emericella nidulans
accccggtaactcctccataatgacaactttcaaactcaacactggcgccaccattcccgccctgggcttcggcacatggcaagacgccgacgcccaggaaacagctgtactggaagccctcagggccgggtacagacatatcgacactgcgcgcgtctacggtactgaagccgcagttggccgtgcgatcaagaaatctggcatcccgcgtaaccagatcttcctgactaccaagatctggaacaacaagcaccacccagacgacgtggcacaggcactgcaagattctctcaacgacctggatcaggattacgtcgacctgctgctcatccactggcccgtcgcctttaagcgcgggacggagcagttcccgaaaactgaagacggaaaaccggctgtcgcggatacagattatcttgacacctacaaagctttggagaagctactcagcacgggcaaggtcaaagctatcggggtctcaaactttagcaaggctgagatggagcggatcctggcgaacgcgactgtccctcccgccgtgcaccagctggagggccatccctggctgcagcagcgggagttcgcggagtggcataagaaacacggtatccatatcacgcattactcgccctttggaaaccagaacgaggtctatagtcgagagggcacgatcggccggctgattgaggatccagtgctggtggagattggcaaaaagtataacaagtctgcagcgcaggtggcgcttgcttggggtgtcactgagggtcactcagtattgcccaaatcgaaaacaccagagcggatcaaggcaaacctcgagggtgacttcaagcttgaagaggaagatttgaagaagattcgcggcattgatcgcaagctgaggttcaatgatagcagcaaggactttgggtatgatttttttaaggacctggatgggaagaaatgagcgtaatgggtaggggtataactgaatgatatgagcataatgataatgaatcaaatcagaattctacgcatatgc

SEQ ID NO: 16501 - DNA, 1045 bp, Emericella nidulans
cattctagcaatcgcgtactgctagtaagttttaccgttatatcggactatatcagctactgattctccagccaaaacgtgtgattcactacctagtcgctaccgcaaccacagtttcatttatcatctatcttgctcttgctacgggacagggcatggactggaaatacgatacatataaccacaagcacaagcacgttccggacactgaatatggaatcgtccgccaggtcctttggttgcgctatgtcaattggttccttaccggacccctgattctcgcaagcttgaccctcctctccggcctccctggcgcgtcgctctttgctgccattgtagccgattgggtaatgctgggaactggccttttcggcacttatgctcccaacacatcgcgcaagtggatctggttcgctctcagtgcgattgctttcatcactctcatctatcatatcggcatcaagggaaccagagccgcgaacaaccgggactcgcacacccgccgactcttctcggctatcgcaagtgtggcacttctggccaaggctttgtacccgatgtatgttttgttctatgctcttgattattcgatactgacgcaaactagtaccctggctgctggcccgctctctctcaagcttggcctcactggagagaccatcctctttgccattcacgatatcgtcatccaaggaatcctcgggtactggcttgtcattgcaaatgatgctgctactggaacgtaagaatcgcctaattacctttttcccattcttttcgattgatttgtgctgacaaacttagcaacctctatgtagacggcttttggtctagcggactcggcaacgagggagcaatccgcattaacgaggaagagggcgcttaattcgttttactctcaatagccctaaagtctactagaactcgataggacacgaacgatttgaattcagcgcagctgcggaagcagcgtaaatttacggaagagcagcttgtccaaacaaggtatatgataggaactgtttgtgcagcataacctttcgag

SEQ ID NO: 16502 - DNA, 1076 bp, Emericella nidulans
cgtgaactacgccctcaaatacccgggacgactgaataagctcattttagcttcacctgttggtataccagaggatccatacgctatgtcttcggatcttcccgagaaacaagaccaacccagcatcgccgccgaggccgcaacggtgccactcggagatgcgcccaagggcgacaacaacattcttctaaagggccctccggcagatgcctcgagagaccggcctccccgtcgcacagtcccgaaatggtttgcatacttgtgggaggccaacatttcacctttcaccctcgtccgatgggctgaccacttggtccccgcctcgtctcgggctggacatcccgccgattctcgcacctccctgccgatgaagccaaagccctccacgactactcatactcaatttttagccagcgtggtagcggcgagtactctcgcgtatatccttgcaccaggcggttcgcacgcagtcccctcatccgccgaattcaggacgtcggccgacagatgattcccgcctccgtaccttcttctccatcctcctcttcctccacgacaacttccacggaggtggccaagccgcgtcgcgagaccggtatccctatcgtcttcatgtacggcgatcacgactggatggactaccgcggcggccaggccgccgcagccaaaatccgggaggagaagcgccgtatcctggaaaatgctacgcccgaagaacgcgcagcagatagtggctcagccaaggtcgtcatgataaaaaattcagggcatcatgtctatctcgatggatgggagcagtttaatgacactgttcttgcggagatggaagatgtcgcgaagagagagagggcaaggcggtgattattctcaacatgctgtatatgatttgttttttttagcgttgattctgagcacgggttttggtattgataaggtgtatagatcagcgaagcatcagctacttcattaggagtagttttgaggcttgcctgttaagttaggtaggcgacagaagctccagcttctatagaagtacataggtatgaaaaccaatagaaattaaaatttcttagctt

SEQ ID NO: 16503 - DNA, 1082 bp, Emericella nidulans
tcgacaactctgatcttttccagtctaccactccagcggcagacgagggcatcgaacccggcacctttgcctctacgcagcccccaaaactcatcaaagtgatctccaaggaacttggaatcacaaactacagcagcattctcagctgggagctagaactttatgacagccagcctgcacgtatcggcggtattgacaaggattttatcttcgccggccgcatcgatgacaagctctgctgctacgccgcacaggaagccctcatggctacctccgaccacacctctccctcttccatcaagatggtcggttactttgatgatgaggaaattggtagcttgctccgtcagggtgcccgctccaacttcatgtctagcgtcatcgaacgcattgcacaatcctttgcaacatcatatggacccgatctccttgcccaaaccgttgcaaagagcttccttatctcttctgatgtcatccacgctgtcaatcccaacttcttgaatgtctatctcgagaaccacgcgcctcgtctcaatgtcggcgtctccgtctccgcagactcaaacggccacatgactaccgacagtgtcagctacggcttcatcaagcgcgttgctgaaaagtgcggctctcagctgcaggtctttcaaatccgaaatgactcccgaagcggcggaaccattgggcccatgaccagctcgcggattggaatgagggccattgatgtcggtatcccacagttgagcatgcatagcattcgcgccaccacagggagtcgcgatcctgggctgggtgtcaagctgtttaaggggttctttgattactttgaagaggtggatcgtgagttttctgatttttaggttgtgactcttgttttctgtcgaggggtgctgtcgcgctgcttggccgtgtctagtttggtttgcatgattttggtgctagggttgaagtgcttgggcattaagaacctcatttagaatggtgacttctttgtatacggggttcggagtccgtctatagaggcatgtgtaaggataaaaatcgaatcctacataattccaggctatgcacttgaacagaca

SEQ ID NO: 16504 - DNA, 1085 bp, Emericella nidulans
atccagatccaaccatgcaatcgagcatccatagtcgcgccgatcaaccaggtttccccgtcacctttcgcgtgtttgcctgctggcagcggccccaattttgagccacgtccacggccgaatgcccaaaggccggttatttttggcaggatcagatcatccatggccgtcaggcgcccggagaatgccatactctacgaagaacttctgatctccagccctccgttcggaggacagtgacggatttcggatacggaggtatcgccgtctattcaacataacaccaacggagttcggagacgatcgcttgggagcaccagttcagtgtagatgtttgcaatccaccgagggtactgcgcaagtacacgcctcgccccccgcctgtgtaccgcgagcggtccatttgctaaagccaccagcctcgcagcgttcatttcagcatcccttccgacccgccgttccaggggaatttcgacgaacggacgcagcgaatcgagccgtttcttgtccgggtttccctggccgcgtggtacagagtacggtgcaacgactcaacgaggcccgggggttggtgggacagagtacggactctggcactgacagtgcagtgacacagccgcagcctgagtcctgcctgcagggtacatgatgcatacgccatactctgtgcacgccggagtcggccggccacatgcgctgctgcagtggtcgtggtgtcactgtggatgtctagaaagtcatcgaacctcgtctcctctattcggagaggtagtacatgtacttgagtattttgaaaaatggcgagaaacgtctgggagttagagcggaatgaggtacagagcaaaaagtctgtcttgaatcgctgaacaaccttccccgacatactccgtatacgcagacatattgatgagaaaaaaggcggggatccgttggcagtcgcgacttgccagtgacagcctgacaagggtcgtggcgggggggtaccttgtcattgacttaattccctgagggtgtagacaaggccccgacggtatagacaagggttctcacattcactatcacaatccaatcacaatcacatctgc

SEQ ID NO: 16505 - DNA, 1098 bp, Emericella nidulans
gagcacggacgagtacacaaaacaagtcaatgcggagttcgccgtcgtcgccaatctgcaccaccagcacgtcgtctcgaccttcgaactcctccccatcggcggaggaaatctagccgcttgcatggagtactgtgcgggtggggatcttcactccctgatcacggctggtccctcgcacagattaccctcggaagaggcagactgtcttttcaagcagcttcttcgtggcatctcctaccttcacaaatcaggcatcgcccaccgcgacctgaagccggagaacctcctcctgacacacagggcttgcctcaagatctcagactttgcgaatgccgagcgcgtccgtttcgatggtgatgattctcagcatgccaatgacctggcggaaactgaacgccgcagcttagaaccgacaccgtatcttgccccggagcgataccttgacgagggcgacaggtacatgtccagatccgaccccagagccctcgatatctgggccgcggctgttatatacgtcgctatgaggacaggaaggaacctgtggaaagcggcaacggagaaggacgagggcttcagggcgtatgtcgaagagcgtaaggccgagaagacgaatactgttatccaggattcgtgccatgtatgcctcacctttcccatcttacttgcgtctggacaccggatcactaatagctgtccacaggaacggggccgcaaagtgatatacgccatgttaagcactgatcctgggaagcgacctatcgcgactgagattctttcctcagagtggcttcagaacattgactgctgtatctttgatcattcccaagcagagtctaatggattttcggcctgattcgtgccgtcttggagagccggacttcgttgcgggcttcgtttcttacagcacctgtcattcaactactttccatatattataatatatcccccgaatttgtgattgtctggcgtttctgggacggttacattttgtctcctctttactgatacactgctgagctacaggagcaaataaattatcgatcatgaatgaagtgtatacacgatatggtataaatctatccaaaatccattcaa

SEQ ID NO: 16506 - DNA, 1100 bp, Emericella nidulans
gctcctcttacgtggagtcgttgatatctattcaaagggcctacatcaacacgaatcatccaaatttccttggtgcagccgccgcaatgtcgtcaattatccaaagcaaacaggaccaagagaggaaagccgcgctcgcggaggaacgacgcaagcgagagaagagacgaatcaaggaactcggtggtccaaacggaaacgcaccaacacatccggaagacgaggaagagcaaccggaaaccaaaaaccttcccatcaggactcaatctagcaaagggacccgcagcatgtctcctcatattggaaaaatatcagacactggaatcacggcaactttgaacgggacgcattcgaatcctccaaccggctttggcggtgctaataccacccgcgattccttcctgaactacttctttggcaaagatggtgcccagccccaacttactacctcagcctctcccaatcaaaaccaaactaggcagtccatccatgaggtcaatgtgagctcaaacgctcgacgcaccgagatgctttctccggtggatgattataccacggtgcccgaatataacgaagcgagttctgttgtaagtatctgttcccaattgtatatgaagcactctattgacacaccacgaaattgtctagttgaaggacgattctgagccggcaatatctgagcgagagctcatggagacggaattgattcgtcggttgatctcttcatatttcaccattgtgagggagacaatcgccgaccaggttccaaaagctattatgcatcttcttgtcaaccacagtaaagatgttgtgcagaatcggcttgttagtgagctctacaaggaagagttcttcgctgagcttctatatgaggatgatggcatcaaagccgagagagagaagtgtgagaggttgttagaaacatacaaagcggcagcgaaaattgtcggcgaagttttgtaaacataacgcctgtctgtccgtgttttctatgttctgggaccctggctatttacaacaatgtaccaatggtgcatgtggttgcggtgtcttaatctgtattataattatactctagctcaagtggcgtgtttaccctt

SEQ ID NO: 16507 - DNA, 1104 bp, Emericella nidulans
ttcccaattgctttgagcttgaagattaaagacgcagcgatgagcgccacagagacaatcaccaggataacggccgacaatgtcgctgatatctttcccgacgtcgatacctcgctagcccgggaagttcttccccaggcgacgactacctcggtcgcgaacagcaatgatctcgctggatacgatgaggagcaggtccgtcttatggatgaggtctgcatcgtcttggatgacgatgataagccgattgggagcgctagcaagaaaacatgttcgtgtccttccctccaacccctcaacccctcccttccccgctatcataactcataatccctaattataatggaagcattgtattgccgtcgccgatctaatattaaaattgtgcaggccatttaatgacaaacatcgatcgcggcctcctacatcgcgccttctccgtttttctcttcgactcccagaaccgcctccttctacaacagcgtgcctccgagaaaatcacctttccggacatgtggacgaatacctgctgctcgcacccgctagggatccctggtgaaacggggtcgcagctggacgcggcgatcctgggtgtaaacgcgcagcgcagaggaagttaaaccacgagctggggattaagccggaggaggtccctattgagaaatttgagttcttcacaaggattcattataaggcgccgagtgatgggaagtggggagagcatgagagtaagcagtacccggggtgatttcgggccggattggctggttggtgtacagtggctaacaaaacgctccttgctagttgactatatcctctttatccaggcggacgtcgttctcgagccaaatctcaacgaagtccgcgacacgcgatatgtgtctgcggacgagctgaaggagatgttcaagcagaccaatctgaaattcacaccgtggttcaagctcatctgcaactcgatgctgtttgagtggtggagccaccttggttctccttcactggatcagtacaagggggagacgcagatacgtcggatgtgagggcgaaggaaagcgaggcgaatggacataacttcatgatgatatagcagcgttattccccaga

SEQ ID NO: 16508 - DNA, 1117 bp, Emericella nidulans
atgtccacaattcggttggtccaccgccttgtgcggccgccaatgtcgcatctctcatccacgagatccgcggctcgttcatttagtgcggcatttcacccgcaagccaacaaggatagtgatcgagctcactcgactacaccgcagcaccgggtgaaccaaacggacaagcctcccaatccagctgtgccgagtacgacctcaacattgaccaaggatttccccaaagctggagagaagaatcctccaccagatctcctaaactcagccgatccgaactacaagcctgtggatacttaccccgggaaagttgaacactacacgggaggcagacagcagcatggagcgcagaagccagaacttgaggttggtgagatggagggcatcacgttcaaggttgagccactgaggcgggttggggaggatatatcaaccatgagggctcgcctgctgtgttagttaatctctggccctctttgtctttcttaccggacgtcgtttaagacggaagctaacttacttgccggaactcagaccagagtcggaagcgaggtattctcgagtccgacctgctgttgtctacttttgccgacgtttatttagccgacatgaacaaggagcagctgcaagaatacgatcggttccttgacgagaatgactgggacatctactactgggcgacccaggatcccccggctgagggcggcgctaaatcagacgtttccaaggacaccccaaccgaaacatggcaacgcaccggggccaaaagtggcgagtgggcgcaaacagttggtgcctttaaggctgcgtaccggccagtaccgtcgcgatgggcggactctgatatcctgagactattgagacagcatgttcgggataacagtgccaatggtttccatgcggcaaagaacaggaagacgggcggaggtggcttgaacagaatgcctaacatccagatcttcaacaactgaacggcccagttatcaagagctagcgcttgagcttgatctttgtacaatatggtttcctgttttgtttctggggggaatatatatgggcgcttcaagaatgctgcatagaacagaatttacaattaaaacaaatatataagacgtac

SEQ ID NO: 16509 - DNA, 1129 bp, Emericella nidulans
atccccaatctcccaaactcagggttttttattaaccgatgtccaacctcgcgcgggtacagacttccgcgtcccgtaccatgggcaatccttgtttcgtccccgtccgcccgcgccgttgagttcgtttgatcgcagtgctcgatctcgagctcaagcccaagacgggagactagatctagactccatttacaccctgtcaagggaggaagtacattacgactgcgcttgtgagcacggttgttagtgctgagctgggtttgcgttgaattgattgtcttctgctggcaattgccgcggcggctagacgcgagttgtggcgccaccgccccaagtctgttgatgtcgcatcgattcaggtcgaaatagatatgcgcggtgttctttgtgtggacatgtctatcacacagccagaaagatcgcctgctgagcacggttggccgcggccagtatgcgaagctgaaggtaactcctctctactgatggatgattgtaacgtcccagttatgctttcaggaacggagtatttagcctccctacccagtactcagaaggcaagcgcgatgaccgatcaggtaccgagacggcagctcctacccttctgacgcttagaacaagcgcacctcctactcaagctgccactataagccagtgtatactgcatatgttgatgctagacagagctcttacccgcggacacatcggttcaagaggtacatctgaaggtgtcaaatgcctgtcttaaatgcccctcggtttcagcatctgatcacttgagtagaaagcaaacttggactctgaactctggtctctgattgttcacttcgccttcgtgtcgaatcgtttcagtattccatatactgtactccgtactacttactggtcgtcgttctactactagccagggtcaggaaggtaacgtcagtgcacaatgctcagctacccagcattcgacgaccaggtcgaatctaaatctaacccacccaattgccgggctgtgcttttaccatttcagtcaaatttggacagcatatccagaaatcgcgactaagaaaggaaacaaggagcagacagtgtggaggaacgatgcagcgagtgaactaaataataaagaactcttaagcttaag

SEQ ID NO: 16510 - DNA, 1141 bp, Emericella nidulans
cgattcatatgatcgagcaaggcattggaaagcgcatgtacgagcggtgtctagcctggaaggagggtgacaatatgccggatgagaaagaccttatcaccagccaagaccgcgtcctcctgcgacgtaggcttttcgccatgaaacgtcatactcttcctccaatcgttactcataacatgatcaatgactccgaggatccgatccttaaccagatccggcgtgtccagctcttcaatcaatcttctgatcgcgtcaaaatcgttttccatccagaattcctcaactcatctaacccagtgttgcctttggactacgatgactttgttcgtggtacacaccttggagtcttcccgtcttactatgagccctggggttacactcccgcggaatgtacagtcatgggagttcccagcattacaaccaatctctcgggcttcggatgctatatggaggagcttattgagaactcctcggactacggcatttatattgtggaccgccggatgaagggcgtagacgattcagtcaaccagctgaccgatttcatgtacaacttcaccctcaagagccgacggcaacgcatcaaccagcgtaaccgtacggaacgtctcagcgacctgctggactggaagcgcatgggcttggaatatgtcaaagctcggcagttggctcttcgacgaggtatttctcgcagcccgggttattctttgtttgcttactgactacgtgcagcatacccctcgtctttcgacaaccaggaagattactttgacgttattggcgggacagagcagaagatatcgcgaccattgtcggttcccggatcaccacgcgatcgctctggtatgatgacacccggtgatttcgcatcactgcaagaagtcaaggagggtctctcgaccgaagactatgttgcatggcgccttccgtaagtcctgcacatctacctaggaagctcgagctaattcagcatcagaacaagcgaggaagatgatgcggaagaccacttttaccctctcacccttcggacgaagaagtccgaccgaccgtcttcacctcttgaccggatatccataaacgggggtcaatccagctagcatggagtttattctttgttcgcactcgcatgtcagcatac

SEQ ID NO: 16511 - DNA, 1156 bp, Emericella nidulans
caacgaccgtactacgcaaatttgggcacaaaaatttggtattgctgtcaagaacatccatcagttgcggacttccattcaatacgaggaaagggaatataaaaaccgatgcaaatacgtcgagaaaactcaaaacaatgagccgaaacccttgctctcctacgaagacgaaagtgatgaggacgagctagtgttcgtcccccgcggccgtggcaaaggcgtatcgaaaagtggtggctcccgtggaagcaacaatcgcaagacttcaaccactgccaaacccgtcgcgccatctctggagagtacgatagaaattccaacccaaccaatcgaccccaactcgttcagccggtcgctgggcgtgccctcgaagcagcatgccacggtcgatttgagtacccaggccggcgcctcacgtggcttcgcaggcgcctcgcggaactaatggaaacaaccggcgcggaacgtctcgtggccaaactcgtggcggcagccgtggccgtggcaagctatgggttccttgatcttacgatggtggtccgtcgaccgttatgatgcgacggactgacaatcaatacaactacgcgattgaccgaatggttgccttatgaagcagaaaaaaaaaggttgtatctgcctagcccgactcagttctctgtcagtttcctttataggtaagacatatgggttttgagcggatgaccatggatgcaagagccggaggatggaggtgtcaaatacggtacttattccacctcgggattcgactacggagaattgtgacatggcctagatgggttcagattgagttcaggtcaggtccagtccaggcgtccactttgcgttcctatgatcgctcatatcatgtcatgcctttactcctttactttccgtttatcatggaggaaacggggctgctgtttcatctgccgcgtgggtagaaccccgtgtcccgaccagatcagcatgctttgcaagaggtaggctattcaacatgctactcttagttagttaccagcatacatctctgccaagacaggtgtgctggaccgtccttcttttattgtcccgcgttgattttgtcggcatcaccagactgagactggatgtcagtggccttacttagctcattgaatacttcacatatctagaactc

SEQ ID NO: 16512 - DNA, 1175 bp, Emericella nidulans
cttcattcccacaacatccccgcaccaataaccaagaaccaccatgaagtttcctgctatggcaatttgactattggagatgataaggaccattggaaggttgaggttgtcgatgatgttgcttcaagagacaggagtaggatcagaactctgacaactgcgttccgtttgcgacatgcggttttgggttgttatctacgcgccgggaacactaatcttcctcagtggggtttcaagcaaattgaaacaacttgtgtgaaggaaaacaaaccccgtgacgtttatacgcactggaatattgaaacccataccaacgaccgacgtatgacaccgcgcagtctgttataatttgagctatactgacataatttgcagttccccccggtgatcctggatcgtacaagtctcctttcttcaaagactttgtacatttgaacgttgcgatgatgacgtcgaacaatgctttggtgcctgatcctgacaagcaggacgatcttgcgtcgaaaccttggcaatggcccattcttaatgtcggtctacgcatgtgctcttgggacgaaaaagtcgtcaaatactatctacttggaaaccctgttgtctactggggtagtaccttgagtttggctgtctttggactgctgaccttgtggtaccttgtgcgatggcagcgcggctacaacgagcttagccaggcagatattgaccacattcactatgccggcttgtaccccgttctcggttggtttctgcattatgtgcctttcatcgctatggcgcgagttacctatgtccaccactattaccccgcgctatactacgctatcctgacattcgggttctgtgttgattggcttaccaaaactttgaacaccaaggttcgattcttggtgtatgggctactctatgctttggtcgctggggttttcgtctacttcagggtgattgtgttcggcattgaaggtccaagccaacagtggcgtcacttgaactggttgagcggttggcgaatcgctaactaagaaccgtgatagagcgttacagttcccgttgtcacagttagcgtgcaacgtccctttattttctcgacctctcactcatctgcttccattatttctttagtttattcaaagcagaggcttctgtattatttatcgatcaatgtgtattttgctctg

SEQ ID NO: 16513 - DNA, 1193 bp, Emericella nidulans
ctcactgtcgagtcactaaaaggccaagcggttgtcaagtcgcttcgcgacacgattcatatgatcgagcaaggcattggaaagcgcatgtacgagcggtgtctagcctggaaggagggtgacaatatgccggatgagaaagaccttatcaccagccaagaccgcgtcctcctgcgacgtaggcttttcgccatgaaacgtcatactcttcctccaatcgttactcataacatgatcaatgactccgaggatccgatccttaaccagatccggcgtgtccagctcttcaatcaatcttctgatcgcgtcaaaatcgttttccatccagaattcctcaactcatctaacccagtgttgcctttggactacgatgactttgttcgtggtacacaccttggagtcttcccgtcttactatgagccctggggttacactcccgcggaatgtacagtcatgggagttcccagcattacaaccaatctctcgggcttcggatgctatatggaggagcttattgagaactcctcggactacggcatttatattgtggaccgccggatgaagggcgtagacgattcagtcaaccagctgaccgatttcatgtacaacttcaccctcaagagccgacggcaacgcatcaaccagcgtaaccgtacggaacgtctcagcgacctgctggactggaagcgcatgggcttggaatatgtcaaagctcggcagttggctcttcgacgaggtatttctcgcagcccgggttattctttgtttgcttactgactacgtgcagcatacccctcgtctttcgacaaccaggaagattactttgacgttattggcgggacagagcagaagatatcgcgaccattgtcggttcccggatcaccacgcgatcgctctggtatgatgacacccggtgatttcgcatcactgcaagaagtcaaggagggtctctcgaccgaagactatgttgcatggcgccttccgtaagtcctgcacatctacctaggaagctcgagctaattcagcatcagaacaagcgaggaagatgatgcggaagaccacttttaccctctcacccttcggacgaagaagtccgaccgaccgtcttcacctcttgaccggatatccataaacgggggtcaatccagctagcatggagtttattctttgttcgcactcgcatgtcagcatac

SEQ ID NO: 16514 - DNA, 1207 bp, Emericella nidulans
cgcctttgcttacgagtacctcttttcaccgatcgaacaccgccaaagtgtcgtccttactgatgccccgtgctatctccttcccaccggaggttgacacaggaccacaccggctagcaccagatcataacatgtcccagagcaaggctggcaggcggaggaggtcgagcagtatcatctaccaggagcctcccgagtccattgagcacaccagcgaccaggcggccctcccaaacctgaatgcgaactgggttaatgctaagggtgagtgattgcgtgggctaccattgcgctgctattgggccctgctcagaatcaaatcaagcaagcaccaactaatgctcacatatcgttacaggtgcttggactatccatttcgtcttgattgcggccttgaagatcttctacgatatcctccccggcgtttcgcaagagacatcatggaccctcaccaacatcagctacatgttcggttccttcctcatgttccactgggtgcggggtattcccttcgaattcaacgcgggcgcctatgacaaccttaacatgtgggagcaaatcgacaatggggaccaatatactccggcgaagaaattcctgctttgcgtgccaatctgccttttccttctcagtacacattacacccactacgacctgacttactttgtcatcaatttcctagctaccttgggagtggtccttcccaagttacccttcgtatgtatcccctacaccattccaaacggatggcgcgggctgggctaacccggagtacagtcgcaccgattacggataggtctcttctccgacataccggaagagtagcggaacggcttcctcttctctatccaatgttttctcctacagaccttactactttcccgccaaattatcctttccgttgtgttttattctttcctttactctctactactctctactattctctacttttgtcataactttaatacctacctgttcaggagccatactgctggcagatttgggcggagtctattctccacctcttttattctgggcgcggggaaagagtatgattctgagattaggcatcagatcccctgcgacacgggcaaaaagccacccgcagaaccagaaacgacgcaaaagaattggggatagacggtgtttggcgagggcttatacaggacagatatttattacagatatcccactattcttccca

SEQ ID NO: 16515 - DNA, 1213 bp, Emericella nidulans
gccacgcaacatacttacgatgtcgttatcgtcggtggcggcattgtaggctctgctctggcctacttcttatcgttgtcgaatgacggtaaaaaggtggctgttatcgaacgtgatttgtcccgccttaacggctcaacgggttatgccccagggtttgtcggccagtttaacgagtccgaggtgttaactcgtctggcaattgacagtgttggggaatacctaaaggttccagggggatttgaccaggttggaggtcttgaggtcgctacaagtactgccggagtggaaaagctgaggtggaggctcgaaacagcgcgtgaaagaggtctcaaggcggagctgatctcggcccagagcgggcagaaatggcccatgatttagtgaagggcgacaatgtttcggcgctgtatttcccagcagatggaacggctaaccctgcggcaatcacgggttactttcagtccgaagctcgcgctagaggagtcgaatttgtcgagggagacgtctccgaggtctgcagaggtagcggtcgcgttaaaggagtgatgaccttttcaggatttatacccgctgagagagtcgtccttgctactggcatttgggcgaggaacctctgtgattttgaagtccctataccagtcatttccgtcgcacacccatatatgtatgggaaataccgcgagcccaagccttacaagtccccattcgtaaggtaccctgaacaccatgtttatgttcgggatcatggcccattctttggcttgggttcttacgaccataaacctatagccgagaaaccaaacgaaaccgccgttgggaactgggtcgaggaattcgatacgacactccaccgggctttgcgtttcattccagagaagacgaatttggctcctcgagaaaagttcaatggcttattctcgatgacgcctgataacatgcctttggttggagaaatcccaggaacagagggactttacatagcggcagcgggctgggtcacccacgcagctggctcagcgaaattcttgacccagatgatcaagggtgagacactcgacgcagtggtaaggaaagctctcgatcccagtcgattccgcgggtgtgatatggagcgcttggagcgggagtccctgcattgctacaataacatatattcgactcacgaggccatatagtatataggttctgcagaaatcaaaggtgtttaaag

SEQ ID NO: 16516 - DNA, 1237 bp, Emericella nidulans
ccgaacgcgactgtagaaaacttggtttctttcttcaaccttcaactcaacggtttgaatgttatccaaagcgtggacccatgtatctcagcccagatctccgacgaccactcttttgcactgctggagttcaagtcacccaatgataccacagtggcgcttgctttggatggcataactatgggagagcatgagagtaacggggaaaatggtgcagctaagggattggaagtgcgacgacccaaggactacattgtccccaacctcgctgagcaggatctggaaggagcgtctggcatgaaggatgttccagactcacccaacaagatctgtgtctcaaatattccgcaatacattccagaagagccggtaacaatgctgctgaagtccttcggcgagctcaagtcttttgttctggtgaaagactcttcgacggaggaatctcgggtaagttcttgaagtcttgatgacgtgcatagctaatcgtggcagggaattgctttctgcgagtacgctgatcctaacactactaccatcgccgtccaaggtctcaacggcatggagttgggagaccggcacctcaaggttgtccgggctagtatcggaatgactcaggcagctgggttggacatgggggtcaatgcgatgtcaatgttcgccaaaaccacgtctcaggatctggagagcagccgtgtgttgcagctgttgaacatggtgactccggaggaactcatggacaacgaggattacgagggtaagttccgtctctttctcattgattagtggtgttctgacgagacagaaatctgcgacgatgtacgcgacgagtgttccaagttcggccgtgttcttgaactaaagatcccacgcccgaccggcggcacgagcagtctccaggcgtgggcaagatctttgtcaagtttgaaaccattgaagcgacaacagcggcattgaaatcgctcgcgggcaggaagttttccgaccggacaggcgtcacgacttacttctccgaggtaagtttcatagatcgctcaggaaacaacagttgtctaacggttgcaggaaaactttgacgtcaatgcctggtagttcgccatattgaaacgtcttatatcttgctcatcccacgatgtttctatctatcctttatatctgagattcccgggagatcaacagggccaggcttctccttgaattaatgatgtatcatagcgatcaatgcaaagatccgaactct

SEQ ID NO: 16517 - DNA, 1303 bp, Emericella nidulans
aaggctaaaaccttgccctcgctttaccacatttatatattgtctggacgtgacaatatccttccaacgatgacatcgtgcgaccaactagaaaaaaattacctaagggcgccttatctttacccacaaattgttacatccttcgcagtactattcgctccttgaacatattgtccatcacaatgggaacaacgtctgttcgccggaaccttttccagaaccatcttagcagccgcccaatctcgaaccctgcaccgaatacccggacatcagggctttcttctcaagtattgcagtccaatgtgcccgagtcaaactcgtccaactctgtcggtctcatggatgatggtgaaattgttgtgaaagacaaaaatggcagcttttcgctggatatacccgtcttgccacccattgtgggtgaagatgaggacgagatggaaggcattgaaactgaaggcactggcggagaatctacggctgctaccggagctgaagccacgggacagggcggaatgagcggacgacagaaagagagtatgtcaacgtcttttgtttacgggacagaccagcaaatctaagtcttagaatatagagtttgaagcgggtcttatggaaatcatgtacaggaaccggaacagacaaacgagtagtgaaccacaaggtgagctttctttacacgttttgcgagaggcccgatgccatggtgctgacattgacagaaattctgaatctcatttaccagagtcttagaaataaggtcgccgcactggatgaagacaactggatgtacgagcccgaagccgatacgcgtgtatagcgacaatatgtgtcaacggcacatgacaacccatttaccacatggatactgctaatgccctaattgtattcaccgtgcaccgggctgtctagtcaagttccatatttgatggcggtgcttcgacttttcttgactgaccccttcctgaagccgaccttctaccgctatcctgtccacctccaaacaacatgctgcccatcatatccaacagcggatttccctgcctagggatattgatcccgaagtactgctcgccgatttggggaagcgcatcatcgaggatcccggcctctttgatatgcgtagcatagtgcgcggtcaactgcttgaacaaatccgctgttcctcgttgaatagcgagcagcagcatgttgagaaagtttaataatgggagcgcaggcaacacccgaacatcagaggtggcactgctgacatcttgcactccaaggctcgggtttgcggacgtgaggcgggacgtaaagatta

SEQ ID NO: 16518 - DNA, 1305 bp, Emericella nidulans
ggatgatgttggccttattcctagattgcgaacctcaatgaccacctattttgtccttgttatccggcgagataacatactcacagacgccttgaaccagctttggcggcgggaaagacgtgagcttatgcggcccctgaaggtccaaatgggcatggatgaaggggaggaggggctcgatcacggcggcgtacaacaagaattcttccggttgttgatggcggaggctcttgatccatcatacggcatgttcacaacggatagtcgcacgcggtgctcatggtttcaaccttgctcatgggagccgctctacaagtttgaaattcttgggttattgatgtcactcgcagtttacaatggcctgaccctccctgtgaatttcccattagcattttataggaagctactgggattgaaggtcaagcacttggaccatattcgcgacgggtggccggagctgacccgtggtttggaagagctactacgttggaatgaaggcgatgtcgcagatattttcatgaggacgtatgagttcggtttcgaggcctttggcgcgttgagacggttgatatggaaaaggtcgatagagatgcaccgtggccgaactcactgcctccacagtccggccgctctgtgcgatactctccgtcgtggtccgatgtcggccgttataccgacctagcaagtctaagcccgccctcatccatggctgctgaaacggccgattcacaagatgataccgccaaatcagctataagcctgccccctttgccctcgcctacttccccagccgaggaagcctctttggtgaccaacgaaaatcgtggccaattcgtcaaggactacattttctggctgaccgacaagtctattcgcccccaatttgaagcctttgcacagggcttctatacctgcctcgaccgaacatctctgtctatcttcacacccgaagcgctgaagactgtggttgaaggcatccaggaaattgacattgcagaactggaacgtcacgcgcgctatgagggcggcttcggtgcgggccaccgggttatccaggacttttggagtatcgcgcatcaattctccgccgagaagaaggcgcagctgctggagtttgtcacagcgagcgaccgagtgccggtcaatgggatttcgagcattatgtttgttatccaaaaaaatggcgtgggtgatgctgtaagtttgactgatccaaattgaatgggcttgactaataatgaggttcagcgccttccaaaccagtttgacctgctttggacgactcctgctgcccgagtactcttc

SEQ ID NO: 16519 - DNA, 1328 bp, Emericella nidulans
  unsure (1)..(1328): unsure at all n locations
gggaaattctgggaaagagctagttacggaattggataatatatggtcggaggaatatcagagcggtttttatgacagctgcaagaacgtcaagaacggcgcttcgggtggcaaggctattgattttatcggagggggcgcaaaggattaccagcagttcttgaagtttctgggcgacaagaagtttttgggaagcccgttccagatcaattaccacacagaacctccggaagactctcagggtatgcaggcactaccgattcaccccaaggcttgcaatgatgcagatccagcataccgttgctcttgtgttgattgccccgatgtgtgccccgagcttcctgcaatcaagaccgaagaacattgccacgtagggcttctcccgtgcctgtcgttctccgtcattctcatatattcggttttcttacttggcgtggctggattttcaagctatttcacctatagagaacgcaggtaccgcaagcctgaacgggtgcgacttctacaggacccgaatccgagcgacgacgaagatgagggcgacattgttcacgctggtggccatttggaataccctcatggatattacaaactcaactctatgctcgatacagtgtttagtcgtattgggtccgtttgtgctcgtttccccgcgttgacgataatatcaagcgttgttgcggttgtattattgagcttggggtggctgcggtttgcggtggagacggatccggtccgtctctgggtgagccctacttcagcagcagctaaagaaaaggcattcttcgatgagaattttggaccgttctaccgcgcagagcaagcattcctcgtcaatgacgacgagactggtgatggtagggttcttgattacgacaccctgacctggtggtttggcgttgagtcgcgcattcgccgcgtaatctctttggaccgtggattgtcattggatgatatatgctataaacctaccggcgatgcatgtgtgattcagtctgttactggttactttggtggctcgctgtcgaacctggacccagatacctggcaggatcgtttgacgcattgcgccagttcacccggcgatgccagctgcctcccggacttctcgcaacctttgagaccggagatgattttaggcggctatgaggattcagggaacgttctagacgccaaggcttttgatagtgacctgngttgtgaacaatcatgctccgggctcagaagaagaggccgaagcgattgattgggaagacacttttagaggaatattccaggttgtccaggaagaagcaaaaaaccgtggtctccgtgtctcttttaccaca

SEQ ID NO: 16520 - DNA, 1351 bp, Emericella nidulans
ttgcggtaagtggaaagtcctcaggaaacttctgaaatggtggcacgggaatggggacaaggttcttgtgttttcgcacagtgtccgcctcctgaagatgttacagatgcttttcaaccatacaagctacaacgtcagttacctggatggatcgatgacctatgaaacccgggccaaggttgtcgacgagttcaactccgatccgcgacaattcgtgtttttgatctccacacgggctggcggagttgggctgaatatcacatcagcaaacaaggtcgtaatcgttgatcctaactggaatccgtcccacgatctccaagcccaggatcgggcgtatcgaataggccagacacgcaatgtagaggtctttcgcctcatatccgccggtactattgaagagattgtctatgcccggcagatctataagcaacaacaagcgaacattggatacaacgccagctccgagcgacgctacttcaagggcgtgcaagaaaagaaagaccagaaaggtgagatttttggcctccagaacattttcgaataccaaaacgacaacattgtgctgcgtgatatcgtcaacaagaccaatatcgccgaaagtaaagccggcgtacaggtcatggatatcgaactggaactggaagaagcgggctccgaggacggttcctggagtagaaatccagacgacgatgatgaagccatgagccaacttgccgccagaatccgaggcgaaacagacgacgaagttatttttccccaccggcaacaatccacaactccatccaaacacgacccaatccaagctatcctcgccggcgcaggcgtcgaatatacacatctaaacaacgaagttgtcggctcttctaaagtcgaggaacaactaagccgccaagctcagctagctgaggatgacagcctggccaacctccaagtcttctgcgactcgcaagatgaggtcgccggtgcggttgtagctccgacattccagaaaaacggccgaccggtgacatttaagtaccatcccccggaagacgtgatgaagcgccagttctgtagcatggcgagacggtttgggttcccgaatgcgacggaatttgcgcttgttgttgagagcatgacgcaggctgagaggagggcttgtcttgatcgatggtatcgcgagaggaggcaggcactccttgagtaagcttctgaggcgggcgccgcagcgggatcgtagttactcttggtgagattggtactattcgtttacgagacatgattgacgagtatccgctattagtatagaacaaaaggaatgactttcctttacaagtgtatttaatatagttgagaatgattcattaacatt

SEQ ID NO: 16521 - DNA, 1375 bp, Emericella nidulans
gttgccggtctcggtgtcggtgccctctccagcgtcgtccccatgtaccaatccgaagctgcaccccgccaggtccgtggtgccatgatctcggccttccagcttttcgtcgcctttggtatcttcatctcttatatcatcaactacggtaccgagtcgatccaatccactgcctcgtggagaatcaccatgggcatcggtttcgcttggccactgatcttaggtctcggagctcttttcctgcccgagtccccccgttacgcttaccgtcttggccgtattgacgaggcccgcaaggtcatggccaagctctatggtgttgaggttaaccaccgcgttgtcgtccaagaaatgaaggacatgaaggataagctcgaggaggagcgcgctgctggtgttgctccctggcacgaggttgtgactggcccccgtatgctctatcgtactcttcttggtattgctctgcagtccctgcagcagctctctggcgcaaacttcatcttctactacggtaactccattttcacctccaccggtctcaacaacagttacgtcacccagatcattcttggtgccgttaacttcggtatgaccctgcctggtctgtacattgtcgagcactttggtcgccgtgctagtctgatggtcggtggtgcctggatggccatctgcttctacatctgggcttctggtaagaataaatccatcctgccactcaaacgaaagacatcggctaacaagtctcatagtgggcaactccgttcttgatcttgacaacccgcagaacacccccaaggccggagccgccatgatcgtgttcacctgcttcttcatcgccggtttcgccaccacatggtcagtcacctcgtacatccgctacaaatctaacatactaacatgaccacctaggggtcccatcgtctggtccatctgctctgagatgtaccccaaccgcagccgcgccacaagcattggcattgccacttgtgccaactggacatggaacttcctgatctccttcttcaccccatttatctcaggctccatccactttgcctacggctacgtgtttgcctcctgctgtgttgttggtgtccttatcgtcttcttcttcgtcaacgagacccagggccgtaccctcgaggaagtcgacaccatgtatgtcttgcatgttgtcccctggaagagtgcttcctgggttcccgatgagagcatcgtccgtgatctccaccctggttccgatgctaacaagactgagggccttgggcaggcggagcatggtgaggagagcaggccggagcctgtggagattcgggagtgagtgttccaccttctatacagttagagagggtgtgatgtgtattactatttgatg

SEQ ID NO: 16522 - DNA, 1376 bp, Emericella nidulans
ccaggaaatgattacccacctggccatgaactcccaccccaaccccaagaaggtcctcgttatcggaggtggagatggcggtgtcctccgcgaggtagtcaagcacgagaccgtcgaggaggccatcttgtgcgacattgatgaggtaacaaaatctgctttttcctgccttaccttgccaattacctacatatgcaactgccgctgcatgcaatttagtcgccaaaaggctgacgggcttcatcattgcaggccgtcatccgtgtctccaagaagtaccttcccggcatgagcatcggctggcagcaccccaacgtcaaggtccacgtcggcgacggctttgagttcctcaagcagcgccagaacgaatttgatgtcatcattaccgatagctctgaccccgagggtcccgccgagagcctcttccagaagccctactttgagctcctcagagacgctctacgtgatggaggtgtcatcaccacccaaggttgttcgtcgcctttctttttatattctgcctccatctgctttttctctataccttgacttctcgtttttttcttgttgtcttgtactctcccagccttcccatagccctagcccgcactttttctccccttattctctctcttccatttttccttatacgatatttttgatataagggttcccgggctaaccaagtctcgacccaaaccacccgatcccgggatcggtttgggtttcacgttttctccgttacagccgaaaaccaatggcttcaccttcctctgattgccgacctcaagaaggcctgcaacgaggtcttccctgtcgccgaatacgcgtacaccacaatccctacgtacccatccggtcaaattggtttcatggtttgttgcaaggatgccaaccgcaatgttaaggagcccgtccgcacctggtctcgtgaagaggaggagcgtctctgccgctactacaaccaggatatccaccgcgccagcttcgtgctgcccaactttgctcgcaaggctttgggaaattagattcagatgagatgagcatatctttgtttttgtttaaaagaataccatatcaactgaatttctcctgtgattatctatttcactatacttttatactccgtgtcctatattatgagaggattgaggatttaggacccaaactaggtgatctgataacgggatataaaccaacacccaaaggtcaaactacgtcagttactcactcctggatgcgcataagctttcagccagaagtattcaagaccgagagcaaatatgaacagatagatggtattcttttcgcagatgtctaaaaatatcagagatggccagaccttgaaataagttcaatggtggcttttattcttc

SEQ ID NO: 16523 - DNA, 1379 bp, Emericella nidulans
ccagcgagctgtatcaacaactccgcgaccttttccttcgacttaaccttcaagcatccttcatgggccgcctgctggtcccaataaacgtggactcaccaggcaccagaaatggacacatctttactgacctgaccgaagcaaggtcccatctcgatcgtctgatgacaaaggccctccgcttcatccgctccgtcggcatcttgcgcgaagaacgaccgccggtggtacaggcccagttcgaagcagaacgcgaccagatttgtgaggaactgctgtcttggcgatggtcccacgataaactcctcgacagacacgggctggaaatccaacagtcagacctccgcgcctcccttttactgcgtatatattaccaggctgccttgctatgggtctgtgtcgcgttggaccgagacgaaaacggacacgataatttcaccgcggatttcgagtcgcttatatccaacgcggaggaaatccttcgcctttcctcgcccacgcgaggcgcggagaaagcaagagtgaaagacgctgaatcagccttctcactagagggcggaataatcgcacccatgtactacgccgccgtccgctgccgcaaccccttcctccgccggcgcgccctcaatattctcttccaacactccaagcgcgaaggaatgtggaatgcacgactttgtgcgcaggttacgaaagtcgttgtcgaagttgaggaaagtcagtgtccggagccaccgacgagcgaaaaggacatcggcccattggcaagggtgtatgaagttgttcagctgaaggaaatcaaggccaatccgacacaggctgtgctttatatgaagcctgaaggagtgaatggcccgtggaaaacgaggagtattatggttgcgtggtgattctattatatgggatatcggagtttaacgtgagtggcccggagactcgtcgttatttgtctttcacatcttttccatccattctgccactatgcagcgtggcttccaggctctgagtggagcccagagtgtctcacgtcgttgacactcctccataaacttcaaccctcatttgctcagactgtccttttccacatatacctgtccgtatgtgaaccagtaagacctatattggggctcttagtgtttcgccattgtctacaccatgaactgtgaggcaagtgaagagcaatccctttggctcgccattcacctgagttcgattcctgggccaagatttacttctgaggaataaaggtacagcaaatccgcaagggaccgatggaatgatagcagatcatgtaggcattgaagagactattgggactaaattgcgcagatatgtctcgtcaagccaatccctaccctcactcaatgctacagactcga

SEQ ID NO: 16524 - DNA, 1402 bp, Emericella nidulans
ggcagatatctccacatcatccgcgattccccggtttaccagtcatctacgacgccaacagaaccgtctgctctctccccccaattatcaacggagagcactcgaagattacgctaaacactaagaatgtttttattgagattacagcgctcgataagacaaaagtggaaattgtgaacaaaatcatggtttcgatgttctcgcagtacacatccgagcccttcacgtaagaacccatgcattcctgtgctcaatttaaaggtttcgggagctgatctcgctataaacagggttgagcctgtccagattatctctgagcacaacaacgagacgagagtcactcctgacattgcacctcgaactacacaggccgaagtctcgtatatcaaccagtgttgtggcttgcagctctctgcggaggagatttgtagactcctgacgaagatggcatatgaagcgacaccgtctagtacttctcctgacttaatcgacgttcacattcccccaacacgtgcagatatccttcatcaagcagatatcatggaggatgttgcgattgcctacgcgtttaacaatctcccccggtccttcccaagcaagtcaggcacggttgctcagccgttatcgatcaacaagctttccgacatcattcgcacagaggccgcaatggcgggttggtccgaggtgctgcctctgatcttgtgctcccatgatgagaactttgcctggcttaaccgcacggacgacggcaacacagccgtcaagctggcgaaccccaagacacaggagtaccaggtcgtgcgcacaagtcttcttcccggtcttttgaagactatccgcgagaacaagtctcactcagtgcccatgaagatcttcgaggtcagcgatgtcgccttcaaggatctatcgatggagcgtaagagtcgaaacgaaagacactttcgtgccgcatggtacagcaaaactagcggcttcgaggtcgtacacggtttgcttgaccgcatcatgtcaatgctgaagtccgctttcatcatcggcgaagagggcctggagaacgccgcagtcaaggactcgcagtactggatcgaagagctggacggtaagtcttcctcatttacaagactcaaaggtccctctagtcactgatataacgatacagacccaacttatttccacggtcactcggcctctatccacgttcgcattgccggcaaagaccacaccatcggtacttttggtattctgcatcccactgtgctggagaactacggtctgaaataccccgtcagcacgcttgaaatcaatatcgaaacattcctatgagattatgggtttgaagactcaatctgcgggaaatggtgatttagacttgcatagatagcatacaccttatctcatggca

SEQ ID NO: 16525 - DNA, 1455 bp, Emericella nidulans
agtggctgttgaaatgggactcgctcatccgtgaggccagatccgacctggcgaagatcctcacccatgaaacaggcaagccaatcgccgaatcctatggcgagatcgactacgcgaccggtttcacctggtggtttgcgggtgaggcagaacgtatacaagggtcaatcgccgtgcctgccgcgcctaaccggcgcgtcttcactgtcaagcaaccgatcggtgtcgctgctgcccttgtgccgtggaatttccctattgctatggtgttacggaaggccggtgcagctctcgctgccggttgcacgatgattgtcaagcccagtcccgagactcccctcacagccttggtattagcgcacctagcggagaaggcaggcttccccgccggagtgttcaatgtgcttacgacggatctggaaaacacgccgccgctaagcgaagcgctgtgcaagcacccgctcgtgaagaaggttacgttcactggctcaactcgggttggcaagctgattgcctctcactgtgcacacgggttgaagaaggtcacattggaactgggcggaaattgtccattccttgtgtttgacgacgcggaccttgaccaagcgctggaccagctgatggctctcaaatggcgccacgctggtcaggcttgtattactgcaaaccggatttacgtgcaggctggaatctacgacaaattcgcgcagtgctcaaggagcgcacggccaaattggtgatcggccatggtgctaaagaaggcacgactctgggaccgctcacgaccccgcgcagtatcgacaaggccattagccaagtcgaagacgcgcgacggctgggcgcagacgtgattcttggcgggagccgtgtccaaggaacacagggttacttcttcgagccgacaatcttaaaaaacatgaccaaggacatgttggtgtcgcgcgaggagtcctttgctccgatcgctgctctctatcgctttgagactgaggaagaagccgtcaagctggcgaacgacaccagcatgggcctggctagttatgcgttctcgaagaacattgaccgtatgtggcgactgctggagaacttggaagcgggcatgatcggcatgaacacaggaaactcgtctgcggctgagtcgccgtttggaggaatcaaggaatcgggttatggaaaggagagcggaaaggaagttgccgtgaatgagtacctgattaccaagacaggtactctaacgattgatgggcagtactaggttgtccgtctccactctttgaacggctcacggtactagcctgctgcctggagacgaatccaaaacgtgagcaggtactgtttatatgcttcaaggctcgagcttgtaagattgctcctttcaatcaaattggtatcctctcatgaagtgctagcatagtcaagtttatagtgttcatcatattatcttattcataaagg

SEQ ID NO: 16526 - DNA, 1508 bp, Emericella nidulans
caaaattcgcagggaggtagcccagtgaccgctttaaccggttgacaatgacagccgcaacgaacattccgattcctgtctggttggattgtgatcctggtctgcaacccaacccggattgattctatcatctagcatagaagctgacactaatattcaggccacgatgtaggttctagcgatgttgtcgcacacctatgctacgaagtctaacgcagcgtccgtccaatgatcataggatgctttcgcaatccttctcgcagctcatcacccatccctgaaccttttgggcatcacgactattcatggcaatgcttctctcgagaataccaccatcaatgccacaagggtgctagaagctatcggcaggcccgaaatccctgtttatcctggaaccagaaaaccgttttgcaggcctgcagtccatgctcctaacatccatggtcagttgccaacggaacacgctcaattttatacagcaagctaatccgcgatggtgggacaggcgactcaggcattgacggaactgaactccttccgaaagcctccagacctcctatcacagacaaaaatcccatccttgctatgcgtgatgctcttatggctcagcccaagggcacaccatgggtcatagctacgggaacattgaccaatattgccttgttgtttgcgacctttccagaagttgcagtgcatatcaaaggtctcagcataatgggcggtggtgttggagatggatttgcgaatgccccaataagcagactagtcgggcatgaaaaccgggtcgggaacgtcactccattagcggagttcaatatctacgtacatcgctcaatgaaggattactagtgttggctcaagtctgacggcgatatagtgcgaccctgagtcggcccaatcgatcttcggcaacgagattctcgcacccaagaccttcctgatgacgctagacctgacgcaccaagtcctcgcctctcgcgatgtccaaacccgcattttgcacggcgatggtgacccctcaacagctccgaccgtccttcgccaaatgctatacgaactactcctcttctttgcgtcaacttacgaagccgaatttggtctcacaacaggtcctccgctccatgatcctcttgcagtagccgctgttatttcaacccttaacccggacttcgctaggagatatcccgagcaggctttaaagtttgatgaccgcaacggcgagcggtttgcagtcaccgtcgttacagatggacttcatggaacagatgtcgctatggtaggacagctcggccgttcagtagtgtccagtcacgctactggggtcaccattccccgcggagttgatattgatgcgttctggaatattattgtggactgtatcaggcgggcagatgagttgaatagtgcgcggacagcagcttaagcccgcatgcgctgtaacttcaggttacggagaatattcacagcacatatagttgatagagagtatatacactacagatggcaca

SEQ ID NO: 16527 - DNA, 1523 bp, Emericella nidulans
cgactgtcatcacagctgactctgatatcggcttttcacctatacgtcaccaaagcctgtcatcatgtatgttgcgagccgcattcgaccttgtggccgtgctgatgtgaatgcttcaggagagtgatcatccgggatacatctttgcaggcgtcggagtatatcgctgattatattatcagtatgtacactctacggcatattcagtaattaggctatactaatgttctctctactggactcaaggtcgtatcaaggcatacaaacctagcgagagcaatcccttcgttcttggcctaccaactggaagcagcccagagatcatctacaagacccttgtccggcgttacaaagctggagatatctcattcagacatgtcgtgactttcaacatggtgaccacctttcctcagatttggtcagttcgattactaacgatataggacgaatatgtcggtcttccgcgcgatcaccccgaatcgtaccatagctttatgtacaagcatttcttctcccatgtggatattcctccgcagaacatcaacattcttgatgggaatgctacggacctggccgctgagtgcgcctccttcgaagcgcgaatcgctcgctatggtggcattgagctctttttgggcggagtgggttctgatggacatattgcgtttaatgagcctggctcatccttgaacagccgtacccgggtgaaaaccctggcttacgacacgattctggcgaactcccgtttcttcaataatgacatggcccaagtgcctcgtatggccttgacagtgggcattcgaacaattatggaagcccgcgaggttgtgatcgtggcaactggcgcccataaagcattagcggtcaaggagggcctagagggtggtgtgaaccacatgtggaccatctagacgcttcaactgcaccagcaccctctgatcgtctgcgatcgtgacgcaacgctcgagctcaaggtcaaaactgttcgctattttgagtctatcgagcaagctgggacggatgcgcgcactcagggtcctcctcttgtctacaggccccgaacctacgtccctgctccgatgacagtgaacaaatccaacggggagcttactccaattgccacaccggaaaaaacatcgaaagacttgagaatcaacactgacctcacgcggtcattcgaggacgatgagctcacaccagatagtatgtcgtcacgtatggtcgattcggccgtcggtggactcgatgccactctcaagggcgatttgatgttcgatcgtatgggtgcaaggatggaagctcattagatcagatcgcaagggtgggtatggaggtgtaaatcagccacgcgatggcagcgctggaacgacttcaaatgctggcttgggtttttatgattaagaaatgtcctttgcaaatgtgattagaacaaactagattgactgctgcatggtgttttggctactgggataatggcttatgcatatagaccgataagtagaatgagatacgtattcttatgt

SEQ ID NO: 16528 - DNA, 1531 bp, Emericella nidulans
agtaacctgcgagccaaaaaatgtcgctcacagaatcgacggcgatcgacatcgcgaaagctgcgtcctcggcgtctcgccacctcgcgattctttcggaagcggaccgcaacgaagccctaacagcgttacacgcagcgctttcaaggaacaaggatgccatacttgaagcaaatgctagggatatccaggcggcaacacaggctgtcaacggcggcagtctcaatcatagtgtcttgaagaggctcgatttgtccagaccaggaaaatacgatgatatgttgcagggcattttaagtgtgaggagtttgagggatcccagtatgtttgcgtcagcactcctctcttacgtatctggttttctttatcccggggttttctgattatgttgaagttggaaatgtcacgttgagaaccctcctcgacgacggccttactcttgagaaggtcgcatgtcccatcggggtactgttgatcatttttgaggcccggcctgaggttattgcgaacattgctgcgttgtctatcaagtctggcaatgctgcaatactgaaaggtttgcttcttaagttttggtatgtagttctgaactcctgctaatattcaaaaggagggaaagaatccacggaatctttcgtaacgatcgcgaacgtgatctccgaagctatttctcacaccagggtgccgcagtcgtctattcagcttgtgaagaccagagcggctgtctccgatctactggcacaggactcgcttatcgatcttgtcatacctcgaggctccaatgacctcgttagattcgttaaagagaacacgaaaataccagttcttggtcatgcagatgggctctgctctgcatatatccattccgatgctgacccggaaattgccctcaaggttattgtggattccaaaaccgactatcccgccgcatgcaactcactagaaactttgcttgtacatcaagatgctctcaaggaagttctaccgcctcttgccaaagcacttattgcgaagggtgtcactctccggtgcgacgaatcctctaaggctgcgctcattgaaaacttgactctcaaggaagcggggatgcttcgggatgcctgcgagtctgatttcaggactgagtttcttgatcttacactagccgttaaaacaataccttccaattcgcctctcactgacgtcgaagcggcaatagcccatatcaattcgcattcttcgaaacatacggatataatcattacggaatcagaaaatattgctaatattttcatgaaaggcgttgacagtgctggggtgttctggaatgcgtccactagattcgctgacgggatgagatacgggtttggcactgaagtcggaatcagtaccaataagatacactcgagagggccagttggtttggatgggttgactatctataagtatttgattcgaggcagtggtcacagggctggtgattattttgacggcgaaggaggcagaaagtataagcatcagaacttagagctatcatagacaaacatgcaaa

SEQ ID NO: 16529 - DNA, 1567 bp, Emericella nidulans
gctcccaatcatcattcctttcaatatctcgcgtttctataggcgcggatggcgatatttctgatatttcatcttctagaaacggctgctcggggtcataaaggcttgattcgtcaaatatgacgtccctcgccgcctcgatgcgctgcttgctggggatccagataagccatatattggaggctttgtatccgactaagtatccccctagcctccgaggtttcgatttcagcgtcttgttttgctggtttagtgactgatctcgtacataggctctgcagccaaatgtgtataggcttgccatattagggcgtttccccgtggccttttcaaatggcgttatccatcctaacatccttattagtgttcgattcaaaatatatgctgctgccttcatcgagactggccacatatcaagtggtaaccttgctttaatcatcatatgccgtgctcgagatgtcaaaacaccccctgagcgttctgcaaagccattctgctctggggtagcaaccacagagacctcatggataatgccttccagatcggtgaaggtacgaaatgctcctccaagtgtctgctcattatcggatttatagaacttcatttttgtcccaaattggcattcaatcagggcaactagatgtattgcagcatctacacagccattcttcttgccatgcgtatacacaaaatgcatatgggtgaattcatcatagaaatgcgtacaccaacgatctccgttccatgctttattaaactcaatgaggtcgaaatggaccctttcaaatgcctgagttgctcgatttgccggccttcgagatatctggcgcggtgcgctcgaatatttgcatgtctcacagctcctgggtggttcgacatcgtcgatttggatgcctttaacagcatttggtaggtgtcggatggcttcatgatttagatgaccaaattgtttgtgccaaatatctgtgttgcctgctaatattagtggtttgctggagtgttttatagatgtctttggtctaactgcatgagcattctcattggccggtgcataagcccgatttccgccgttctgctccaccacccaaagtccttgatattctgcaagtcgacagacctcatggccgtttttaaccaccctatcttctgcaaaatcccatataaagcctgcccgcttcatgcggcttgcagagatgatgttggtatgaaaacctggcacataggcagtttcttgcaatgatatcatgacatttgaggttcctcggcaatttggtgatatgtcaccaaccccagtaccctcaattggtacaacagcattaccagcgcgcagatatcctgctggctcctgtttcagctttttaaacctggttttgtcattgcatatatgcactgtggcaccagagtctagaataaagctctccttcagcattgaatactctgatgctgagaaccctaccattatagcagccatggcatgctgtacagtggtttccttgttttgtacagtggtttgcttgttcagttccattgcctttttcagcatattgcatttggcacctggaatctt

SEQ ID NO: 16530 - DNA, 1631 bp, Emericella nidulans
cttggtccaccacttgatccgcccaggaaggtccatctattgctcgagcaccgcgcattgcaccagatctacaaaaccgcgtctttaccatctcaacaaagcaattgcgagttttgaactcgctcgccgcggaatcaacataccccaaaatatagtcattcagcctggggtacctttttactttgttatacttctgccattgaagaaatcaatctcgattgagcgatttggttttgcttactggtgtcacaattgcttgtctcgatgcggccgcagtgagtgttagccttggagcttggctcgcgttacatatgagtgcatggtaaatgctaatatgcttttgtgtcaccggcagacgagaataccacattgtcgtgttaggcgctggtaggctggacttctaccctaatatgaggataccgaaggaatagcactgattctgtttgtctgcacaataggaggagtgggtaaaagctgtcttaccggtatggagatccgtcgctctgactctttaccgctgccttcgtggtatggtctcacgatcgacgcggctcacttttggtagcgcaattcgttcagaatgtttggatcgaaagttatgacccgacaattgaggattcttatcgcaaacatatcgaagtcgacgtgagtcaatcatgtcctgcgcctgcattcgtcgatgctgacattaaatagggccgacaatgtatattagaaatgtatgttagatgattgagtacaggaccgcgggggctcggtgaatgctgacctttgatggcaacagtcttgacacagcgggtacagaacagttcagtaagttcagctcgtcccttagcagccgtttctctccgtgtaacgccttcttagctgccatgaggtaaccagacaccttattctggctcgcttgatagtatcggcgacatgttgattttgggctaacccaattcagagaattatatatgaagcaaggccaagggttcttgctagtcttctccatcacgagcatgtcttctcttaacgagctagctgaattacgagaacagatcgtccgtatcaaggatgatgagaacgtccccattgttatcgttgggaacaaatcggacttggaagaggaccgcgcggtaccccgtgctcgcgcattttctctatcccagagctggggcagcgctccgtattacgagacttcggctcgtcgacgagccaacgtcaacgaggtctttatcgacctctgtcggcagatcattcgaaaggatgcacagggaagatcagaggactacgaacttgcgccgcgcaagcgtgagaatacaagccgacaggaaagaaagcgaggaaaacggcgagaacccaaacgaaaggggccttgcgtgattctatgaagaatcacaaatctcagaagcacacagtttgctacttatctgcatctcgcatctcgcatctcacgcgctatacggctgccagacattttctcccttcatccttcctcatgaatccctcacgacttacactaccgaactttgagtacgatgataccaaccctacttctttttaccgttttaaattatacgccgtcaacgtcatattacgatagatctctattcattgagaaatttcatgagtcatacgttcttgtc

SEQ ID NO: 16531 - DNA, 1710 bp, Emericella nidulans
ccatcatcatctcccctcaccaactccaactatttcagattccgcttgcccctctcgtcgggtggtacaataacgcttgtcaataacgcttgttacaccgcgggccggcttctgctgtgcaataacacattccacatctaccaccttctgcttaccatctacaaccaccactcttcatctctcagccatccggcccaatcccactcgatcgaattgggtgctcggtctcgattcgcttagatccctttttctatgccaccggaccctgaccggaggcggagttctaatagaatggccattccttacgcaaccgggctgccggccgacaaccagcctttgccgtcatttcgcgaggtaagcgggcagtccctgtttgctagattgtggtttgccggttgtcagactagaccagacgaatctagcgggcgagcaggagcagggaagatgtagtaaagatgctgactgctttaaaagctcctcccaccacatcttcacgaagagatcgaatctacttcatattttaactctcaacataactctcggcaaccgcgcgacgtccagcatcatcacacgaattgggtcttaactcggtcccaagagagcatgcttcatcgcggtcttcgcgtcccagtccggtgctcccaccaatccgcgatctgcagtcgtacccagaccgtgcgacgggcgtatatccagaccccaggggtctcccgccgccgccggaaatcaccgccaggcctgttggtccccacggatacccccatgcagcgccagccgtgcctggtccactggccgacaggaatgccgacgcctaccgcggcgtgccgccaatgcacggtcaggtgcgataccactatccatcgatggcgtatcagagcgacccggaccacgcttccgtaccgtcgctctcgcacgcgcctcagtcgaatttcggcattctaggggattccaccgacgcgaggaacagacgccgccgagggaaccttcctaaacccgtcactgagatcctcaaggcctggtttcatgcgcatctggatcacccttatccgagcgaggaggacaagcagatgctcatgtcccgaacaggtcttacaatcaaccaggtaagttatcttgatcgcctctaggaaaagaactcgactaacgtcctccagatcagcaattggttcattaatgcgagaagacgccaccttccagccctgcgtaatcaaagacgtactggcggaagcgacctggatgaacgacagtcgttgagcgatatggaacaaacgtcgcctgagccatcacctcatcgaagactatgatacacgaggcaacgtcgagttgaccgtataccacggccgaatagaccctagaaagcgccgcgaggtacaattacattacgatttacgtgcgagatcggatagacatgatgtctttttcttatcttttgtttcttgtttcttgttctccattaccccatttcttcattgctcaggtcagaccacttcatcgagtgatgcacgccttgataccctcgctatctcttttggttaagtttacacgcttgcatgacccgactttgaaccgttacgttcagcgatctgcctcacattcttgcctcatttatcgggaagatcatctacctctaataatcatcatgcatctgagggggtttggtgttttgcgttgctttattcctcatgtacagtacaagcatgatcatgaccg

SEQ ID NO: 16532 - DNA, 1711 bp, Emericella nidulans
tcaccccagacaatcaaacaacacacctgatcttcgagcacttacgacagcagttggagctaacctgcggcggaagtccgccgttgtatcaacaagtgcacaatgtggaaggttatttttgttataggagcttttctcttcacaagatgctcagggttggctttgatgcttcgacgaagtgactcaccatcagtagttgagttaaatatccatcgcagtgagattccagaccctgtagcaagggaccgaaggaggcgaaaacgagaccaaacagttgcgcaactgatagacaatgaggtaagtcagtaataagtatatatgccatcgtacttacgtccctataggaaacgctgtatttctgcaacctaactgttggaactccagggcagagtttgcgattaattcttgatactggtagcagcgatttatggtgcaacgccgcgaattcaacactctgttcttctccgaaagatccatgtcgcatatctggatcatttgacccaagctcgtcatcatcttattcttatatatcttctgatttcaacattacctacgcagacggaactggagccgccggggactatgccactgacacagtcagtattggtggtgcaacaattaaagacttccagtttggaatcggctacacatccagttcagcaggtatgttgagaaaatgttttgttgtatcagtagctgtaatattgatagctctcagagggcgtcttaggaatcggttatccatcaaatgaagtccaggttgctcgatacggagacgatgcttatcccaatcttcctcggttcctgatgcaaaatggatttgttcagtcgagcgcttatagcctctggctaaatgaccttgaagcgaataccggctcaatcctgtttggaggggttgatacagagaagtatcgtggcgacctgcaaactctccccattcagaccgtcaatggagagtattctgagctgataatagctctcactggcgtctcgctggatactgaagccaggaagcatacagtgtcttcaaacgcgctaccagcagctgtgctcctagactccggcagctctctatcatatctacctgactcaattgccgaaaaaatatacgatgaccttcgcatttcctatgagccgtccactggtgcaggatacgcgccatgcagtttggcccggcaaaatattaatgtgacctttacgttctcttcacccgaaatcgcggttggcattgatgaactcattatagatgccggagatcttcgtttttctaacggtgaacgcgcttgcatattcggccttgttcctgctggagataataccgctgtactaggggatacctttctgcgcagcgcatatgttgtctatgatttgacaaacaacgagatttctatcgccaaaaccaatttcaactcgacaaagagtaacatcctagaaattggaaccggtagtgacgccgttcctggagctacaaaggtatcgcatcctgtcacttcagtagtggctgatgggtctgggtctagaattggtgcgccaacgaacactgaagatattgtgccatcggcgagtacaggcgcagcggttgtgctagggagatcgacaatatctccggtgctcgttggcgctgcagcattggggtatatgtttgctttttgaaattttcgtacagataaagctgatttctaggtagatgaatatcaatataagacccttt

SEQ ID NO: 16533 - DNA, 1766 bp, Emericella nidulans
gctcccaatcatcattcctttcaatatctcgcgtttctataggcgcggatggcgatatttctgatatttcatcttctagaaacggctgctcggggtcataaaggcttgattcgtcaaatatgacgtccctcgccgcctcgatgcgctgcttgctggggatccagataagccatatattggaggctttgtatccgactaagtatccccctagcctccgaggtttcgatttcagcgtcttgttttgctggtttagtgactgatctcgtacataggctctgcagccaaatgtgtataggcttgccatattagggcgtttccccgtggccttttcaaatggcgttatccatcctaacatccttattagtgttcgattcaaaatatatgctgctgccttcatcgagactggccacatatcaagtggtaaccttgctttaatcatcatatgccgtgctcgagatgtcaaaacaccccctgagcgttctgcaaagccattctgctctggggtagcaaccacagagacctcatggataatgccttccagatcggtgaaggtacgaaatgctcctccaagtgtctgctcattatcggatttatagaacttcatttttgtcccaaattggcattcaatcagggcaactagatgtattgcagcatctacacagccattcttcttgccatgcgtatacacaaaatgcatatgggtgaattcatcatagaaatgcgtacaccaacgatctccgttccatgctttattaaactcaatgaggtcgaaatggaccctttcaaatgcctgagttgctcgatttgccggccttcgagatatctggcgcggtgcgctcgaatatttgcatgtctcacagctcctgggtggttcgacatcgtcgatttggatgcctttaacagcatttggtaggtgtcggatggcttcatgatttagatgaccaaattgtttgtgccaaatatctgtgttgcctgctaatattagtggtttgctggagtgttttatagatgtctttggtctaactgcatgagcattctcattggccggtgcataagcccgatttccgccgttctgctccaccacccaaagtccttgatattctgcaagtcgacagacctcatggccgtttttaaccaccctatcttctgcaaaatcccatataaagcctgcccgcttcatgcggcttgcagagatgatgttggtatgaaaacctggcacataggcagtttcttgcaatgatatcatgacatttgaggttcctcggcaatttggtgatatgtcaccaaccccagtaccctcaattggtacaacagcattaccagcgcgcagatatcctgctggctcctgtttcagctttttaaacctggttttgtcattgcatatatgcactgtggcaccagagtctagaataaagctctccttcagcattgaatactctgatgctgagaaccctaccattatagcagccatggcatgctgtacagtggtttccttgttttgtacagtggtttgcttgttcagttccattgcctttttcagcatattgcatttggcacctggaatcttcaggatatcatcaaatttcttcctgatctctggttcttccatgaaatctggcttccttattgatatgaccacatacgggcattctctgaagaaatgtttttgaccacacatgtaatatggtactcgatttgtccggtttgtctggtttgatattccagctccttggagcgtcgggctggcagcaaatgcaacatcaagc

SEQ ID NO: 16534 - DNA, 1888 bp, Emericella nidulans
tctggaccacccaaatcttcaacaagtgcaagtcgaagggatgtgcgctttttatctcatgacggtgggccaggctaataggtcagtcattctcccccctcccctctttttttttttttgttttgttttcagcatttgcgttcaggttcaggaggcgccaagagctaatatcctctgaaggtcttggaggttgtcggggatttcagtccaatcagctgttacgatggggttgaatctccgaaatgagagcaacattatcttctatagctcaagagagattcgttatagggtctggtgggctgtatatgttcttcacgtcttactatgtgtgatgagtggtcgtctccccaacagcaccgaagactcctgtaccacgcctcttccggtgccgtttgccgaagaagaattctcacgcaacgaagttgagcagttaattgcagaccatgaggctcgaacggttttcatgcagaatctagtgtcgcggtcctcaacgcaatcggcagaaagagcgttgatacctgagttgaccaggcggcaaactcccagccctggcaggcttagtgatcggattgcgtcggctgctgcccatgttcttacgccaaacgtttcactccattttctccacttcgtcgaactagggctgatcatgcgacggtctattgaagccctgtatgctccgggagcggggcgaaaatcatggcgctcaattgagatggtcatctctgcgttaaacagtcgagcagacagctggctcgcaaaacttccagctgagtttcgttttctccaaggagcaccggcttgcgaaagggaacgactcaatcttgcgttttcctattatagcaccaagatactcatcacccaaccatgccttagccgcatcctttcgcaggcttcatgggataaccagaatgagagcttttgcactgcaatggctgctatgtgcatcgatatggctagtcaagtgttggatctcctacctaacactctggacgttgcttgggtctgtcgaatgtcgccttggtggtgtatagtgcactatatcatgcaggccatcaccgttctcctgattagcttgttgatcaaagagaaagcgaacgctggtcagaactcaagaactattgataatgtttccaaagcagccgactggctttccgtcttggccgttaaagacccatcagcacaacgagcttggtctgctatccaggatttgttggctcaccgcggattcgagactgtgatgaaatctagccgaacctgacgcactaagttcgcgggactcaatctgcgattatcgccgtatcccgctcatgtatttctccctatccctcatcaccagttttgtgcacacgattaggaatggtgcgctggcggagttcaataaattcagaaattgtcagtcttttatccacccacctgtgtattcaactcgcagtgctctaaattacggtccaggttgcaccgacctcagacagccactcatcgcgtctcttccggtctccactcgcagttacctgggctgcgcatagtaagaccatcaggtacagtccgcacgatactgataccgaatctggtagcgccttcaccttgattgatgcttttcagtggccggccagccaccaggcagcgtgccgcaaccactctattgatcaaaccaatcattgcttggctcgctgatgtaaaacagatgcatcgatccgctatattggctgatggcaacaagtgggtcgagctggccgggagtaacgtccattcgccggcgctcgtttccgagcagtctcctatggggctatacaagctccacgcacgctacagctgaccattcgctgctatgaattttatggtctgtcttaatagatagtagcagcatcgttatcagtcaatcattgac

SEQ ID NO: 16535 - DNA, 1947 bp, Emericella nidulans
accagcagggcaggtatatgcggcggggcacctgccagatagctcatcgcttccaggttaaagataaagctcaatcagcagagaacgactacttgttgaacctctccttgaactctttgaaactctttctcaagaagaactctggtcctgaatcgaactgtcagcttctgcactatggaggtgccagtgttcgcctggatagttcccattatgttgggcctaactctcctctacgagtttgtgatctatcctgcttttctgtcgccattgtctaaacttccaaatgcgcattggacggctccaatatcgccagcctggattctctggaagcggtttcgcggccagaataaccgcaccatccacgctgcccatgaacggctagggtcaatcgtcagactggcgccctcggagatttccatcaattgtgtcgatggaggtataaagtcggtatatacaggcggcttcgacaaacatgaatggtacccgcgggtctttggctcttttgggtaagcgatactggatgaaagaaacgtcataaaccatggtgggactaagtccgcattgcaagtttacaggaccgtcagtatgttcaccatgaccggtagcaaagctcattcgacccggaaaaggatgctgtccaatatctacagtaaatcctacttgcaatcgtctcgccacctgcagcttatatccaaaaccatcatttttgaccggcttctgccgattcttcaagcagcagcctcgtctaagacggataccgatgtccatgacctcaaccaaggactgaccatggactttgtctcggcctatctatttgggctggctaatggtactaacttccttcagaacgcggagtacaggcgcgagatgttgcgcctttatcaatgcagaaagccgtatgaattctatcatcaagaagtcccaaatattttagctctactgaaaaaaatcggtattcgcttaattcccaaatggtgcgatgatgcgaatcggattctcgattcctggggcctggagctctgtgataaagcagaagcatctgttgcttcatcagaccttagtgtcgagccggttgtatacaagcacctcaaacaagccatttcaaaacaagccccgctcaagatagacgatcaaaaattatacgcagattatcttgagcaacagaggctcgacatcgcatgtgagatgtatgatcacctcacagcaggccacgagaccagcgctgtcgttctgacataccttatgtgggaactctcccaacatatagaagtacagaaagaccttcacaaggagcttcttacactacaaccaaggatagctcctcgttgtctgtctggtcatgccgagttgccgtcgccgaaatccattgactcgctaccttttctagaggcaatactcacagaaactttacgactccacgcttcaattccaggcatacaacctcgagttacaccgacgccgacatgcacgcttgttgggtatgacaatatacccccgaataccagagtaaacgcacaggcctattctcttcatcgaaatccggaggtatttccagaccctgagacatgggagccgaagcgatggctcaaagactgcaataaaccttccgaactggaggaaagaaagcgatggttttgggcgttcgggagcggtggacggatgtgtgtgggaagtaatctggctttacaaggtaggttagagttcttaatgagcaaagaaagcgctttaaccacccaacagagatgaagttggtcatcgccgccatctatacaaacttccgaaccactatcgtcaacgatgacggtatagaagcaattgatgcttacacggtcaaaccgaagggagaaaaattgattctcaggtttgagtatatatagatcaacttaggtgtccatatgcccggttctagccagcttcactaccgttgcacttaggacgcactcagtt

SEQ ID NO: 16536 - DNA, 2076 bp, Emericella nidulans
tggcgcaatactgatttcaccatgggttgacctcacgcattcattccctagcatagtaaaggacaaccctggcgactatatcccgccccatggcttcttgcataagccgtcgctagcatggcccccgccgaacgaagacgagatccgagagattaacgaagccctgaagaagaatccagccaccacggataagaagaacgagaagaacgagcctccgacaggagaggcgaatgtgttcaaggtcagcgagtctgagccgaccctgggccacggtcgccgacccccgtctttcgtgatgaacggcaaaacgatagaggtaaaggaccagattcacatgtacacgaccaacgagctgctcttccatcccctcgtttctcctatcttccagccttctctcggaggactcccccctcttcagatcattagcggtggcggcgagatgctacgggacgagcagttctacattgctcacaaagcggccaaccctgtggcctacccgccgaacgacagtctcctcgccgagctcgaccccaagcgcgaaatagtcaacaagtaccccggaacatacgtccagctccaagtctgggatgatctgtgccacgtggcccccattctcagcttcacccgtcctgccaaatacatgttccgatcaatcgcgcagttcggagcgtgggcgctggccggcgcgcaggatacaacggtcgacatcgtcaatgatgacgaagttcccccatctcatcaagtgagtcagcaagtcccgagacatctgacaacgagggcagggaaaagggacctcacgatcgaccgggcattgccgtaggtaaagctggtgactcgctgccaccattcaaagaccggatgattcgccagagggtggataaacgaggccacatatacccccttcctcccccccgcgactgtccagcgcttcaactgcccccttcatccgtcggcacaatcaaccccggcctcctcatgaaatggatgctagtcaaggaagaatgggatcaaaaatttgcaaaagaaaaggcgcggatacaccagttacggcttgcaggccttgcttccggatttcaggatttcgacggcgataccccgccacccagcgcgctggccgcgagacgcttctctccaggtgcccttccaccaaagggtctccgcaccagctaccctatgacgatgtgggccaggtttgccaccaagcacgataagcggacgattaagcgtgagcaagaaatggacagccggtcacagcggtcgaatcgagccagcgtcgacgccggacgagcaggcgcatcgattgagcaccaggaaaccaaggacaaagccgcgtcaatcccgacagagccagcgcaacagttgaatgacaaggttccctattctaaaccgccgagcaatgataacaagcccaccgactcgaacccatctcttgcccaggcctcatcgaacaaatccttcgtccccggcccgttcatcgtcctgccgaactacgaaggccctgacaagtccgaaaacgcgagcacacgcgccctcttccacgtccccggcaccatcaaacccacagcgcaaaccgcaggcacgtccaaaagttcgcaggatctggaccaacgcccatcgtcgcagggcggctcggcgaccattcgcagcgggtttacggttcagtctgacccggtgacggacgacgcagggagtactattggcgacgaaaaatcccttgctgttaccacgttgggtggtgttgatgcggcaagtacccgcgccgtgctaaatgccgatggagtgttgaggccgtctacggataacaactccgtttacgtctctgctgacagccttccgctaactaacggtgcggatcatgagaagtagatgacatattgtctgccaatatcttttcatctgtaatatatatgttggagctagattgatacctatcgtgttttggtatgattgctttttgttgctgatgttggtctatgtgatgctggtttggatgtacactcgaatatgtcgagatttatgccctcttgtgtatctatacccatgctatatatgccctatccttaatatttaccctgg

SEQ ID NO: 16537 - DNA, 200 bp, Emericella nidulans
agactttgtgtcccgtgttttggatctgtttatcgtgattttgattcatttggattctcgaaggatcaattttggaccttgcttcagtccgactctgtaagacccgggctgattctgaattctgcactccacatatgcatgactctgttagactctgttagattctgttagagattcgaactaagcctaagcctaagcct

SEQ ID NO: 16538 - DNA, 200 bp, Emericella nidulans
gctaggtcagctcgccctaccacatccacaacatccacagcgagatcaggcactgcgggagcagccacgtctactctttcacgcaagccgtctagcttgaagagtgcaacgggagctcgtcaaggtgcgaatacccccactgtctcgactgtccgcaaaccggcctcgcggtcccctccatcagggaatgaacgctctca

SEQ ID NO: 16539 - DNA, 201 bp, Emericella nidulans
gccacacgattcggtcatcgtatggagtacagggctatcttaaccctgtttgccgctcggtcaatttgtccgcaaaggactttattactttattactggagttgaagcccgtgtttgaaggaaaataagatgagatctgggtttagctgtatcctctgaagatcgattagatttgggtgactgcagaaagaagaagaataa

SEQ ID NO: 16540 - DNA, 205 bp, Emericella nidulans
gagtgagggtgaatagttgcaagacgagtaaagagattatgggcgactgtctcgaactgcatttgcttgaccgaaagcttgctaaacgttttcagtgcgagagatcctacgcccaagcgcaggtaaagccgcacgagaaggagcaatgcttggtagttatgcggagaatcgacgatcaaacgctctagaattgcagcggcgcgga

SEQ ID NO: 16541 - DNA, 205 bp, Emericella nidulans
cctgttttcactctaatgctctctcttcccactcgcactactccttccagcgttctcgacttgaatttcttgggcgttaatgcacggcgtttatttgttctctaactgaaaactgcggggttacatcactttgtttcagatctggctcgcaggattatctactaggtggtgtattgacgactatgagattacgatatatgtgaat

SEQ ID NO: 16542 - DNA, 206 bp, Emericella nidulans
cgggggttctactgctgcgtgattgcgttacctccactcatgccgtcctatatctctctatccattaccgcttaccgccacgtatcatgtaatctaatgcctgactgataccatgtatagagtttgctcacgtttgttttccggatgcattcgaagctggtggagttcgggtggcttctcaatcgaagtattcttataatctagat

SEQ ID NO: 16543 - DNA, 209 bp, Emericella nidulans
tgacgcaacacgaccagcacagaagacgtcgcggtccgcaaagtatctaggatgaacgttagaattaagcacccagggaggcgtcagcgtagacgtactgtgtagccaagtcaccaataggcagtttgctgagaacgaccttggcccctgatttgtagatagcctcgagcttgttgtagatgatctgccactccgcatcgacgatggcc

SEQ ID NO: 16544 - DNA, 210 bp, Emericella nidulans
tgagcgcggcatttactctctcaagtataccggcccagccgcggagaactaggtaaacaactgccgaagccagtgagcctgtgatctctacgcacgagcccggcagtctacgaactgtcccttgatcaggtccctaggtatgaaattaggtagcaaattccccggagcagtagtctgctccggcagtccggaaaattcgaaaatatctga

SEQ ID NO: 16545 - DNA, 211 bp, Emericella nidulans
ttcgttctggctgccgttggtatgttgctgcgctattgacctacatctgtctttttctcatgtcgtgaggaggatccgtgatgatgctggagggttgaatggcggaatgaactggattgagttgcatggatgtcttgttaggagaattggggattggatctaactatatgccgctcgttctatgatggtcatgaagccacaatattcgcca

SEQ ID NO: 16546 - DNA, 213 bp, Emericella nidulans
cggcttgcgcccatttcactctctaaattttcatattcagtcctggtggttgtctttgttccctctatcgtcctggtggcgatcgatcattatctgataactaaacattttttggcgtggttctgttgagcgttctgtgatgggtgagatctgagatggcaagagtacgacggcatgagacttgataccaatgacctagtataacatgaaaaa

SEQ ID NO: 16547 - DNA, 213 bp, Emericella nidulans
gagcagaaatatggtggcaagtactacgatgcctttaatttgaagcctgtcaacaagaagatcggctgcagggtcaagggcaaatttcatgacatgactgggtatgtcgatatgtttgaatgctgagaagcagtctgctaactcataccaggcataatctgcccggagctcattaaactgaaaatcttgaagtgatgtgatatgacctcttat

SEQ ID NO: 16548 - DNA, 213 bp, Emericella nidulans
cagcctcaggcccagcaggtctattcctcattgttgtgaagtcgcaaatcggtaagaagcgccgcgcaagcgtaatgtatctttttaacatggtcatattagcaaatgctgacaacatagaaaagggtacacctgggcatggcaggctgcaatggaacatggggctgggttaaggtggaaggggcccagtaagcactcttgattcgagatata

SEQ ID NO: 16549 - DNA, 214 bp, Emericella nidulans
ccgcggtcgtcgtctgtaggtatgtgcgagtctgcagcgcgcatctatttgtcttgtattccggttggcagagttatttacgccatgtggctggactttatgggacatggatttgctagctaggcttattacctgctgaatgtggatggaataaacgcgaagaacggcaattttgcctggtcttcaacttatcatgtccaatatatgataaaaa

SEQ ID NO: 16550 - DNA, 214 bp, Emericella nidulans
gctccagaagatgttccccgacaaacatatccccgaccccatcgctttcacatacccgcgctggtccacggagccctgggcctacgggagctactcaaactggcccgcgggcacgaccctgggagatgcaccagaacctgcgcgcgaacgtcgaccggctctggtttgcaggcgaggcgatgagcgcgcagtattttgggttcctgcatggcgc

SEQ ID NO: 16551 - DNA, 215 bp, Emericella nidulans
tgccaccaggtgcaatgatgagcgtctacctcctagcggtcccgtccctcttcgaaacaacaagtagtcctgaccagctcgtccgccactggagccggatctacctcaacgggcacataaaaggccccatcatctgcctaagcacatccgcgttgtacggactggcggctgcgactaagtactcggccggcgaggactggggcgtctttgctgcc

SEQ ID NO: 16552 - DNA, 215 bp, Emericella nidulans; identical to SEQ ID NO: 16551

SEQ ID NO: 16553 - DNA, 221 bp, Emericella nidulans
cgaggcctggatgaggatggagactccaaaatgcctagctgaagtcggaatcgttcatgattgtctatagcttgtgtatctcgcttactgagttccatacgtggttggcgttataaggcttgtaaggatcccactggagttgtgttgtacctattttgtctacctctttgtgttttccatttgtcatgtatctatcatcatatcctctccactggcgcggc

SEQ ID NO: 16554 - DNA, 221 bp, Emericella nidulans
ggcttcggtcatggtggcttatgttactagaggctgagacgtgtcatattattactgttttgttatttccttggaactgtgttttgtacttgtcatgaaccttcagcctctgttgaacctgatgttgcttttcttttgatgtcttcaaataatgactgtatatacctcgagcggtgttgcgatgatagcgtccaatactctataggaataacaacactcta

SEQ ID NO: 16555 - DNA, 222 bp, Emericella nidulans
tacgcgtctgagcgcgagccaggcccttaacaacgcggactcgtatgccctctatgctaatggtatgttgtgactcctattatagccctttagtctcatgatgctaatattctcatagctgtttaccttggatgctagattagcatatcactggcgtcagccgaatgctttgctggactgagggaattgctgacctgaggtgaagaactgacgatactgatg

SEQ ID NO: 16556 - DNA, 222 bp, Emericella nidulans; identical to SEQ ID NO: 16555

SEQ ID NO: 16557 - DNA, 223 bp, Emericella nidulans
gctgaggttgcggctgttccaacagcatagatcatattggtctcctcgtgcgcaacgatattatgagagcttccgaagcccctataccacgcggtcaagtccttctttgtggagaaaacggtcggctttgagctagacgcagttgtcaactatggctgtcagcagacgctcgttataaattgggaagctaccataccttgttgaggtcgaaaatctgcagccc

SEQ ID NO: 16558 - DNA, 224 bp, Emericella nidulans
gaaacccgtgtcacgcccactttcacccagtccggctgcccctcgattgaatccgctcaatagcccaggccctgttacgccgctcgcgttggaagaggctggtggctacctttctgcaggctcctccaataggtcggagctgtcacgggaactccagcgttcgcgccggcgcctgatctgttggaccgtatgcttgctcgggaaaatgacaaggttagacaaaa

SEQ ID NO: 16559 - DNA, 225 bp, Emericella nidulans
ggacgccggaaaaacggagcatcattgtttgttgttgatggcagcgaacctgtttgcatttattgttttcctggcatttgcggcgggaacgaaccatggaacagactcagatgccaggacctacatagtagcgccgggtaccgcccatggttctgtatttacttatcgagttcgctgaacgtctgaaaagtctcgaaagcgctggtcactaacaacaatggccgg

SEQ ID NO: 16560 - DNA, 226 bp, Emericella nidulans
ttcgaccgggctgcgtgtttccgacgattataccacaaagaaatggaacattgggttgggaagcctacaatgaggatttcgaccgccatctccatctttctccttacctgcccgataatgcgtgggtcaatcggtactatagcccgaaaagcacaggccgtgccgagtcttgcaacgaagcttggttctcggacaggttagcctcgagtgctcaaaacggagtggc

SEQ ID NO: 16561 - DNA, 227 bp, Emericella nidulans
  unsure (1)..(227): unsure at all n locations
tcgcgtgtccaacgctctgaagtcnggtaccgtctggatcaacaactacaacatgatcttgtaccaggctcccttcggtggctccaagcagtccggtctcggccgtgagcttggctcttacgctcttgagaactacacacagatcaagacggtgcactaccgcctgggtgatgctcttttcgcttaaagctaattgtatgatttgatgaaattgcgaatacaagttg

SEQ ID NO: 16562 - DNA, 228 bp, Emericella nidulans
caagaaacagtctatgtgtttcattcagtagataaaggatagaactatcataacaccgtcaaggtgacatgtgaggcaacaaagaaggtataaggcttgcccagattaaccgtgaagaataagaaacccatccaacgccgcgcaggttggctaacccgtagatgagccgtaagatcgaaatcaaagagagtcattaattgccgccgcggagacggaggaccaggtgga

SEQ ID NO: 16563 - DNA, 229 bp, Emericella nidulans
gcctggaccgaatttggtcaattatgcaagcccaagtgctattatatagctagtttaaattatcttctcggtttataagttgctcttgatggaatcttaaggtgccgctttattcgctcggctgtgagaatatatcttaccaagggcttgtttgaattttcttgtcttattgggccaccagccttctctgagctaaacgcacccttaaatgcagttttaagccttttct

SEQ ID NO: 16564 - DNA, 229 bp, Emericella nidulans
cgaaccgagctgaaaaggaacatagacatggttgaggatatgagtcagggaatccagctccatttaccaacactatatcttctcagtcttgttctgttttggtggaaattcaactggtgaagagaaaggctgcggatggccaacttaaaaagttagaaaacatacagctccaagtagatctgccaggctagaaatcaagataagccactgggtatgctgcactcagccc

SEQ ID NO: 16565 - DNA, 230 bp, Emericella nidulans
cgggatattcatctctaactgggaaatagatcgagcttggtactgcctgcggtcgtctctaccgctgctccaccatgaccgttctggatgctggtgactccgacatcctctccagccagtaagcggagggttgggatcgttatgtctgaatgatgaatgttggcggatctgccagatttcatgagattttagatatgacaatataaaaattcaaagccccagcatctgta

SEQ ID NO: 16566 - DNA, 230 bp, Emericella nidulans
cgccatcagctaccccgacagccagtacgacaacctcaaggctggcttcccgtcgtcctagggtaaggttagggtcgagtttctctccgttgacatgccatacttcgttacgttgatacgctcgcttatatgtacatactactatcgttactaggataccggtagaccggctagatgagttgttttgagattttttcattcatattgcaatacctcttaaggcttctgtt

SEQ ID NO: 16567 - DNA, 233 bp, Emericella nidulans
gtctgttaacctgtaaatgccgctatgaaaacaaacttccccagtcaaacctgcaacatcagggaattattgggttaaattcctgaactggcacgactcaagtttagtgtgctgctcacccaattgagcagcataacctagctgtatcaacgagtgaccgggaaaggacagttatgatgacgaatctaccagccagttacatatacagtggcctaatgaaaagtttctgaaat

SEQ ID NO: 16568 - DNA, 235 bp, Emericella nidulans
tccgaagccatgaatagcataagcacatgacgagttctttcctcgaaacgctttccttagaaaagagatggatcatgagccacgcctatatacgggagggaaggagggcaacaaaaggattacgaggcatttcttggagctaggtaaacgtggccggcgacgaatggcatgatttgcagattcctttgggataggcggttactcttgcgttgtgcatgtgtattattaacccgaa

SEQ ID NO: 16569 - DNA, 235 bp, Emericella nidulans
tgtgcatgggtggaagcatggataaaaagaccgtctgttattgttctgttttctatacacaggtgtgatgattgtttctattgcatgctgtgctatgactttctcactgtattatattgacaattactgtacgacgttatgatgtccagcacgatgggggtttgtgttcagatttggtgcttatacagcattggcttctttgacttcgcgggcgactgaaaatagctgagactta

SEQ ID NO: 16570 - DNA, 236 bp, Emericella nidulans
accgtcaggagcacgccaatcccgttgtagagaagcacggccatggcccacgggcactggcaacgcccctcacgatgcacctgctacagccgttccttaaatctcgaagactgatgattgaatgatttcacttgccaacatcaccaagctgcggctcccttcccatggttggtgtatgaattgtcgggcatgcgattgcagcgtctatttatttgcctacttactggaataccttg

SEQ ID NO: 16571 - DNA, 236 bp, Emericella nidulans
catcaagactgtctctaagccctgttttggctgtgactgcggggataccgagtgcgatttttgtatctgtaccgttatgtgaggggatagctaggtatggcgtctgtattccctctgggcatgagttgagtaattaacaagaattttgtagttgcgcgttctggttcagctgggtggatggcggaggtagtgaaagcagtggacagtgtcttaacagatgggctgtggtttataag

SEQ ID NO: 16572 - DNA, 238 bp, Emericella nidulans
gatgagcgtgcccgtgaggcaggacgcaagggcggcaaggctactggtcaccacgagcctgaggaataagggtgttcgttatgcatccagaaatgtgatacgatctgacgattgggccatgcacttccactcatgtactatatgatgctttaatgcatgaataacttgcttcttactgtattagtaccatagttatgcatccaatgcagaacacaagcaatggatgttgaacgaatga

SEQ ID NO: 16573 - DNA, 240 bp, Emericella nidulans
atccatcggctggtcgggtggcaccctaggcttgcttacgagtgcttacattcttaactcgtttcaaatcacttcactactagtttttgtcgtgatggatcctcttaccttcgtttcatttcgtgtctttaccatttttctgacggacagcggcggatatgtgattttcgcgcggtaaaacctatacggaattgggtgcattaggtagataccgtcttatatccaatcagtctttctcgc

SEQ ID NO: 16574 - DNA, 242 bp, Emericella nidulans
tgcgtcaacgacttcaccaccaagtcgctcatctcgcgtgaggagggttgtgttatgcgctgtgtggacaagtttatgaagggatctcagcgcctcaacgagcgattccaggaacagaatgccgccatgatgcagagcggacagttgcccggacggtaaacgacttcgtctttcggttttcttgttggctttatcggcaatttccgtgtatactagcttctcaatgatactctcgcctatgt

SEQ ID NO: 16575 - DNA, 243 bp, Emericella nidulans
cgtctctgatattcccgccgttcctattctgcctaacgagttatgagatttgccctgaggccgcattgaacgagatgaaagaaattttgtaacctgcgctggaggtgtttttatcattgatttatggtattgggttcgggacctggcattatggattctcctccttgtaatgtgttctagaagcgtggatcgaattcaatctctgctagattcaatttggatcgagtaaagaaacttgaaaga

SEQ ID NO: 16576 - DNA, 244 bp, Emericella nidulans
tgccgggtcagccctttttgtttcaaaggagcgtcatgtggttacctttaaactggagcatgatgctacgttttgggcagagtgtggcatcgccgatgtgtactccgtcggtgcagccttgggtgtgctttgcgagcagacttaatagcatgcatttggcaggtcaagcatgcctcttagcggaacagtcttgagttccgtactcttacgattgtttgacgaaatcaaaatcctcttcttgaag

SEQ ID NO: 16577 - DNA, 248 bp, Emericella nidulans
tgactgtctggtataggacgcggaagaggttcacatacaagcactcgaagaacaggtgatcgggcttattttcgtggaagcgatcaatgggtgaattggatgggtgtcttatttggttttggctggggttttcttactttactagcggtttgcaacattgtctgtcccgtccgtgagccttgaggagggagtgtataactatctgcatatctttatattgggttttgtcaatacatgccacatttcga

SEQ ID NO: 16578 - DNA, 251 bp, Emericella nidulans
tgcggcgccaaattcattcaggctctctgcacggtgcttctcatcgattgttggtatagaagcctttaaccgcttcacagcttctcgtctccggtatttttgaaaaccgagtatcgcgcctgcaacagcagctccggacagcactgcagttgcagcgagctggacctggtgtgagttgttctgtcgttggatccaggatgccatctcaaagtggatcgttctattctatcgaggagccgttgcgccggtat

SEQ ID NO: 16579 - DNA, 253 bp, Emericella nidulans
gccggtgcctggaccatgagattctggcttatgagtgctaactgcaagatccggaggagtaatgatgagtcggtgttgttttatgcttattaactttcattaccggcttttccctccatctgctagcattgcacggctaggctgagcctgtagcagcttattggctatattcgtgatgataatgtcggtatggtgtctagatgtgaatttttatacgcagaataatcttctgctgcattctctgcctatgccc

SEQ ID NO: 16580 - DNA, 260 bp, Emericella nidulans
tctggttctgactccggttctggttctggtgtatatgattcgtgagcgtcttagtggcctatgcttgttcaatacctactctggtgccttctgcttatttcgctggctcgcaactcttctgaggttctacccaccatatgtaacaacatcccgcgtagacatggctaccatctccgaacgcataccctttcccatctaggtccttcgaatatcggccggacctggtatttaggttgcaatgaagttgcctgacgcgtgcg

SEQ ID NO: 16581 - DNA, 260 bp, Emericella nidulans
tcgtttgagcactccgacggaaagcttgctaccaaagcagctatccaataccctgctcttgacattgagcatagctcagcagcttaatcgctaaggctgtcgcttcgctgtcttcaggccaacttctcccgcaccttcgagctgggatcaaatatgggttgtaaatgcctaaatgcgttgatgaccttaaatttctcatcttcactgctcaagatgttgtatgccattgtggatagattgatatgacccattcaaggaca

SEQ ID NO: 16582 - DNA, 268 bp, Emericella nidulans
agaaggtatagctgaggtatatttacgaaaaatcaaagtgcaagaaacagtctatgtgtttcattcagtagataaaggatagaactatcataacaccgtcaaggtgacatgtgaggcaacaaagaaggtataaggcttgcccagattaaccgtgaagaataagaaacccatccaacgccgcgcaggttggctaacccgtagatgagccgtaagatcgaaatcaaagagagtcattaattgccgccgcggagacggaggaccaggtgga

SEQ ID NO: 16583 - DNA, 269 bp, Emericella nidulans
actattttaacttccaagggtctcgccttgttctcagtatttacgattggagactcctccgcgattcatcaagatgatctccctccgctccctccttggtcccccgaccgccgccctccgccagttccttccccgacacaacagcaacttccgagtccttgcccggccattttcacaattatcacaactcacaagtaacaattggtttttttttgggtggtcaaggtctattgtgccaggtgctggtgtttctgccgtgaggcaggtgg

SEQ ID NO: 16584 - DNA, 270 bp, Emericella nidulans
gccgtgtgccgaaagggaagccggttaatattccggcacctggatgtggattctccacggtaacgtaactgaacgcggagacgtcggcgggggtcctgggaagagttctcttttcttcttgacggcctatcaccctgaaatcggtttgtccggagctagggttcaatggccggcagagccctgcacctttgcagggtccggtgcgcccccgacgacccttgaaaatccgcgggaaggaatagttttcacgccaggtcgtactcataaccg

SEQ ID NO: 16585 - DNA, 275 bp, Emericella nidulans
ctttttagcgaggtaactagttcttctccgttccctcagcgaggctgaaaataaacaacggccctcttcatcagcaactatatatttcggtgttaggcagtgggtagcctacgagccaaagtacaggcatcttgagacctgaaagtacctagcccgataaatcatatacatagataatactaggctaatgggcagccgaaatgttttcgcgcggtcgaggacaaagcgaaccttgtccatggcaatggcgtcgacgaacagtgggctctggaccg

SEQ ID NO: 16586 - DNA, 279 bp, Emericella nidulans
aaccactttgcggcggttgcgtcagacgcggtcagtttcgaggtgtacccaccacttaacccggactttgatctgcatcatcatctacttgcggggtggggagtacctatcggcgagatgtttgatttggatgggttggcggagatgtgtatacaacatggtcgctggacgtttttcgtctcgagtagccctttgaactgtgcgaatggggtctcgagtcccccgaacactatggctattttttgatcagtcaaacttatgtgccgacggggtatatga

SEQ ID NO: 16587 - DNA, 279 bp, Emericella nidulans
cccccttctatgggggaccttgtcaataaacgccggggcagcgttaatagtgcaattcgggagtcgcgcttttccaaggacctttagtggttgtttttatctatctgtgcaatatatcaccttgttgtttatattgtttggtgttatttactggttcattgtatgttctgggggagccatgtccttctagaagaggccgagttagggcttggatattggttatccgttgtcatattgtgtatgttatttcagtggtccatgcatctaggatgtcaactg

SEQ ID NO: 16588 - DNA, 280 bp, Emericella nidulans
aggcctcggcccgatcgttcgcttctcacaagtcgcataaatcactctatgagggcaacccttacgatattgaccgcgtgaacacgcgcgagtcctttggaggaaaatagagttcagcacttggtctccttacttataccccgatacatatagtctttagtctgcatctttgcattgcttttgcgctttacccatttaatgtgtccatgtgtgatgcgatggaagcgaaaagtcattttgtctctctgcattgttgatatataccctgcatgatttgttg

SEQ ID NO: 16589 - DNA, 282 bp, Emericella nidulans
gactagcaaaggaaatggctgcccttcagaaatttaaactagtcttccacgtccccccatcgtccctcgagcccgtccagaaagcgatcttcgctgcaggtgcaggccggtacccaggaccgggcaactacaccgaatgctgttgggtgacgtcgggaacaggtcaattcaggccgggtgacgcagcaaatcccgccattgggaaggtgggcgagcttgagaagatcgaggagctcagggtcgagacgctctgtgtgggagttgatgtggcgaggaaagcgg

SEQ ID NO: 16590 - DNA, 283 bp, Emericella nidulans
cgtggataaatgttggttgatttgatatatcttgcatttttggcgtctggtggccttgattttctgtcttcgatttgtttgttttttattttctttcatgctatgtctaacaatcctgttcttttcattcatgttcaaccatgtttttccggatacccataccgttccttaatacctcttgatggtttctacatcacgggcactccgagttccctccttagctgtcgttgtattttcatcttacatagctctactttcgttatattcacaccattcggaagca

SEQ ID NO: 16591 - DNA, 290 bp, Emericella nidulans
gcgatgaaatcgcttacattgcatgattttcttctctcaaatctactttacttattcatcatatctctattccaatttcttcctttaggcgtttcctctttgcgagaccatggattcatcagccagtatcatgtccctgttagcaccacttccttgtcttctgtctacaactactcttcccaactctgcaagctagccgactgcgacctccacctgccattttctacttagactaagagaatgagttaccttcgtcgtgatatagataagatatgctgcagtgtgtttga

SEQ ID NO: 16592 - DNA, 293 bp, Emericella nidulans
ccctccttctggagtaggtccataagtgtaccgaaagtagacggccgctgcttcttgggagctcctggcagtgactgatcatcctctgccgatttgcgtgcggtcactctggtgttgacgacccaaatcgggtttgtgagcaggacagttgcactccctgcaattgctccggctatcatcgattcgagtgttgacaatttctttgaacgacctgctttttcggcagccttctcgaaggcagacctggtccattcgtaccagtagtagtagacaaagttcgtgacgctgatacc

SEQ ID NO: 16593 - DNA, 297 bp, Emericella nidulans
caatgcgaggaactcccccaaactcctcatctccagccaacatcgccccggccgatgtatcattcgtgcttgctgtcgtgagaaccgctagaacagcttttccacgctcggcttgacttgcacatatggcagtcctattctttgttgcgcaaatttatttatatgttttctgtgtaaattacaaaagcgtgggcgggttctcgtcgcttcattttcctaccttttgattaaaaactgctgttttatcgtttttccttgttagatcaatattgggaggctttctgagagttcgttttt

SEQ ID NO: 16594 - DNA, 298 bp, Emericella nidulans
gcgacgatggctcactctgtatcaacgaagcctgcattaaggcgaatcgcatataaccaaatactccaagcacacggccgtcggcgttcctacctggttggtcgccacgtacgtcacctccaacctaatcctcaacagcctcaactactactggttctcaaagatgattgaaactgtgatgaagcgcttccgtcctcagaaagagcaatccaaggtggcagagaaacttaaggagcataacaaggaagctagcgcggtggaggagcttgcgcagaggctgttctcgacgccgcatcca

SEQ ID NO: 16595 - DNA, 301 bp, Emericella nidulans
caccggtttctcctggctgtcggccacctttatctatatactagctgcaagacttttccctcttgcatgagcttctctcttcttcgacctgctcttctcaataccgccgaggttaccaacgtcatgacattatattttcgtctcattttcatttagcgtctttgttacggcaaacaggcatgaggagtctgatcagccgctaggagtggctttggctgggaaataccgctctgatgttgtattgtatttgtacatagacatatagctagtttctctactaataatcatgatccccggagga

SEQ ID NO: 16596 - DNA, 303 bp, Emericella nidulans
cgactgctgggacgctgacgacgggtagagccttgtgttgcaggaagacaaaacgggtggaagagtacaaaacaccctcagtccgactgccatcagagcaatcaggcgattatcgacaattcccacgccgcaggtcggctataacaggatctggtcgtaggcatctgaaattgagttgcgttgccctgtcaggtaggtttctatggagactggttccggttttactctgcgattagatctattcggtcaaaaaatatagaacgtaagagtgaaagaatacattgcaaggctgccatcctttct

SEQ ID NO: 16597 - DNA, 306 bp, Emericella nidulans
ctacccatacctctcttactccaggactagcaaaggaaatggctgcccttcagaaatttaaactagtcttccacgtccccccatcgtccctcgagcccgtccagaaagcgatcttcgctgcaggtgcaggccggtacccaggaccgggcaactacaccgaatgctgttgggtgacgtcgggaacaggtcaattcaggccgggtgacgcagcaaatcccgccattgggaaggtgggcgagcttgagaagatcgaggagctcagggtcgagacgctctgtgtgggagttgatgtggcgaggaaagcgg

SEQ ID NO: 16598 - DNA, 306 bp, Emericella nidulans
gtgataggcggcggcagcatttaacactcgagtttaagcctttcttgatgtcgtgatgaacccagtaccgtattttacctttcatagacctcttacttttcacttctctgttgcttttgctttgttttcctcaccttaattttcggagtcattgatacagcagtggattgtttatggttgtgttgctacggcgcgtttggcacgggtttgttgaaggcgttcttgagcttacatcatctcttataattcttacatatgattactcaatgttgactagacgcccaaattgttagagcggttcgccgg

SEQ ID NO: 16599 - DNA, 307 bp, Emericella nidulans
ggaattgcagtgcgccacgaatatttcgtccatgaggatggacagagtctgcatgcgcggtactgcctgcgcttgattcagttcactgttggctcggcagggatcccatggacagcctgactgatcgccgagggcgatttttcattcatttcttttctttcctttgtgcttcaaagtcctaacagacccacttgggagtatacttattctagcttaccctcctgggaccccgtgtatataccctaccaacctagagggtcgcttgctttgtggtggcggcttaaactacatatcacatatctgatta

SEQ ID NO: 16600 - DNA, 308 bp, Emericella nidulans
tgctggggaatgaaggcgaatttgcacgagtgatacgagatctattctaagatcttatatgtacggatactatgatcttttgtgtttacatcggatacccattctacgcgtcttttctcccaagctctttgtaggttgtgcaattttatagtacggtcaggcagagttattggcctgaggccaaagcacgtgactacttgacatcggtccttggtctctctcgtcgtctcagctccttagcgcttgtaccgagacagcacgatgtcattctaagtgttcgttctcatacaattccatggacctttcca

SEQ ID NO: 16601 - DNA, 308 bp, Emericella nidulans
ggaattgcagtgcgccacgaatatttcgtccatgaggatggacagagtctgcatgcgcggtactgcctgcgcttgattcagttcactgttggctcggcagggatcccatggacagcctgactgatcgccgagggcgatttttcattcatttcttttctttcctttgtgcttcaaagtcctaacagacccacttgggagtatacttattctagcttaccctcctgggaccccgtgtatataccctaccaacctagagggtcgcttgctttgtggtggcggcttaaactacatatcacatatctgattat

SEQ ID NO: 16602 - DNA, 308 bp, Emericella nidulans; identical to SEQ ID NO: 16600

SEQ ID NO: 16603 - DNA, 310 bp, Emericella nidulans
agttggacgcgggcgaggacggcaatccgttctatccgcctgcgggtgagcataacgcctctgcagagtcggcaccaggagctccttctgaaagcactgtatcaacagctgaagcggcgtaaggtcgttttattccatgttctgtaaagaggcgagcagcagatatcccttattgtttattcctgtttcttgtgtgtaagctataataaactttatgttatggcaaattctgggcgtgcaatcgaccttcgctccatagtcgtgatcctccttaagttcaaattgctcaatgcaaaatacatcacaccca

SEQ ID NO: 16604 - DNA, 310 bp, Emericella nidulans
tcgcgtgcttgcttacgatcttctcacagaggagctaactatagaaggtatagctgaggtatatttacgaaaaatcaaagtgcaagaaacagtctatgtgtttcattcagtagataaaggatagaactatcataacaccgtcaaggtgacatgtgaggcaacaaagaaggtataaggcttgcccagattaaccgtgaagaataagaaacccatccaacgccgcgcaggttggctaacccgtagatgagccgtaagatcgaaatcaaagagagtcattaattgccgccgcggagacggaggaccaggtgga

SEQ ID NO: 16605 - DNA, 315 bp, Emericella nidulans
aggaacgaggcgggagagcagtaaacacagggaggagcagcagcacagaaagaacatcgaatagaaacaccaaatgcagccgttgccttcccttcctctggtaaatgaattcacataaacgagaggtaaaatggatgcattgaggaaatgagaaaagaggtagacatgaacaaaaggcggcgaagatgaggaaaagaagtaggaaaagagaacaccaatccctattgtgagcacaaagtaccttccgtatagaaatagaacatgatcagcgtaaagagtcaagtcggagtcgctggaatttaggatgcggggagg

SEQ ID NO: 16606 - DNA, 320 bp, Emericella nidulans
ttcttacaaaaataaccgtcaactcttgcccatatgaccaagggcggtcgctggaatatcgttactggatggaagaagggcgcgtttagggcagctgggttggacagcctccggaccatgaccgccggtatgcgcaggctgatgaacacgtttgtgttttgtacaagtgagtcctcaacgataaatccacaatcctcttgaagctactaatggtcgattggagactatgagaagggcggtcatgttaggagtaagtatatgtacgatatttatcagaaggaagtgtccttctagtacctggcagagtggcctttggtatc

SEQ ID NO: 16607 - DNA, 320 bp, Emericella nidulans
gccacggcctccaggacttcacaatgccttttatgatcaacttcctctgcgagcaaacacgtacgatagagatgctgaagaaggacaacgaggagcggaaggcacgagaggtgacgcaaaagaaggacgaggacaacacgccgattctaggcggatccaggctcatcgtgacgcagggtccagcagcgccagcacctcctgtctacggacaagcgaatgggataacgccgcaggccacggggttccgtcctttctaagctcgccttgtctttttgaggggtagattttctttccgcaagtgtatttcactatttctgata

SEQ ID NO: 16608 - DNA, 321 bp, Emericella nidulans
tagtgtgttatatttgatccaatctctcgtcttggagcttagcagctctcccttcggggcttaagggctgctcggtaccggattgagggagagtgataaatgcgttcggcacacaaccttgttacttcgacggacgcgatgaaggcatctctgattctataatacttggtggtgtacactttaccgacgcaccgaggcccttgagatgttctgctaccactagcatggtaggcgtcatttgcatgatagggttcctccagtcggttatcctggttttactgacaaccattacataaacggatacaaatatattcaaattgt

SEQ ID NO: 16609 - DNA, 327 bp, Emericella nidulans
cgtggccagtgtcagttatgggagtgagatgtagcgattttatgctctgaacttatgaggttatgaccggattcccctgattgaagcttatagtgtgatatccctgctcggaatatataaactctgcatattgacttgggttcagccattgctaaccatcaaatgtcttatcttttctcatttggaacagtttctaaatacgtctcagactatcaaaggaagcgatgttcggattactttcagttcatccggggacgccattgggtagcagttgctcattcagtcagctctagattcacctctcaatggccttaagttcatgctgta

SEQ ID NO: 16610 - DNA, 331 bp, Emericella nidulans
acttcgagcgcttcaaggtccttagactcaggaagcaggtacgttgcgatatggcttttaatctatcaaatggcgctggaatatggggcttttgaaatataggagccgcagtacagtttagtatcaaaggctaacatatgacatacaggctcgtttcgaggtccagaaggctcacgccaagatcagggcagctgctcctaaggcttagatggttaatgaggctcggtgcatagagtgaaggggtatctgggacggtttcactttgctgagggtttaaattcagcaactcgctgtatgcattatcattgacagcataaaaatgacttaagaa

SEQ ID NO: 16611 - DNA, 332 bp, Emericella nidulans
gagaccaagcctcttgtctacattcaactcccttcaagcccgcattttctacagtccatatctacataccaacacaggcgtattgttcaagcacgatgccgacctatatggtacgtcttcagccctcaactgtgtaattggaaacttatggactgttgaatagatcaaactcaagcctagcgcaacagcagaggatatccaagcgtatggattccagactctcgcagagcctagaatatttaatgtttacaccgtatagggtgaaggacagcgctgtctccaacggaggcaccataactcacgagtacaagctgatcaagggatttgcgtga

SEQ ID NO: 16612 - DNA, 333 bp, Emericella nidulans
gccctcgaggcctgccacaagggctggggtgagagtatcgtcattggtgtcgctgctgcaggccaggagatttccacacgacgtaagccgccaatctaattgagacttcgttgagccttctgctaactccccatgctacagcattccagctcgtcaccggtcgtgtatggcgcggctgtgctttcggtggtatcaagggccgcactcaactccctggcctggtggatgactatctggatggcaagctcaaggtggatgagttcatcacccaccgtgagcccctcgccaacatcaacactgcctttgagcagatgaaggcgggtgactgcatcc

SEQ ID NO: 16613 - DNA, 334 bp, Emericella nidulans
ccaatgctgccggtgttgagcgcgctcagagtcgttggccagcggatattttgacgaacccaggaaatcaggaacgaccataccttttctgagcctctgtacctcgtcctcgtcctcgtccttgtcctcgcactcgtacgaccgggttccgaagcttaccccccgattgtcgaatacccgcttaaacaggcagacgcggctccccgagcctcgaaacgtcccgcaccatatgaactcctcgatactataccagcgtataaggatatttggtgttagaatatactggcaatgacgatgatgtgtttctgcaattcgagatcaaatactcatcggc

SEQ ID NO: 16614 - DNA, 336 bp, Emericella nidulans
tataggagaagtaacggttgttgaaagcgggcagttgcgtgtcaactcaaagtcgatagtcagcctcggagcgcccaagactgggcttgttaacgcccttctcgctggagagggagcctcctggaacctcaccgtcgcggatattggaattccccaaatagcctggcgcaaattcggcacgcgccgacggcacggaatcgactttggtaaccgatgggttgtgtcgctgcgctaccagccctctgtcgtctagtagctgtttccctggacgactatctaacgattattggatgaaaagacattgaggcgttgtggtagagaaaacactctgacttt

SEQ ID NO: 16615 - DNA, 340 bp, Emericella nidulans
tccaccgcttgacgaaatccctggaattaattgattaatttaccggatgataccatcgaagcgctgcttgaaccaccgcatagtctcggtctggttgatacggtggctggcaccgatggtggacttgcagcggcgacgcttggcaacgcgctcaccagggcgggtcctgtttccttgtatcagtcctgatagccttgctaagaagagagctcatggcccgaaaagtgtccaactcacatgcagcagtagaagtccatgccgtagataccaatgttggggtcgtacttgataccaagatcaatgtgctcgctgataccgaagccgaagttaccggtctcgg

SEQ ID NO: 16616 - DNA, 342 bp, Emericella nidulans
tgcgctcgaagccaaagtcggttcttctcacattcgatatctcccatccttacaaaattcaaatttttttttgcacaaagaacctggtgtttgtcaactcttatctcgcgtttcttttctctcatagaccatgccttttactatcaccaagcgctgttcgcttctgctctcctgtataatataatggcgcgaaatatcgaaaagtggttttgggaggcgatccttgtttgagattgacaccattttcctcttcatcaaggatatcgatatgttgacgtctttcgcctcacgcatgttcttttaattacagtatcaacatcacgagcggatgatgaatggaca

SEQ ID NO: 16617 - DNA, 342 bp, Emericella nidulans
cggacggccattcgaccagttgctcggcgggggacagttggatcttgttgcgaaaacactgtccgactttcgcacgcaaagaccgagcgtggttcagaacttaagtcagtttgtactttgctacgaaagcatcctagagtgggcggtagcccagatgccgagggagagcccgggataacattataaatcgttgtctcctctcgttagttattttgatgattacatccatgagcgcattttaagaggtgtttggtgttctttcgaggcggatcttgatattaccaggtgttgaggcccggcagagcttatagagaatacggtaatcaaatatgtaaggaacca

SEQ ID NO: 16618 - DNA, 344 bp, Emericella nidulans
tcgtcacatggcatccgatccttagtaggctacgttggtgtagttgatgcagtttcctcctgccctttatcctctgagcatattccacaacagatatcgaaggtatttcccgaaagtctctacaaacatgattggaaggtttctatatcgccggtagcacagctggcctgacttcaccatgcaatgtcgccggtgtcccgcgctgtttctgagacggaaatgacgttgattagacctcgaggccggggcgttttggtctcacaccgatgggttagtcgtgcgtcctgagatatgcatagacgacaggtggagatatggaatcaagggatagacccaaaacaagg

SEQ ID NO: 16619 - DNA, 344 bp, Emericella nidulans; identical to SEQ ID NO: 16618

SEQ ID NO: 16620 - DNA, 344 bp, Emericella nidulans; identical to SEQ ID NO: 16618

SEQ ID NO: 16621 - DNA, 346 bp, Emericella nidulans
tcccacagcgcccgtcttttttctattttgaatttgcccacttacctatactgtgatatactggactctcctttcctttcctctcactacctctctcccgccctcctttggctcaccaggatttcctttacaattttctcacttttttatcctccgttctacgtatactcggcgttctaaagcattggatctggagataggacttgggtttgcggtcattgtgcgctttttttttttttggcagggttcacccgatgcgcccgtttttgctcttgttcgaattactgttatggaagacataagtaaccataatgctattaagctgcgtcgattcgacgttagctaa

SEQ ID NO: 16622 - DNA, 346 bp, Emericella nidulans
tcccaacctggccctctctcagcggtgatttaggtctcctatttcccgcagtccttcgttgattggtgcgctcctcgatcatactactatactccatcgccttgtataaatcactctatactctcccaatctgaaacgcaatttccgcatgcttcttggtaagtggcccctctcactccagttcatcgtcatctgcaatcaatccacaccctatgtcttgttgtcataattcgtgcacgcccggcatttccaataccaagccttgggtgttcccctgagtggatcgcagacaaagactttgatcaaggcccactgttataccactctttctgggtgctccctgcgc

SEQ ID NO: 16623 - DNA, 347 bp, Emericella nidulans
tccttcagcgcggctactgctctgaaggccgagctctccaacgacaacctggacgtcattgtcgtcgctgaacgcttctccaacggcgtgaaccagacctactctgcctctgacgccattcagtttgacgccgtcgttgttgcccctggagcggagaagctcttcggtgccaagtccgcggccaactccagctcaaccctctaccctgccggccgtcccctcgaaatcctcgttgatgctttccgcttcggtaagccagtcgctgctcttggcagcggctccactgctttcgacaacgctggtatcaacaccgccgtcgagggcgtgtacgttgccgatgccgtgga

SEQ ID NO: 16624 - DNA, 347 bp, Emericella nidulans
cctgtagtactccgcatccgcagtacagaaattcatgcaatcatcatcatataacaccaaggaacaacaactcagataaagagggtattcacttccgcccaaaccagccggaaactgtgctcttcgcctcagacgccttcgcctctacatcatggctcagcttgtttgcctcctctttaccagcctggcttaggtcatccaacttccgttgtgcccgggcggcctggtccttgcccgcctggctcaagtcatccagcttccgctgtgcttgggatgcaaggtcggtgttctttgtcgtggggttgttcgcctgaacacgagcacattagcatcatcgttaagagata

SEQ ID NO: 16625 - DNA, 347 bp, Emericella nidulans
acagttccttttcatcaaggttacaagaaaggctttgcgaacgattcgaaaggctgggggccttgatcaatacttgttggacgatcggcctgcgcgaatcaaggagttgggtgtttttggatggaagcttcgatggcaggtgatgcagactgataaaatccaagagcaatttaagcaagagcgaaagcgtttgggactgccagaaccgccgtcatttgaggagtggttgaaacagaaggagggtgaagtcaaggcgcaagtggaggaacataccaacattgccgaactcacgaagccaacctacaacgaaaagaaccattaacgtcaattcgcatgacaattctagc

SEQ ID NO: 16626 - DNA, 355 bp, Emericella nidulans
ttggcgcttttggtggattacgcgggctggaaaatggtttacggaccaacgtgcagagcggcctgagcatggacgaaaccgtgttggatggtatggtgaatttcaacgaggcggtttcgcggaccttcgtgccagcacccaagtctgcctctccagccccattggcgccatagcacataaccggactataatttctccaccattagggactttattcgataagcactttcagtgaggaaatatgaactgatctggtgctccttgaagttagcctcaggatgcgcctgactgcccaaatttattctagctccagcgtactagaatcagcgaataaatactttagaagaagacattc

SEQ ID NO: 16627 - DNA, 356 bp, Emericella nidulans
ccgcaccggtctgtctctgcctgacggtatctcttctcgggaattccgagtctactttccatcggccaagaccatctcgatgacctttgcatgttggagcaggacctcgtccttcaaccgcctgcctatcaactgaacgtggcatggtgcgccctcgatttcgtctggtttgtctgcggcttatcagcatctttgaatgcggctgcggtgcagaaacatacaatcagggctatattgcacgtcacgaataaactcggcgtcggcggctttattagcatgcccaaacgggatgaggcaggcaggatactatttggcttagtttattctttccatcagtagaatgagtttcttacgtc

SEQ ID NO: 16628 - DNA, 357 bp, Emericella nidulans
cctgggattgcggggaatgggcagccttcctcgcctcatactcagggatggatcatgctcgattgtcgatgtcaggaacgcgtcgtccgcgcagctacaccatgcttctgtccgccaatgcaagcctcgactgcaaactagaaaatttgaggattcgggaatgtcttaccgatacgctatcgacacaaaaactgcgtgggaatggcggacacactccatccttttggttaggctcttacaggggaggcaaatccatgtttagcgtcgtggccatacattactgatccttgcagcttctacagaaatcactctcaatgtcacagggatactggccattgacgtgcagaggtggtggcg

SEQ ID NO: 16629 - DNA, 362 bp, Emericella nidulans
agcaaacccgggccttcctgacggagaacaggcagagcatggtaggcatattcaagcgctttgctaagatcggcggatccgccgctcccgaccaccatgacgcacttaccagcattgcgaagtcatacacggcccttgttgcggctaccaacttcttagaggtaggtcattgtgctcactgttccaattcaagatctaactttgcgacaggctgaagagagcgaagtcgagcagcacattgggccgaagctgttttcatagggcgggttttgcatggaaagacggtgcatgggacgttgaacgactgtggtgtatttacggtatcaagcatattgggacaggctatattatacgttctagtg

SEQ ID NO: 16630 - DNA, 365 bp, Emericella nidulans
acttctaagattctgtcgatcagttcgtctcagctctggaggcaaatgtttggcttgattacggggcttggagaggggaaaaagtactgataccaagtttcgagtctttattctgggcctcaggaagcttttctgacttcacgaactcgcgttgcgcttcgagtactgcgcaagcctttggcgggctctcaacctctctggtctttaactctggtctcaaatattgggtccacccgatatattatgtatgcgggattctgtcgccgttgaggctggttcacgttcatgcttcaaacggacgtatcagaattaggggccggtacggagtaaactggttcataagttgcacaacgcaggtcctgcat

SEQ ID NO: 16631 - DNA, 366 bp, Emericella nidulans
cgacgtgccgctatccaatgcacattagaatgctcccggcaattcaaaactccgtgcaatgagttcgataaatggaatatggtatgattcatataagcaagatctctcgtatgtcggctaaagcgtgagggtcgttaaaaatcattttgtccttctccattgcctttactttgggcctgaggattttcaatttacgttcggccagccattactcccaccgagtagcggtggaactgctaatccctggttcttcaatgtcctataacctcaaagtcagtgctttacgaggcactcgggacttttaggcttaggtatcgcacattgagatacgctgttggagagatatgaactccacgacttgacttg

SEQ ID NO: 16632 - DNA, 367 bp, Emericella nidulans
tccatgcgaacttcttagtgtgctcctaatggtgactgccggctctgcagtatctcctcaacgaatcaattcttggcgtcgctgagtatcaaccctgatgataactggcgcaatgttgggattctgttcgtctacatcgtcttcaatgcatttgcggctgttttcctttattggctggttcgtgtaccgaaaaagaagtcgcaacaggtgaaaaagcagtaagaggggagcgaagagaatcagcaaggctgcgtgatgacgtctactagagcatgggctaaactgagtgttaactatcgtcatctcatatgttacttcacggtagattatatctcctatcatacacaggatattttcaggaggttat

SEQ ID NO: 16633 - DNA, 368 bp, Emericella nidulans
gccgctgcccagctgtcttctgagcctgtggtaagttcacttccttcgagacattgccaggaatatggtctgaccagccctatagaatcaagagactactactactgagacgtccattgagactcccaccgatactgtcatcgagacccccaccgactctactattaccggtactactggtctcgagactgcaactgaaacctcgaccccgacaacatctcagcctctcattcctaccggaagcaccccggtcattggctcctccagctttgcaacatcccctagcccgaccagctctacaagcacccgatcctcttcaagtacaaccagggactctacctccacttctacggcgactgagtctgcta

SEQ ID NO: 16634 - DNA, 370 bp, Emericella nidulans
ccaccagcagcacccgactgagtcggggtgctgctgcccgcctcccagcgggattcctcttcctaggctacgaccaccccacggccctcagtcccggcctctgaataagaagcctagcgatgctctccgccttggagtctcggatcgcgctggacacgatatcgtcatctctgaagtctttggtggaaattttctgatcttcacgtcgtgttttctatgcttgctggacgattactgtattctttgaccatgacgactatgataccactacagctcgttggcccggagcaatcaagggtcaaagggggggaagcgaggggcactgaaggataactgccaagagacaaattgatacttgccaagctctgtg

SEQ ID NO: 16635 - DNA, 370 bp, Emericella nidulans
atactgagaaaatgagcctactccgtcattatattgattagcagcctgtccatgaggtgcaacgccgtcgcggtaggtttggaatgcagtcagatgcgaagattctggcacattgagggtattaatcgtgttgatggaatatggttcaacgctcggtcctgaagagaaatcgctctcttgtccaatggttggaggcacgcaaactagcttcagtcgattgcaggcagaacaaggccagatgtttgttgtagcagcatcgcatttgatttttcgcttcctacagccattgcatgcgcgcatgactggaagaggtattcagcaaggaaaccaaaatcaccaaagaaaggcacttacccttgagccttttgtg

SEQ ID NO: 16636 - DNA, 372 bp, Emericella nidulans
ccgaagccgtcgggaaatcgagatatgcagcccaactcaagagccaacaagaacagagtggagccaagtccattgcctcggaactctggaacgggctcctggacgaccttttaggtcctaaacagcagaggcagagtcctatgcgaaagtgatttctatgctattgtttgctttggcgctgcacgaatgttcccttgaatgtagttaatctcttcatgaagtcctgaccgactctactaccttatccgaaaatgtcgagttcttccgcgaccttactacttacatatttttgcctcggctgctttcattgttctgttgatatgattgtccttgacactaaatcgagtcacaaaacagcagatcagtacatga

SEQ ID NO: 16637 - DNA, 372 bp, Emericella nidulans
cgttgaggacggtggcagctccagctctacgtctgctaccggtactgctactgccacctccaccggctccgagacctccagcgccaccgatgctcctacctccacctcctccacccccgtcatccccactaccaccggcactgagtccagcacccccaccagctctcccaccggcacccctgctccccccgagttcactggtgctgcttccaaggagcgcttctccctcgtcggcggtgctcttgctgccgtcgccgtcgccgttgccatctaagctagccgtccaagcccgctggacgctatttttgatgcgtgacgacaggaatggaatggtaatggaaaacactccgacatgtacatttctcttcgacc

SEQ ID NO: 16638 - DNA, 375 bp, Emericella nidulans
atatcagatcagaccggatctcaaactcccgaaaaatatatggtactaatactgtgtttacgtagctcacggttgctcctgcggtgcttcttgccagtgccctgccggccagtgcaactgcccggtatatactcccctcctgcgcgctgactgtccaatccgctgatgggtttatgtccctctccagaagaactaaatctcgaccctctttgaggtcacgatggtcacgatgagaggggtcgatgcggctgcggaataagagacgatgacgaagtatgaatggggtggatgatagtgccttgcgatgattttgttcatagcgcagaagacgatagaatgctatcggatcattattccagcaactgttctttggct

SEQ ID NO: 16639 - DNA, 377 bp, Emericella nidulans
taagacagagtgctcccatatcagtgccaacgatagcctcggaatcagagatgccgacaacgctagtgaatgtgctgtcagccagcgtatgcaatacacagttccttccagaaagagcctttggcgtggctatattgggagcgtcgccggtatttgtgcgagacttcgacggagaaaccggcctgatgtcgggaagtctccaaaccttcacatgtctaactcccaccctgtgaacatattcagtatccagagttgtcaaggagagcttcgaagtacatacgtgattaaagcttggcctaaccaagtcatgtcacgaacaacggttgtgcatttgttcgttgaatgaacgttcgctgagccatttttgaggctgacgg

SEQ ID NO: 16640 - DNA, 378 bp, Emericella nidulans
aacagcggttgctacagtcgacaccattagatttaccgtaaggctctctgtagaggaacctacccaagtccttgtactgaatagtctttcgaggtttccgttccgatttgacaacattatgcccttgttccacgagatattggatgaagagttcctgaatccgtttagtcattgtcgaggcgaggggataagccacagtaccgtagccattgcgacgacaaaggtcgcattgttcgagcattgggcaatatcatcgtcgagttggattatcttcttaatacgagagactaacaaagccttagcaagtggatatatacggacatcaagggtacgttggacgtactaggaagagagctttgacctgtgatctctggagac

SEQ ID NO: 16641 - DNA, 378 bp, Emericella nidulans; identical to SEQ ID NO: 16640

SEQ ID NO: 16642 - DNA, 379 bp, Emericella nidulans
ctaatcaggagtatttgagtgggctaacaactgttaacgggactatctacgatactatattacacgtcgctccgccaacagccagtcatcgtagtcaatagtacgctccaaccagtgatttaaatgtctcaatggtcgaggtatgagtacaccgcgctgatgttcagatggccccatcagtggttactcagaatccaaagcgccttctcgccgccgcagtgggagaaatagatggagtgatagaggcgctggagcctgaagggaccgcagctgcagaagagcggttaccaacactaccaacaagcggtccgatgaagaaagtctggccacacggatccgaaggcgccgtgacacagtcctgaaggtattggccaagtcg

SEQ ID NO: 16643 - DNA, 381 bp, Emericella nidulans
ctccgccgacgagcatctcaacctctgtcaagggcctggagctctccccaaatcgttgtgtccggggtgctgagagcccacttctttctgtctacagaccggtttcccccagctttggtggcgatttgaacattgaaaccatgagacaggctttgaggcgaacaggtagcggagacttgggcgcgcctccgaaccagctatctaatacaatagatagcgaggactgaatgcctgttcgaccagcctgaagcttcatgaaggtcgtcgaccacctgtgttaaataacgcttatgctgttcccatgattttgtagtacattacttccctgggggctgtcacttatacccttgcctgacctattctatatacgctagtcttttt

SEQ ID NO: 16644 - DNA, 381 bp, Emericella nidulans
ccccagccagcaagccaatgacgagaaaagtgaagccgggttcttcaaaccccttcgcatcggcgttccgacagacttcattccttctaagccgctacccccatcatctacatcgatagatagcctcgatacatcttacttgccagaccagaatatcttccttgatattggtcccgatccagccacggatagtattggctttggggtccgtgttgagggtggcttgctggcagagggtgaggtcaaagagcttgtggacgcgattgccgctgagattgaaagagctgttgcttgcttaaaagcttaaaagaaagctgctatgtagtcgttagaatgcgttgcatacatcgcattgaatggtcatatagtcataatatagtc

SEQ ID NO: 16645 - DNA, 383 bp, Emericella nidulans
ggcgcagcgcttgcgtactcactgcttgatcatcatgttcacacgaaaggtccggacgcgccgccactgtttaaggccgcagtgtttatatgtgcggggataccgtatgagttggatgggaaggggcctgttagcctaccagagggtgagtatagggttaggattccgacggcgcattttgtgggcaggcaagatccgttatatgagcaggggttgaaactgttcgggctttgcgagccggggaaggcggaagtttatgatcatggagggaagcacatgattccatttgatgcggggaataatgataggatggtggagatcataaagagggctatagagagggccgggaaggaataattatgatccacatgtttgtgaaatat

SEQ ID NO: 16646 - DNA, 383 bp, Emericella nidulans
gctttggagagcttcgtgaggaggacataaaacctctgcatcgactcctttcaatggatgaggtagactcagcatacgaggctgcccgccccccggagttgccgatgttcctgcaagatctgtcaaagctgtcgcaggccgcagagccgggagactacgttcagttttttgcctctgttgcagagcgggagctatactccaacagtagtattagcaagcgcgaattctcaggaaacgccgtttcatgctgcttcggcgtgatgtcggacgcagatatgttgtcgagccacacagtgggccataagaatttgacggttgtgccaaaccattttggcgcactctccgagaaagccatcacgtacctgcacctctggctgaagcca

SEQ ID NO: 16647 - DNA, 385 bp, Emericella nidulans
agccgcagtcgcttggatcgatacagtacaatgcagtttgtgggcctgtggggagcctctgagtcacgaggaggatatgcaaagcacttgcagtcggcggaccacagacgggacgacgggacgagcgagcgatattttccagtctcttctcccaatcttgattgggcttgaccgttaatacaatgcattgctcagtcgttcgacttctgaggatctagcgacgtccctgcactgtgccattgccgctgacaggaggagagacatcggactcggcgacggcgagggatggcggtatcaatggcggcagcgatggtggtactgcgcctcggtaatgtactgtattgtaggagcctacactgccaatgcacagccacatttgtgggca

SEQ ID NO: 16648 - DNA, 389 bp, Emericella nidulans
ccaccacatggatgtgccgaagcggcgcgcagcaaagcgattgagaactgtttagacaccaattgttcactgctctaccactttctgcgccgtatcacgaccgttatctaactacccttctgtttttatactctgcttctcgaggctcgacctgttttataccaccctttttttttttctttttttttcttcctattgcttcttgttctcacggctaacgactaatgcggtgtgggattactggacggcgttatgatgcagacgagactagcgagatttctctcacatctgctttgcttctgatgtcttgtcgttcctcatgttgttatacgctatagacggtcggcgttggagatacctggcattttattattatcaacaatacatca

SEQ ID NO: 16649 - DNA, 390 bp, Emericella nidulans
tcctgcaagataaaagcgacatttgcaaagaccttaccgcggaagacgccgtacgcgttctctcccataatggaaagctttgagtgcgagcccgtggtgcgaaccgacaagttttacttgtctggcgcgcataacgaagactctgttgaggaactagaagtgtttgacagggtcacattctaagggaaccacacgaacgatgagactatcgtacccctctctaagaagccagcagtccgcgcctatgtgcatcatggcatgctgctgaatcgggctaaagacacgacgtgcagtctgaccacgccggtcacttttagagtgcaatcgacaatttctctcgcgatgctgatggactagtcctcgtaaatgccttgctcaaatttctgtgcg

SEQ ID NO: 16650 - DNA, 395 bp, Emericella nidulans
cgctcagcgcccacaacctacttcatcttctgacggcggcagccgttacgccttaccaccgccagcaccaaacctgaacaccttccccactccgcttgggcaggtacaaggtctgaccgcatatttccgcaaagagatcgtcccgctctgtaatcggtacatcacggatccgccgcaggatgagaaaactcgtgattttgaacacaagaagctcggcgagaccattctggcacaagtcatgattaaggcggactccattgaagttgtggacgacgagactcggagtgcgcgaagggccctgattaaagaggcccagtctacgcttaatcaggtcgatgcggtggcaaaggcctgaattaccttaaaccagttaaaattaatcttcggacttctac

SEQ ID NO: 16651 - DNA, 398 bp, Emericella nidulans
aggcgacgcggcatgacgtatgaccatggtataggtatagaactcttcgttaatgatctcttcgactgggtctgttggacgggtatgctgcttgtttcatggaatgcagcacttgttggttgtttgtctagagcaaatcggcgtcggttgttcggcttatcctttcactttttcttctgtcattttcttccttaaattcacccatccgcctaccttcttcaattctcattccccatgtgttacttggaccccttctattcttcgtcttgttatatcttctccacctaattgtgtttactttactggatgcccacctgcggtgctccaacagggcccttccagcttgttgttctacctgcctacccatctacctatacctataacatacaccggaatca

SEQ ID NO: 16652 - DNA, 398 bp, Emericella nidulans
tcgacacaatggctcccaagaccaaggcccccgctaaggacaacgtcactctcggccctctcgccggtgatggtatgcgcccacctaatattattccaagcggcagtttgccagagcagatctaatcaatatgtttccaggcaagctcgttttcggcgttgcgcgtatcttcgcctctttcaacgacaccttcgtccacgttaccgatctctcgttcgtctcccttatgcctacgccctaatgggttgcatatatataatacacattgcgagcagtgaacactaacgttctatcagcggtcgcgaaaccatctgccgtgtcaccggtggtatgaaggtcaaggctgaccgtgacgagtcttctccctccccccccatgttggctgctcaggacgttgc

SEQ ID NO: 16653 - DNA, 399 bp, Emericella nidulans
cgcgcaacatcagggcattccagagtcatcacaaccaaagattgttgaccaactattcgaggatgtagaccgctttcgaggtctgcctggtttatattggtcagcgtcacccccagattaagtggacgccatactaacagttgcaggggaacttgggcattgatccaagcgcaaatctcgcagattgacttcgactacgcttcatacgcggagactcggctaggcgagtattacgcatggcgggccgagacggaaggagcaagaggcgagaaacccttacgagagcgacgctgggcagaggaatgagtgcaggtatcatcttcaacagtgaatgtttgtacagcgtgtttcaacagcgtgcatgagccatcattaccagtaattagacaaaataaaaat

SEQ ID NO: 16654 - DNA, 401 bp, Emericella nidulans
gttcgcccttgcagcctccccgccaccaaaggacattccatccgagtccttcgtggcgcggatcctcggtgtccgaactgttcgtgacttaggcacgctcactaagtcgcccacggacttttgcgacatgactatcatccatcgaagcagcaccctgatgccggaactctacggccccagattttactttcgccaattcctcaacgtccgcaacacatttattggaatattgtggaattacgccttcctggtgggaacggctttcttgatcttggcaccggtccgatggctggtgaagaaagccatctatgcccctggcagcgggccaaccacggagagcggccgtaatgaccgatgcgagtaccgcgccatcgccactccggaccaggacacgccgaagc

SEQ ID NO: 16655 - DNA, 401 bp, Emericella nidulans
ttcgaaacttatatacctaactcacctttctcgactttaacattctacaaccgacataatgagctacgctgaagctgcggcaaagggtcccaaacaatctcccgaagaggtacgtcacgcggacttgaccacttgattattcaacgttgttaacatttaacgcaggcgtaagtcgagacactgaacgactcaaagcaagcgccagacttaacattgactgacttcttctgtttcaatatagtcgcgctcccaacatcaatcacgtttatagagacgaaggtgacagcacagcgtccttgatcgatgttgacggcccacatgtgcaatcagttgactccgacttcctgcagagggaagtaaagaccactacccaggctgagcggatagagcgcgaggaagag

SEQ ID NO: 16656 - DNA, 402 bp, Emericella nidulans
ttgccgaactgcccctttggcacagggcacagaagcatccgtgggacctccatattctctgcgaagctcgatgtctttgtccatccctaatcacggtacaaacggatggtgttgacggttttaatcagctggaaacgactacgtgggagtgtatctcttttctcgctatgcttagtcgggctcttactcgttgtcttgtacaggaacacttaagggtcagcaccttatttctctgcttgctccctaccccgacaccttgttcctcattgctttcattatttttgttctctgtttgcgactctaatctggcctctttacaatattctcttcatgtttcttaggttggattccttgcgcatcttgtcaggctcagttatagggaacgcatgaatgacttgtgta

SEQ ID NO: 16657 - DNA, 402 bp, Emericella nidulans
cgcttgcagccattgcgactcctgctgccaggacagttgccgcaccagcaacccatgcggtgcgcagaaccctaaactcgtcaatacgacttctaccaatgggtcttcgaccgcgacgagcacaactacctccaccacttcttctctcgcgcccttcacgggcctgcctgatgatgacgagggcgctgctgtaaggcctgtgacggatttgaggcaggtgtatgggctttttgccgtgctaggtggattcttcgctggttttacgattttgctctagaagttcgattgattgcgtgcatgcatgcatgcttttctggcatggcatactatagcgtgttatttcttgatgagttatcactgctactgacgggatctcctgctttgctttagtttatttcatga

SEQ ID NO: 16658 - DNA, 404 bp, Emericella nidulans
ggcgcgaaagatgtgctggataagctcaatgaccctcaacttgcggatgggattaatgccaactcatataaataccgcgttaacctctccatggaaactggagatgaccgttataccttccttaacaacttgatgtgggttgccagtggctgccgcagaggccaagaaagtcagtcaccattcaattattcccgacgggcgaatctgaatatgctaaccagctcgttacagttattcttgatgcattccgcgtcaactaactactgctgccaccgccacgattgtatctgtttccgacctctctgattttctttccgtttcgagcgagcactggattgattgtttatggggcaaaaccaagtcttcggcctgttttatatcttgactaacctacagtcatctgt

SEQ ID NO: 16659 - DNA, 404 bp, Emericella nidulans
tggcgacttgtcgggtgacgcacagacaggggggcctaagccatcgtcacatctcggctttcacattccgggccggaagaagtctacccaggcgccgccagctcagagatgcgcgcgatgaaatcgccatatgcgcctgaggtaacagaagtgcgtgagtgagtgagcgctgccatgtctgaaggttcattgtgggctctatctgaacgctttttgtatgattcgatgaaactggttttgaaggtggcgttttggggttcttatgcatcttccacctacccgatatatgcattgggttgcttcatcttggatggtccgcactaatcataatgtttgttggacaattactcactaccattcacttcatcatcggtttcaataagaatactcctgagcatatcgca

SEQ ID NO: 16660 - DNA, 404 bp, Emericella nidulans
cgctaccggcgacccatacgaggatttccctgacgaccaccatgggcgaggagctcagtgctcctgtgtgcttcaagatcgcttcggagctgaaaaatttcggaaacacggccttcaagaatggtaacatcgccttgggtctcgagaagtaccagaagggtctacgctatctgaacgaatttccggaacccgaagagaacgaccctaaggacctggagcctcaaatgaaatcactgcgtttcacccttcactcgaattcttctctcctagcaaacaagctgggacaattcaagaacggcaaaacctgggctacatacgctctggatgtgctgacgcagccagtgcaaaagatgccgaccgggctaaggtctactaccgccgcgcagtcgccgaaagcggactca

SEQ ID NO: 16661 - DNA, 405 bp, Emericella nidulans
gctaggatttgaaggtcaatgtccttttcctttacccacgcgagacgaacttgagaaacaagagaaggagtacagactttttgaggcggcacagaatctgcgaacggatttggctagcttgctaaatacggcgtcagacggatgggtacctccagatggttggaaagcggcacaatcagcccagaaggagctctttgatggaatgttgcaggctgttttgacgaacgcaggttcagatgatgatgagccggtaagagatgaaatgacgctgaggtcaatctggccattcgacatcgatggatgaggacagtagggatcagaaggactatgtgcaggatctaatggatatctggaaatctttgtttcaatacatcttccaatcaatatctgcacgcctgtggcgac

SEQ ID NO: 16662 - DNA, 411 bp, Emericella nidulans
gatgttcaaggaggaggagaaggattgcagtaagtagcgcttggctgtttctaaaacccagttgatactaactgacttgcttgtagacgtcgtcatcctcacctccatgggcgagcagatgtgcatggaagtcaaggaggctcccaaataaacaattaaactgttaatgccgggtcagccctttttgtttcaaaggagcgtcatgtggttacctttaaactggagcatgatgctacgttttgggcagagtgtggcatcgccgatgtgtactccgtcggtgcagccttgggtgtgctttgcgagcagacttaatagcatgcatttggcaggtcaagcatgcctcttagcggaacagtcttgagttccgtactcttacgattgtttgacgaaatcaaaatcctcttcttgaag

SEQ ID NO: 16663 - DNA, 413 bp, Emericella nidulans
ctaaggcatataaactgcccgttctctggcatcagtcactcttggtcttcgcacagcgttaccgaaatgatattactgaggaccagcgagaagcccttttggacttgctcttggttcgtggacacaaggatattggtcctgaagtccggcgcgagctgttagcgggcagaggtcgagggatcgtcgcacccgacccggagagacaacatgcgcttgatgctggagacgatacaatggataccacattataactgcgaagaaactctttttcggcgatttcttacatagatattcccaatcctcttgcaaggatcccgcttgttcatgggcctggatggatggcgttacttgatgacttattgatgcttcatgatatgcatagactcttcccgatcttacaatgccttctcatc

SEQ ID NO: 16664 - DNA, 413 bp, Emericella nidulans
cgcctttcatcttgtggcgacatcgctactactattataacacccctccctctcctccaccgtctctctacacattcagagtactcaagacgtcaaaagcccttactcttgaatcgacttacctcgtgattcttatgcatcaacgcaacgaaatgacgggcacactctccccacaatcagcaccctcttccccttccatctcgacccgccgctcgtcgcggtcctcccaaaagccatcactgtcaatcgacctctcctccctcccaccactatcccagccttccccgccaacaaacacgctcctgatcacagaactcaatgacctttacctctttcaaccgtcctctctttctcagattcggcaactcatcgaatccatcgcccccctaaactcgttctccccgcttccgtcc

SEQ ID NO: 16665 - DNA, 417 bp, Emericella nidulans
tcaagtatatctggtctcatttcattcccatttctttcactatcgcatcacgccataccctttttgcgaagacatatcaccgtctcgcatcgcatgcattaataaatacatttatagactactgcctcactgtctccgcactgtctttgcatcccccagagggctaatgccaccgcaccagacttagatcatgacttttctgttccatttccatgttccgatgataccgcagctttctgttccgtccgtgttctgtcttgtctatttcgcttcgttgtacctatattcagctgagctgctactgtcccgctgcacagaacgaccaaaacagacgctgggtttcgtctttgttgtcttccatcacctaacctaccccatcctacctcagttaatattcagggaaagactatactatgc

SEQ ID NO: 16666 - DNA, 419 bp, Emericella nidulans
ggctcgatcttcgtgccaacgacatacatcctgattcgttcaacaagtcggccttaatttggtaccgcacgaacttgttcctttttggagcgccatgtaaactggtgtagatggtagagatatcgcaagatcagcggtcgagcacgcgggtggagattagtatggatcaatgctcattggctagaatggctgttggagaaagcctgcaatagccgcttatcatatcgttctcggctaagcgtgccgacgtctccatcctcaattctccacgactttctcccatctcgttcaagatcatgtctgggaggtatcgagccagacacccatggcatccccccaaaccccttccaaagaaggcgacacgggcctgaaagggggactcgatgtggtcgccacaaacaccaccggcgaggttccat

SEQ ID NO: 16667 - DNA, 419 bp, Emericella nidulans
gacgtgcgacttgcaggatgattagacgggctgttgtttcgtccgggtggaagccgaaggttgagtgcagggagcatagggcgacaagtgtacctgcgaggtctttggagaggcagaagcagcggatgatttggtcgtaaaggtctttggaaaagtcttcccgggcggttgtctgggctcgggtggaaagataagagaaccaggtcatcatgtttgagtagagcgcgcgggctgttggaaactcggcgaagtatgctgtgcggctgcggtcgtattgaagtttgccgcagtcccagaggcaagcatatgtttcaaggtctggctgcacggaagatgatagtacttgaaatttgttccagagggcaccaatgtcctgttttcgaagttcagcgtagaggagatggttcatgaagtaagag

SEQ ID NO: 16668 - DNA, 420 bp, Emericella nidulans
tagcactgaatgcatctctcgactcttttcatgatgtgattttatcactttagaccccctattcgtgaggatgatactgtctgcccccaacagtgctaacctcgagcagtcattatgttgccgctgccaaatcatttcagtgggtgagctcaaaccgacttttgcaaccgaagagatgaataaacgcatccgggtccttatcctgcacctggttaccacactgtgcgcgggatgaccagtgtgtgtctgcgtgggacaacgtccagttgggcaatcgaaagtggcaggatcatggagacgggtgagttggctgagaaatagacaaacgacgccatttaagactgatggcttagaggagataaggtacaaagggcatatttcccctgcagtatgcatagaatgctcctcgcgccaatgaac

SEQ ID NO: 16669 - DNA, 421 bp, Emericella nidulans
cggccacgaggcaaccgtatatattgcgaggtgtcggccggcgatccagaatcgcgtgatctgtcctcctcacctgcgcatagacgtctgggactggcaggaggataaagacaacgagagatgcccatcctgccggggagacacaccacccgagaccccttaacagcatctccagcgaaaatggagtttggatcgacaaggacccgggttatgtgtctggaccgacgctgtgccctccggactggttttgcaattcagaaacgagtttctgctctgaacgtccgccccaggtaaacgacgctgctttggatttcgcattctcaatggaagtatcgcgtctaatgaatatcctgttgtttattagccatctgtgtactacaccatgctgaattgacacaccattcatcgccctggcggctag

SEQ ID NO: 16670 - DNA, 422 bp, Emericella nidulans
ccaacggcgaaacgggcattgcaccatcgaactacctcattctgctatgatggatgccgccttcctttcttctaccttctttgtcgtttccttttctggtttgtcatgggcccttgccggttggcgagaaaatgtgtttgatacccttcgagttgtatcactcggcgtgaatttggattgcgaactaaagtcatgttacgtcttgatggtttgtttcttcttcgatttatttttttttctctttggacttgctgaattgtaagatctcacttggatatgggcttggtttcttttcttcgctccccggcccgttgaaaacttgggatggatgatcgcactcaggtttgataggatgttttattgtatttctctttgtctgatatatctgatacgcatgagactgaattggatgatgttcattg

SEQ ID NO: 16671 - DNA, 424 bp, Emericella nidulans
tccgcgcacagttccgtcacaaccttcccgcaaagtccttcggtgctactgtccgtgtcatgctctacccctccaacatctaaacgccccgttgtttttcatatatccgcggcacaactccggaatctttgcgcagacggtcaggcaaggagtcggcgggatgagcccaggttgcgatggagttagtgggttgataatgatcatgggagaggcagggccggacagcccagccctacgagtctcaaaataaaaagataaaatgggatctcttgtctactgtaacacatggttactgtttcatcttaatagacatccagccggcatgcttgttttttgaccaggtggccgtgggttgtcttgacggcagggctctagtgtattatttgacgctcatgaacacacaatccagacaattcatctcggc

SEQ ID NO: 16672 - DNA, 428 bp, Emericella nidulans
gcaacacggtatattcttggcttggagccgagagtcggtgactccagtagtagaaagcctttcgtacccgtgtctgaaacaaccgctgagatcagaaaagagagcacggtcctgtttgaagaggagaagcagaatctgttcatcgaatccgtccgcgagattgacctgtggtcggttgttctgacacggttggataaggccacgtgcgaagagaaactactgaaggagctctattcctgggtctctgacggtctggactgtctttcagatatttttgctcgccctgatggtgaggacggccttgtgggatggatggcgaagcctgaggcctatacgcttggggtgagggtaattagtcttgctggtgttttggcttcaaaagagctcgagtcttctgggttgttaggtaccgatgctcagggtgccct

SEQ ID NO: 16673 - DNA, 428 bp, Emericella nidulans
tcctctgcgccgcagcatatcttatcttcggctcgtggctcaattataatcgctatggtgcccgtgggtgggacctgcttccgcacggcgatacgcttcgagacattccttatctcttccaagactggctgcgccgggtagtcaacacatttcaaggggcgggttcgagaggaggatacagcgctgtataaatataacgctttatttctctgtgatgtttcgaggaattgcatacgaacgggaacaggtttcttgaccggcagattccttcaggtaatgctttttctctctgtacgatggaatgaatgattggccagtttcgcatttgctcgttcgatttgcttgtctgttttctcatttattactgttgttggacgagctgatatatacctcagctagattttatcagtaaatgtattcatacggag

SEQ ID NO: 16674 - DNA, 429 bp, Emericella nidulans
cctgacggcttgcgacgagattggcaacatcctgcagcttaaattctcgaccggtgtcgcaggcggtgcactccccatgaatgacgacatggcgccgcccccagagaaggaagtccagtggcagcagaagcgaaacccgcgaattgtccctccgcggtggcgcatagaggacgtcattaggcgtggtgtccaagatgttaagtcaccactatattaggatgcttgcctctgatgcctgacggttggctttataatgatgacccatctagctatgtccattcatgccctcatggtaaacttggcgctatggtgcatagggggttcttcgctgacgtttctggcgcgctcggtcgaatgctggtcatgccgcgtcgtgtcgaatggaagttttggtgtatcatgcagacaacgacttcacaacaatctcgc

SEQ ID NO: 16675 - DNA, 429 bp, Emericella nidulans
caaccagcccaccagccaaaactcaacttcaaaatgtctccctgcaactgcaactgctgctccggcgactgcaactcctgctcttgcagctcctgcaccgtaagtgtcctcgcgttctacgaggtctcgtctcactaactaacaaaatggttatcatacagcactaaatatctcttctgccgcgtcgtcctctgcccgtgctctgccatttcaacatcccagctgtatctcaaccaagcgacaacacgtgcttactcgtctatccgaccgtgtaagccccaaatacgctattaacaaagagatcgagaacctgaacgcgtatcgcgagattgtcgggactccagagggcgatatgatgaaggaacaataaaccgctgttatttgactgatgtatctactttgtcgctccttcccaaaataacgtcgacg

SEQ ID NO: 16676 - DNA, 429 bp, Emericella nidulans
tcaggcagcaacagcgactcctcaacttctcaggaccagaacaacaaagccaccgctcaagattttctctccaagggtcctcagattcctgatagtgagcgatcctgcttcattgattctaacccagcgatctaacgagctatagacatgccgcccaaagcatctcgagaagaaatcgaagctcgcatgaaggaactcaataaatgagtgatacctatctgaaagatcctgagaagcagatatcgaattggaaaactttgcggcatcgctattagctgaaatagtccatttaatcaaaaatgtaatgattgtatgagggctggcgggcacacagatgtttctaccttgtattccctaaaagtcaccgtatttgttaaccttactacatgagcagtccagtattcacaaaataaaatgaatctccctggc

SEQ ID NO: 16677 - DNA, 437 bp, Emericella nidulans
ttggggcgcgattaggacgatcggtgacggacgagagcatgcacgtggtagacagtttcatagcgggcgttccccgcgatcgtcgatgcgccattacactgacatagacgccgattgatggaacgagacgctgtcgtggagagtctggcgtaccatgccagacgcaccaacaattttctaactcgcttcggatagagccgaccgatgcgcgatgtttgtcggggcatactgttctatggcaccgcccagattgcagctcggttagacctgatttttagtcgcgcgatacaaattggttatataagcaacattagtcatgactgtcacgcgaccataaagacgatgatgagtttcaagtcgcgtcacctgccctaggggtcgagctcgcttagtcattatttagtaagctaggtatagataggcggcaacgttggcca

SEQ ID NO: 16678 - DNA, 447 bp, Emericella nidulans
tcgcagtcgcagcgaccattcccgaagtctaccaggcagaaggcccggttgacctttacgaagtatcgggggagacactgttcaacgccgttgtcgacaaggcggtggagaagttcgagataaaggagacagagaagttggtcaaggagtatgaagttataactcgtgatcatgagctttccatcggttaccttgcggatgaggacgagttcgagctggttgaccatgtcaagctttaacgattttttctttttcctttcccccctggcgtttgtatcagcgatgacgggcacagttgtctagaatttgattcgcataatatgattttggtgtctttggcgcttctgtctttttctctcgatcgacgcatgctgcgttgttgatctttgcagtcatttggcggcggcgccagctgttgagattttgcagatatggtattttattatt

SEQ ID NO: 16679 - DNA, 447 bp, Emericella nidulans
tcaagtgccccggctgcttcaacatcaccaccgtcttctcccacgcccagaccgtcgttgtgtgctccggctgctctactgtcctctgccagcccaccggtggcaaggcccgtctcaccgagggctgctctttccgccgaaagtaaacgtctcgacaacggagttggagcgacgacgattgcaacgtggcgtttttcgatgatgatggattaatactatttttttgagaaagcacttcagatagaagatggaatcctcgccccttgcgagaaacccttacaacactcatggacaatgagaaaaatgttcctacacgtcacatccaccgttcaataccaaaaagcgttttcttcacagtgaggggagttccggatatctggcacttgatcggtccatactttgtcaacttattgctttgtttccgtcaaaaaccagtttcttctctcc

SEQ ID NO: 16680 - DNA, 447 bp, Emericella nidulans
ggaatatggctcatgtcaagttttggaatccaacacctctccttgaaagggctgtagcactgttggaccccactgccgagataattcaccgcgagaaagacagcatcgcggctctcaggtggagcgggaatccggaagaaaatgtggaatggctcctgaacgagaagtatgcatggtgttaaaattcatggcgcagcacttctcctagacatagacgtccttgtatgcatggacgcggttggtgatctatcgtttctgtctcttttggttcttgaataattcatgccagtttctcgtctttttagccgccgttgctgcactagtatctgagggaaggttcctcttggctttctgtcgatcagcttcagtagcgaaacatattgtttttggctcagggtgcatataacatgtttcctggttattgttagcacaattcatacaattgac

SEQ ID NO: 16681 - DNA, 447 bp, Emericella nidulans
tcgaccctcctcgatcgacacaatcgtgccgttcttctcttcgaccgatactttattcatttactacttctactccgtttaataccttaccgacacgaaccagttgaggccatgatcagttttgacaccaaaaagtcttgcgatgtttttctggaatttgacattttgggatttaccgttttctttgtacgggcgtttgggatagacgggaatgggtttgagattttgggatgcacgggttgataccaagacagattagattgtggcctcgcggccgattttcttccgcctattttctttttttttccctttcgttctagctctgagctgtgcgttttgctttttgatcgatactagatttcctttgtcaagcaagagtggtacttttgtcgcgagtcctgtacactatcctgagattccttcagtgaatgaaagccagtgttggca

SEQ ID NO: 16682 - DNA, 451 bp, Emericella nidulans
ccccggtggcgaagggtacttggacgtcatcaatcgacttcgaaccgttatcatcgaagtggagcggatgaccgaccatgtgctcctagttactcatcgctctgtggcgcgcgttctcctggcttacttccgcggtctgaaacgtgacgaagtcgccgatctagacgtacctttggggatgttgtacatgctggagccgaagccttacggcgtggagtttaaggcgtaccgctacagtccagagaaagacacgttcgagtatatccctgacttccaactccaacagacgacgcagcagtaaagcaagctatgggtaagggctgttagttgttagacttacacgcagcgcatctcttgagacatctctactttagcacgatacgctatgagttatggtggtattgttcgattttacctttccttaacgtgtctcaactgcttaggcgctgga

SEQ ID NO: 16683 - DNA, 451 bp, Emericella nidulans; identical to SEQ ID NO: 16682

SEQ ID NO: 16684 - DNA, 453 bp, Emericella nidulans
atccgcctatgccctgcaggtttgtctcttgcaaatacctgctcttgtcttgtttagtgccttctacgcccgtgttcttgacccagaacatttgattacacactccttcaggtacgtcagctatctctcgtattgtgtcaatccttgagatcgatatgattttgaagaaggctaattaatgggtttaacagcctcattttcgcgcaatgggatatgattacagtcatcctttgcgtttttctcctctcttatgtctacggtgaaggtaaaagcaattatttcaagggctcaatcctcgtcctgacctaccttgtcgtcgtgattgggttcttcctctctggttacagtaacatggacaccatgggtgttgatcgcttcaacaccttggccctgaacattgaatctaggcccgagaaattctacacaattggcaggtcgaaaagcggagttgcc

SEQ ID NO: 16685 - DNA, 453 bp, Emericella nidulans
ccttggctcggccacgtctcttgtattgggtccatccatgcacctgctgccagtgattgtgcatagtattaaggttggtcgcaatgtatgggcagtccagatcacgtcgacactgcatgccgttggtcgagactgggagaattggcaggggatgatccaatgcccgaggaatctcaacagcaccagggtcccggatcaggttggtccattgttggacagtctcgaggacaggctggatctgcaagctggtcatgaaatgcttccggtaaaggtgggtttccacctcaattaggtgaaccccgtgcttgcattggcggcagaccatgatctgcagctcagggattgtttcaaagagtaggtgagacatgctgagagttgcacctatagaggctcatacctaggagtacatatcaacatggagagattcaaaaccagggattgattctcctgact

SEQ ID NO: 16686 - DNA, 454 bp, Emericella nidulans
cgtaccaactgcgccgacaacacttctcttggagagttcactttggctcccatcccacctatgagagctggagaggctgctctggagtgtgtcttcgaggttgatgtcaatggtatcctcaaggtcaccgccactgagaaatcttctggccgcagcgccaatatcactatctcaaacgctgtcggcaagctttctaccactgagattgaacagatgattgacggtaataaacccccattggagttttgtgcttcctatactaatcagaaacagatgctgccaagttcaagaccagtgatgaggccttcaccaaacgatttgagtcccgtcaacagctcgagtcctacatctctcgcgttgaggaaatcatctccgaccctacaatgtctatgaaactcaagcgtggcaacagggagaagatcgagtctgccctccagtgatgccatggcacagc

SEQ ID NO: 16687 - DNA, 455 bp, Emericella nidulans
gcttgtggcagccaagcgttcatagcgacgttgctttttgatccttcgatgtcggctcttcctatcataccgaagcagaattcggtaagcgttggattgttcacccactaatagggaacgtgagctgggtttagaccgtcgtgagacaggttagttttaccctactgatgaaggtcgccgcaacggtaattcaatttagtacgagaggaaccgttgattcagataattggtttttgcggctgtctgaccaggcagtgccgcgacgctaccatctgccggataatggctgaacgcctctaagtcagaatccgtgccggaacgcggcgatgttgccccgcacgtcgtagttggatacgaataggcctccgggccctgtacctcagcaggctggcgacggcccccggggagaagccctcgggagccggctggcggattgcaatgtcacctcgcgcggg

SEQ ID NO: 16688 - DNA, 458 bp, Emericella nidulans
ggtggttggattgggtgcgaaactatatcgcggtaagactgtcgctagtccaactagcacatttgattgacggtgcgattcagggtcccatcacagaggaggtcatgttcagatcggcaataatacctctccacctactcgccagaatcagtccaggacatattgtttgggtggcccccttgtacttcggagtcgctcatgtgcatcatttctatgagttccgattgacgcatccggatacttcggttatcgcagccgtcgttcgctccgtttttcagttcgcgtatacaacagtttttggctggtacgccacttttgtctatctgcgaacgggatctctcttcgccgtcatcctgattcacatgttctgcaactggtgtggacttcctcgcctgtggggaagggtcgaggctgcagttccaataaggcctactttcaatagaggaaaagaggattct

SEQ ID NO: 16689 - DNA, 461 bp, Emericella nidulans
agccggctctccagcacgacagaattcatccatactgcgacagagtaggtcaattataagtcacgagattgctaaggctctacgtagatactctttgctgggcgtttactgacgaacaaagggatattcttgttccatccataacgctacccagctccgctagaattatgtaattgttttggtagggctgcagttgggaacggaatgaataaggcgcatgggacatgttcggaaaggcgattctccgctgatgcccatagagacgctcccaaggaatgacaacagtgattacattgtatgagctcaacatgccttttgtttcgcgattgtgtaattatctgatgactctattataaaatgaggcgcaggcaattagtttgatacgagagtccgagagttcggaacacaaaaagacacacagtagcagagccacaattgtggcttgtgcgtgacctggccga

SEQ ID NO: 16690 - DNA, 462 bp, Emericella nidulans
atgtgtacattatacgtccttgtctagagcttgcttacaagaattattagttcctgcacttacacgaacccactccccacattctttgttcttccttccttacaagcaatatacccgactacattattccttactcatatcccctatcactatacctttgtattctagggtgccgttgactggagtgtgttgatttgttgcaagattgttttccttgtggatctgaactgtaagtttcgttcaatttcttttctccttttttctcttttaatggtactgttttcactcaaaacactgtctgttctcgtaggagttacggttagaagcctcaaggtgataggatgtgtttcgacaagggttgtgtctcccattccaaacctttatatgtgttttgtttggaaaatcgcgaccagtagaatcatatgtgtatatatttgctcacgagaaacactcaacgaacct

SEQ ID NO: 16691 - DNA, 463 bp, Emericella nidulans
cgactggtggtcaggtgaattggatgaagtgaaagcggacttaatacccattattcgatgacacagttaacagggcgctgaaaacagctttcacttattgcctcttggtgacccaacactcttcggacgtttctttgctgtgattgcatgggttttggtcaagggcattcgcccatctgaccttcttagtgtgtcgtttaatagattggccgagcctcagcggcaaagagcgcggatgagaatcatctaggccgaagccgcctagctgcgcagtggaatgtgactgtgggaattaggagttcgcgcctactgaggcggtggtaatgggctttccttgtcattctctatatataaggaaacaagcgtgcgctggtgtaagtgttagcgcgcctcgccagattagcctggcgggtcagtggtgtctcagtccaagcacctgcttcttttacaagtgataactacc

SEQ ID NO: 16692 - DNA, 465 bp, Emericella nidulans
tgtcaacaagataggtgtcaatcgtcatatggcatccgatccttagtaggctacgttggtgtagttgatgcagtttcctcctgccctttctcctctgagcatattccacaacatgtatagtatcaaagaaaatgtccacgcaactaatcatattgatacggaaacatcatgtgaccttcatcatgtacaccaggtgtacacgatgagctgtggaagcatgaaggagtctggtattcaggggtgcggatgcacggtgactagggatgtcaacccgcactggctgcagtgcggtgcgggttgggaaagctagacttattaaaccacgggttggtgtaatgggacgtatttagatgtatcttcctatctagacgtgccgacgtacaagaaggaatcgctggaaaggagaaaggaaaaaagggattgctgtcatgaggaagtagggttgtcaacctgcaccgcaaccca

SEQ ID NO: 16693 - DNA, 469 bp, Emericella nidulans
ccctcctgaaggcccctcatctttctgcctaacaacaaaaccactcagcacacacaaaactcgccatataatccgagtttcaaccaagcaaaatgacactctactacagtctggtacgtattttctgacagggcacctcgctctgcttgtccagcaaacacactgagctttgtcccatttctgcaattgagaccctgggtttcctggaagctaacgtactttcgaccctaggtcttttgtcttctcgtacttgagatgggagtgtttatgggactgattgtgccccttccgttcactgtcaagcgcaaactttttactttcatctccgaaagtccggtaatagctaagttacaatatggattgagggtatggatttccaggataattctaccttcttgccgctaacatggtcctagataacttttatcttcattctcattctattcattgacagtgtcaaccgggttta

SEQ ID NO: 16694 - DNA, 471 bp, Emericella nidulans
acagtatcagaaagtcgacctcttcccacctcatctccgcgagcaaatcgacgccacgaacgactgggtatataacgacgttaacaatggggtctacaagtctggttttgcaactacccaggaagcatatgagagaaatgtcacgacgctttttgcctcactcgataggattgaaaagcatctcgcggattccaagtcggcttatttttttggagatgacatcaccgaggcggatataaggctcttcacgacgatcgttcgatttgatcccgtatatgtacaacacttcaagtgcaatattcgcgatatcagatctgggtatccggctattcatgcttggttgaggaggctgtactgggatgtcccagcgttccgggagacgacccagttcgaacatattaagaagcactacacgaagagtcattcgcagatcaaccccttcggcatcacacctgtagggccgacaccgga

SEQ ID NO: 16695 - DNA, 474 bp, Emericella nidulans
gccgccgtaccgagtggatgattgccggccgctggtggcaggtgacacagctgctcttgcccggatacgcaaggtggtacgtaatatcctttattttatatactctacagatagtaggatgtcactaacatggcgaagcttgaaatggagcgccagaagatcgagttccgaaacgccagcgccgctataggctcggcaaacaccttctcccgttcggcggcttctgggcctggagctgccggacccaggaaaggaggctgaattgatattctagctctccctaccatctcgttgcgatcgagactccgcgactcagcacgactaaggacgaccgcaatgccataaacaatctcacatgttcatgccataaccacgatgaacatattcttgcaagacacagaatcactgcgtgacatgataggaagggacggagcgggaaagatttgaggggcagtctaggatctcgcctagata

SEQ ID NO: 16696 - DNA, 474 bp, Emericella nidulans
cctgcaccgcactgcatctgcctacgttagactggatttgggagatatttgcaacggtctctgcgcgaaaagaacgaggaagagttggaaatgtctacatttgggcgcacaaaccgaatgagtccgactgggtactgatgtgagatgatagggacgtcctgcaccccaaccgcgccaacgtctccaaggatgagctccgtgagaagctcgccgacctgtacaagtccaacaaggaccaggtttccgtcttcggcttccgcacacaatacggtggtggcaagagcactggctttgctctcatctacgactccactgaggctctgaagaagttcgagcctcgctaccgtcttatccgcatcggtgctgccgagaagattgagaagcccagcagacagcagcgtacgtctatcccgagccatttacacctcattcttgagatggcagtggaggagctaacattcgttcaggcaagca

SEQ ID NO: 16697 - DNA, 474 bp, Emericella nidulans; identical to SEQ ID NO: 16696

SEQ ID NO: 16698 - DNA, 474 bp, Emericella nidulans; identical to SEQ ID NO: 16696

SEQ ID NO: 16699 - DNA, 474 bp, Emericella nidulans; identical to SEQ ID NO: 16696

SEQ ID NO: 16700 - DNA, 475 bp, Emericella nidulans
tgcctcttgccaggtcaaaaccagatcatctccagcctgaaatgtatcgaatctatcaggccgaaaccctctggcagatggataatggatttctcacgtgcctactggaagaagcggaatcaccgagacgatcctcgcccaaggctcagccactgacattatatatgacatctgacaacatcccatttcctggacggaaaaccttgtgtgtttcatgctggtgggctctatcacttccctcgtaccgtggaaggaaaactccgtgcagagacgacgcttccctcaagtatggataccagttcctggaagtctgtttaagcatttcttgcggttaagggtaaacattttcttcattctcaaactgctttctcgaagttgtggtcagttggtgtactcaagagtacgccttcgctccatctcgatgtgcgcagatccagtgtggctgacaggtgcgatcctgcgggtctcagtgggg

SEQ ID NO: 16701 - DNA, 475 bp, Emericella nidulans
gtccagtccctcattctcaagcctcttctccaaaaaccaaaaaaaccaacttccacctcttcacaatgaagttctccattgctgccgctgtcgttgctttcgccgcctccgtcgcggccctccctcctgcccatgattcccagttcgctggcaatggtgttggcaacaagggcaacagcaacgtcaagttccctgtccccgaaaacgtgaccgtcaagcaggcctccgacaagtgcggtgaccaggcccagctctcttgctgcaacaaggccacgtacgccggtgacaccacaaccgttgatgagggtcttctgtctggtgccctcagcggcctcatcggcgccgggtctggtgccgaaggtcttggtctcttcgatcagtgctccaagcttgatgttgctggtcagttcttcgaaaatcactttcgtgatgccccaatgctaacaattaccagtcctcattggcatccaagatc

SEQ ID NO: 16702 - DNA, 475 bp, Emericella nidulans
ccacgccgaatgcgtctactgactcttatctgacatctaaggctcaggcaacgaccagttgaaggatcactatgagcaagagaagcaggctcagattaagaggcagaaagagggacaggggaagtggaaccagaaccttgctagtagcagcgaacgctcggtgcgtatacctttatttttaccatcgccctccgtccttggtcatgaatcaggagtcgtacgtcgagtggagtttaacttgctaacgaatgtaacaggtcaaagctgaccggggagaggtcgacaataaggatagcttcgttgacctccaagataagacgaagaacgagcctaatcagaaggcgtaaaatggctgggcctggtgcttagcattagagatttcttattattctggtttcactcttgtaccgtgcactatatggctaggagagactttccagtctttctaacatagcaatgaacttaatccaaggta

SEQ ID NO: 16703 - DNA, 476 bp, Emericella nidulans
gcgctgcagatggaggaccagttggcttcccaacaacgccccgaaactgcacaagaagttctagacgccctcaacctttcgcagaagaggaacattcttagaaagatcctacgctcaccgcaatttacgcaaagtctcgcaagcttgaccgtggctataagggacggagggttaccgagcatcagcgaagccctaaagattccagtcgagaatgggggcttcatgcgtcgaggcggtgttccgcttgggggtggtgatgcaatgaaagcgtttattcaaggcgttcgggattatgtcaaggactcgacgcaagggaaccgcatggaaactgattaatctatattgagttgaggccgtttgtttggcagatttgtaactatccacttctgctctagatgatcaaacgcggcatgctttgttatttttaggccttggcgcggagttagtaacaggcagcaccgtttaagaaatcaaac

SEQ ID NO: 16704 - DNA, 479 bp, Emericella nidulans
aaaaatagggctcttttaggagccttatgggcgaaaggcacaggtgctgtattatcttcactgtcacaggacacagcctcaggtacaattacgtgaaaggtgctcttgtcactcggctctgggctgtgtagcgaaagtctaattcatgtccaaagtaacaatttccaatctcctcactacaattagctattttcatgattaggcaagagctaacgctactgaatacagatacagaatcagcctctgcaatgatgtgcaatcctagtgctgagactactagcatattatgatatgattatattagtaccactctcgaaggcacctttcacctcagtttcgatatgtgatagctatcaggacttgtctcccaaccaattttgtttgcatactttcattttcgcacatattcgatccaactagacgagaaccttgttcatttaggaccacgacggcaaggtctaattcttacactatcgagc

SEQ ID NO: 16705 - DNA, 479 bp, Emericella nidulans
tcttggcccttgctgctggtgctcgtactgttaagctgaagtacggcaaccgtgcacacaacattcctgctctcgacttgaccactggtcgctgccacattaccagccagaaccacggttacgctgtagatgcctctaccctgccttctgactggaagccctactttgtgaacttgaacgactcgagcaatgagggtatgatccacaagtctcgtcccatcttcagcacccaattccaccccgaggccaagggcggccctcttgactcctcgtacctcttcgacatctacatcgacagtgtcaagaagtacaagaacagtcaacttgccttccaccccagccgggagactattcccagtcctctcttggttgatctcctgccgaaggagcgtgtcgatgttgcccctactatcggtatgcagaacgttgctgctgcggcggccgctgcggctgctgctaccgcttaggtgaatctggga

SEQ ID NO: 16706 - DNA, 480 bp, Emericella nidulans
aaccggtgcgttctctctacgtatccttaccttgtccgtctaggctgaccgaccggttaaagcactggagtaacttctggcgccctccaggaacggctgtgagccgcgaccccccagatggcgaccgctacgcgctcatcgacatcaacctcacgcacccgatccgcacgtcacagctcgcaatctcgcacttcctcaggtccggaacagacagcacacgccgcaaagcgattgtgcacatctccagtatcgcagggcaaaacccgttcctcgcagcgcccatctacgtcgccacaaagcatgcgatcaatgggttcgttcgctcgctcgccaaactcgacgagcgctgcgggatccgcgttacggccgttgcaccgggcatcatcaagacgccgctttggaccgaccacccggagaaactgaagatagtggatgatacgaaggatgcgtgggtgacgcctgacgaagtcgcgaccgtga

SEQ ID NO: 16707 - DNA, 484 bp, Emericella nidulans
aaccaaactacccacgacatacaatagaggaaaaatgaagttttccctacctacattaataatttcatttttcattgccagtgggattgcggcaccggtgcaatcggtttgtattgcctttatttagatattctacacctctttcaggttagggctaacttcatgaggtacgaacagagcacaccgatcgtcgcccgtcagcttcaaggagggactgcacttgagatgttggcaaattctggtgggattgggggcgctctttcgtacgcgaaaatccctgtgttatcggaattgagcaagtcagggttgggcaagtgagtgagtggacatcatttgttgagatcggataggatgcgttaggtagaagaaagaagttcttgtatgtttggtatcgatatctggttcattcttaatctgatgagggtcattgctatcgctagttatcactgggttatcatgcagaataaagataaggacaaagcgt

SEQ ID NO: 16708 - DNA, 488 bp, Emericella nidulans
gctgaagcagccgtggttggtattgccgatgagttgaccggtcaggccgtcaatgcctttgtttcgctcaaagagggtaacgagaccaacgaccaagtccgcaaagacctcattctgcaagtccgcaagtcgattggacccttcgctgctcccaaagccgtctttgttgtcgacgacctgcccaagacccgtagcggtaagatcatgcgccgcatcctgcggaagattcttagtggtgaggaggatagcctgggcgacatttcaacggtaaggcctctcgacttgacttcgttgagtacgtggaactaattgttacctaagctgtccgatccatccgtggttgagagaattatcgccacagtgcacgcttcccgaggcaaataaactacaaccgccattggttcgggccaaaccccatatatacccataaaaagcgtgtcatgatgatgacagcccaactgaatagacagaatacttgccaactctgc

SEQ ID NO: 16709 - DNA, 491 bp, Emericella nidulans
tttcgtgcaagtactaagacctcaatcagtatactttggaccaggatggaaagcgggtttataccctgaagaaggtcactcccaccggggaggtcacaaagagcgctcaccccgctcgcttttctccggacgacaagtattctcggtaagctcccgactcagcaagaactcgattgtacttgtgtttctcagaaggtgctaacagttatttaaaaaaagtcaccgtgttacgctgaagaagagatatggccttctgcttacccagcaggctggtatgttgattagtcccttttaatgcctaaagcaaaggctgactagtatctttagacaaagaggctgcgcagctatagagccggagaagtcaatatgacggagtaatataaaaagggggtttctgcttcatttgctggcgaatggtgttcaatacggatcaagatgatacgagattttcggattttccaataccaatcacttcgttcaaggcagcttca

SEQ ID NO: 16710 - DNA, 491 bp, Emericella nidulans
ccgccctgcccttcattccttctcccttcctagatttcgcatactaacaccgttttctggatattagcattcggtctttcaatagcagccattgcaatcccacgctgggtctcctaccacagctcatcgtacgactattcctacgggctccaccggcgttgttcctctttaacagatacatgcgaggcctttcccaaccgtgaagactgtatcggtgaagaccggtacttttgttcgatgtggcggaccgtgggatttgggatgtcatttgccgttgtgctggaggggttgagtgttgttgcgtttctcattgtgctctctggcggaaagaggctcagggaggagggatggagggttctgagtctccttattcttgctggtgcggctgtgcaggcggggtgtatgggacttgtggtacgtctccgttccaatccaggctttgtggtcggatggggttttttggcagggaggtgaagggctgtatgactgac

SEQ ID NO: 16711 - DNA, 492 bp, Emericella nidulans
cgacgtttagaccggacgctatgtgaactgtattttgcttttattgtcataccatgttgcacatttctttcgaaagatctttcaattggcgttgagactttcatactttttataattattttcttttttttttttttccccatttttcccctcagtcttttcctttgtcttccattgtcttgagatgatatctagccagctctttgtttcagcattaccgatatccacatgacacagagcagggggggttttcttttcttttctttcctatctacagcatgaggctatccctcactagccgtgtcactcgaggtgcctgctaccatgccatgtctttgcctgggatggcccttgtccttctctcctgttcccttttttgtctgcttgcgaatcggataatgatatatcccacatctacctactcgttttgatgtattcgacaaggcaaaaacaatgtatgcaaactattatatgtcacgcattcttggtcaa

SEQ ID NO: 16712 - DNA, 495 bp, Emericella nidulans
tcaaaacgcggtacgtgcaggatattctacctgcgatttgcccgcaatttggcgggcgcgaggaccgtggggagacgcaggaaaattatggatcagcggcgacgtgtgacgtgagctgtttgcaggcgctatcacggcgcattcacttcggaaagtttgtggccgagtcgaagttccagaaggagacggaaaagtttgttgcgctgattaaggcaggggatcgcaaggaaattgatgaggcgattacggatgcgaaagttgagcaaaaggtgctggagcggttggcgctcaaggcaaagacttacgggacagatcctggctttcctgagcagtcggggccgaagattgatgttcaggctgtgcaggacatgtacaaggtaccttccctcttacctcaccctgccgttcatgatctaatcaagaacaggaatacgttatccctttgaccaaggttgtcgaagtagagtacctgatgcaacgccttaagggcactca

SEQ ID NO: 16713 - DNA, 496 bp, Emericella nidulans
ggctggcaaaagattaagaacaaggtggaagaggcaagcgtcgagcgatttagagaaaatgccaagcgtggcagggaaggcttcgaagccgtccttgagatgagtcgacgagttttcagcgagcagcgcgctctcgaatccagcgtggcatgatcagtcgcaactcctgcatcacgttattgagcgtttagcttgcataatggcgttctttcatttcctaagcgtgtggttgtttcggcgttgtcctaaaagatactctcatcgcatactgatgacatgaccatcgcacttattgtttactcaacttaccgggctcatgaggcacgtgttctcaaaagttattgatatcccttgccatatttttcaagcgagcgtcttgcttctctcttttgagatactacgagagcacgacaaaatagagctgtacatagatacatattacctatagtggctatcctagaagaccccccaatacgacacggctgaccccagccac

SEQ ID NO: 16714 - DNA, 497 bp, Emericella nidulans
gctagttcttatagctacacatcagggccaagctcaagctctggctacagttaccagtcccaatatcaaggtccagttcccaactcaacaacaacaccctacgcctcggtctacactcctccctcggcatctacctccaccacccttcctctgcacagcgccactgccactagctcaaatttaggtacacatactgatggcggtgaaggtgaagggggcctctgggaaagcacaaaatcgtggctgcacagcgcggggaacaagcttgctgaagtggaggccgaggtctggaaaaggattaatgaggcacatgatagtgataataaatgagcgtgtgctctaggtgtctctttcgattttgtggtttatgtttggttgcaccgtctacgtcttttttacgacgagcttggttgggtaacagaatggaagggcttaagtgtttagagagtaaggctcatccgagatatatctggcgaatactactgatagaggtggga

SEQ ID NO: 16715 - DNA, 500 bp, Emericella nidulans
caaccagcccaccagccaaaactcaacttcaaaatgtctccctgcaactgcaactgctgctccggcgactgcaactcctgctcttgcagctcctgcaccgtaagtgtcctcgcgttctacgaggtctcgtctcactaactaacaaaatggttatcatacagcactaaatatctcttctgccgcgtcgtcctctgcccgtgctctgccatttcaacatcccagctgtatctcaaccaagcgacaacacgtgcttactcgtctatccgaccgtgtaagccccaaatacgctattaacaaagagatcgagaacctgaacgcgtatcgcgagattgtcgggactccagagggcgatatgatgaaggaacaataaaccgctgttatttgactgatgtatctactttgtcgctccttcccaaaataacgtcgacgttatcaatctccaacccattgtagtctcctgaattgccgttagaactacttccgtgctcgttgaaaacgca

SEQ ID NO: 16716 - DNA, 500 bp, Emericella nidulans
acggcgacgagttgccttcggtctacggactgatcggctctggagaataactccttgataggaagtttcttccccgtccgatggggaaggaatgtcgatgacgggatacattctagcagtatttatgattatcttggtagatggacgataatgacattagcctgaaccgacctgtaacatgactggacgtgttctcgtacctgaacctgttcctggacctggtattctggggaaatcctgcagacgcgtcggctgtatgtccggcaaggggtcatccctttgcccaaactttgagtagagggacttggaatgctcgtttcaatctaccgagccgtactcttctggaccctttgctgtgctagacgcgctgctgtctgctggtgtcgactgctttcattcttgcgcgcatttctcacgcaaaatccatggcttcgccagtgtcgcatgccggtgtgcccctgaggcatgctggtaacatgcctccctgaatgcctgggccc

SEQ ID NO: 16717 - DNA, 504 bp, Emericella nidulans
cgcccctcattggacgggtaacggttcttttgaagatcggttcttccaccaattatgctgttttattaacaattcctcccactgtcggctattgggattgcccgagagagagcggtcaattgccgcccccatctttggttgaagttccccacactccatccagaccgcagcaagcgtgaggtcggagaagggtccgaatcttcaaggcgctcgggcgagaagggccgcgagattggggatagtctgccgggacagattagaccgactccgagtctccaactaacactttggcctggctttctcctcttttacacaaccttctctggcattatctctgttcgtttctcataaaattcaatctttggaacgaccaggttgcgaagatgggcaaggtgttcgatgcggccgaaggtatgttctccatatactacaattcagcgcgacagctcttaactctataatagttgcaaagcacaatacaaaagatagttgctgggtgattct

SEQ ID NO: 16718 - DNA, 505 bp, Emericella nidulans
cgaacacaatcggcgacgcaattgaggccctcaaacttggacacgatataaatggctacatcggagaccctgtcacaaatggcggcgaccaaccactctctcctaccggcacaggcaaagggaaagggaaacagccagcatatggcagcatgcggagtgtcagcgggcagtctgtaagcagcagtagaggcaagggcaaagctgccacttctggcgggaagtcatccttgaagagcaagtctgtttctgccgcgaatggcaacgccgactcggactcttcccttgatgggcctttgatgggctcgggcgctcgaggtggtgtcaatagtgatggagatgatgatgatgacgataatgattatatcgtaaggacggatcatttggcaaagacggatgccgacggtgaggatgttgactaagttcagtggttgcactgaaacttccgttgtatatattactcttgttcacgtggatgtataggccgtgttctataatatgtctatat

SEQ ID NO: 16719 - DNA, 505 bp, Emericella nidulans
aagggcgagacaattaacgtcgtcaatacacgaatatgggacccagctgtctatcccaacccgctagaatgggacccctatagatttgtacgtcgtcgcgactcgggcgatcacgcagcacatctcgtttcgcccacaccagatcacatggggttcggactgggaaagcattcatgcccaggccgattctttgcagccacgaaaatcaaaatcatactatgtcatattctgttaaagtatgatgtgaaaatccctgatgaggaaatttctacagtgatttcttcgggaaactttctatttcccgactcaactttgaggatctcagtcaggcgaaggcaagacaacttgactatctgggactaaacacccttccctcatagcagctgtctgtaattggaatgatttgatcatagactttggaatcttgctaagacttattttggaaaggcgtgcagacaatatcagtgtttctctccgagcacaatacatttcataattgcccatt

SEQ ID NO: 16720 - DNA, 508 bp, Emericella nidulans
tggccggtttcttaggaggtgctttagccaagacgtgatgaatgtcctgagcgctcgggagcagcctcttcaaaatctccttctggttgatggcgagagatctgttgcccccatctattcgctacaccctttctactcaatggatacaccaaatgccatggctgccgttcctccggctccgaatccaattccactgaatggtcacccgggtatagaaaatggtcagccgagcataggaaatggccagccgggcgtagggttgtcgtaaccctataactccggtgacctcatactattgcggaatacgccatgaaagagcgtgctgcatagatcagtggagaggttaacgtatatttcggttcgatttagccttcgactttctttctctttccaacttacggccaggattgggtactacctgggttgggagcagattcatgactgtatgataaggtttaaccattgaatatggggtcgataatggatccgggataatcgtccgggcacc

SEQ ID NO: 16721 - DNA, 513 bp, Emericella nidulans
gcgatgacagcactcggcgtatatttgagctacaggcctcaattgtcccgccagcaaaggaccataggaatgtgcaacggcaggcgtcgaagcaacccaataaagtcgaatcctgcaagtcagggtcaatggtaagaaccgaatttgacttggattttacatatgattcaggcagcaataaatcgcacgttctcaatcaggtgcaagtcttgcgaggtctcgagccagatgataaagaggaagaattggctgaagcagatctggggtttgtaaggaagatgcgggtttacaaatcagagccaatgttccataggtgagttgtttgaacggcgtgttccgttttttgagatgctgacacaggtattcctgtcgtctagattccacacgccactacagtacccattactcgatagcttccctagcgacatgatcaccttgtcaatgcccgaaaacaaactgagcattatttccgcactgacgacatccactcgcacagctgaaaagattaaaaac

SEQ ID NO: 16722 - DNA, 513 bp, Emericella nidulans
tggtcttccccaggcgcaaatgctgtcgtctaacaacctggaatccattactattgacgagttcctccaatctgccaacgaatcgacagctatgctggagcaacagttgcaggttagcatgggcatggaacccaaagggctttcacaaggtgtatatgccatgccagatacgcaaaactttgacaaatctataattaatgcggacaccaccttgccaatgaccactgccacaacggagtcgctctggccgacgacgatgttcgaccccaactccacgcctttagatgagagcaacttcttcccaccgccatgggtgcaatgaggacagcaagggccttagaatcttgtttagaaactgcggtttatttgtgcactttaccaccacctccacacagtctgtgacaacactacaagtcttcacgaccctgatgagagatgatgatagatgcctgatttctaccttttgttctttagcccattgcgagtgacattatactaccgtataagaatcaa

SEQ ID NO: 16723 - DNA, 516 bp, Emericella nidulans
tggaaactccggtggacgtgacctccgcccgcgaggctgctcagagcctgtgccaactgtcgggtcagaagtctactggtcaagggcaaaggcggcaatgccgcaaacgtggccggactgggtccgacgacctgctgctacagcaacatgtgcgcagcctcatccgctccgacactctagctgaaggaacagtacttccggatggcaacatggcagagctgcttcggatgtcgcagcctgacaacacttctccctcactcccatcgctgagcgcccttgggttaggtgcgcccttgtctggcccagctggaatgaagcgtgcttgctgcggtagcgaagcaagaaaaattgcactccaccctagcttgcgcgtcgactactgacggactgaggtttctgtcatgaagactctcatttccttatgcccatagcctgtttgaaacgcgtttctttttctgaaaaaaggaaaagttgctattactcctattgctattgcataatttctatttggtgcca

SEQ ID NO: 16724 - DNA, 516 bp, Emericella nidulans
tctgtgccggcgttgtggtcagtaacttatctcttcgaagttttttccgactgtatacgggcatggttttctacacgggaatagccaggaacggtcggaataatcaacagtatagaaggcgtaacgcttaatggttgcatcattacaggccgccggtcctaccacatccagaagtcgacctgcgcaaactgcggttaccccgctgctaagactcgcaagtgtacgaatatccctttcttctcctgttgaatggttatggaatcagcgaaaggtggtatatgattacgggaactctggcttacgatattgcgtggacaacagacaactggagcgagaaggccaagcgacgcaagaccaccggttccggccgtaccgctcacctgcgggacgtccaccgccgcttcaagaacggcttccaggttggcactcccaagggcgcccgtggtcctgagaaccactaaatcaattccgatgttgcgttttcgttccccggggctggagagggctggtatggca

SEQ ID NO: 16725 - DNA, 519 bp, Emericella nidulans
tgcagggtctgagggtgttacccttagaaatacgaaaatgaaagagctccggctgaaaaggatcctaggaattgttggaaacgcccagctttgttccaagatgagccagggtaatctagatctcgaaagtgagactcggtcaatcgcgctggaccaagtggggtcgatcagtcggatggagtcttggacagcacagtggaaaattcagtgacaatctatatacaaccgacttggagcagtagaccgccaggagacgctagctgcgtaagtttccaatactgccgagcagccttgcccttttgaagcgaggaataatggggtaggctaggtgaggcgtctttcctgttcctacaggtatgatttcttttctgaactcctataattaaccccaaactaaagcaagacatgcgacggacgtgtcatcgtcgcactgctggattattctctctgcaggtttcgcttaaccctacgcaatgtaaatttattgtctgatctatttaatcattttgaccccgtcgc

SEQ ID NO: 16726 - DNA, 525 bp, Emericella nidulans
tcactcagctacagagccataccacagagatccaaagcaagcaaccaaacacaaacaacctaatcacaatgtccaaccgcgccgagagattcgctgaagacgattacgagcgtgagaatgacttctccgctcccgtctcaggcgagtatgaggacgactcctacgcccatgaaactggcacgcaggggttctctaaggggatccctgtgcagagcgacgacgcagcctacgacgatcccatgcagccgccgttttcgaacagcaaccagcaacttggtacatccgtttctatctgtcctcatcccgcttaaattggtaaaccgaggctaactggcatgattatgcagagcaagacgaacgcgaggctatagacaagtccaatatcattagcggcaagggcaggtcgcttcgtcactccaaaccccaggctcccagcggatacagtgaggggccggacgaggatgatctgcctgctgaagcgttcaacactggacgttctgatatgaagcggatttcgtgaacgaa

SEQ ID NO: 16727 - DNA, 528 bp, Emericella nidulans
cacatattgctagacaacaagtccgactgactatcgacagtcttgagcttggagctggaggcgggcttgttgggttagcggttgcctctggatgcgaagttggcccacctcaaatatatattaccgaccaagtgccaatgcttccccttatgaaatcgaatatcgcgcttaataacctctcccggaaagtgaaagccgcggtcttagattggggcactaccctttcagacgagatcccccggcgtcccgatgttatcctcgccgctgattgtgtgtattttgagcctgcctttccactcttgatatcgacactgcgcgatcttttgggtcctgattccgtctgctatttctgtttcaagaaacgtagaagggcagaccttcggttcttaaagctagcaaagagagcatttcaggtcaccgagatcgatgatgaccctgaagccggaacatacaagcgcgaaaatatcaacctgtacacaatacgatcaaagcccggtacagggcatcattgtatcgacgggcgcgaca

SEQ ID NO: 16728 - DNA, 529 bp, Emericella nidulans
ttggcggcgctcccaaaatgagctcggagcagaagattgctgccgcagagaccgaagtcgaaatgatcacagacatgttcaaccggttcgtcagaccttaccatgtcaacgtctggcaattatatcgcccgccattcatgttttctccagttaacataattctgtcctagattatcggaatcctgctcgaagaagtgcatccccaacgactaccgcgagggcgatctgaacaagggcgagtccgtctgccttgaccgctgtgtcggcaagttcttcgaggtcaacatcaaggtcagcgaaaagatgcagggtgttgctggtcagcagcagggtggtgcgggactaagcctgtgaagcgtatggattgcctttacgtgtgctgatatagtgtactctactctcggttgtgtaatgaattcttgttttccctcttgtggttgtcagccggtgcttctctgcagttggcttgtccagatttctcgtggtttggccttgaaagcagcagcttgtctggccggtcttgttgcgt

SEQ ID NO: 16729 - DNA, 532 bp, Emericella nidulans
cgtccaccttgcggccctactgcacgatatcagcgacaggaagtatcttccccaagattcagagcaggacgcaaatacaatccccccgcacaaactagtcgagtatatcctcctcaagcatggcgctgatgcgaccctggcccagcgcgtacaaacgattgtttcgcatgtctcgtatacgacggagtgtaaagacccgtcagctataaggcggttgattaaggatgaagggctggttgagctggcgattgtgcaggatgcagatcggctggatcggctgggcgctattgggatcggacggtgctttacgttcttgggtgcgaaaggaagggatatgttaaaggagggtgaggagtgggaaatggagaattcgataaggcattttggcgagaaattggaaagattggagggaatgatgaagacggagacagggaagaagatggctaggtccaggacggagaggctggtggaatttcgaaggtggtgggaggaggagattggggatatttcttctaactgagattgcgtggac

SEQ ID NO: 16730 - DNA, 533 bp, Emericella nidulans
cgccgccctgatctctgtcccgcaagggatctcagctatgctgcttgatgaaacccgtcctgctactggtatgccttctctgcttcagttcctctacctcccaactaacacaggcgacagaaattgaagtctacttcgcccgctgcctcggctttagctcctcgcactcgcaacactcacattcctgctcacgggcaacataccgctaacatcaagcctcgcggacccaatatcaactgaagacccggagtccgagaccgacccgaaggcaccctacgcagtgccaacattgctcgtaacatcagcgttccacgcggcctctgcgttctacgcatacacgcgctacgtgcttaatgcaaagggcgtcttcctcattgcgatggtgggatatgcaacagtggccgccgtgggactttggtgtgttctctttgctagcagccatgggcggattagcaggaggaccggtgctgataagcgcacggctgggtttccatttgggaatagggaggcgaagaagaagcatgctaagggga

SEQ ID NO: 16731 - DNA, 533 bp, Emericella nidulans
ctatcgcttcaatccgttactactggttcataccatcaactagctcaaaatgcctttcactgcctcgtaagttgccgaacccgccctgattttctccgcgcccgaccgcaggtcgccgttatgatgtcgttcgagcttttctcagtttcttcaggcggctgaattttgttgagtcgcaaacctcctttactgaccgatttttgctcctagtgatatttgcaaactcatcttcgccttcattcttccccctcttggagtcttccttgagcgaggatgcggtgctgatttcctcatcaacatctgtttgacgatcttgggttggatccctggtatcatccacgccatgtgggtaacccgcagtgatacttatgagttccccaactaaccattttcatagctacattatattcaaacattagagcgccttgtattgacctttgcacttgcgacgtcaatccatcgcttattaacaccgtttcgcgaaagacgaagcatgacatgcgatactcttttcgtcatttgctgagagcaca

SEQ ID NO: 16732 - DNA, 535 bp, Emericella nidulans
gattcacgaaattcgcggagcataaaaggatacattgtttttgtttgtacatacaccctccgatcacgatttcctagatttatgctttcttcgactacctgcgagcgacggcgccctgcgattcgattcttgcattctccagcgataccttgtttttctactctcggttagggaaaaccaaaatacttatttattggccgcggggttcaggccggcgatgatgtatagaaagcggcgattttgccatttgggggacacggagttgtttttcttggagtattctggcggctttgcgaagttccgcttagtggtttagccatgtttcttccggggtttggcttgggtacaaattttgggtgggacggaatttcatgctttacaaggatctagaaggcggcaacgatatacgtcttgcattggttgggatttgttaaatttgtttcggaaggctcgcgacgtttgatatcttgcatatgtcttgtctggccatttttgtttctgttcgtgtatatggttgggactggtaacacacctt

SEQ ID NO: 16733 - DNA, 540 bp, Emericella nidulans
ccaccggaagacacatcgttcgcgacatctcatgcaggcaatgcaaagaaacggtaggatggaagtacgacaaggcgtacgagagcagcgagaagtacaaagaagggaaattcatcttggaggaggaactcctgtgcgtggtgtgctagggacggtcttaggcgtggccatgctccaagcatatcagcaggcacatcatcagggcaacgggtttcctcctgagcacggctagtacggctatgcttgcggaatggacgttaccaagagcatctttttgacatggcgcggagtgaatggcgttatcagggcgttatcggtcttccggtttggttcagaatgggaattttgccatctatgcagcactacagatttcactgaggcaaggttgaaccccggcggttaaatttggatgtcttatacattttacgcatgcttatcttcatagcttttaggctttgagagtcagatctgttgattccttttgctgtggttttcgtcagatagttaggcagttcatctcaatccattcacttttccaac

SEQ ID NO: 16734 - DNA, 541 bp, Emericella nidulans
gtcaccttaccttgccttctacttccaaggactcgatacattgataccacttgataccttcctctttctcgcacctttatatatactcttctctacacagatttgtcacagtcaaatcttccacttgctctgctctgaaggaccgtcttgttttctcggcagtctcgcccgtggatatcttggacacagttaaagcctcggagattttcccattggatttcaatccgtgccctggataggattttgtttctgtttctttcatttttatctactcccaggcttcttgtctgagcagttcgacacaacaggtagtcccctcgatcatttcttactcccattgttttgtgcttttatttcattgcaacatgcgcgccactccaatggaccaccctgaggaccatcgtcgaccatacatagcaacaattgcctggatctcttgaacatctccttttgcctctacctggatcttcggtgccgcatcgcggttacccagaatcttgatgacaatgatggccatgaccatttgtctgcggcagccgct

SEQ ID NO: 16735 - DNA, 543 bp, Emericella nidulans
agcgcatacacccgttgaacatcgaatatatccatatgggcgcttgtctcggatacatccaggatctgttcaccgaggctctcctgtcccatccgacgctgtcaatcgcgcgcaagacagccatgatcagagcgattagcaagatcatctggattcaaaacgacctcattgcgcgctggcgaatgcgtgatggcgaggagttcgctgatgagatgtctgagtatattatcgacgataaggaagggtacctgggtgacaagaagatccttggcgacagtagcagcagcagccgctcttcttcgcgctcgatggaggatgaccgcgttagcattgcgccttcggttgcctccgcgtgtccttttgctgatttggcgcaaccgataacgcaaaccaagatctgggctgggaaataggcgaccgctctttattaagagaaaggattagacgggtacgggtatgataaagcattgcaggcgtttaacggataaacaagaaaactcatgaaaacgatttccttgggctcgttaatacaacatagtgttt

SEQ ID NO: 16736 - DNA, 543 bp, Emericella nidulans
ctttcgagaggtgcgtcgaaaacatagcaagttgcagcaggtatctcgaactctaatatcgctacagactggtcgctgttggcctgatccctctcactattgctcctttcgctgccggatccctcaaccccgtcacggatgctgtcctctgctcgctccttgttctgcactcgcacgttggattccagtatgtacaccaactcctccattctcctttgcgaagatctaacggctttaaagggcttctattatcgactacttccccacgcgccgtgttcctaagacctccacattgttgaactggctcctgcgcggcttcacccttactacagctgtcggtctgtacgagctcgagacaaacgacgtcggcctgacggagaccatcaagcgggtttggaaggcgtaaacggagcttatatgatttctgtcttttgccaatcttgatttttttatttgtcattttatatcagatttgtttttctatgttaggcgtctgcccttgtatacttgcttcaccggtaggtcaaccaaggatagacctgg

SEQ ID NO: 16737 - DNA, 543 bp, Emericella nidulans; identical to SEQ ID NO: 16736

SEQ ID NO: 16738 - DNA, 546 bp, Emericella nidulans
ccgctccccatatgcatggacatgcgtgcgagtatcttatcaactaccttcgacctggcgcccatgtcctagacattggctctggctctggttatctaacccatgtatttgccaaccttgtcgtggatacgtcatcgagcgatggcccaaaaggacaagtcatcggcgtcgaccacatacaagaactcgtaaacctggcacacgacaatatgatgaagtcagaggatggaagaaaactgctagaaaatggaggcgtgaagtttgtcaaggccgatggccgccgtggatggctagatggcgcgccatatgatgcgatccacgttggcgcagcagcacaagagctacaccctctgctaatcgagcagctgcgagcgcccggacgtatgttcatacccgtcaatgccgaggacgaccaagggaccctgttcagtaccgcattcggcggtgggcagtatatatgggtagtggacaagaagaaagatggcactatacacaaagagaaagtgtttcaagttagctacgtccctctcactgacccaccaaagc

SEQ ID NO: 16739 - DNA, 546 bp, Emericella nidulans
caaaatgttgttgttcagctgtttattcctcaggccaacacgaataacgtctccccatcaacgcaacaacatcgcctagctctatcagtgagatcgaggggagaggaatcgctctgggccattcaattcaaccataatctgacaatatcacacgatatggctcgagtctgcccaaacacgctttcgagtgttattgacgcgaagcgcccagctggtgattgggtgagcgcgtcccttgagcctggcgatgttattgttgttctcccttcttaatgcgggttcattatgagactcgcgactatcacgcattccagcgcgccctgcaacgcgaaaacgctcggaccaccagtctcctagaattcgaggcacaagctcgaattctccgcgcgttctatcactgatgatcgtcttgttccacgttttttctcttttcgttcttcggctttccgaccgttgtctccaagtcctcgacctgtaatcacctaagcgcgctttctgctatcacatgattggccagtgatattgggcttggtgggcatgattcgc

SEQ ID NO: 16740 - DNA, 549 bp, Emericella nidulans
catatcttatcacaaattagcacaatgtcctctctccaaggaaaaggtatgtcctcttcggacaaccagccaaccacctccacccgcggcggtgcaagcgcccatcctacgcccgcaaacaactctggtggcggtgccggatggggtgattccggccttctaaagggtggtcttgaaggagtcgtatgcatacaacacctatcctttaccaagatgaagcactaatgtgtgataatccgcagagcaaccgcctctccagtacctccggcgagtcccacagcggcaagatctccagcttgaatggtgaactgtcttcccttaaggaacagaagatggccggggagcagcggtatcggcaagatattgaggagtccggcgggacggtgcccaaatcgtcggatcatagtgatgcaagcttcatgactgggaagcccggtggcgctgggactttgcctgggtgggagactgcgaagggagcgcttaataggtatgatttattctcaaactactgggttatgaaatgaatgctgacttgtgtagcatgatggg

SEQ ID NO: 16741 - DNA, 552 bp, Emericella nidulans
ccggaaggcagtaccacaaccaaaccagcataacacctctatactaaacaccacatataacatcatgcctcgcggagtcgaatacgctcaggacaaccaagtgtccgacaacaccttcgaagccggtgacacgaaggttcacggcacaaaccccgacaacgaccacatgaaccgcgtcgaccgcacagcgcccatgcctgaggtgaccggctcctcggaaccgtacagtggacagccccattacagtaacctgcatggcagcggcaagggtggacacgagcctaagacactgggcgagaacaagggggtcggtgcccatgggtgtttaaacggttatgaataggattatgaggatttggactagttgggccaggcgcctaacttccaaacacatataatttttttctcgcaccttcctgtcggccgccattgagtggagggctgatattggagtttatgcattatataaatatatgattgaaacgaacttaagaacttctgcatccgaggaaacctgtttcaatccgatttgtaggatatattgacacgaaa

SEQ ID NO: 16742 - DNA, 552 bp, Emericella nidulans
ggtcttcagggaggagacagaccgtattttcggcaaggtcttcctacaagagttcgtcgatgcccgacgacgtgtagcgaccttgcaaaatgcgcctcaagtccttttccgcaacgaccctccgctcgaactggctggcgttcctggtctacaggacgctggtgacggcaagatcagttacatcacatttggtatgagctctctcaacgtctgaaattgtcccgatgactgactggagacagttctcttccctcgtcatttaacaccgcagcgacgtcaagaaaatatctcacacatccagaccttccgcgactatttccactaccacatcaaagcatctaaggtgaaatacctgctcttacataaatagcatcttgctgatggtctgataaaggcatacatccacactcgaatgcgcaagcgaactgccgactttctccagggtacgttttggttcaattttagttgcctgtgtttcaactaaccaaagatagtcctcaaccgagcaagacctgagaacgaggagcgagaaaggaagacggcgagcggacg

SEQ ID NO: 16743 - DNA, 552 bp, Emericella nidulans; identical to SEQ ID NO: 16742

SEQ ID NO: 16744 - DNA, 557 bp, Emericella nidulans
cgaacagcccgccaaattcctctccctgaaggctctacggtctcgtattcatcttaccgcagcgccactaaatctacgcccgcctacgatgacgtggatgtcgaaacccatgtcacgcctgacgactcgattagccaggttggcgactcatctaggcgctcctcgtattcacaccgatctcatcactctcataagtcgcatgtctctaaacggtccagcaaattcgatgaacccgtcagaccgagtgacagcgtcagccaggtatcaagtcatgcttccagacgcaccgtcaaggccagcgggagtgttgcaggcggcggttcaattgctggttcaaagatcagctccagtcggagagcaagtcaggttgcgtagatcgccctttgcccggatttctccgtctagcatcattattttcgcctgattttgccctcttttcacttccatacttataatcactgttattttcaagctcacttgcctatacagctgttgtcccagaacatagaaactttctactctgcatattgcatgtcagaacgcatttgttacttccg

SEQ ID NO: 16745 - DNA, 564 bp, Emericella nidulans
caccggaacttatgcggaaagcatgacatatggccctggaagtgtcatctccacgaaccggcaggttagtaccgccagtactagaaaccttgagtctgttgcggatgtggcggaagaagaggaagaccgagcaatggcgaaagacgaacacgaggaaccggacaaggacgatgaggctcagagctctaaagcagatgagcctgaggatcatgcggccgttcctcaagaagcactcgacgaagaaacgtcgaaaatggtgctgtacggacaccccgccgacagcggactgggttcggagatcacgagtacagcaggctgatcatacggaacccgcaagcggcttcaactcgacttttattgatagttaagcgctactattctggtggtggcttgggtccacctcccaggaggtaatgataccgtggcctttcttttgtactttcctttgtcatatacttacgattggctacccgcccacttcgagcaagagagtctgggctgggatcatggatgcatgtggtattgattattggctagatgtaactgaatgatatcctcctttta

SEQ ID NO: 16746 - DNA, 564 bp, Emericella nidulans
cgacgacacccgcttctcccccattccaaagtccctaatcccctccctctcctgctctctaactctcctaggctcatttgaaccctgcacaagcgctttagactggacattaggcacccacggcatccggatttcattcattcaccgcggccgccgcttcggagctacatatctccccgacgtccccgtcgagcaaggctggacgaaagaagaaaccataaaatccctaatgcacaaggctggctgggatgggtcatcgcatcaagaaagcagctcgcaccggcgatttctgcgcggcagcagcagtaacagtagcaacactcgcagtgggtcttcgaaatcagagccatgggagcaagtctcggattttcggaccgtgaaatatcaaggtctcaaggcttctgccgattatacgcagtggcaggagtggcgggagtgggtactttccttggatgatgggagtgggaagttgttggcttgatcatggcttatcgccgttctgttttgtcatatgttaaccatctcgcgatgtaatggcaagagcatatggcttgttacttttga

SEQ ID NO: 16747 - DNA, 566 bp, Emericella nidulans
gccgcaagcctaccgccatagcaataacctctgatgatctcacaatgttcgaggaggagcgactgcgcaagctggaaccacgaaacagtggtcacgatcccgctcaaaatggcacccgtgtcaactttgaccctagcgacgaactgaagcctctacctggtgacaaagcgaggatagttaggtctcgcgaggagcgtataggcattggtcagcgcagctgaagcatcatttttacctagccgagataaggaatttcctgctagaggtgtgaccgacatggacctagaagaggcatactaccttatttaagagctaattaagaccatctttgcagattttcttgtgtacgaatctccattttatataccgaaatctggccgtgtttgctgcgaaaattagctatatatgctgttttccctcgcacctatcagtgggacataagggtctggctggtacttggctactacggtctattctgttgtcaaatatggcctacatgtaggcaggttcttcttccaaggtggtggccaggttctgtactcaatgaactcatcgctttgaacaag

SEQ ID NO: 16748 - DNA, 566 bp, Emericella nidulans; identical to SEQ ID NO: 16747

SEQ ID NO: 16749 - DNA, 567 bp, Emericella nidulans
aagaactacatcaattctaccgtcttactaccatgcaccctgaattctccgcacatcccccgcaacgcccgactctcaagcgcccggccgctattccgtcggtccggatcagacgctggtatgctccctaaccatccatcgcttgaactctaacgttaatcatatcttaggtccatccccctcctcgccattgcagccggcgcctacggaatcgcccagtacggggcgatgcagtctaactcgccgtaccgggtctccagccaactagccgaggaggagcgtctccgcaagaaccagcagctcatggacgcctacgggtacaaagacaacgtggaggatctgcagaaggccctggaggcatacgaggtccaatgatgcgggctcatcgcgtcgacgaaagcgctttttgatattatgtggcgttggcatcgggttggagttatgtttggttgctgattgaattgaatcgctcggcgtccggagtatttactgtcgtcatcggtttctgcatcgcttcaacagaatgtcggtactatttgatgccttttgttctctttacgactcatg

SEQ ID NO: 16750 - DNA, 569 bp, Emericella nidulans
agcggcgggactgtgtggtcatgtaagctgcctttactgcgcaagagttcatggtactaaaccagctccggttcggtggccgatggtttagtaacccgtttacattggtcggatgctgggcagtctcgatgctgtgctggtcatggtcttgctgaggctgcctaccctgctcattcatgtcatttcacgtcatggactgacaaaaatgttctgcgacacagcattgcaacgaacacacaaaccctagttcaatgccaataccgacaccttccttcacacatcctatccgagctcttgaggtaatcgccatgtccgggcggtcattgtcattggccatgctctacctatccaccttccaactatgttgtgtcatatcatgtcatatcctgtctagaatggttggtgaagctcaagtctgatttcaaatactactgggccgcgtctcgcaccatcgaatttcctactgttagcctattagccggccttttccttcttaggctatatcggggatcttgcattttcagcccacatgcatgtgattttgctgttgggagttactgcgtaactta

SEQ ID NO: 16751 - DNA, 569 bp, Emericella nidulans
gcatttgaggaccgcgcacaatgcttcatcgaccagtactcgaatttcacagtccatggcaaggactctgagcttcacgtcaatggtcgcttgactcttggtgagaacatcgcggatgcagggggattgacagcggcctatcacgcctggaagaagcgcgacgaggcacatgctgaccccattctacctgggctttcatcgttcagcaaagagcaggttttcttcatctcttacgcaaattggtggtgcagcaaaacgacccctgagaaggcccaagaggctatatataatgaccctcatgcgcctaagccagcgagaattattgtaagtcgaatccgtaccctgggcactgcagttgtaatgggactgaccctaggcttgatagggtaccatggcgaattccctagaattcaaagaggcattcaattgccccaacaagcagcctacctgcaagctctggtagctgtggctggatgcaggggcgctgtttgtatattagtactgtaggtgtaccgggatatgtataagcaatgataagtagcacattgtgcgcagtagcattcaactgg

SEQ ID NO: 16752 - DNA, 570 bp, Emericella nidulans
aaggtctgcgaattctctgcgcgagtgagtatttataaacaattctcaggctgcttgggatagggtcgcgactatacactgcccagatgcccgtccctgtcccaacatcgaggactttctgtgcaacgtcaataccgccccagcctcaggacgcggtcgatcactcacctgcgcgtcgtccgggataggcgctagatagagccgtccgcccaggacgaggttgtagacatggtgtcggtttgttcgtcagtcttgcgcagccggcgtggatgggaattactcacccgaaatccagatggtcctgcgccttctcatcattaggtcccctagtgaatttaatttagaaggatctctaatgcgacccggctcctgctcaccagtatgatccagcgcggtaagcatggtagcgtcgcccgttctcgtagcggtaatccacaatactgctccgcagcgaggtcaattccctagcgcagcatcagcgaccgcgtcgatcagggtcgggtcgtataagcacagacgagttataatcatcgctataagcggaatccgtgtcgtcgggatgctgacgtg

SEQ ID NO: 16753 - DNA, 571 bp, Emericella nidulans
ctccttatatccggattgtaaacggccagctaacagccaaaggcatgtgagagtccatcacatggataaaaacaaagacgatccagctcttcgacacgtcctctcccagcgacccgaaggtagcggccgagggcgacggcgtcgaatgaatccccaataacatccacccttaaatgatgcctgctccatcacagcgctgttctattctgctctgttccgttaggagacggctttctccggcattctctggagaataacgcggccattctctgagtggttcaaagcacatgcattacgatatcctgctttatttcctcgactcgacttcgcttctagctttgtttcgactagcgatgcgataccagatgttaattctagaacatttgtgctttgctcggtcattcgttcttgcattcactttgctcccctcggccgtaacggggagctaagacggagcgtggagtgttacctggtttcggtttcggcgtacttgatttgatctttctgatctctcctcgttcgttttgttctcgcttttctcgtctcctttgcatggtattttcacgttgca

SEQ ID NO: 16754 - DNA, 575 bp, Emericella nidulans
tctgtgccggcgttgtggtcagtaacttatctcttcgaagttttttccgactgtatacgggcatggttttctacacgggaatagccaggaacggtcggaataatcaacagtatagaaggcgtaacgcttaatggttgcatcattacaggccgccggtcctaccacatccagaagtcgacctgcgcaaactgcggttaccccgctgctaagactcgcaagtgtacgaatatccctttcttctcctgttgaatggttatggaatcagcgaaaggtggtatatgattacgggaactctggcttacgatattgcgtggacaacagacaactggagcgagaaggccaagcgacgcaagaccaccggttccggccgtaccgctcacctgcgggacgtccaccgccgcttcaagaacggcttccaggttggcactcccaagggcgcccgtggtcctgagaaccactaaatcaattccgatgttgcgttttcgttccccggggctggagagggctggtatggcaaaggagcctcgcatctgaagtacggtttctcatatgcaggggcactcccgcggagttgg

SEQ ID NO: 16755 - DNA, 579 bp, Emericella nidulans
cgcgcagtgggtacgagaagcctacgccgagcagtatgagaaatggatgccatggctggaagaccagtacctgaggtggttcgggaagggggataataaggcttcttacgtcacaaaaggtactcacagaggtctccagctccacgggttttgttcattcatgcgatagctaacactccatttagaaaatctctccaaaaccaagatcaccggcaacgagcaaattaatcgattgcaagacgatgcgaataacctcgtcggcaatcaactcggcgagaatggtttgcttgcacctgttggaaacctggtgtcccaggaaggtattaaccgggcggaacgcgggggaaaggacgagaatggttcttacgggggcccgctggggtttgtgacggatccggttattaaggagggcacaagtgtgggagctagcgtgacggatggtgtgaggggcgtagggaattcaattgggagtgttttgaggggaggaaagtagacaagtgtgatatcgtgaagggtccttggagtggttaaggaagagagaaggtttttgagttcagaatttggacttatggcatgtgt

SEQ ID NO: 16756 - DNA, 580 bp, Emericella nidulans
gcaatccccaccttccgtccaaggggaaacagttgaccgcttcttcactcgcgatgcagagtctatccatccattctgccgcatctggaagtacaatggtagccgatggggcgtaaagaaaatataccaatggtacaagatcatgtcgccacatatagacctagaagtccgctctattggtaggtttgcgttgcgcagccagccgttcaccatatcccttagaacgagatgaatgttaacaatatatttagcatacgataaagacaagctcaaactctacctctctatgcaccaagtattttccatctggatcgttccgtttcacactgcacctgtagcactagtgacggttctggatctcgctacagatccaggtgatgaaagacaagaaagcgcaggcggcaagaagcagtattatatccggaagcaggaggatttctaccaaacgtcagagtttatcaagtttgtggtgccatatggagggcatatgcttgttatgatgtggcatgcatttgccagtctgttttctataatgggcgtcttcttattatggccggtcatgtgggcagaggagaggggg

SEQ ID NO: 16757 - DNA, 581 bp, Emericella nidulans
gagcctgcgcccccttgacctcggtgagggtggttgtatatgtatatgccgcggtgccctttccctgctggctcaactcgaacccagactcgagtcgcgagggacggctgctgtagccggatctgccggtgctctcaaagagtgtgcgaaacaaggggcgcagagttgcaatattgccaaccgtcatgccgatggcattttcggcaaatccccagatcaccacattggctacggcgtataggaactcgtcttgattggtgaggttgactgtgtagttgagccggacgcatgctgaaagtgaggctctgtttcagttagtcgtcggaaatcatgaatctgcagctgagagtacgcacaagataccaaggctcatcagacccatgacggacagcttgctgttacggccgagctggacgttccagagcagggggattggcctatttgaaggttaagtcgtgacaggacagagacaagaattggttggtactgacattagggcagtcacccagtctgtagtaatgttgacagctgtgcaagcatagtaaacatctgccaaaacttgaggaggttggcagcgtcca

SEQ ID NO: 16758 - DNA, 583 bp, Emericella nidulans
tccttggtccgcaaggctcaactctcaaggctctcgagcttttaacaggaacctacattcttgtgcaaggaaacaccgtctccgccatgggaccgtacaaaggtctgaaggaagtccgaagaattgttgacgattgcatggcgaacatccaccccatttaccacatcaaagagctcatgatcaagcgcgaactcgccaaggaccccaccctagcccatgaatcatgggacagattcttgcctaacttcaagaagcgcacactgtccaagcgccgcacgccattcaaggtcaccgacaagtcgaagaaggtctacacccccttcccaccggcgccggagaagagcaaggtggatctgcagatcgagtctggagagtactttttgtccaaggaggccaaggaacgtgcgcagaaggaagaggttatggagaggcagcggataaagcgcgaggaaaagatgaaggagcgggagaaggcgtttgtggcgccggaggagctggaagagacggagaaggccaagaaggaaaagaaagagaaaaagaagaagcggaagagggactcggaggtcgagccggcagtcgatgg

SEQ ID NO: 16759 - DNA, 584 bp, Emericella nidulans
ctgcgccgactggggatgacaagcagaaggttgaggaaccttccaagtccaagctggagacccctgaggtgactaagcccccggctgccgtcacaccaccggaaaaggcccatgcggcacccgttgtcagcgaagccactggggccacctctagcgctgctgataagccggctgcttccaaccagactcaacctgagaagccttcgggactcagcgagagcgcagctgcggcgcgtgctgcgacccagaaatcgcaacaggccaaggctgccgagtcacaatctgctgataaagcgcaatcggatggcgccgcgcagtccgaagagggcaaaaccaccacggagcaaaccgctgctgctcaatcggagacctccaaggccgacaagcgaaagagcggcttctttggttggctcaagcgcaaggttaagggaacctgaggagctacaactatctaattccttttctcgagtattcttattctgttttggtttgttatttcagattgctccatccacccggctcgtcgagtggacggtgtattgggagggtgtttggcgggaactgggaggattcgagccccgcat

SEQ ID NO: 16760 - DNA, 587 bp, Emericella nidulans
ccgacccaccgggtactggaatgaagatcgcccgacgtcaacgggcaaggccaacgggcgagtggaggaacccaggagagtggggtgtgtttgggaaccatgaggcagcaagaacacatcgagccactaagccagaaatctggtagttaccataaaggtacaaggtgcctgaatcgataatatcccatgttttcagggcagacagagcgacagggccagctcctccgttcatgcactggtgatcaactgccgacgctaagcttcgttgaatcacgagtacgttctccataagccgaggctggaggctagcggacagcgaacggaggttgaaccgaagcaatctgggaacgatattgtacaggttggaatctggaccgcacctggcatcatagtggcaaataaggccaatagggaagccccgggattgcccgtgagagaaaaagcacggcgcgtgctgaaggtgtgctttgtttttttttgcccaaaagtcctgtatttccttcgctcgcggttgcacagttgtcacaccagcgatcgctagctcagatgctcaagagcttagacgccatagaagccatcagttcagc

SEQ ID NO: 16761 - DNA, 588 bp, Emericella nidulans
cgttgctcccgccgatgtctggattcctgccggtaacactggtatggaacccggtaagacctctttcttccaggctctcggtgttcccaccaagatcgctcgtggtaccattgaaattaccaccgatctcaagctcgttgaggagggcaacaaggttggtccttccgaggccaccctgctcaacatgctcaacatctcccccttcacctacggtatgaccatccagcaggtctaccaggaaggccagaccttcagcgctgccgttctcgacattgaggaggagcagctcctcaaggtcttcagcagtgccatcaacaccatcaccagcatctcccttgctgtcaactaccccacccttccctccgttatccactccgttgtcaacagctacaagaaggtcttggctgttgctgttgagactgagtacagctggcccgagattgaggagctcaaggaccgtattgccaaccctgaggcctacgcttctgctgctcccgccgccgctgctggtggtgctgctcctgctgctgccgctgaggctgctcctgctgaggaggctgaggagtccgatgaggacatgggcttcgg

SEQ ID NO: 16762 - DNA, 588 bp, Emericella nidulans
tgaaaacgcagacggagggttctacctacgctacatctaccgtaccggcttctcagcagcagacggatccggatacaccgatgtctctttcgtccgacaagaggacggggagctggccgttgttgcagcagcgaagtaggagtagcacgcttatatataacccggaggagcacggcggcagccccaacctccccgctgtcatggtcgaagatacgagcgccgacccggatgatatggacgtggagatgagcccgattgatatgcctgtgaagcaaacgccgccgttcaagactgctcgaccgcctgttgagttgatggtttgattacttacgaccgggttcttgcttcatgtctggtccactgcaattgcattctaagcgtttgacttggagttggctgcttgttgatgtctgtattgttttttattttcgactattgtgattgcatcaggtttctctctttttctcaaacattcattgcgaggcgttcgggtgatagtttatcggcaatctattcatggcgatggcaataatgtgtgcatttacggttctaaaaaccagtactaggcatacgatgcttacttaaata

SEQ ID NO: 16763 - DNA, 589 bp, Emericella nidulans
tcaagtgccccggctgcttcaacatcaccaccgtcttctcccacgcccagaccgtcgttgtgtgctccggctgctctactgtcctctgccagcccaccggtggcaaggcccgtctcaccgagggctgctctttccgccgaaagtaaacgtctcgacaacggagttggagcgacgacgattgcaacgtggcgtttttcgatgatgatggattaatactatttttttgagaaagcacttcagatagaagatggaatcctcgccccttgcgagaaacccttacaacactcatggacaatgagaaaaatgttcctacacgtcacatccaccgttcaataccaaaaagcgttttcttcacagtgaggggagttccggatatctggcacttgatcggtccatactttgtcaacttattgctttgtttccgtcaaaaaccagtttcttctctcctttctgtgttatgcttttatgctgtacatcgttgtcttgacgagtgtaccgggtttcacgcaccaagaggttatgcagcgcgcgtccgcctgagccatgtcaattgaagcgagttcgaatgccagaaggcataggggcgacg

SEQ ID NO: 16764 - DNA, 589 bp, Emericella nidulans
ccttacggagtactgattactgactcggtctcttttagagggtgtgctcgtggccaagaaggacttcaaccttcccaagcatggcgacattgacaccaagaacctctacgtgatcaaggccatgcagtccctcaactcccgcggctacgtcaagacccagttctcctggcagtactactactacaccctcacccccgaggtacgcttaattccagtcgcctgatggaaaggcaacaacgccggtttactaacagtgtcttcagggtcttgactacctccgtgagtggcttcacctccccgctgaggttgtccctgccacccacatcaagcagcagcgttctcacgctccccctcgtggaatgatgggtggtgaagagcgcgagcgccgtccccgtcctcctcgtgagggtggctaccgtcgccgtgaggaaggcaaggagggtgcccccggcgagttcgctcctagcttccgtggcggaattggccgtggccgtggcgctcctgcttcgtaaggtggtgtcgatgtcgcctcccggtcttccgagggtttttatgggtgttgctagtgtggtttgagtaggctatggcc

SEQ ID NO: 16765 - DNA, 590 bp, Emericella nidulans
ttttcctagtcgttcttcacctgcaagcaagttctaggtctaaatctatccacctactgttgcccaaccctgaatctatacatctacacacgcagccgcccatcagcccacacttttcctcttttctcacttcaccacaatcaaaatggcaacggtagagaaacaagaacaaaaagacactcctgttaaagacgagatgcaggactccgagttcgagcaaaaaccctcggcccgcgcccctccccaggatgaagacgatgactattcggacgactactctgatgaccacgacgacgatgactacgaatactcagacgagggggacgattactatgacgacgaagacgaagaggacgaagaccaaggcaaggcagtacaagcctaccagcccaacggccagtcaataagcagtcgggaccaaggaggccagaacgttaggcagaagatcaacaacgggaacatatcgcgggccccggatagcaagaagacgatcgacgaccaagacgggctgaagctaaagctagatgtgaatctagatattgaagttgagttgaaggcgagaatccatggtgacttgacactggcgttgc

SEQ ID NO: 16766 - DNA, 591 bp, Emericella nidulans
gatggtgaagatgctaccaagtccgtttatgtggctaagcttgatgagatccgcttcgttgccggtcccatcatccagcgccaccgcgagaagctcgaggccgagcgccaggctattctgaaggcccaggaagaggaagctgcgaagaagcgtgctgaggaagaggctaagcgcaaggccgaggaggaggccaagaaggccgccgaagaggctaagaaagcagagaaccccgacgctgaaatgaaggacgctcctaaccagggcgaagccgcccccgaaaacgcggatgccgacaagcagtaggcggcccgtcgaataatccacccttctcagtcagtgagacgataatcgccatgaattactcaattttgtcgggttactctattataccttttttctccaatccatgaagctacggcagtaaaacgatactcattttatctgtttcttgatgaacccatttcatacgagatgctgtgtactggatcaagctgcagccacgcatcgtgatgacgagatggacggattagatcgggcatgtggatagactgtcggcgaaaagtttataagctcgctaatactagaggattt

SEQ ID NO: 16767 - DNA, 592 bp, Emericella nidulans
ggataggtgtcactatatttattcgccataacgctggcggcctttatactcgagcacaacctgcctgggtgctggttagtatgactacacactacacctctgttagaacctggccctcgaggtgaagaagtagcaacagaggctgtattccagtggtcctttcaatacctatggtcccaaaatcgtttatggcatgacctcctggcctttccaatcccagcaccgaccgcgaccctcatttgcgtcactccccaacgtgcataggacttctacaagggatgcggctgattcttcgggctgaagcattgctcttccactccagtaattccgggtgaagtctgtctgaacggttcctgggtgcatcgcaatcgccatagctcgctctttgcttcgagactgcagatgaaggtcgaatgtttttgctaattgaaaaactgccgccttgctagcacggtacgagtaccatccaccggaggcgttatcagagatggacccgactcgggctgccatcattgcataggtcgaatgtaggggcagatatcgcagcgtcctgtttaccttggacgactgttgggtgtcttcaaacggcgga

SEQ ID NO: 16768 - DNA, 594 bp, Emericella nidulans
accaagctcgagacttccgacggaattaaagattacaagggctccggtaagctgcagggcaagaaggcactcattaccggcggagagtacgttctctgtacctgttctgtttcgcggttctattgctaacaagtctacggcgctgtacagctccggcattggccgctccgtcgcagccctgtacgccaaagaaggcgctgacataacaatcgtctacctccctgttgaagaagaagacgcgcaagagacaaaaagactcgttgaggccgaaggacgccaatgcctgctgctgagcggggacctccgcgaccgggggttctgcaagcaggccgtcgattcgcacgtacagaaatatggacacatcaacatcctagttaacaatgcctcgcagcaattcagctgtcccgacctggcgcagataaacctcgacaccgtcactgatgtctttcagacaaatatcatccagatgtttgcgatgacgaagttttccctcccgcatatgagcaaaggagatagtatcatcaataatacttcggtcacagcgttcagagggacaggtagcatggtggattatgcatcgaccaagggggcgat

SEQ ID NO: 16769 - DNA, 594 bp, Emericella nidulans
cgaacccaaagcgctctgcaattacaacgaaattcttttcaaaggcatagtctcgacatggatcacattcgttggcttgattgtcccggaaacttacgatcgtattttcgccaaactccaaacgtccgctcaagcggcggccctctcctgcagcggagctggcaacaacacgtgtggcatcaaatggtacaagtcaagctgggacggttcaatcggtatggagcaacagattattgcgactgatgtcctctcgtctgtccttgtttcggaaaagtcaaaccctcctctcaccaccaagaccggtggaaacagtacaagcgacccaaatgccggtacaagtgatagcaagcataatacaggcgaggcgaaacctattaccactggtgatcgcgcgggcgctggcattctgacggtggtttttgttgggctctggggtgctatgattgcgtggatggtcctgggcgagggactgtagcggtcttttgcctttcttgtttgtttcagcctgcctgcacggctttcttgtatattcagtaatcattcggaaggagtattatggatctgtgaatacgtatttgtctggagaattgatat

SEQ ID NO: 16770 - DNA, 596 bp, Emericella nidulans
tcccaacgcgctcgtacccttcacgccacaggattcctggaacgatccagacttctcctactgcacgacggatgcatgcaggaaagcctggggtctgcgcgttatcaactcgtccagcgtgtatgtctacggtgcgggattgtacagtttctttgaaaactacggccaggagtgcttgggtgactcgtgccaggagaatatggtgcaggtagactgctccgacgtgcatatcttcggtctcagcacgattgcatcagaaaatatgatcaccaactccgatgggtcgagtctcgtgccgcaggagggaaacaagagtacgtattgttcaacaattgcgttgtttgagcagacgtcgcaggcgtgagcatgagttacgtttaaagttttgggacgggatagattgtttacttcattttcacctctgtctctatctatctaggtatggtatatagttcgttggaggtttagtcggtcctgtggtctgcgttatctaaatagacgaggcctagggtggactttgttgataccattatatttactatttaccgttcgactgagtctgttcagataatatggcttttgcgataccactgcga

SEQ ID NO: 16771 - DNA, 598 bp, Emericella nidulans
acggcgagctgcctgagcatgccaagatcaacgaaactgacacctacggtcatgagggtttcgaggacaacgtcgagttcgacgaagaccgcgacagcgaagacgagaaggaggtcgatatcgacgaactataaaaccctacccacccctcgatatctttgtattctatactcccacaagagccactgtgttcttcccgccagcttcgacaaactttcggcacttcgtttctatcccggtgcagtgttcaccctccgtcggtgatagatactgtgacgaggaatcgggcttgtggatcctccactgcccaccgtcagaagaccagtgcttttcaagctccagagtatggatcattgatattgggttaccggagcaccattccatggtgatattggatgtcctatttccaagcacatctcatcatggagccgttctccaggttctgcagataaacggacgctacatgtacggtgtcagctgtgctggcatacgtcctgtcaccgattcatttgtctgttctctttctacttactgctacttgctcctttcttttttgttgaaaaagcttggatgatagatttatgaaagggttatgata

SEQ ID NO: 16772 - DNA, 600 bp, Emericella nidulans
ccccactacctgtcgcccaaaggtaaatgcgcgagaagcattgctggaagcgtacataccatgctctccaggaaacacgtcgtcccgcttttcaacatctctgcaatactcaaccgcgccgccgcatatccatcgtcctttgtaaagttcccctgcagaacccagattcgctcacagagccacgagacaagctcgaggtcatccgccgtcccgcgaagcagtgtctgcgccgtgtgcatgtgcgtggataccagcccagggatcacgatccgaccggtgaggtcatatttctcttcatcggggtattgcgcaagcagcgccgctgtcttgccgagcgaggaaatgcgattcgaaccgcgggggacgtaaatggcaccgtcggtaatgattcgccgggttgagtcaagggtcaggattgttgcgtgagtgaagagcattttatctgcataccgctctgcctcttattggagctgttttatttatcgcgtgggtgtggtttctttgcgatgttctgcagattgatgttatatactttgcgagctgggtgaatcgggatgtcggcgacctccgagactgtagataagaatggagagcatttgg

SEQ ID NO: 16773 - DNA, 605 bp, Emericella nidulans
tcgaacgttcaggccactaccatgtcttaccaacaacctccgtacgaccagcaacaatagtacgtctgctcttacgagaagcaattctctgtctgactcttagctaatactgttccagtggctaccctcctcagggaccacctgttagtcgactctctttgttggttgggtattatactgacatgggtctacaagatgcaataccaacaacctcctccacaagtaatcgtccaagaagaaaagaaagatagaggatgtttagctacttggtaggttgatcaattgtttgagaagaaacggaacttacggaatgggctgactacggacagtctggcgacgatattctgctgctggctttgcggggagacgtgcgaatgctgccttgattgtctaacttgctgctgttagctgttctctgtctatttgtatcttgtgcatcttctgaaatcgacgttcttgcgatgtattgattacctatattcatgtttaggacaacgttgcttgacatttacgtgagaaatcaggagcttgagctccttcatgatggaaagcacttggacaagacggaaatatgattcacaatgttttcaactcggactcaattt

SEQ ID NO: 16774 - DNA, 607 bp, Emericella nidulans
gaacagaaatctccagtggaacaaaagggtaaaagcccccttgattttgattttcagtgtgaatacaaaccatgaaagtgtggcctatcgatcctttagtccctcgaaatttgaggctagaggtgccagaaaagttaccacagggataactggcttgtggcagccaagcgttcatagcgacgttgctttttgatccttcgatgtcggctcttcctatcataccgaagcagaattcggtaagcgttggattgttcacccactaatagggaacgtgagctgggtttagaccgtcgtgagacaggttagttttaccctactgatgaaggtcgccgcaacggtaattcaatttagtacgagaggaaccgttgattcagataattggtttttgcggctgtctgaccaggcagtgccgcgacgctaccatctgccggataatggctgaacgcctctaagtcagaatccgtgccggaacgcggcgatgttgccccgcacgtcgtagttggatacgaataggcctccgggccctgtacctcagcaggctggcgacggcccccggggagaagccctcgggagccggctggcggattgcaatgtcacctcgcgcggg

SEQ ID NO: 16775 - DNA, 608 bp, Emericella nidulans
tcgggctcaccaaggtcaaggatgcctgcgagaaaatccagcactacggagcaggaaaggatgaatcgggaaccaacgacgagccagatgagaaggtgtcactggagaagattgaaaaaacgctggcgactgctaagaaggattacaaagaggtagagaatttcttccggcgggaatactatcgtgatgaggagacaccctcgtcccctgaagaatccaaaaaagacgccaaagcataagataccttttttggaggatttggatggacgaggtagaaggaagccgttactactgtcttgttaactggatataccacgagaggggtggcagtggacagcgccacgccacgccctccctcttcccatacacaacgctcgcgtactccatttcaacctgatcaatgaaatcgatattctttcacacaaggtacgacaaaattcgacttggaggacctacactgcagctgtacaggcacgggacagtgcgttcgagtgtttcgctccgttagagtattatatgaacccaaggcgttgccatgatgtttgtggtagatgttaggcctgtgctttatgaacgatgatatatctcatgcacactgccttgtggca

SEQ ID NO: 16776 - DNA, 610 bp, Emericella nidulans
gcttggcacgggttcgcactcgcaaaaccaatggcttggtgcgcgcatctttgtttgaatttggtgagtgcaatcagccgaacaagaacggcggtcatcgtcgcttctggaatgctgcatggttcgtatgagccttggctatccaatagacgatgactgcccgatacgtcaagcgagcacgtggcaagagggatggagatactgttgggaagctggggcatgtgcatgcgaccgttccccttacagattgcaacctcattctttccgtgcaagcagcagtcttccggcaacgaatcactgtttggtgcatttattcgatgcgacagctgaggacggaccggccaatgctattgtgacatatcactgcaagggacgatggggtttactgggcatgccgagtaggacaatcggccccgaggctacggattgccgaattgaaccctaagagctgccgcagtatgatccatgcttgccctgatctctcgtgccgcgcttccccagggccagtcaaccttctcggcggcgtgctctgtcagctaatgctcgtaactcatacttgcataccatccgtgattaattcctgctcttatcgcaaatctacttcagccgt

SEQ ID NO: 16777 - DNA, 612 bp, Emericella nidulans
taaggataagagcaaggatgataagaaagctatgctccttgcaggtgctggcggtcttgctgtgggcgctgtcggaggtgcgctgattgcgaatgcactcggtatgctcaaagaatccaaactatcttatccctatgccctggttataggggcttgaatggctaacaggcccagacgactcggacgatgaaacccgcgcggcggcagcagcagcatcggcgccgccagaggccactgctcctccacctgttggtctccccccagatgagacggcggacggtgactccgtttcctccagcgaccgtgaggaggttctggaggctcgacaggaatatgagcgggcgcagctggcggcacaagactccgatgcatcgagcagtgaggaggaggcgctggaagaggccagggaggagtacgaggagatctatgaggaagtgtacgatgactagccttgtaaacgatgaaatagtggaaagtcctaggtagcagttgttgtagtgtccctggataggacggatagacttggataggataggagaggacaggataggatatagaaatgcatgtacgtatgcgtctagctcagccttaacgactacaaatgtgcactgc

SEQ ID NO: 16778 - DNA, 618 bp, Emericella nidulans
ctatcttcatccacgctccctcccttatcataacagttaagttagtacaaaaagagcctggcgccttggttttcttctcttcttttgtgtaataatgttggtttcggcttcggaacatgttcacagttgaggggtcagaaaaagcaaattgactgtgcggggtattcgaaagcccttggtcacctgaacacctacagcatagggagtactttgcttcgccttgtttccttttgctggagaaaggaagagactgctggcttacggacggctgtctccccatacaatcctgttagctgggctcatgcagggtctgcgtttgtttcgattcggcgcttgcttggtcatgatattattattccctctgccattattcctcttctttgtttatatccacaaaacgttaccttattgcttgcttcgctgttaccatttatcttcgtcttacatatcttgaatgattctttgagacagttttggttggcctcgcgaatttgatgtttgccatgaggcgctgggctgtatttagtacagattgttgatatcctgggggtacttcaatcattatctaccgatttacaggctgccggaaagctagttacggcgaagtgctagcaggcc

SEQ ID NO: 16779 - DNA, 619 bp, Emericella nidulans
tctcgattgattcgcccttccatcttctctcatgtaaagccacgcaagcttacttatacctaccggcgtatacaaaccctggatcggagcctgcaagtccagcaccacagtttgaatgtggatgtgcgggcgctccgcaaatccgccggaatggatctcgcactccgtccagctctgaccgtgatgatccaccggctcacgttactaggagctttactagtggttctggcggtttggcccgacctccagcggcgcatctagcttccgagtcagacggacaagtgaccgaacaggtgccttggccgatgcacctgctccgcgccccatcttttgcaccgcccgcatttgacgaggtgcctcctccgccacccctcatcacacctccgccagagtatactagtatagtcggagacaacgaccgcgaagcagtgctgcaagactacttctcgcgtctctccacctacgaagaacatgtcgacgatgagcgaggctcaggacgagtcgacgtgcccttaacacctggggcgcgcgtcaaccgcagtatggacgttccgagagaatggatccgtctagatcagacggcgtgattccgaaggagtatatacacttgactacgacc

SEQ ID NO: 16780 - DNA, 621 bp, Emericella nidulans
ccggcaggaaatcatcacggtgcaaaacaacttccagcagttcgaagcgcatgtgctgcagaccatccaggctgcaatggaacaactggtcgtatttattactggacagaccgagcgccagaagacactgtacagcgacattctcggtaacctacaaaggatcccagccgaatttgagtgggtaaacttcatgactagaaatgcttcctcgctcgttgacccagatgctccgccacggtcgattgcaaacattaactttcccaaccaggaccaccccgccacgcagccgctaatctcaggaacgctgcaacggaagtctcgcatggcgctcaagggttacagcagcttcttctacgttgccacccgtgcccgatacctgcacgagttcaaagacaatgacgacttcaaccgcgacccgtctcccgagatttccctttatctaccagactgccatattgtctccgtcgatgaagtcaaacataccttcacaatcaagggcaaggacgtttccagcaacgctatcggtaatgcctttcacacaaacaccgagttcgtcttcaaagccggctccgcagccgaggcgaaggaatgggtgaacatcctcagggacgccgcgaaagc

SEQ ID NO: 16781 - DNA, 621 bp, Emericella nidulans
cgcggacgaccacgggtctatcttgctctgggatctgggacccggccgcctcctcaagcgtatgcgcggccacggaaaggggggcatttggtcgcttagttggagtgtagaatctaatgtgcttgtctccggcggcgcagacggcacagttcgagtatgggatgttatgggtcctgcccatgacccgtcgcagggccgcgttgccggagaaggcggcgcaggcacgaagattgacggggcttcctccgctgccgcgaattctacgcagacacctggcaccgttgggccagggatgggcagcggcaagaagaagggcaaggacgttgttgtcacaccggaccagattagtgcgttccccactaagaagagccccgtctacaaggtgaaattcaccaacatgaatttgattattgctggcggcgcttatcttccttgactggcttgcatgtctctgaggctgggtatattgtgtgactatctgacgccagatacccctcctatttttccgctttcgtgatcgttatcttttctcttctttacctcatacctcatacttttctgggatcttattctgcatggactttcagaccaaccggacggcgtcccggctgggttgaatgg

SEQ ID NO: 16782 - DNA, 623 bp, Emericella nidulans
gccaaatcaatctctcctgctgacgaaccaggctacatctatatgttctggatcacaccatcgacatccccaaagtccgccccgccaccatcagatattgcaccgtctcttctcccctcagcacacagagatataaactctgataccgacgaaagtgacgagagccccgagcaaatccagcgtagcaacaccgccatccgcagggcaagggatttaaatacattctcgtcagcttcgtcgcccaacagcccaggaacagtgaagctgaagatcggccgaacgagcaacgtcacccgacgattgaatgagtggtcgaaacaatgctccaaccatctaacattgatccggtactacccgtatacctcgtcatcgcagcggcaggggcggaatggtggtttggaacccggaagaaaagtccccatgtccatcgcgtggagagactcatccatcttgagttggcggatatgcggataccgatctgggaccatgtccagagtgtgggaaggacacagagaatggtttgaagttgctgctgaacgggccgctttgaaaagagtagatgagtgtattcggcggtgggtgcgctgggcacatactcagaaataggtatcttgatagattta

SEQ ID NO: 16783 - DNA, 626 bp, Emericella nidulans
tctccagcccttccagccatatctcgggagccgagtatgatgagataccatggcgattagcgaatgatcaggtaagatgaaggcccattaatacccactgtcaatccccatcgaagctcaagttctttttagggccatcccagcaaacatcaccagttccacgttacgcaaacatctctcaacaactcaggcttttacctgcctgaagatcacaacacagctccacaccactccaggtcatatcacggcccggatttaagtctcgtcgatcatttagcgtcaacaacgttcaaccccgcgtccacgttgttactgggtccggcccctgggtcggatctggagccgcaaaaaagcggatggagtgtcatgtcgcatcagagtacgccgagtgctggagaagatgtaccgcctcgagtaagtgcatgcataccctttctctagagacccaggctcaagccaaggcgatttgacagacgacaaggcggcgagcgcaaaatcgggaagcgcagcggcgatttcgacagaagaaggaagacgcacaaaaagtgcttgaggagagaattagcagcctggacgccaaatgcaaagaggtttcaagcaactggcgcagaaatgcgaggcagccc

SEQ ID NO: 16784 - DNA, 627 bp, Emericella nidulans
agcgcgttcgccgtctcaagcgtaagagaagaaagatgagggctagaaggtgagatttatcgcgagtttaatatgggtacgcattgaatctaatgacaatcccagcaaataaacaactcgcgccatccatctcagtttctcatggtagacttgggttgaacgctgaacacgacaatatgacgacgtcacgatgatgattttcggttatgatcgtttcgtggttcgcctcaaagatacctgtgatctggaacatacatctgctttatacatctacctattcgacatcggaatctgccgttcaacaggacgttcactcccgactctaaaaggaatgtgaatatccacccaatccctcggattcataaaacgatttcgattgttcttcaggtcacatggttattctcttgaggggtcaacgtgcttagtggggttgggaggaatcagtggaaagtgatggattaccttgtcatggaaaatcgctggttcttcttgagtttatcatggggactggtcaattctctctggatcttagaccattagcatccgttagtgcacctgggatttggagtcgtggagaggtcctcgagagtttattgccctcaatacgaaaccaaaaagttcgcaaac

SEQ ID NO: 16785 - DNA, 628 bp, Emericella nidulans
cgggtgggctggatgagatgcaaaagctgcgcaagctatgcgatgagtacggtgcctggctacatgtggatggagcgttcgggatctttggtcgtgttcttccagaaaccccggaattcactgccattaaacaaggatgtgaagggatggagttggcagactccatagcaggagacggccacaaaatgctcaacgtaccctacgactgcggattcttccttactcggcaccgagatgaagccgtgaatgtgttccaaaatgccaacgcagcttatctaaccggaggcactagcgatgctccatcgataccatcacctttgaacatcggacttgaaaactcacgacgattccgcgccctacctgtttacgcttccctgcttgcatacggaagcaggggataccaaactattatcgaggagcaaatccggctagctaggaagatcgccgcatggctgtacgaccacccgaagtacaatgtgctaccggaagtaaatagcaagcacgaattgctggataagacatatatggttgttctgtttagtgccaaagacgataatctgaactgccagcttgcggcaaagattgatgagactcggaagatatatgtctctggcacctcctggcagca

SEQ ID NO: 16786 - DNA, 630 bp, Emericella nidulans
cgttggcggcctcatcctcctagctattctggtctgcctcttcagacgctgcaggaggaccaggtatacaatgaaaccaataccacctgttgccactgcgtacagcccctggccacgccgaatgccgcctcagccgcaacagaccccaatgcgaagactaagtcgatcgccgggatcaggatacggccaggttccgcaagctccctacccgagtccgtacggacactatcctggccccggacctcagcgaggaccagggccgataccatctccttatcctggttattctggcccgggtatgtatgaggatccgccgccagggtatacgccgacggtgcggtatgcgtagatagctttctggagctgaaaggcatagattttttttttgtgtgtttcgaatatagtgttggattgtatatagcataatacgggctgggtttggcgtgcgcgggtatacctcgatcctggagtatgatggaggttcactgcatttacttttcttgccacttcttgggtacttctgcatactgtctttggtcatagttggaggttttggatcatactccgcatatatcatctaattcctcccctttccttcttagataatgaaatacgacggcctttgttact

SEQ ID NO: 16787 - DNA, 632 bp, Emericella nidulans
ttccgccttcccccattggtccacgtcgtgccggctgctgttcggacgctataatatactaactgaacatcaagcattctcgcttagctcgcggtaactgaggctgagcaagtcgtgcgcctttgaaactcgcaagttgccgccttacagtccgacggtgaggcgttgtgacccggggcccttctgcgtgacggcccccaatccgctgagttgtgtgtttcaccatcatcaggaaatcatgtcccgggtctcggcaccagtcccgtggacagtctcatgatttccagctcaaggctgtcaccccgtccgctccgactcgtcaagtatggctgctgttgacgtgggatgggaagcaggtagcaaccatagcggtggtatgctgcggaattcttggcgcttggcagccaccgtatgctggagggtacgtacgtggtggtttccagttggcactgttaaggttgttcgcatacattttccatgacaatacgagctcggatctgttaagcctacttgtccagcctcagtgttaaagcgatcagcgtggcgtaagcggcgatactcagggccgtcaggataactaccgcattcccgctggttctgaacttatgtcgatgtactccgtcgtctcctac

SEQ ID NO: 16788 - DNA, 632 bp, Emericella nidulans
tgcaacaactatcagtcattatgttctcaagaacagcaatctccttcgtatgttcggcgcagtcgttgtattcaaatgtggtactaatccgtgttagacgctccgacggtctctgtttcggccacaactctcccctcagtttccaaaccagcttccatctgtgctccaagcccgtctactttcaacagagaccaaagcagcaattgataaagctgttgcatcggctccggtggttcttttcatgaagggcactccggaaactccgcagtgcgggttctctcgcgcaagcatccagattttgggtttacaaggtgttgatcccaagaaattcgtagcgtttaacgtgctagaggatccggagctgcgtcaaggtatgtctgtcatcttgaatgttctgcataactttggcttagtcgtgcttttctacaggtatcaaggagtactcggactggcctacgattccacaattatacctgaacaaggagtttattggtgggtgtgatattctgatgtcaatgcatcagaatggcgaactttcgaagctcttagaagagaagggtgtcctagttgctgaatagattgaggttatgaaatgccctgtattttaagtttcgtgtgctgttaatgtatat

SEQ ID NO: 16789 - DNA, 632 bp, Emericella nidulans
gacgggctgcgcgaggtatctttccatctcgttgacatgcgcacttccaaaaagatcgcccacattgtccccgagatcttatcaccccaggaagcgattgaggaggaggccaaggggggctggatcccgccttcttcaatgtggattaatgatgtgtccacatacaagaacatgcaagacgtcgccgagtaagctaaacccctgcacccaaagaacgccttgaggaaagttgaactgacatcatgtagtgtcattgtagctacaggtttagtcgtgctcgttgatgattgtatccgtagtcgatggcctcatgggacaagcacgccacgccaccaacacctcggcaccgaccaggcacaggcagtctgacgtgtaagtatatcggactgtcccgtgctcggcttaacgacttttcttgtcacgttcatgtacacgagactgtattacctttttttgaccctcatgacgatctgagcgctggcttcacacgctatggttgggctatatcgttcacacattatagttggtccatgtatgcctgaatgaatgggcacaacatgtatatgaatctaggtgttggcggcatcaggcagggactcgagagatgaaaatagaatctggctgtatatttg

SEQ ID NO: 16790 - DNA, 634 bp, Emericella nidulans
ttcacaagtctccagcccttccagccatatctcgggagccgagtatgatgagataccatggcgattagcgaatgatcaggtaagatgaaggcccattaatacccactgtcaatccccatcgaagctcaagttctttttagggccatcccagcaaacatcaccagttccacgttacgcaaacatctctcaacaactcaggcttttacctgcctgaagatcacaacacagctccacaccactccaggtcatatcacggcccggatttaagtctcgtcgatcatttagcgtcaacaacgttcaaccccgcgtccacgttgttactgggtccggcccctgggtcggatctggagccgcaaaaaagcggatggagtgtcatgtcgcatcagagtacgccgagtgctggagaagatgtaccgcctcgagtaagtgcatgcataccctttctctagagacccaggctcaagccaaggcgatttgacagacgacaaggcggcgagcgcaaaatcgggaagcgcagcggcgatttcgacagaagaaggaagacgcacaaaaagtgcttgaggagagaattagcagcctggacgccaaatgcaaagaggtttcaagcaactggcgcagaaatgcgaggcagccc

SEQ ID NO: 16791 - DNA, 643 bp, Emericella nidulans
tgggctggagccatgaacgatcccaaggtccaaagtctgatcaatgaaggggtgcttttccggctagatccagacctgaaactgagtcgtatggttgagcagttgacgataccaaacggtattggctggaactccgccaacgatacgatgtatctgacagattccccaacggggaagatcttcgctttcgactttgacgagagcactggagagatcagtaacaggagagtccatttcgacactggagagccaaaagaacctgacgggttcgccatcgacagtgaaggatgtatctggagtgcaatctacggcgggggtaaggtgatccgcatcgatacccaaggcaaagttattggcgagatctcacttcccacccgaaacatcacctgtccggcttttgtggggacagaactattcatcaccacggccaaggacgacaaaaatgacgacaagttcccggagtcgattcggtatggagggcatctctacaaagttgatgtgggagtccgaggacaaccaagacatgagtttcgcttcagtcaatgaccattactcatgtgaggataagccggagtgaatcatattgttgggggttaatgattggaaatcattattgctgaaaacggtgctttggatcccgagg

SEQ ID NO: 16792 - DNA, 644 bp, Emericella nidulans
ggtcaacgtcatagatgggcaggtcagtatcgtagtctctttaatgctgtctcattttgaacaagctgagcaattctggcgaaaacacccgagcggcaccatctttctccgtcccaacgcaccattaattccgcactagctttgcttgcctggccagtgtgcggctcttgccgtgggttgacagataattgcggcccccaatttccagcgaccttccttgagctgtcatatcacctgccaatacgtataccgcaacgagacatcgccagcaccatgagccatacagtccagaatatcatcagcgaggatgaaacaagctacatccgccaggaaaaactcgaggaccggctgtacgtgttattcgggtatcctatcaaagtccaggtaagaaaagatgaccaccagcattgacctagcactgccacactgattttgccccgttccgctcatgcctttttatctcaaagcatataaatggtcgatacgtctttgaggctccgagaaaggtggatatggtaagctacagaccgcatggtatcctgctttggtatagactcgctgatccttggtgccctgccccggggatacaggatgagatagcgtacgttactgcgccttgtttgatgtcacccttccgcttcggc

SEQ ID NO: 16793 - DNA, 648 bp, Emericella nidulans
cgctgagactatatatctgggcagacgttcaatgctttggagtgtttttcagagcgcattgcgctcggcatttattccctgctggtattttctcagttaacctttaattgtcaccgccagcgctcttagctagccttcgccaaaacgcgtcgcgtcagcagctctggcaaccttcgtcctcactttctgtctcgtatcccttcttcgtggtcgatttacctcttcccttgcttccattcatcattcctatcagtgttttctgctttcccccactcttggccttcttcttttcctcagtttcttgtttccgtagatactgctccatgtgcttctcccgcgtctctcggccctcttcagagagctcggcttcaagcgcacggaactcatcactttcgggatccatgccaatcaaagactcaaggagggcgatttcgcgagcccagatagagtaatctgggactgccttggccgcagcgggtttcttctgttgttttttcttggtctttggcttgatttcgtcatcactggctcctgactcaacatcttcctccgctgcttcttgttttgccctatttgtagcggcagctggtattcgatcgattggcgtttcgagaatcattggtaatccctcaaagcgaggctcgttca

SEQ ID NO: 16794 - DNA, 648 bp, Emericella nidulans
tggggtccactttacaaagccattcacaagatccatcatcaatattcagctccattcggcatggccgctgaatatgcgtcacctatagaggttatgattctgggatttggtactgttggatgcccaattgtatggtgcgctgcgactggggatctgcatatctttacgatgtatgtttggattgtgcttcggttgttccaggccattgatgcacacagtgggtatgagttcccatggagtctacaccactttcttcctttttgggctggagcagatcatcacgaccttcaccacgagaagttcgttggcaactactccagcagtttcaggtggtgggattatgttttggacacagagtacagtcccgaggcgatcaggcggaggcgggatcacaaggcggtcggcggtgcgaagaaaaccgaataacgctatcgtacttgaggtctcgtgggtaatttttatttctgcactgctgtgatacttagaatggcattaatatgagcattgtcactccccttgccaggagtacttccccagacatgctcatttgggaccggggcataccccgtcatatcgatagcccgacggctcatcgtataatacttggctgatgagatagattttaatgataaacaaggtgccaaactt

SEQ ID NO: 16795 - DNA, 650 bp, Emericella nidulans
atgatgatctccaatcaaagggccaaaggtaatgacatctgctatctgtatcggatgttataccactgagctactgagtctggcggtgcacctacctgaaaaggcgtgagtccaatagcgggaagtgcggcactgagatctaacagagggccgtcagacgaaagttcaagctcaagctcaatctgcgagaacagtcgtttgactaagaactcaatgctgctattggtgaagaacccaatcgactcgtccaactcgaaatcgaaatcgacatcgaaatcggactcgttttcctcagtctctcccacattgaactgcccttgggagagttggatatcaccctgcagcgtgcatgtcttgcacttcacaacgacgggcagatatggtctgcacaatcagctttctgggaatcgttaataccctggcacttacataaattcatcggcgagtggattatcttcagatcggtgtggtgtataccaaaggatttagttctggatgaatcaagcgtgccgacctctgaagggcctggtggaaaggattgaggagctaatggagcgtctggccgtctaactcgcgtcggtccgcctttttgaatctctgaagaggccttgtgtgagaaagacactctcgttgccgataatgctcatgcc

SEQ ID NO: 16796 - DNA, 653 bp, Emericella nidulans
gccgtgtacctcgcctacacctacggaataatgtacctcgtcctctccacgttcccgagcctatggactggcgaacaatactataatgaatccatcggcatcggcggcctaaactatatctccctcggaattggcttctggctgggctctcagatctgtgctccactcaacgaccgcatttaccgcagcctgaaagcccgcaacaacggcgttggcaaacccgagtttcgcgtcccactcctctgcgtcccggccttcctcacccctgccggcctcttcatctacggctggacaggtcagtaccaaacacactggatagcgccgaacattggcgcggcgattttcggcatgggaacgatcgtcaccttccaatgcgcgcaaacatacatgatcgactcgtatacgagattcgcggcgagcgcgttggcagcgagtgcgtttttgcggtcaatttgcggcttcgcgtttccgcttttcgcaccgtatatgtatgacgcgttgcattatggatgggggaatagtttgctaggcttcatcagcttgggtttgggaatcccggcgccagtatttctttggaagtttggggcgttgctgaggaagaagagtacatatgcggcgggttgacacacacaatacttatcagagtatctatt

SEQ ID NO: 16797 - DNA, 654 bp, Emericella nidulans
cgtacggcgtatacccgatcgaaaaagattcggctattgctattttactggtcgcgaaccgttactctcccaacaacttctggtaagtcagcattagggagacagaagctttcggctcagcctctgacattttgaatgttggctcccaggaacggccggtaccgctctatctaccagttccctgtgggtgactccaccacgataacgggcaagatccacgtcgacgtgcattactatgaagacggaaacgtcgccctgaacacaactaagccgctgaacatttctgtaccgaacgccagcgccgagagcattatttcgcgcattgcgtctgccgagcgtaactaccaggaagagctcaacaaggcctttggtcagatggcggagggtgccttcaaatccctgcgaagacagcttcccatcacgaggcagaaggtcgagtgggagaaggttggtgggtaccggcttggacaggatatctctggtggaaaggggcggtaggctggacctcagtggtttttctctgtgatcactcttgatctattgcaacgaaaacctccttctcgccagccaatacatcactcgcttgaggacttgtcatcttacgggctgtgattgactacatcgaagctgataaatgcatattatatcagccat

SEQ ID NO: 16798 - DNA, 655 bp, Emericella nidulans
cgcttcgttttgctacgactgacgtcactccagaaagttctcgctgagaagatggcaatgtcactcgcaaactcagtcagttccctccactcctcactcggtctagtcgacgattccatcgctatcctcgactctggcgtcagcgacttcccacgcatttccaaagtcctgcaaacaacaagggtaagaatataccgcagtcacgaataagagcttccatgctgacgtttgttaataagcacttcgagcttctccccgaaccaaccatccgtgaagcccaaaaggccctcttagacgaaatcaccccaagcatcgcacacttgctctccctcgcctcaaaccacgttgaaaagctttctcgtcgcgaacaaggtctccgtgcgaaatgtgaactgcaggagggaagacttaactccgagagccgcaaaacctcgacacgcggacagagacatacagccagtggagaggctggttccgcagcgaaagcgctcgagttgagaagattggttcagaagaaagagcggcttaagtatgccgttgaacgtctggagctgcaaagtacgcagagagaacggcagttgaggaagagtatggctttttattaattgaatcgatgcgattcatgcaagttgagaaaactggcatgattctctca

SEQ ID NO: 16799 - DNA, 657 bp, Emericella nidulans
aatgatatgtatataacgcactcgagcttattgtaaagacagccggaagtcgcagaccatccggcccagcgtccgtttgcgcgtgcccaagaaagcgagcttcagttgtcataggacagaatctaattgatacgaagtagatgagaatgatgacgaggacaacgaagatgagatgagaacatgtctgtctgggaaccctgtctgggaaccgttcgagcagcttccaactagcaggaacgaaacagcacacaggcagaacttatgctaagctgtctaaggctaagagatgtcgagtggtagtattgagtttcgagaagggacaaggttgttacatggtcagaattggccagtctatggaacttgacgggtatagtgacacgtttggtcaaggcttgatgacagaagtcccacatttcattcatgcacccaaatatatgagccgtttgttgcggtactggttcaagatattccagtacatggtttcgtagagtgtcaaagaacaagggtggtgattttatagttcagagactggccagcggtcgcattgtgactgacgagaatccaatcgatcgcgtttcctcagagggaaatcaccctacaaagactacttaagctactgatcactgcatattcgatcatggacacaaagcggatgga

SEQ ID NO: 16800 - DNA, 660 bp, Emericella nidulans
tctgtgccggcgttgtggtcagtaacttatctcttcgaagttttttccgactgtatacgggcatggttttctacacgggaatagccaggaacggtcggaataatcaacagtatagaaggcgtaacgcttaatggttgcatcattacaggccgccggtcctaccacatccagaagtcgacctgcgcaaactgcggttaccccgctgctaagactcgcaagtgtacgaatatccctttcttctcctgttgaatggttatggaatcagcgaaaggtggtatatgattacgggaactctggcttacgatattgcgtggacaacagacaactggagcgagaaggccaagcgacgcaagaccaccggttccggccgtaccgctcacctgcgggacgtccaccgccgcttcaagaacggcttccaggttggcactcccaagggcgcccgtggtcctgagaaccactaaatcaattccgatgttgcgttttcgttccccggggctggagagggctggtatggcaaaggagcctcgcatctgaagtacggtttctcatatgcaggggcactcccgcggagttggagttgggacgggtcttcacttatgccgtcagagcactttttattttagagagaaagggcaaataaatgacggtatttggaagaca

SEQ ID NO: 16801 - DNA, 661 bp, Emericella nidulans
agtcaaagcaaactatcgacactctcatcctttgaaccccccaaatccttacaatcgcaatgggtggaggcggaaagatcccgtatgttgtctataccattttccaaccttcgctatgttccgggcttaccgatttgcttttaggtaccccaaggaagtctggtctcccgccggaggctggtacgctcggcccgcgaactggaaggccaataccgctattatcggcgcggcgatgcttggaatagtcgctgcagtctggagcatcagtgcagaacgcgaataccgggacaggatgccagagccgggcaggttcttcccaagtcgatagtcagtcatccttgcaatgctgcccaccgagtcgggaactatcttatactaacacactttcaatatgcgcagctggagcaagcagattatcgaacacgagaggcaacaggccgccaaaaacgaatcataagaacgtgcgggaagactaagaaaaccgcagggaaagctatggtatggcaaggtctatgttctataattatgcgggctgtacgacaatagaaaggcgttatcaataggtcagttgatctgcaggtgattttgaggagattcttcgagtgtccgacaaaatttgtgggtgtaaaggcggactcgttccgtaaattcaataccgttc

SEQ ID NO: 16802 - DNA, 662 bp, Emericella nidulans
gcagacttggtttttaggtagaatcaagagcaccatggtgcagacggcccagcgctccgtaatcctactgcctagcttggaaacgacgagatcagcacgattccagtacgccacacaggagatctgcgaaaatggccatgatatcgccaccgactcatgaggtgccacaatatgtggcggtgcggttcagacgccctgcaacacccttttggcgttaaagttttgacgggttgctctgcagggtcatgatagctccgagcaagctcaggagctatcatctgtttccgaaccaggacaggctcttcgggatttgtcatttgtggcgaaagtactggttgaatgacggaagtggcctttaagggcgagactcggtaagcattgtctcgactttgagattttctgttaggcgtcgcgaaggctgttcgatgactgcgtctcctatgcactgtacgacggtgcacgacgttgacagcagctatttttactgcggatttctctgctatctcgaatcaagcacagacaatcaagctttactctgcagtcattcaaattgctttggaggtgcagcttggagcctggacttagggaaagctcctactctgtccgcaacacttgcacaacagcgacttgagtatgcattgagaaaaagcgtcagcaatatg

SEQ ID NO: 16803 - DNA, 663 bp, Emericella nidulans
tcgcccaggaggtcgtcgaactcctcaaggcaaggagagagaccgtctcagttgccgagacggtgcgtacctaccccatgtctgcggagcgaacatagttctgatctctccaggcggccgggggcctgatatcggcatgtcttctctctgttccaggggcatcggccgtctataaaggcgggctgactgtatgatactcaaccgaccctctaatcgctagttgacgcgtccatactaaacctgcggaggtctacaccctggaatcacgccttgcatttgccggctggacgcaagcagaccgagacaagtacacgggtcccacgactgagatagtcggccagatggctggccatactcgtcgcactttggaatccacttatgcagtaagcgagagcggcacggctggaccgacgggagggactacgaggaaccggactccgtaagtacagattgctctaagaactagcagtttactaaggtacaagtggctatgtggcggtggccgtgtcgacggcgaatggggaccagacgcgggaggttgagacggggagcagtgatcgggcgcagaacatggtggcgttcgcaagagagtcgttgcagttgctgaaggaggtgatatcacagtctgtaacgcctgtcctctaggattcatagtgtccaagt

SEQ ID NO: 16804 - DNA, 664 bp, Emericella nidulans
gcccatctacgaagatgagagccaagtggagaaagaagcgcgttcgccgtctcaagcgtaagagaagaaagatgagggctagaaggtgagatttatcgcgagtttaatatgggtacgcattgaatctaatgacaatcccagcaaataaacaactcgcgccatccatctcagtttctcatggtagacttgggttgaacgctgaacacgacaatatgacgacgtcacgatgatgattttcggttatgatcgtttcgtggttcgcctcaaagatacctgtgatctggaacatacatctgctttatacatctacctattcgacatcggaatctgccgttcaacaggacgttcactcccgactctaaaaggaatgtgaatatccacccaatccctcggattcataaaacgatttcgattgttcttcaggtcacatggttattctcttgaggggtcaacgtgcttagtggggttgggaggaatcagtggaaagtgatggattaccttgtcatggaaaatcgctggttcttcttgagtttatcatggggactggtcaattctctctggatcttagaccattagcatccgttagtgcacctgggatttggagtcgtggagaggtcctcgagagtttattgccctcaatacgaaaccaaaaagttcgcaaacg

SEQ ID NO: 16805 - DNA, 665 bp, Emericella nidulans
atccacgccgaccctgatggaaagcatatgcgcctgaacgctaatggcgttatcaagtatgtctccgcttgaacttgacgaagtcgctgataatacggtgtttaattctttaattcccttcgcagaacccaggatgacgccgtaagtcacccaccggatccagagaaactagtcaaatgaagacctgacgtgaactaactgccgtcctgccatcagctcatctacgtgaactacactggcgtcgttacacttgctgaagcagagcagaaagtcctctccggaacagcggaggagggaagcacgccatttgggaattcttgtgggtgcaccatgacttcctttaacaaggataatgctaatcatatgatccgtacagtcacgcaccttactgtcgaggtgagaaaatagtctacctttccaggaaagtatcaacggaccctaactaatgttccgcgatagaccggccacgaacgctacaaggacctcgagaaccgtgtctttgtcggcaagggccgcttcaatgtgcagaagggaaagccggttgtggtcgagtaccgggttgctcaagttgtgcatgcttaattgagtacttttgaggttgagctcgataggcactgtactgagcagggatacctgacaaagtaaagaatggcatgaaatgagct

SEQ ID NO: 16806 - DNA, 666 bp, Emericella nidulans
ctgcttgatcgtcggcgagaatatcacaaaataaacatggcaactcaaagggcatgtttggctgtcagatttattgctacaagcttatacttacgactgttgtcgctgacttttctcagattgcgttcaaagtccatggcaccgttcagggtacgtcttcagttctaactagtttcattcttagccagctatgtttaacaagtacctctacaggtgtgggtttccggtaggcacagtttctacaggtcaacattagacatttctgatcatgtcgttacaccagtgatttcaccatgaagcgtgctgcggaatacggtctcagcggctgggtgaagaacactgattgcggaagggtacgtttgtagtccctattaatgctaacaatcttgcaatgtcttgcatcgctcgtcagagtcactaaatgcatatgaaggtcgaaggcgaagcacaaggctcagaagagggtatccaaaaatttctcaaggatatcaataatggccctcgacttgcacatgtagtcaagctggagaagaagacactcgatccgaaagacggagagagtcattttgggcttaggaagacatcggcgactgtttttgattcactttgatggtcgactatacagtgtatactctggttcaagcagaataaagtccatccgctcgg

SEQ ID NO: 16807 - DNA, 667 bp, Emericella nidulans
caatcgtacttgacctacatcactaatacctgtcactgaataatcggttctgttcttcaagtaaagcatcgagatggcttatctcttctacttccttgcattcctcgttgttatttgcggcactggtacgtaacctgagacacgctcatcacaaatctaatggttacagctctttatctcactcgttcgcgatggctaccacttcttcccgtccctgactatatatacgatcgtctaccagccagtttcaccgacgacatagcggcgggactcacgtcgtctgaatttgacctctcaacgaatattgagcatggggatcaacgggccggattggatgccttcggcaagcgcgaagttctgaatatcatgagacgccaaaaggttgattttaatgaagctcgacggatttatacagagcagcggtttgccaagaacaatattggccctgacggccggcccagagatccgaaattcgtatcattttcgtgagaagctctgttacctattctttttcgtttccatctctctcgcgttcaagctatttttgcgcagtcttcaggatcctaatactgcccactcagtgattgtatgtatctccacttctagccggtcaataatcccccccgctaatgcagtacctccatataataaatacagataagaggct

SEQ ID NO: 16808 - DNA, 668 bp, Emericella nidulans
gcttggtcgcgaaggcgagaagacgaatttcttcgtgtttgtgctacacgtatgtccctaccatgatttgtgttgtgaggatgccaacagcttgaacagaacaaaaacaagtcgaagaaggccaactgcccactgacatgatggagtccggccggtaccacgccgctgtcaccactgatgacgtttggatttgctacccatgggaggcgaagtatgatcaaagccttttcatttagaaccagttacttatcagtttatagggatattgatgaacacgacgcactcgcgaaggcaaaccccctagtctaaggttcagtcagcgaaaacctcaatctttcgcatctgttatgatctcgaaatgcgctccctccgccggttactagaatcgtcccccctctgcttcgaggagccaacgatctcaggcgtcttttacgaatgggttttatagataaaagcaatcacttcagcatatcttcataagaggatctatctacctgcagggaatagaccatttttttgcgtggtcgctttttggaacattcacttttttatgagttctcacgcccaggcacgatcccacaaaaacaatctcactctgcgatctacacatacctggcatacgcattttatgatactgtatgcagccaaaatgcaaacagaccgtatca

SEQ ID NO: 16809 - DNA, 669 bp, Emericella nidulans
ctgatacaatcgcatacattggaaattcgttctgttaactgtagcttgtcgttgcatagctcgcatctgggtatgtttactcgtcgcccccagcgtcggcctcgaattgattatacccggcgttatatacgattctaacgctgttgaacgctcagtgtccaggttcaggatgaatgcattaccgcattcaacaacctccgcatgaccggtggtcagaagggatctaagcccaaattcattatcttcaagatctcggacgacaagaaacaggttgttgttgatgagacctccgacgaccctgattacgagactttcctcaacaaactcggtgacgccaaggatgccaacggcaagcccgctccccgctatgctgtctacgatgtcgaatatgacttgggtggtggtgaaggcacaaggtattatcactagtaccccgagctggacaatgtgcctgactgacaacctttgtttctgcaggagcaagatcattttcatctcttgggtgccttccggaacctctatcaacgtatgtttttgttactaaactctgattattatcatataggctgctcacaaagaacaacagtggtccatgatctacgccagcactcgagaggttttgaagaacgctctcaacgtcgttacatccatccacgccgacgacaaggg

SEQ ID NO: 16810 - DNA, 669 bp, Emericella nidulans
gcgcggaaagaccaggaaggagacctactcttcttacatctacaagggtgagttcgtccgaatcagtcaatgatattgacgtgttttaactcgcaacagtcctcaagcaagtgcacccggacactggtatctccacccgtgctatgtctattctgaactctttcgtcaatggtatgtaaactatttgctcttacgcgcggttatgaagctaacttggctgaagatatctttgagcgcgttgcgacggaggcgtccaagctcgctgcttataacaagaagtccaccatatcatctcgagaaatccagacctcgtgagtattgcattttattttaagagtgatattctaacttgactagtgtgaggctgattctgcccggagaactcgccaagcacgctgtgtctgagggcaccaaggccgttacgaagtattcctcatctgccaaataggcttttctcggcatcttttctttttttaattgcacggatatgttctttgtttcgttactcgtcatcttgaacggttttgaggcggcgggttaaagggtgttcgcgggatttctaacgtgtcatgggatggtcttttttttcctatttgttctatttcccctcgggtcaaatgtcgtctttcaacgccttcagttttatggaaacatggatgtggtgtaaca

SEQ ID NO: 16811 - DNA, 670 bp, Emericella nidulans
gagaaactaaaagtctcatccccgctgagactatatatctgggcagacgttcaatgctttggagtgtttttcagagcgcattgcgctcggcatttattccctgctggtattttctcagttaacctttaattgtcaccgccagcgctcttagctagccttcgccaaaacgcgtcgcgtcagcagctctggcaaccttcgtcctcactttctgtctcgtatcccttcttcgtggtcgatttacctcttcccttgcttccattcatcattcctatcagtgttttctgctttcccccactcttggccttcttcttttcctcagtttcttgtttccgtagatactgctccatgtgcttctcccgcgtctctcggccctcttcagagagctcggcttcaagcgcacggaactcatcactttcgggatccatgccaatcaaagactcaaggagggcgatttcgcgagcccagatagagtaatctgggactgccttggccgcagcgggtttcttctgttgttttttcttggtctttggcttgatttcgtcatcactggctcctgactcaacatcttcctccgctgcttcttgttttgccctatttgtagcggcagctggtattcgatcgattggcgtttcgagaatcattggtaatccctcaaagcgaggctcgttca

SEQ ID NO: 16812 - DNA, 670 bp, Emericella nidulans
cttcctaagctttctcggaacatactcggataccaacgaacgcgcggaacaacgtgcgcaatcataattcaacagtcaacatggctggttcagcttctatgctatgcctgatcattcttaccattttcagtgtgtatcgtccattcttcaaggcaattggtcttccgatgagtatactgacgaggcccaatagtaccacctctaggcgtcttcctaatttcaggctgcagcgtcgactttcttatcaatatcatgctcacgatactagggttcgctgtcctttccccttcaataggatctcaggttaacagctcctgtgcagctatctccccggccacatccacgccttttacctggaatatgtgtactataaaaatcgcgaggccgtcatggccgatctagcgccaggtgtctactccgatcggatccagcgaggggggcggcataattacgggaccatttcttgaatatgcttcattggttgggacctttttctggatctgagtgtgctcttagctgctagcttcgtgtatttacacccatcgacagtgttcacaggttgttttcggggtataataggacatcgatattttggcggcagccctttttattacctttcctgcatgttggatagcagactgtcaacaatacgagccgtccatcttatcga

SEQ ID NO: 16813 - DNA, 671 bp, Emericella nidulans
gtatcatcaactgactgaacctagcatacatctcttgtctactgttcgataggtcacaataagaaacaatggataaagataaatcacctcgccgccattggcatggtaaccctggcgaccgctatgaacaccataatgtctgggtgagaggaggtgcggcttcaagctacagacgaccttcttcagcctccgcttcggatgtatttggggcaactgacagacgggtatgtcattcgaatcaaacccatccgtttctcgctctcttctgcaagaggcatactaaagctgccaccccataatagtcctccagtgcatctgagggagacgctggagcacgcagccctcctccttccctgggggagcgaaggaggtccagcggccacggcccttcgagcttgttcgagagcctgactagccagaagcgcaattcgaacgacggcgccttcgcgcaacgcagacaaagctggaatgagcaggctcgacctggtggctatttctccaaatggtggtctgagtatattggtggtaaatagcgccgagatgtagttgtaagattgtaggcctgtctgttgctataggcgcaggacccttaggatgctcatattcatcgtgttggcgctggaagccttgcagcaacatgggtcaaaacgagcacatggagcgttgacgcc

SEQ ID NO: 16814 - DNA, 675 bp, Emericella nidulans
ccagaccggcccgttcacatttcatttcagtattgccagggaatttggctcattatgtccgtcaacgctgtcacgtaagttgccggtaaatgaatgggttcgacctgcgctgacttcgattttcatagatctctctaccggcgttcgctgaagctcgccctggactgggctgtccacagacatatctggaggggacaggcagtttatatccgatcccttttcgaggccaataagaacattcgcgacccccggcaacagaaggtacgtgacatgaccttcgcagccgctgaccgctccgtcgaggagcactcgctcaccagcactgttaggtcctactccgagagaccgaaaaattactcgaaacatggaagcatcctgatccctaccgtgcaccaacggcccctggtggtatgtttacaacaatctaagtatccgagcaaaggactaacccgcgaaacaggaagcaaatacgagagaaaccttcctgctcgtcaactaccttgtgagtgtaacctaacttacgtggacaatccagacatcgtctaacgtcatgtcagacgcctctggtggtgctggtgatcattaatgctctaggacaaaaatcaagagagattattttatgtaataggagcatgtattccagtcgtctaattaaatcaaatgcaatgtctctgc

SEQ ID NO: 16815 - DNA, 677 bp, Emericella nidulans
cggggtacggaccacagggagggtacgcccctgggtatggttactcgcagggaggagaacactatagtggagagaagtcgggcaaggataaggataagagcaaggatgataagaaagctatgctccttgcaggtgctggcggtcttgctgtgggcgctgtcggaggtgcgctgattgcgaatgcactcggtatgctcaaagaatccaaactatcttatccctatgccctggttataggggcttgaatggctaacaggcccagacgactcggacgatgaaacccgcgcggcggcagcagcagcatcggcgccgccagaggccactgctcctccacctgttggtctccccccagatgagacggcggacggtgactccgtttcctccagcgaccgtgaggaggttctggaggctcgacaggaatatgagcgggcgcagctggcggcacaagactccgatgcatcgagcagtgaggaggaggcgctggaagaggccagggaggagtacgaggagatctatgaggaagtgtacgatgactagccttgtaaacgatgaaatagtggaaagtcctaggtagcagttgttgtagtgtccctggataggacggatagacttggataggataggagaggacaggataggatatagaaatgcatgtacgtatgcgtctagctcagcct

SEQ ID NO: 16816 - DNA, 677 bp, Emericella nidulans
aacagacgaagacaccaatgacgaagtcaatgttctcattttcgactatatcatttgcttggctatacacgcagccatggacgtggcacagggtaacacaggcgagtgggatatgtcctggctcgaagatactctacggggtaagtaacagacattaagcaaacccataatcatccaggttggctaaagcccggaaatttagctttgcgatcagtgcttccgccgataaaagagctaccagtggatcttcagataaaggcccaggtatttgaaattgctcgggtgttgagtcaggcatcttatccagggccagcggaactggcggagatggcaagcacattcgtgtctacatgtaacgccaaaaaagaagacatgctagctctacacgcgatggaggttgcgagtcacattcgtaacgagagcagccaaacagctgtcgttaatagtctcctttccgtcatgcaactattagcgccgcccatactcatacagctcgaaagagggcgactcgagggcttgaaccggaacgaaacgcaacagctgaagcgaaggataggcatggtataaaaacaaattgcacttttgtctcagtaataaatataacaaagaccagggattagagagagcctagcccggcctcgaaatctacagctgaaacctagcactgatatatcgca

SEQ ID NO: 16817 - DNA, 679 bp, Emericella nidulans
cctcgtgcacaacgagaagctcaagtctattgtcctcaagcagctccagactgccggtcgtgctagcggcctcaagggcattgagattatcaacggtgttgtcctttctgatgaggagtggactcctcagaacgtacgtcttttcttctctcgctttgtttcaggacgtaactaacatccaacagggcttcatgaccgccgctcaaaagctccaacgcaagaagattatcaacaggtaccacaaggacattgaccgtgcttatggaaagaaataattgtggcgattctttccgttgaatataccctcgatttgcctatcatgccagcaagcgaaacagtgagcgtgcgagcatatgttgatgttgacgattactaacgttgccatgatgtgcccacgcacgccatgaactgatccctgcttaccgtcttcgatatacctctttgtctatttctcctattagttacaatgtatggttccaattcttatcctcttctcgagactgtcctgctctgtttcctgcgctctgtatgctatgcccctgtactgctatgattgttatctcagtatcatgactcctgtcgcgctgtctcggtataaaacctatgcccagttcagtcttgtccattggacatcagattaggtaccttctttacgcggtacgctaggttgtttggctga

SEQ ID NO: 16818 - DNA, 679 bp, Emericella nidulans
gcaatcctcgaagaagctggaagcgatatcacaaaggtcgtcaaggtgaatgtgtttctggcaaatatggatgactttacggctatgaatgaagagtacatgaagcactggggggacgttaagcctgttcggacgtgagtttttctttctcctcccttgggcaatgattttccacctttcctgtgtttagcattcaaagatcgcgctaatgtctttcatttctttaggtgcgtggctgtcaagacattgccgttgaataccgatgttgagatcgagtgtactgctcacctgtgaagtcctatttctcgagttaggatgccgacacagagcatacaaaagaactagaaaagaaaaaagattgttctctggtccatgcttggtgccatctggccatgtgctgtagcccgcttgctatgtgttttagctaagggtgtttgagcgcatttgtgcaagtcgcctgtcagtaagcgcaagaaaaccgtgtgatttattgaatcagaggcgtcataggttgcttttcaagccttgacaatcataggaggagcagcatcaattgatcgtcatagaagctcgtgtcgattcgacggagagaatagtgagggatcgtttcgttttctgtttcctgtagtttcaagatgagcgattagtcccttcatacctaagcaatcagtcgacaagg

SEQ ID NO: 16819 - DNA, 688 bp, Emericella nidulans
accggccttcttgccacgagcacctctgctgcgttcgacaagtgggctcgtaagttggaacctggccagatgctcgttcagccgtactaataccgatgcagcctggggcaagcgcgattactcctgcatcaatgcctactcagggcctaccggtttgtgccttgactttgcttgagatatactctcttactgacagtcttctagagaacagcacattgactacaggcaccccgcttgagatcaagttcaaccgcaacagcggccgctgcgattctttgaacgactaccctacgggcaactacagcctgtggctgcacaacaacccagtccgcaacatgggcttcgtgaactcggactaccaggtcaagatccaggacggaatctcttcggatgcaaccagcgtgaccttcactctgccggatgatctgcccgaggttgccgacgacactgtctggtaccttcgtctggacacttatcttcctactgcgccccaggttcgtcccctcctctgcaatgctcgagtagatgttgattgttttgactcagatgccttcacttttcaatgctctgggccctttccgaatcgtgcaataagtgcgactgctcgtcttttgtatggtagtctgagaatcgtttcttgctgcgcgttccttcagtttgacagatcgatagtgtatgtaataaaaag

SEQ ID NO: 16820 - DNA, 689 bp, Emericella nidulans
gaggagcggcgcgaagtgaatcagcctggtggcgggctgtatccccctcacctgaggggtgagattgaggcgatgaacgagtgggtatacgaccgcatcaacaacggggtgtataagacaggtttcgctgcgacgcaggaggcatacgaggcaagcctgcacccgcttttcgaggcgttggaccgcatcgaagggcacctcgcccagcccgggcaccagccgtatctctttggggagcatatcacggaggcagacgtgcggttgtatacgacaatcgcacggttcgatgtggcatactacctaatcttcaaatgcaacctgaagatgatccgacacgactacccgctgattgacgcgtggtaccgacggctgtactacgacgagtcggagaagacgcgcggaggggcgtttgggaagacgaccttcttgggccttgtaagtcgacgggccattccatcctggcgcagggacttgacacgacagctgacaatccaacagtacaaattcggctatctggcggcgcttggcaagaaacaaagcgttgatagctcccagctgattgtgcctgctgggccaaagcccgatatcctgccgcgtgacgcgtagatccggtttactatcatccaccggcttattttgagttgtaaacgggaatttgccgtctccttgcagttacgaagccctgcggc

SEQ ID NO: 16821 - DNA, 700 bp, Emericella nidulans
tccaggtcggccgccttactcattatgcctttgtcgccgtgctttgtaagtctatcctcctgaccctatcaagttcagaacgtttggaaatgtcaggcaacggctaaccgtcaccgtcggcagtctccgctttcctagcaggcgtcaaacgctcaacaggcctcacgtaaatcccccctccttcccttctcatccgcgcaaaaaagcaccaaaaccgtcccctctcgctttccgatgtttgttctatacaatttatagaagaaagaaaagctaacacctgcaccccgcgcgcaccccggccttctggcagggagcaatgcgtggggagtccaatcagccccagtctggactccgacaagatcaccgataacaaggacttcaagaagtggattgacaactacctgggtgtcggcgaatgggtgatggaccagtcaatcgcggtttttgggagcacgagctattttgagaggaagcggtgatacaacttccaactgttttcttggtcatctttgtggatgggaggatcatgtgtactgaagagacggcatgtcggtgaccacttgttggacccaggacggttccatccccgctacgctgatcatgttgatgttcctgtgctgcgacatgcaaattggcgttagggaatgctgttattcttatctttaccttataccatacattgagtgaacttggtgagatg

SEQ ID NO: 16822 - DNA, 703 bp, Emericella nidulans
tccccaaggaagaccgcaagaagatccatgagtacctcttccgcggtatgtgaacgaacctcgacagcgcgacgagacaagacaatcaaatgggattggcttggttgcgaaattccttacggagtactgattactgactcggtctcttttagagggtgtgctcgtggccaagaaggacttcaaccttcccaagcatggcgacattgacaccaagaacctctacgtgatcaaggccatgcagtccctcaactcccgcggctacgtcaagacccagttctcctggcagtactactactacaccctcacccccgaggtacgcttaattccagtcgcctgatggaaaggcaacaacgccggtttactaacagtgtcttcagggtcttgactacctccgtgagtggcttcacctccccgctgaggttgtccctgccacccacatcaagcagcagcgttctcacgctccccctcgtggaatgatgggtggtgaagagcgcgagcgccgtccccgtcctcctcgtgagggtggctaccgtcgccgtgaggaaggcaaggagggtgcccccggcgagttcgctcctagcttccgtggcggaattggccgtggccgtggcgctcctgcttcgtaaggtggtgtcgatgtcgcctcccggtcttccgagggtttttatgggtgttgctagtgtggtttgagtaggctatggcc

SEQ ID NO: 16823 - DNA, 704 bp, Emericella nidulans
tcgcccaggaggtcgtcgaactcctcaaggcaaggagagagaccgtctcagttgccgagacggtgcgtacctaccccatgtctgcggagcgaacatagttctgatctctccaggcggccgggggcctgatatcggcatgtcttctctctgttccaggggcatcggccgtctataaaggcgggctgactgtatgatactcaaccgaccctctaatcgctagttgacgcgtccatactaaacctgcggaggtctacaccctggaatcacgccttgcatttgccggctggacgcaagcagaccgagacaagtacacgggtcccacgactgagatagtcggccagatggctggccatactcgtcgcactttggaatccacttatgcagtaagcgagagcggcacggctggaccgacgggagggactacgaggaaccggactccgtaagtacagattgctctaagaactagcagtttactaaggtacaagtggctatgtggcggtggccgtgtcgacggcgaatggggaccagacgcgggaggttgagacggggagcagtgatcgggcgcagaacatggtggcgttcgcaagagagtcgttgcagttgctgaaggaggtgatatcacagtctgtaacgcctgtcctctaggattcatagtgtccaagtagataataggtagattacgcaatcatacgttcccctattga

SEQ ID NO: 16824 - DNA, 705 bp, Emericella nidulans
tgttccgcgatcttttcaccatcttctatgagcctttggttcgagtgtacaagtcagcgaatgtttacagcagtatcaccgatttcgccaagtttgctgacgacgcaatcgctgtgattgaaaagtgccagaggcaggatatttccgccgacccaaaccaaactgttcaagcctttattgatctctgcgaacggcaccagagtagtctctacaagttcgtccacgaggtccacctgcacgataacggactgtttgggtccctgatggcatggattgaagatattcttcaattcctgcgtaacgggccaaaaggcggcaaactcgacatgaacgcgctgtttagcggtgccaaggacatgggtcagattgacccagccctcgctcgtgaggagatagataaactcataaagtggcatgaggatcgcaagcagtggcacctcaacaagactcgccagaagatggccgctgaaggaacggctagttctccattccagaccaagttcaaatcgagcgactttggtttggatgaggtatgtataggacctttaaagtaagtcacagataaactaacaagaaacaggccgaccttgaacatctcgccatttccgacgaggattctgatcactccgatgacatcgacgccgaagacgaggcagaagaattagacccgatagctgttgaacgaaaacgacggtcccggcaaca

SEQ ID NO: 16825 - DNA, 705 bp, Emericella nidulans
cgcgatcaatcaactaataaccataaaatcatgaagttccagctcctatctctcgctgctcttttttctgttgctctggcggcacccaccgccgaaacctctgctgaactaaatgtggcggatttcgctactccagtcgaagccagggacatttcccccgaagcgctgggtctcgtgaagcgcgccgtgcgtgctatattgtcaattctagctccggcactgtcaattgccgttctggccctggattcgactacggtgtcgtgggaagtgtcactgttggatatagctatccattcaattgctacaagtcgggtgactgctacgaggggaactggttagagccctcaagcttgttttttatcaatagtagtctttaggattgctgacaggaacttaattagcacctgggatcaggttcccttgtccggtggtggtgtttgctacgtcaatggctactatactgatagcaagtgtacagttggtaagacagataacttgttccggtgaaatcttctactgacatatcgctagctgctctcggaaaatgctgaatacctggtagccaatgtgttataggtggaatggaatgacacacactggggccgtttctgggagattattttaggggaagctgcgagaacgttgacatttcgatgtgcatgtctagtctaggatctagcagaactgaaataattcaacggtcat

SEQ ID NO: 16826 - DNA, 706 bp, Emericella nidulans
cagccgtgcgaacaaatacccaggtcttgattagtctgcggtcgaaccggaaattgtgcgttcacacagcctctaggttccatattggaagtgggagcatgcttacagtgggattaacaggcttgctcgcgtgaaggcgtttgatcgtcacagtaacatgtatgtggacctatcagctgctgatctactctgaaactgtgagactaactggattgtcttagggttcttgagaacgtcgtatgtttataacttcaaaccacgcccggttcgattccgaggaacgcgttgctaatgagccgacagaaagagatgtggactgagccccagaagggcggcaagggacgaccggtgaacaaggatcgattcatcagcaagatgtacttactactccaccttgttaagagaagaccgtgctgatggcgtcgttactaggttcctacgaggcgacagcgtcatcctcgttctgctcagttaattgtcggcttcgaacatcactgacggattattgacatctctcccggctcggagttcggttctggctttggctcttcgttgattgaaagaataaagaatacccgcgtggttacggcaaaggatgggtgctattgtggctgtctctactgcagacggacgcatcggatggaggctcgacacgacctgttggtggtattataggacagtcccaatgttggaatgaggccgggcg

SEQ ID NO: 16827 - DNA, 706 bp, Emericella nidulans; identical to SEQ ID NO: 16826

SEQ ID NO: 16828 - DNA, 710 bp, Emericella nidulans
ccagtcgctcgccatcctgaccggtgcaaccgccggtgcaaccgaatccttcgtcgtcgtccccttcgagcttgtcaagattcgcctgcaggaccgtgcttcagccggcaaatacaacggcatgctggatgttgtgcgcaagatcatcgctgccgaggggccacttgcgctctataacggtcttgaaagtacattgtggcgccacatcctctggaactccggctatttcgggtgcattttccaggtgcgcgcgcagatgccgaagcctgagcctgggaacaagacgcaacagacgcggaacgatctgattgctggttcgatcggcggaacggccggtacgatcctgaacacgcccatggacgttgtcaagtcgcgtatccagaatagccctaaaatcgcggggcagacgcccaagtacaactgggcttggccggctgtggggacagtgatgaaggaggaaggttttggcgcgctatacaagggattcatgcctaaggtgctgcggttgggtccgggtggtggtatcctgcttgttgtgtttacgggagtgatggacttcttcaggaagatgaggggggagactgcttgattctgtgcttcaaccgctgtttaaaaaatgtttgttttcgttctgatcgctttcgcttgtttatgttgatgagatggattggacatgcaggatttagatggttcctagaatgtgccataga

SEQ ID NO: 16829 - DNA, 713 bp, Emericella nidulans
tgactctattgaactctcactcgaatcagtcaagagaatatatccaaacaccaaatctccgcctcacaagcgtacatcacactaccgccgctccttctgtcacattaacaaaacttcgaatcctataaagcaagaatatcaaacccaatccgccaattatgcaactcactttgaccacggtcctcacaacgctcgccttcacgtcttatttactgctggccctcgcgctcccgatccccatgttagcactaaacacaagacaactccccaaacttcccgtcggtgatctcaagctccttgacactgtcatgccgaacagcgggattgccgacagcgtggcgaggctgcaggaagatgtggcgaagcaggcagggaaggtgacaccttcgtgaatcctctcccgtcagtcaattgcttgggatgataggtctaccagtttggcaggggataggtaggtgagtgtttggctgacttgatcatcgttcattcttgggtgaggatttcattgctgatgggtacatgtatgatagtagggaagggactacataagagattagagcagagcaggtacgaacgaacatggaattgagtgatggtggcctatgtttcctactagttcagctgctatgtgttgtgctataggaatatgaaatttgagataggataacgggttcggattctggaaccattctggcatttacaatgatattttt

SEQ ID NO: 16830 - DNA, 716 bp, Emericella nidulans
tcggcccaaagcttttagaatccctggtttacgtgccaataatttcttatccgctatatgtcacccatctaagggatctggatcctcatcttgtggttggtcagtgtcttttgccacctaggaccatcgacgttcgttattggactgccaattgaatcgccgccggttcacaactcgcgccactgtttttttccagtgtgcgcgttccgcaggtgatagcggcccggtccgcgaatgaacacggcgaaatgagttctccgacactggaaaagagtgttcgatctgagaccgtatttccatatcatccagtatgacaatatgggacgtggcaggtccgcaggggtcagcattacttcatcagtcgcatgagataccccgtgtcccctaacaacgaatactacagtataaagactagggcaaacgatatcttatctctctaacatacgtgctttcgtgcaagagatgcatcaaaagcgagcatatgccgttttctatggaaggaataggcggagttgtgattgtcctatctgttgtttattggtctgctgtttctctcgttgtctaacaaagagctttatgtttgatggtatacggataagcattctattcgggccggtggctgcagcgtgattactttcatccttgttattatctcaatttacatgtggagtacacggttttagggcttttagataggaactagcatggcatacagg

SEQ ID NO: 16831 - DNA, 716 bp, Emericella nidulans
caccgtcgcgatggctcaagaacgttccggtattgcggttggtctcaacaagggccacgtatgtatactgatttcctttatctgatatcctccaaatggtgaatggattttcgatggatgaatggacggatgggatggagcttccgatgtcgagtcgaatcgaattgagcgagacgagcagaaagcgatcggttttacgtacggttcggttcggattatgtggaagtacactcggattgagttgaaatgaaattagaggttgcgggcaacgaagaacacgagacgaaattttacgcccgtgtacggccgtcaagaagggactagcagggagattatagcgtcaagaatgttatcggaagtcaccgtatttgcgtcagcctatgcctacgttgtctattcagttcggctatctgctcggcttatttgattcgacacggaaactccggaccatacaactatcatccatccagcaatccatccatcctattcttccaatctgcggtattccgaggcccctgaactaacgggtcgtatctgctttagaaaaccacccccctcaacacccccaagacccgcatcagccgctccaagggcaaggcctcccgccgcaccgctttcgttcgcgacatcgcccgtgaggtcgtcggtctcgctccttatgagcgccgtgtcattgaacttctgaggaacgctcaggacaagcgcgccaggaagct

SEQ ID NO: 16832 - DNA, 716 bp, Emericella nidulans
ccaaaatgggtcgcgtcaggactaaggtgagttgtttttctgttgcaattgaagctgagggagtcgaaatcttattaacaacaattttttctcgcaaaaaatagaccgtcaagcgctccgccaaggtcgtcattgagcgttactaccccaagctcacgctcgacttcgagaccaacaagcgtgtctgcgatgagatcgctatcatcccctccaagcgtcttcgcaacaaggttagtgcacgaataaatcacggcttggaagaagcgatcgataaggagacgaaaaggctaaccctgggaattgcgtttagatcgctggttacaccacccacctcatgaagcgtatccagcgtggccctgtccgcggtatctccttcaagctacaggaggaggagcgtgagcgtaaggaccagtacgttcctgagatctctgcgctcgacgtctcccagaccgagtccggtcagctcgatgtcgactccgacaccaaggatctcctcaagagcctcggcgtaagttcactcttaaggccactattatagatgatgctgggtcatggctaatttggtactcgtagttcgacaacctcaaggtcaacgttgttgctgttacccagcagcagcccgagcgccctcagcccttccgctcttagaggacaatcggaaaaaaagtttaatgatcttatgcggctgatctatggtctgtgactgtccggtcgtg

SEQ ID NO: 16833 - DNA, 717 bp, Emericella nidulans
caccggctacctcatcatcttgaatctgtcatgcattatcgtctctgcatccagcttcgaatctttgctccgcggccttcaccccagcgttcttacccgcagtttaccgggctctcttgcttttgttccaggagaagctattggaaattaccagcctccaccagggcccatccattatggccctttgccgacgactgaccccgttagctcggaagcgcctgcgattgcttcggcagctgcgaatgcagatggtaacgacattggatacgggtcaaggcgggccatggctgcgaccgaaagccctgacgctgcggacgagtaagtcatccttgattatgcctgcaatgctacgaatgaagtttaatggtcgctgctagggtaacaagtcgtatcccctctgtgacggagatggatgcgatgatagcaaaggctcaagcggcatcggcgaataaaggcgtggcgtggccatcgatgggcttgatagtgccgatactcgtgcctttcctacagttatgacagaaacacagaatattgcgccgaatactccgcaacgtctcccaccgggaaaagacgtggctagagatgagttagcaggattttttggtatgactggacgtaccaattatatgtacagttacccatcgccactagatattatgtacatcgttcacattattcatggtcattcatcgtggtcgattacgttcatacaccgcg

SEQ ID NO: 16834 - DNA, 720 bp, Emericella nidulans
ccgtcacaatgtccaacgttttcttcgatatcaccgccaacggcggtaagtttcacgttttttgccgcgcctgtcattcgctaatccccctcaagagcctctaggccgcgtcgagttcaagctcttcgacgatgtcgttcccaagaccgctcgcaacttccgtgagctcgcgaccggtcagcacggcttcggctacaagggctctcccttccaccgtgtcattccccagttcatgctccagggtggtgacttcacccgccagaacgtgagtcgcagtctctctgggaaccgcgagatgcagagattctaaattttggctttttagggcactggcggcaagtccatctacggtgagaagttcgaggacgagaacttcacactcaagcacgacaggccttacctcctctccatggccaacgccggccgcaacaccaacggctctcagttcttcatcacggtgagtcgcgccattgataccggcagaagaagatgctaatgcgatactttctagaccgtcaagacttcatggctcgacggtgcccacgtcgtcttcggcgaggttgttaagggccaggaggtcgtcgatgctgttgagaagctcggctcccagagcggtgccaccaagaagaaggtcgtcatctctaacagcggtaccctctaagcggatcgtggaggaactgaaatcatctgagaaatgaaatgagcttctgcgggccggta

SEQ ID NO: 16835 - DNA, 720 bp, Emericella nidulans; identical to SEQ ID NO: 16834

SEQ ID NO: 16836 - DNA, 720 bp, Emericella nidulans; identical to SEQ ID NO: 16834

SEQ ID NO: 16837 - DNA, 722 bp, Emericella nidulans
tgttgtcgacgacctgatcacttcaattcagaacactccctcatacgagatcaccgagatcagcgaagacggcgagaagacaaagaagattactaactaccgcgcactcaactccaagtctcatgaagccgacgtggtccaagaaatcgcgactgccgatattgtgacgtgcgctgttggaccgcgggtcctccagttcattgctcccgtcatcgccaagggtctcgaatctcgcaatgtttccaccccactcactgtcatcgcttgcgagaacgctatcaacgctaccgataccctccgcggccatattgagaagaagaccaagccagagataatcagcgagcgtgccgtttttgccaactgcgccatcgaccgtattgtccctaaccagcctccgaacaacggtctcaacgtccggatcgagaaatactgggaatgggttgttgagcaaactcccttcaaggagaagggcgtcgcgcaccccaacgtctccgccatccactgggtggataagctcgacccctacattgaacgcaagctgttcaccgtcaacaccggacacgccacgactgcctactatggccaccttgctggtaagaagactattgccgatgctctccacgacccgaagatccgtgaaaatgtccacaaggtcctagacgagactgcttccctgatcattaacaagcacggcatctctgaacaagaacagaaggagtatg

SEQ ID NO: 16838 - DNA, 725 bp, Emericella nidulans
tggagagcgacaatgccaaccatcctgccaactttattggcaacaaggtcacagggatcgtaagttcaggcacactcttttgatttgaacgcagcgaatctgatcctttgcagttattcgagaacaaagtcgaccacaccacctatttcggcagcaacctcgaatacattcaagggtaggccttttctccgttcctctataccgcacactgacaattgatctatctagaatccacatgcttcccctcctgcctatgtccccatacatccgcagtcagaggttcgtgcgcgaggaatggaacgccatcttcgcatccaatgcagccgcgcctgccgatggagttacaggcggatggaagggtatcctctacgcaaacctggctcttatcgatccagccgcatcttggcggttcttctcgcagagtaactttgactacagctggattgacggcggagcatcgcggacgtggtaccttgcattcgctgcaggtaagtttcgtctttgtgctcagaatttttcaacactaacggacgtaggacttggtggtgggtcggctgcataggcttcgttcgggtcagccaaggttatgcaccttcactatccttgagatgatttcgctcttctagctccatgttacgtatcatgatagtgggcttgagtgttttggtctttctttaatatttattccagtaaccctggatttctgcgatcttacattatccata

SEQ ID NO: 16839 - DNA, 726 bp, Emericella nidulans
cagccgccctggctgatttcaccttcgacgagctctgggccctccaaaataccctctgggataacttcctctaccctgccaacctccagcagattaatgccacagacacctccgtcttcgctgagaatgtaagcaccctccttcatttcatgccgctggccgtttgcatataaagactaactcccagacaccaggtgcaaggccgcgtcgacataacacgcacatttgacggccgcgagctcaacaatgaatacatattcggtcttttctcagacccctcgcatctcagcctcgtcggcatcccaatctcttataacatcacgcagttcgcagccaatcagaacatcacgtccgcaacgacagttttcacattcaacgcaacctcgttcaatattctcgtccctatcaccattgatacgtggatcctatataacgcggacgggaagatcctccagtatgatgcgaccttccggtggtttggctggttgctggatacccttctcgaagctgcgggaacgggcatattcaataccacagacccagcggagacgcagagagcgctggggaatcttctagcaacaacaatttgccagactcacggtcagcactgtgttgatgataaccagcaatacaacagcaacgaggactgtgtcaggttcctcacggaggatatccggttcggaagcgcttacgagctgggtcgtaacacgctgctttgtcgcgagg

SEQ ID NO: 16840 - DNA, 726 bp, Emericella nidulans
gccgctgttgatggcactcgtactatccaaatttccgaaggcgagcgctgtttgatctgcctcagcgagtacgaagtggctgaggagcttcgacagttgacaaaatgcgagcatctttatcaccgtgactgtattgaccaggtacgtcaaattgcacgttgatcttaccttgtaagcatagagctaactaattaagtggttaactacgggccgcaattcttgtccgctgtgtcggggccagggtgtcgccgacaaatccggcgctgaaccgccacgaccatcagatgcgccacgcgcagcagccgcttaatattttgtatcacggctgttattatttatacgattcccaactctctattactgttagaagtatttagcatggcgctttccccagcagcttcaccatctcttcgcatctttcgctcttcgcttcagatatccattgctgcatcgcgacattttggttttggttgtggggtcagtatgcagttcaagtcagatcattgtttcatggccgggtttcaagtcatggtggtatcacttgatgtgcatgaacatgattggactcagcgagattttcgcatgggatatacactaactttctgtatactgtcatgaggttcggagaatgtgtttttcgcatgagctgtattattcccctagtagcatagagcgctctgttcatgtcaataggcagccggaagatcatgaaattcattacttata

SEQ ID NO: 16841 - DNA, 726 bp, Emericella nidulans; identical to SEQ ID NO: 16839

SEQ ID NO: 16842 - DNA, 728 bp, Emericella nidulans
caagcacagtcaacatggccaacaacagactgcaatacgtgagttcctcctatgtgtccttgcccattacgataaaaaaaatgaatgaattctgatcgaatttttcttctcagcgccgccggaacccgtacgtttaaaatcccaccaaatgccttccccagttgtatccgtctatacagcacaattttgcgatgtttggcgtagattggggattggattttctacgatattgtgtcaggttttatttggacagatattgattagatttcgcacaggtacaacacacggtccaaccgcgtccgcatcgtcaagacccccggcggcgagctgcgataccagcacctcaagaagcagggtaccgctcccaagtgcggtgactgtggcatcaagctccccggtgtgagtaccgagtccccggatctggctggatttcatatacaagaaaaaaaaaaaaaaacaaggggatcgatgaatggattcaacatagcgaaacggccacatgtaataagagacaacgagactgaccaacttttcctattcagatccccgccctccgcccccgcgaatacgcccaaatttcgcgccccaagaagaacgtcagccgtgcctacggtggttcccgctgcgccggctgtgtcaaggaccgcattgttcgtgctttcctgatcgaggagcagaagatcgtcaagaaggtgctcaaggagtctcaggagaaggctgctaagcgc

SEQ ID NO: 16843 - DNA, 728 bp, Emericella nidulans
tccaggccgctcacatcctgcagtcccagcacggcatcaactgcaacctgactcttatgttctctcttgttcaggctattgctgctgctgaggctggtgccttcctcatctctcctttcgtcggccgtatcctcgattggtacaaggccgctcacaagcgcgacttctcgaaggaggaggatcccggtgtcaagtctgtccagagcatcttcaactactacaagaagttcggctacaagaccatcgttatgggtgcctctttccgtaatgtcggtgagatcaccgagctcgccggttgcgactacttgaccatctccgtacgttgccacccttcaactataatttttgagggcgtatcactgacgaaccacagcccggtctccttgaggagctctacaactccaaggacgccgttcccaagaagctcgacgctgcctccgccaccaccctcgacatcaccaagcgcagctacctcaacgacgaggccctgttccgcttcgacttcaacgaggaggctatggccgtcgagaaactccgtgagggtatctccaagttcgccgccgacgctgtcacccttaaggacatcctgaagcagaaggtccaggcgtagatgaatgaaccatgaatgaaaaggcaccggctgccgcgtgatgagaccaatttcgttatgtaaaaatttggcgacttgcaaaaacttgctttgttttagaagatacgagttacggaat

SEQ ID NO: 16844 - DNA, 731 bp, Emericella nidulans
caacagcccgctcctgagcaagacgccacaccggataacagccgtcagcgcagacaagagcctaacgactccgacacagaagacgtcccgcgtcccgaaatggaaccagagcagcagcagagaccccagcgccgccgccgcggccaaccccgccagcaacggcgtcctcgccagcaaggtcaagacggcggtccattgggtggcctaggcggcatcaaccaggccggtgatctcgtgcagaacacagcgggcaaagcagtgaatggggttacagggagcgccggtaaggctgttggcggtttactagggggtggccagcaggaagaagagagtggtggtggaggaggtaaagggagtgatgagcagctgcggctgcggctcgatctgaatctggatattgaggtgcagctgaaggcgaagattcatggtgatttgacgctgggattattgtgagtgactgacaccggtcttcttgcttggttcgcgttgggtagatatgctgactgactgatcaggaattagtgcttgaccgcgtcgatctatttgatctccttgcttcttcacgatattacttccgataccgacttatgactgctggtgctcggtcgccagcctgatatgtgatgtcgtccacgaatttgatttgaattgggctttgcgatgttttgcgatgttttgcggcggattgctctagatcctttgcgatatttcacttcctcggttcggtttcc

SEQ ID NO: 16845 - DNA, 734 bp, Emericella nidulans
acgaggcgaggggaccctgaaaactgtgtaatgctcggaggtcacagtgacagcgtcgcggaaggacctggtatcaatgacgacggctctggcactctgacccttctggaagttgcgactcaacttagcaaatacgacgtaaacaactgtgtacgcttcgcttggtgggcggctgaggaggagggtctgttgggctccgactattatgtatctgttctcagcgaagaggagaacctgaagattcgtctcttcatggattatgacatgctggcttcgcccaatttcgcctatcaagtctacaatgctacgaatgaggttaaccctgttggatccgaagagctacgtgatctttacaccgagttctacacttctcatgggctcaacttcacatacattccgttcgatgggaggagtgattacgatggtttcattcgaaacggcattccaggcggcggtatcgctactggtgcggaaggtgtgaagaccgacgaggagcaggagatgtttgggggaattgcaggcaactggtatgatccatgctatcatcagttgtgcgatgacctcggaaacgtcaacgcaactgcttgggaggtcaatagcaaggtatattttgaaattctcggtgctggtacaaagctcacagttgactcttctcgcagctggtcgcccacactgttgccacctacgcagtgtcgtttgaaggattcccaaagcggacaactaccaatgttaag

SEQ ID NO: 16846 - DNA, 737 bp, Emericella nidulans
tgcgcgaagaaagcctgctgtcgagagccccggcgccagactaccgacgattcccgagatcaagataacagagacgtggaacgtctgggaagttcgtgaagacggccagctaattgtcggtgacggcaacaagggcaacaaagctagcacagcctccgcttcatcagacccctgggacaccccgatggcaccacctttagctcgaaacatggcgggtggcgcagtcgatcctccaagacagcccacaaaagaagaagtcctcgagccaacgtcaacaggcacatcttccgagttagaacaggaggctcccaagtggaacctacagaggcgaaatctatgaaggaagaagacttatcttcaagcataccaggtggcttcgattcgtcagagaaaaaggttgaaaccccgtctgctgtctcggatgacaaggtcgagagtgttcctgagtcttttgagaaacaagttgacatcacgtccgctgtctccggcgacaatgtcgaagctgtctctgaggacctaacttccagtgctgatggcaagaaactctctgatggcgatgagacggtgtcagcatcacgcgactaacgcgttcacattggtctctttgttcttgtctcatcgttctgtcattgtccaccttatgtctttcgtttagtaacctaaccttctatgaggatgtaactagcctatcctacttaacctagacatgtgacttgctgcatgtcgcagctccgact

SEQ ID NO: 16847 - DNA, 737 bp, Emericella nidulans
tcgcttgccctgctaccctcacagaaatgactcgggacagatacgcgttagatacgaacgacgtgcctctactgaatgaagggatcaaggccacggcaagacacttgtccgccagtcaaagtctgctagaagacgaggcgcgggcgtgggaagacggagtgttggaagatttgaaacgtcagcgagacagcctagtgagtgtgcgggagatgtttgaccgacgggaccgatatgcccgtaacaacatcccccagttagaaaggcgaattgaggcgaatgaacgcaagctccaagacctacgagcgcgaccacagggaccgtcaagccaggtgaaatcgaaaaggtcgaggagtcgattttcaaggttcgtactatttgccccgtggcccagaaggttggttggctaacatattctgtaggacaaagaatcaattgtacaacagcatgcgcgtggagtgttcatcaaagagtgcatccgagacgagcttatctacttccaacagagccagtatcacatcagccggcttcatcaggattggagtcaagagcgagtcaagtactcggagctgcaagctgacaactggcggtcactgggtgaccaggtggaggggatgcctcttggagactaagcattactgcgtctccagtggaaatcgtagctccgcgcatgcaatgagggattttctgtattcggtattgactttttgtctttaccttctctttgtttttgttttgtt

SEQ ID NO: 16848 - DNA, 738 bp, Emericella nidulans
ccaggctgcaacgccatccttcccgtatcagggttatcagatcagcatccgtcagcttacccagagcagggattatccacgggctctttctttgtacccccctttaccggtctatttttactcggtttttactcccggctggttaacaccgattcctctgggttagaaaccgtctggacgtcatttcggattccgaatacgcgagcttttcactgtgctctctatgaattcttgatacatcacatgcgtcagcatcggttctgctagttgcgaacatgtgttgtggactgtgttgacagctccatcgcgccgcagcctggcggccatgaactccttgcaccttcatgcagtaggggacgtctcatttgattctgtgtcttgctctgacgagccttgtagtccaattgagttactgacagcacggagatcgatttctcgcaggggaagcgagtcaatgacgttggcggaaccgcgccaagcgagggtacagagtaatccctcggctcaagcgatagtggatttgtccgttctagaatgtcggtcttacttgtgtgcgccccgaccgttcttcgcaatcgcacatggcttcgtccgagcgccggcatcgatctgacttctctgcggactaccttgaagccgttataattttgggacgagtcttcaaggctaaacagctgcagcttcagactgcgcttacgcttaacagtatattgttcgaaatacagagtgttcgcaata

SEQ ID NO: 16849 - DNA, 739 bp, Emericella nidulans
tcgacggattcatgctgcttgccgcgcccctgactgcactctgcgccgagattggcaatcaatgcaagaggacggctggagactcccagatctacagtaaaggcgtgcattacaatcgatattatacaagctagcaatttgattattgaagtttggcagcttggcagaagggcttgtacagtttcctcttgaaacccacctctccgccatgcgagtaacatgttgagatctctgacggagaagcagagctccagatacatggatgggagatggatcaaggttcacgtgttgcctttacaatggaaattcggctagaattcgcgatgtttgtggcgtccggctgccaccaattctgaacaagacattgttatggacagcagtactctggttgcatttgccagaaggttctggcgtcatcaaaaacaggcgctgcaaagctagtagctgccttcttttgatatgtgctgccttggttgcagaagtgtcaaagtacttttgagaactattcaactgatggatgagcagggctcgtgccttgagtgcttactctgggcctaaacagaaggtttctgtttattataggttgctggatctttgctctggctatatgttggcgttggtttacattcccgaggcatttttaaggctaaattcttactgacaccctatgattgtcacttttacctgaacctcgggcaacaataacttacatccttataatatcattgtcttccctcct

SEQ ID NO: 16850 - DNA, 740 bp, Emericella nidulans
ggagcggctcctgaccaaccacgtgcaacctgttaggtaagaaatcttatctccaactcttgctttaaccgtcaactcctctcgtgtccatgtactcgagtacgtacgctctcatcctttagggcacagggcacaaggcagaccttcccagcatcgaatataggagtcactgtgtgcctttatcaggtcggcctcttgatggctacttgcttgatgtccgtctcgtattgagactcgagcccgctgcaaggctgattcaacacgaggagacggagtgcactggccaaccgggccagcgtgagacaacgcctggctgacgtactgtccacctcagtgagatcgtactatttactcagttctgacttcacagccggtcacccttgcttgcgacgatttcaattgacgtttgaataatcattgccggtttctgcacgatatcggcacgatatcggtatccaccacccgtcgcagcctttctcggaggctggcgtgtccacccctgactgagcgaccgattgagggtttggtacgatttgctgcaggtttcgagatactcgagtgaccctcgttttcgacaatccgtgcagtaatggccattgcagagacgatcttgagatatgcctaaaagggtatggataagtgcagtcgcgcaggcgctcggtgctgaggctcattgaatggtactgggtgttggcgacatgttgtctattcgttacatcctttccatgagccggtgatcg

SEQ ID NO: 16851 - DNA, 741 bp, Emericella nidulans
aagtccgcgccgtcgctctcatggaaggactgaaagacccgtactcctcgcagagccaaacaccacagacgccccggcaaggccgtctcaagcgccgtcgcgaatggaggtggacacttgggccgcttgaagaagctggaaccgcgacagattcatcacaacctggttcaggctccccggcacccgctccctcaggatcagaaccgcatcgggatccaggagaacccagcacgccggcccccaacgcgacctcgacggccccatctcagccaccgccgcaaccgcttccagtctcgctgccggcgcaccatgacacatccgacgcaaacaccgcttcctcgcgaggaacagaagaatcagaccctaaaccgccccaataaccagcggtggggcactttgcactcatctacacctgcattgcatataatgcgcaacgctcgcattcagcttacgatttatgcatcatcatagaacatttctgcgttcattctcacactggactcggcattgccattttcacaccgtatctatattggtatcagactgccgctttttctttcctatttatagactttactttattcatggatacccgcctacgctatgttacggagtgggaccagcactcagcatcccctcgtatccatttcttctatttttcccttttttttttattcttttcttctactttctctcttatatataccttctacatacctaattattcattcgttcacgttg

SEQ ID NO: 16852 - DNA, 750 bp, Emericella nidulans
tggttcccgccgcagagaagaagacttcgctcggctggaagcacgaggccacacagagaggtcaagcggatctcgtcgtaaggaagaggacccctctcgaatggaagtaggacataccaccgagcggtcgagtggttctcgccgcagggaagaggatcctgctagggcagaagtacgcagagctcgaagacactccgaggcgattgccgaagcgcgaggagtcgagcactctgagcgagaagaacgccgtcctgaccgccgggaacggcgtcgtgacgagcgtgagcgccgggatgagtgtcaagacgaggctccccgatcccgaggagacgagcatgaacgtcggcgccgtcaccatcgcagacgtgaacctacgcctccgcccagcgcagcgaccaagctcaagggcatgctgaaggccgttatcgccgcgcactgattatggatacgaaatgaacatatgaatatacgacattacttttccaacgaacatgcattactaactttcatccttcatccttctcccattttgctttgcgtttactttgcattattttgggtttggcgatggctgtcagctgcgccgcggcatttgcatggagcatcatacatacaactgaaatatcaatgagggattatgattcatgacacgaggaagcgagcataaaggtgtcccgcatttccatattggaagattattttctatatataattatagattagctccatatgattagcataggttctgcg

SEQ ID NO: 16853 - DNA, 751 bp, Emericella nidulans
cgagtcttcaaggaggggatgatacttctgacgaaactacggacactcagtcattttagcaccttcgagccgcgtatcggaggtaagttcccgaaatcgacatacgatgccatcatccgtgagatccagcgaatgttcatcagcatggccctgatggcccagacagcccaatcttttcaagatccatctttgctctcaacgcgagggaataccaggatggaagataaattcacaaaaaaatggtcctctcgcctagcctctattgcgctacaatctacagacttcaaatcccacgccacaacctctctcctctgccacctcggatcagcggttttgaacgcccagccgttacccccgtatctgtctacaggggcctcattcccgcttgcgcgtgccgtgcgtcagacagacaaggacttgatgagtattcggcacattcatgatcccgcgttctcagcgtttgcctcgttggaggtgctaaggtctgttgtgggagcgggactggggaagttgcttgggtatggcatccaatatgaccccaatattagactgttttgactctgtggcaatgctaacgatgcatagcaatgtgaagtccttggttggggagctctcgtttgacgttcgggatcaaggcggtgacgagggagctgaattaaggacgttgatggacgatctttaagtgttgcagttcgtggtgagcagccactgaattgaatttgaagctgcaataatattcccattgtccatt

SEQ ID NO: 16854 - DNA, 751 bp, Emericella nidulans
gctcagcaagcacaacgtcaccattgtcacaaagactttggagcaagtgagcagtttacacgagactatccgtattaaaagcgcggcttgggatgacgctggcgtccttctttactccaccttgaaccacgtgaagtactctcttttgaacgggtaagcctccttactagtgcttctaaaaagctacagattgagctaactctaccgtagtgacaatggtatcatccggactttggatcagacagtttatctggtcaaggtcaaaggccgaagcgtctattgcctggatcggaatgctaaaccaagaaccttggaaattgatcccaccgaataccgctttaagctcgcccttgttaagaggaactacgatgagatgctgcaaatcataaagacatccagcttggtcggtcagagtatcatctcctatttgcagaagaagggctatccggaaattgctctccagttcgtccaagaccctcagacacgtttcgagcttgcgttggagtgcggtaacctggacgtcgcaatcgagatggctagagagctggaccgtcccaacctgtggaaccggcttggtatcgaggcactggcacatggaaaccatcagatcgtggaaatggcttaccagaaacaacgaaactttgataagctgtcgttcctttacctgtctattggtgatcaggagaagctgtcaaggatggcgaagatcgcggagcaccgcggggacttcacctcccgcttccagaatgcc

SEQ ID NO: 16855 - DNA, 754 bp, Emericella nidulans
tctggatggtcttctcggcacactattgaactgcttgtcgacattggatctcgaaaacaagaacaaaaagccttacgacggcaacccaattttccctacctttaaccagaactgcaacgtagacaagttgatcaatatcctagatcaagcagtgtcagcttacgagccctcggagcttgaaaccaaggccatccctctcttccataccctcgtaaccatccacgaggtggcacctgatggtccccgcaaatacatgcagtggcttcttctacctgacgacaacgatcgggaccggccaatcgggcagtctgacacgttatcgtcgaagctgctcaagctttcaaccatgcactatgcgaaccttaaggtcgctatctccgaactcatgtttgtcctttcaggaaagaatgccgaaagcttgacgaagaacattggttatggtttcgctgcggggcttctagcatcccgcggcatggatatccccaagtctgcgggtgaagcattcgcaaccaactctcaagatcttaatccagagatcaatccgatcacaggccagagatgggctgcggaaaaggaagataccggcccgcccatgacgaaagaggagaaggagagagaggccgaaaggctgtttgtgcttttcgaaaggcaagtacaacggtatgtattccatgtagtcatgctaattctattatagggccaaagcaaacggcatcctcggggtcgagaacccagtcacccaggctttgcggga

SEQ ID NO: 16856 - DNA, 760 bp, Emericella nidulans
accaataaccaaatttatgtacaacggtgctcaataacaaagcacctgcatccagtggatatactcccctcgttgatattgggaccacggaaatctacgctgctctaagcgtcgaagcagtccatacactttcaaattgagttctcgaagttcgttatgacacattcaatcattgcaacctgcaaacagactcggtttcatattgatgacaaaccatcccgagaggtttgttccatacccaatttgtcaacatagagtataactcaagttttcaggttgatatagagggccttacagtcgcagtatcttcagtgccggagtctgtggaagatccctcaagaacaaaagcaaaggggaaatcgaagtctaaggccgaagcaagagagctcatttctgatgcgcacttgcgactcaaagccggcgtgcattatgggctgataggtcgcaatggcactggaaaatcgagtatgtgatttgacctcgggcgagacactagttaacgtggtgtgcatgcagcgttgttgcgggccgtggccgataaactggtaccgggcataccgcattcaacccgaatagccattctgcagcagacagatactgctagtgaagacggttatgcgcccttctatgatagaactgaagatcaaggagcaagtgagggaaagttcgttctggactatgtcatgagcagtgaccagttcaggaacgaagtcactcggaagatgaactgtaaggacacagcccttatctagatcatttc

SEQ ID NO: 16857 - DNA, 764 bp, Emericella nidulans
tttacttgaacctcaaaatttccagcgtatttaatacttgttacaacattccgccatttcgtcctgatatccgtactctctgagcgaatgcaaagaaaatgactgaaccaaccgcccccatcgaaacaaacccaccaactcagtctccagaagcaaaatattccaaacccagaataacaattcagtactgcacgcagtgcaaatggatgttgagagctgcttatgtatgatacctaccctcacgcccggcgtcgatatcagaacttcaaccccaaacaagccaactcaaagaaacaatggctgatctcatatggacagtttgcccaagaactcctctctactttcaacacagacattggcgagattgcgctgattccacgcacaggggggatattcactgtgaccatcttcccttctatatccgccagcaccagcacaacatcagattcgcagtccaactatgagtctgagtcccacttcagcaaagagggcacgatcctttgggatcggaagagagatggcggatttcccggtacgttacccttggcctcgactgagatgtagacgtaaattgatgtccactgacgacgagcagaagtaaaagaactcaagtcccgcgtccgcaatgtcattgatcctggacgggacttgggacatactgatcgagcgttgaagaagggggctaatgcctctagctctacccctgccactgctattactggtacaagtacaaatgctacagctacacccgcgtcgttatcggc

SEQ ID NO: 16858 - DNA, 765 bp, Emericella nidulans
gctccacgtttggcgggatctctgctgttgtcgcaaaagaagggacagctgggtaagcaggcgcttatgctgccttaacctgatactaatagggccagactatacaagggtttgtatccgctctggggccgacagatcccctataccatgatgaaattcgcttcttttgaaaatattgtcgaggccatttaccactacctcccgggccaaaagtcagactacaacaaaggcgcgcagactgctgtcgcattcactggaggatatcttgccggtattctgtgtgcgatcgtctctcatcctgcggatgttatggtgagtaagttgaacgcaaatcgcctgcctggtgaggcctttggtgccgccacaggcaggatttacaaggaaatcggctttatgggtctatggaacggcctccccgtcaggatcatcatgatcggaacattggtgagttcatatacagttattcctaggccgatgctaactctactccgtactgtagaccggtctgcaatggatgatgtatgtatttccttgctcgacttccaacctatccgaagcggaatcggagctttcaggcggcatgtactgacttaggttgacagttacgattcgttcaagatattcatgggcctgccaaccacaggaggtggtccagcgaaggagcagaagtagatgatggtaaactggttcttagggccagggtaatatcagattgtctaggtaggattgcagtgaaacaaactatgtagtaggaagatcgttatt

SEQ ID NO: 16859 - DNA, 767 bp, Emericella nidulans
gccctttgaacacgccgcaatttgaggctatcccgaagccgtctatcagaaaaaggaacgagtcaaagcgtcaaacaagccgagacagacaaacgcaacctttagcttcaccaatcacgatcctacccagaccgcagagtgctaaaagggagcaaatgcctagttcagctccgacgcctccagctcaaataactgcgagcccccgctctcggtccaacaaggcaaagtctccttcgcctcaaaaaacgttccaaccacagattctacgtcgatcggataaggtagatatttacgggctactgccaatacgaccgaaggagatggaagatagcagtcaaccaattagtcttgctgaagcttctggggccaaggcggttccgaactcgcaggctgatacttatcgacggccaagccagacacctgcgcagagagaagcactactctccctcttcggcaaatctggaccgtctcccaaacattcgcctgcggagttgaacctgcaaacttctttgccgaaacattcggctaccccttccgttgtcagcccactgacaccgcaccatcaaccggctggcagcgaaccctccaatagtgaccgagttgcgtcccctgcaaataaagcatttttacttggatttttggaaggagtcgctaaagggagcaaatgagttgtttgattgatattgctgagctgcatatgtctgtgttctagatctgacatagtacgattatacgttaacagagatcgccttcattatagtttcaaa

SEQ ID NO: 16860 - DNA, 768 bp, Emericella nidulans
tgcatgtgggcaagtaagcacgataatcgggaagttgaaaataccggtctcacaatgtgcctcgaacttatgaacaacatggctgaggtagatgtacaaacgtcgaacatcttcttccgtcaattctacatcccaatcttgcaggatgtatttttcgtactcacagacagtgatcataaagcaggtacgctcatcggtgccgcccgaagaggaaaaatacaacagtactaaccttctcaaaggtttcaaatcccaggctatgctgctgtcgcggatgttttacttcatcgaatcaggcaaaatccaagatcccatctactcccctgaacaagcacctatcgggtctatccaataaggatttcctccagaagtacgttgcggatcttttacagacggctttcaagaatctgcaagagtaagttctcaggtttcccattataaaagttgtccgatgtctaattgcgtgctagaatccaaatcaagcaattcgtcgtgggcctgtttgctttcaatgacgacttcaacaaattcaagacacaccttcgtgactttttaatttcgttgaaggagtttgctggggataatgctgaactgtacgccgaagaacgggaacaggctttgaaagatgccaaggctgccgagcgtgatcgcgcatgagggttggagggctcctcaagccttcggaaatggaccatgatgatgagctatgactcgatgaagaactgaaatccgagactgacttatcttcttcggcacatgtgatgaaat

SEQ ID NO: 16861 - DNA, 779 bp, Emericella nidulans
aaatccttgattaatggagcagcatcagtaccatactcggccaacccgtcgcttgccctatattgccaagatactcgtgtcctgttagggaccatgaaacgtcgcgccaagttcagacacgctcttatcagtccataaaggtgtctatggcctacaggtttctccagagatcgggaaagtccacactgctcggggttgaggccaaacgccgccatgaactccattgcagcaggtgcagtgccgacattcctacctagctgagaagcaatcgtacgctcaacagtgccaaaagaagctacatcgcctcatgatgaagttcgatccttttcacttccgtctttgagtgccttcccaggcgcgcttactttgttcttcaaagtctgtaggatacacctttgccgccacgctgcctttcctctcgccgaggcaccaaaatccatgattactgtagatgttttgatgtggaatgagttcgtatataccttccggctcttttaacgccttcatctctgtgcagaggttgacgggacatttggccagacacaccgttcgtacggatatcgtcccaaatccatacccttctcccacaccatttccgtctttgacaaatatgtgaggcccaataccatgggtcgctctaaattgttcgtctgtcgcaaggtataggtatggaaggtgtctactctgctcgcttatgggctgtataagccacaacctcaacctgcctttgcctcgaagttacgtagtccatagacaatccaactccaaaatagaagaca

SEQ ID NO: 16862 - DNA, 780 bp, Emericella nidulans
ccatccctcggcttctgacccttttctccttcattgtagagtaagaggatcgcgtattgcgcgacaccagtcaccatggtcaacctcttcaagcggatgcggaagctaaaaactgtacgtctctgatttcaattaactcaaattgctaacgtgtctctagaaagtaattctcccttgaccctgcctctgataatcggactcgctagaaaaaggatactatattcgaagcgagtcactagtgtcgctaacaagccaaatagattctcaatatccgcgtgggaacaggcgccgcaatcttcccttcagcagctaatgcaaccgctgaatacccggccgtcacacgcctacacctcacatatgctcgcaaaatctacggcggtcatcaaggtgcacggcacttttggcggcaatgtctcacccgactcaagtatcataaccccggtgttccgattaccgtgaaacagaccgacaaccaggacgggcccgcctctttaacggtatattttgcagagaaactcagcaatgctgcgtcattgaatcgtgccgccaaggacgagcatgcgcccgagccctcagcaacggagaagacggccaccgtggatgtccgaaacctcacttatcaagatatctggaataaagtgaagaacatgacgggcgcacaggaagtgcccccgactgaggaggaaaaggctgagctggcaaagtttgaacagatggcacagcaatcagtcaaggaccgagcccgtgtggctgctatacgacaggcgaagctggatcaca

SEQ ID NO: 16863 - DNA, 780 bp, Emericella nidulans
tcctcagttgccgggatcgaagcgaaggcggaactcgtacatccgtatcctgacatcattgtctcactagaccttgtccacaagcgtgcggaacgatcggcaacatgtcacgagcgggaacatggctcaaaatgctgggagtgtgagacttctgttgtgcttaccataccgacatgctaactccggaacgcgctttctagtggcatcgtcatatgcgttggcggccctgcactcgtcgagaaacttcgccccacagatgccgaactcatccagcgatataatccggagctccgagagcgcagtatgcgggaaggtgaccggcgcgcacaagaattcgacgactatgtcacaaaattgaaggaatggtccaagtctgataagtcgagtgcgtctctgtttatcaacccatgagctgagttcgtatagctgacgttggtgggtatagtttggttcgcggcaaaagagatggaggagaagaggcttgccgagcagcaggctattcagaaccaaaccaaggagcaagctaggatacagagagaggagatgaggaaggagttgatgggcgaaaaataggagttctcgaaaggtgtcgtccgtccggtctaaagaaggttggactggaaaggcgtggacttaaagaagcgatgtatcttgcataaaatcagcagttgaaatgacggaatttgtacggcgctggcgcggttcaactggtaagtgggaaattatcttatatgtattcatagcttgagataatgtaaagagtcccagctcatttgtcaa

SEQ ID NO: 16864 - DNA, 780 bp, Emericella nidulans
gcagccctgaggcaacaatgggctcaacatgcttgaccctaacccggctgatgacgatgactttgacgatttccagtccgccccctcagcaccctcgtcatccaatacattcagcatccctccacccgcttcaaccgtcagcaccacttccaccactcaatttgccgctcctcgaccagtgtccggaacacaagggtcaaacttgaatggcatcgtcggcttcacctcgatgacgccgacaccgacgtcgagtggtgtttcttctcctgttctcccaacgcagaactcaaagatagctcagcagccaagacctaccggctatcaggcggcgacccccaattatttcacttccgttgccacccagcaaacgccgtctgctcctttaggccaccggccatctatgccgtccacttcgtctttttcatctgcaactggtccgaccgctgcatccaaaggtagcaagcctacagcctcaaaggcctctggtgatgcattcgggtcactttggtccgcagccagtgcgaatgctggaattcagaagtccgcagccaacgccagcaaagggcctaacctggcaagcatggccaaggaaaaggcaagtgcaggtatctgggggacgccttcgcccagcttgtcgtcaccagtatcccagcaacaaccacagcaaggggcaaagacgggtagctcggggctggatgaccttctgggctaaatttattttcaagcctgtttcctcaactctcaaccttggacgatgtcttcttgtttggaaaatcactg

SEQ ID NO: 16865 - DNA, 786 bp, Emericella nidulans
tttttgattatattctctcataatcacggccaataaaacatgtctgtcagtatgcggcggtcgctaccgttgctccggctcgtcatgacgccgccaaaaatcgcgtcaacgcggagatgcttctccagcactcccctcgtgaaaaacgcaggatcaacggccacactgccagtcaagaagcccgttggagcttttcggggagggtgaatctatactcaaccaacagtgtaacgcaagatacggtttatgtactaatgcttgccaccagattatttggtttccttactggttccgttgttgccggtgctgtcgtctactactatatccttggcgagtacaggatatcgaacagcatgcttactgaagatatcgatgtacgttcctgcctttttggcctctcagccttccattctctgcgaacaatatacgttaggactaggctaattgtcataggctttacaaaccgcaacccaaaagctccagacttacatctctgagctggaaacacgagtagaccaactgcagaaaaagaaatgagtgaccactgtctgcatctatgactatctgcattacttgcaagtcatatttattgctgtactcatccctatttcggagttaggtctttctgcatgcacacgttgcttctggtcgtctggccttcatttttttcaagtgcttctgttgatcgtgattactctatctggagattctctcgaagctttaagagactaagctcactcaatgagcggtcgtgtacaataagatcaaatatccgttcatctattc

SEQ ID NO: 16866 - DNA, 789 bp, Emericella nidulans
cggtctccaatccaacaccgaagtacgtcgtcctacattacaatatctctagaagcctcactctgtgattgaagctcagatgaagtcgctaaccgcccaacagaccgactccgcccgcgccaaatccctcgaactagaaattcagaaccgcgttgctaaagaactcgagcgtctccgcgcgcgcgaacaacaaactcttgccgagattgagaagcgactgtccgaagccaaggacaccggcagcttcgcctccgctcccagcgcaccagccgtaacgcactatcccgccggctcactagacctcgacgcaccccggatccccttcgccggccgcgagtacgctcctccccctcctgctgctgtcgaagtggccgctgtgaataaggagctcaaccgagagtctgtgaactcagaaattgaagagttgcgcgttaagctcgaagggaggaagaagctggcggagttggatgagggtgttgcaaaggctcaaaaagacgtcgttagctgtttgcgcttgaatgatcggcggccgctggattgctggaaggaggtagctgagtttaagaaggaagttgcgcggcttgaggagggatttgtggatcggattgtgggttgaattggtatgatctggcgcattcgatatgatgttgtgtgagagcgctgtgagaccaagagcagcaggcgcgctttcgaaaatagatgtgctgtttatttatacttgtattcctactattcacttggggttatatgcatcttctttacgtctaatctgcacaagcatctctacgg

SEQ ID NO: 16867 - DNA, 789 bp, Emericella nidulans
gctgcgtcgcggtcttctcaattatacggttcagttcgcatgacagtcccagttgttggacgcgtccagcttgagaaattgtctaagccacgatacaaggggccaagctgatgatgattcgacggaatatccaccgcaagagatcttctgatcccgccacgagcggccatcggcggctcctgaaacgcattgctgccggctggtggccatgtcggcacagctcgccttcagtggggacgcgagagagcaagcaagggtcggtatcgcaaccttgaaacgtcatctacacagccttctgttctacccgaacggcaggctctggctactactctagtgggctaggtgacctcgttggattcgagggttgcctttgccaggtgcgtcagcctcctataggtgactactgcagttggaataaacttttgcgaggcagcaagggggagtaggcaccaactgtgacgacgtaggtgtatgcttgcctaaagctctgccacttctcgcctaaaggaatatgctgggtaggtcctggactgaagctgtgggttcatggcttggttgggtttctcttcttctgggccagtacggggtagcgcatctagttccacattttgttccgcatcttgtttgtaccttatagatcttggtaataggctgcaaaggtcatttactgagcgagctgtggttgagaaggggcgaaacgtggttgacaagggactttctgcagtcgtttgacccaatccggactctctatctccaacctctcctccctcttccctgtcccagcgggct

SEQ ID NO: 16868 - DNA, 791 bp, Emericella nidulans
gcctacgccgctgtgcaaggcttcgatatctcccactatcaggaaactgtcgactaccagggtgcctacgactctggagcgcgcttcgtcatgatcaaggtcttttccctattacccgggatttctaggttgttcatttgactaacgaagccaggctaccgagggaacaagctacactgatcccaagttcagcacgcactactcgggcgccacgtccgcaggtctaatccgcggcggataccacttcgcgcaaccaggctcgtcctccggagccgaccaggcatcttacttcatcgagcacggcggtggatggtccggcgacggacaaacgctccctggcatgctggaccttgaagccggctgttacggcctttcaacttcggccatgtcctcctggatcaaggatttcggcgagacttacaaggccgccacgggccggtaccccatgatctacacgactactagctggtggcaggagtgcacgggcaatgacagcggtttcggcgagtacccgcttgttgtggcgcgctggggaagcagtgttggtactctgccagcgagctggagtactcattccttctggcagaatgctgacacttatgagtttggcggggactcggaggtctggaatggcagtgaggacagcttgaagacttttgcttcaaaatgaggaatttcttcaggtgtggatacatacttgtcaaattagttctagtatagcatcggcagcacgtcattccataccccaatttggagtaacgttacctgatgcggggttccaatgcttataa

SEQ ID NO: 16869 - DNA, 791 bp, Emericella nidulans
ccgatagcccagcccaacgactgattgactgatcgatttaaccattccaggtcggccgccttactcattatgcctttgtcgccgtgctttgtaagtctatcctcctgaccctatcaagttcagaacgtttggaaatgtcaggcaacggctaaccgtcaccgtcggcagtctccgctttcctagcaggcgtcaaacgctcaacaggcctcacgtaaatcccccctccttcccttctcatccgcgcaaaaaagcaccaaaaccgtcccctctcgctttccgatgtttgttctatacaatttatagaagaaagaaaagctaacacctgcaccccgcgcgcaccccggccttctggcagggagcaatgcgtggggagtccaatcagccccagtctggactccgacaagatcaccgataacaaggacttcaagaagtggattgacaactacctgggtgtcggcgaatgggtgatggaccagtcaatcgcggtttttgggagcacgagctattttgagaggaagcggtgatacaacttccaactgttttcttggtcatctttgtggatgggaggatcatgtgtactgaagagacggcatgtcggtgaccacttgttggacccaggacggttccatccccgctacgctgatcatgttgatgttcctgtgctgcgacatgcaaattggcgttagggaatgctgttattcttatctttaccttataccatacattgagtgaacttggtgagatgaaacattcaaggatatagcttgcatatgagtcaccgtcacgggctg

SEQ ID NO: 16870 - DNA, 795 bp, Emericella nidulans
ggctctgcaaaaatggccgtcacaaaccagggtatgtcttacggaaattccgtcggctcgttttgttttccacgcttctgatcgcctctgattgagttgggattgttcttcgaagacggcaatggcgattagaccacccttccacgccaacaaagctacgggatgaatgctgatgttttttcttcgaatagcaatctcctcctcgcgccggaagtcgcgcaaggcgcacttcaacgccccctccagcgtgcgccgtgttatcatgagcgcgcctctgtccaaggaactccgtgagaagcacaatgtacgatccgtcctttccatccatcaagtcattctacaacgatcttccccatgcgcatcttgggcggttgagaaaagggtggactgaagattgatttgaggaattgggaacaatggcaagaggaccagagctgacggatatcaacctaacaggtccgctccatccccatccgcaaggacgacgaggttaccatcgtccgcggcaccaacaagggccgtgagggcaagatcaccagcgtctaccgtctgaagtggtgcgtccacgtcgagcgtgttgtccgcgagaagtccaacggccagagcgttcccctccccatccacccttccaaggtcgtcatcaccaagctcaagctcgacaaggaccgtgagcagattctggagcgcatcagcaagggtcgtgaggccgtcaaggccaagtccgcgtaaggaactggaactgggacttgcattttgtgtttctatggatgaatggcgtgggagtacaatgagatc

SEQ ID NO: 16871 - DNA, 798 bp, Emericella nidulans
tcccgtcttttgagctgtcaacgcttctcctctactcggacagcctacattctgattcaacaagatgacactccgctatgggtccttcgccactttcctgatagtatgccgtatgtatccccccacgcacgactcgtccctccgtaacccgcgcgaccaataaattctatctgtcccatccatgaactctcaatttatcagaaactaatagccaaacagcaacaagcttcttccttggcataatcttctccctctttccttacgactatccaattctctggtctacctcgcctaccgattcgaccgcctatgactccctcgaaacgcacttgcgcctcctccacgcctctccccctctaatcccacggatcctgcacatcgtcattttcttgggtttagcaggcttgattatgaaactatggaaaccttccgagtcaaacatgctctttgatggcgcgtcgcttgtgctctacgcgtgcgggatcacggtgtatgttgccaacatcgttaaggggctcagacttgccagtgggggtgtttatggggccgaactggccaatgctccagatgaggtgggacagattcttggacgagaggatagcttgaaggtgctcagtgcgagtaacaccattttggcgctggttttggtaggtgttttggtattgcaggcgggtcaatggtatgcggagcgaaaggatgcgcaggaggatgagtcatttgcggccgtgaagggggagggaaagggaaagggtgcgactaagaagaaagcgaactaagttgttatgcttgcgtcggctc

SEQ ID NO: 16872 - DNA, 799 bp, Emericella nidulans
tgccgtgctcatggcatcttatactcgtgaaagtctgaagccgacgccgtttgttgaagctttcatgcagtttgaacggcgccaaggccatggcaagtcccttaacgacttgattgacctccgatgcggccagtggattctcatttactgcattattcaagcactaccgctggtcgttgttgatgtccaggacgttcgttataccgacgacacggaatatttcctgtgcattgctcctcgcggcggcgcaccttgggtgaacagtgacggcaaggttgcccgtagctggttcggcgttgccggcggcaatggtctcgttagcttaccgtccgatgtggtcgttaacggtgtggaaggtgtctaccggcgcagccattgttggcaaatggctgagcaatggtgcgtaaaaggatgccatcttggggccgcaccacgagttgatgacccgtatgataatgagtcgtcaatctcatccccatatcccgcacaccaatcatctaccgggtcatcatctgagcatcccgcgcacctacagcggccgatgcctggacagcagatgcctcctactccgctgctgacccctggaggtggtcttgcgccgccacctgctattccgcgaatgaactcgcccgctctacgtgcaagggcagagcatcggcactcgatcaatcccggtctggaggcgctgccattaccagccggtgtggctccgattgatccgcccgcacggcccgtcagcaagttcaaccccaacatgagcttcgacgacatcttgaaacaggtcccgaaccaaaagggc

SEQ ID NO: 16873 - DNA, 800 bp, Emericella nidulans
ccctgcttcggcagcctctgccactcggcctgcacaagacgtcgacgcctcaagggcagagcatctcgccaacgacaatggcattgggtctagccgcaggaaaagaaataaccgaaaaaagatcattgaccaatctggagctgcctccattgatggtgatagagattcaggtgcggtggtaccttccgtcttttctgctcaagatcctcagttacctgttgatccgtttgtttcgtcgcccaccgacagtcaatggaaatctgatggtggtcctcaggccggatcctttcacctccaaggccccggagcggccaaaaaaaaaagccgagatgactccgctgtgccggcaagtgaatttgttctgcagcaaacgctacagagtctcgaatggggcgtggacagtgacttgcaaaaacaccaacttacagcgctccagcaagagctcggtagtagcttttttgcagctctgagagaccacgcctggaaccaggcgcaaaagactgtcgctgttccccgcacgggcaccaacttcagtgaatcgtctcgactgtcacctgaatctttgacgagagctaatactcagccgattctgagcggtcgccatcctatcgtataacctaatccgagccgccttcttcccttgtgttccaaattatcatctctcctcgcacctctcctttctgccgaggagacttaccatgaaacgcaaatcgacagagacttctttagacaaaagttctatttctgccttgattcgtttcaagctatacggcggttctattcttgccatcgtccactat

SEQ ID NO: 16874 - DNA, 801 bp, Emericella nidulans
gcgcgaatatgaacgtgaacgacaggcactcaaggagaaagaaaacaaacccgccgaggccaagcgacctgtcccagtaccgcccaaaccaagttatgatctctcatctctcgagcaagaacggcgtcttctccgcggcgaatgggagcggcaccaggattcaaagccagctgcggaagtgcagacacccccgcccatgccccctcgacgacctctgcctgaccctactactgcccagccgccaaagatccagacatcagagagtcgagtcgatcgcttcttgtcatcaaacccggcgcccgtggctcccaagcccgccactcatcgcttccaagattacactactacatccgaggtcgacgctgaaaacagccgccgcatcgcatctcagcagaagacccgcgcaggcgggtgggcctcgaaatccctcttagagcgggaaatggagcgcgacggcgagcgccagagggaatgggaagagaaccagaagcagactcaggaagctgcggctagaggcgcgaaggacccaacactcactgcgggacccggcggcgcttgggacgtacaccagtatggcttcatgggtggtgataaccagaaccgaggcggccctggattaggcgttggaggagcaaggcggcagattatcgggcctcgaccacctccataatttgatttgtcttgtttcgaactgttggcttgtttgtggctggatatttgtcctgtgttgctttgatccccctcattcccccttcgtatttatcaattagagatattgtttgagagcacaaagcttactgc

SEQ ID NO: 16875 - DNA, 802 bp, Emericella nidulans
ctgacctgacctggctcttatttatgtatctctggaggacgtcctaaacctcaaaataaataaacaatcacctcagaatgaactccgttgcgcagtcccaacctcagtcccaacagagggcagcccccgctgaagcgggcccctcgacgccctcccacactgaagaacaaaagcgccacttctacggaattctccccgaacaggaaaggaaagggaagagctacgcgcagtgggtacgagaagcctacgccgagcagtatgagaaatggatgccatggctggaagaccagtacctgaggtggttcgggaagggggataataaggcttcttacgtcacaaaaggtactcacagaggtctccagctccacgggttttgttcattcatgcgatagctaacactccatttagaaaatctctccaaaaccaagatcaccggcaacgagcaaattaatcgattgcaagacgatgcgaataacctcgtcggcaatcaactcggcgagaatggtttgcttgcacctgttggaaacctggtgtcccaggaaggtattaaccgggcggaacgcgggggaaaggacgagaatggttcttacgggggcccgctggggtttgtgacggatccggttattaaggagggcacaagtgtgggagctagcgtgacggatggtgtgaggggcgtagggaattcaattgggagtgttttgaggggaggaaagtagacaagtgtgatatcgtgaagggtccttggagtggttaaggaagagagaaggtttttgagttcagaatttggacttatggcatgtgt

SEQ ID NO: 16876 - DNA, 802 bp, Emericella nidulans; identical to SEQ ID NO: 16875

SEQ ID NO: 16877 - DNA, 806 bp, Emericella nidulans
taatctgacctgacctggctcttatttatgtatctctggaggacgtcctaaacctcaaaataaataaacaatcacctcagaatgaactccgttgcgcagtcccaacctcagtcccaacagagggcagcccccgctgaagcgggcccctcgacgccctcccacactgaagaacaaaagcgccacttctacggaattctccccgaacaggaaaggaaagggaagagctacgcgcagtgggtacgagaagcctacgccgagcagtatgagaaatggatgccatggctggaagaccagtacctgaggtggttcgggaagggggataataaggcttcttacgtcacaaaaggtactcacagaggtctccagctccacgggttttgttcattcatgcgatagctaacactccatttagaaaatctctccaaaaccaagatcaccggcaacgagcaaattaatcgattgcaagacgatgcgaataacctcgtcggcaatcaactcggcgagaatggtttgcttgcacctgttggaaacctggtgtcccaggaaggtattaaccgggcggaacgcgggggaaaggacgagaatggttcttacgggggcccgctggggtttgtgacggatccggttattaaggagggcacaagtgtgggagctagcgtgacggatggtgtgaggggcgtagggaattcaattgggagtgttttgaggggaggaaagtagacaagtgtgatatcgtgaagggtccttggagtggttaaggaagagagaaggtttttgagttcagaatttggacttatggcatgtgt

SEQ ID NO: 16878 - DNA, 808 bp, Emericella nidulans
tctaatctgacctgacctggctcttatttatgtatctctggaggacgtcctaaacctcaaaataaataaacaatcacctcagaatgaactccgttgcgcagtcccaacctcagtcccaacagagggcagcccccgctgaagcgggcccctcgacgccctcccacactgaagaacaaaagcgccacttctacggaattctccccgaacaggaaaggaaagggaagagctacgcgcagtgggtacgagaagcctacgccgagcagtatgagaaatggatgccatggctggaagaccagtacctgaggtggttcgggaagggggataataaggcttcttacgtcacaaaaggtactcacagaggtctccagctccacgggttttgttcattcatgcgatagctaacactccatttagaaaatctctccaaaaccaagatcaccggcaacgagcaaattaatcgattgcaagacgatgcgaataacctcgtcggcaatcaactcggcgagaatggtttgcttgcacctgttggaaacctggtgtcccaggaaggtattaaccgggcggaacgcgggggaaaggacgagaatggttcttacgggggcccgctggggtttgtgacggatccggttattaaggagggcacaagtgtgggagctagcgtgacggatggtgtgaggggcgtagggaattcaattgggagtgttttgaggggaggaaagtagacaagtgtgatatcgtgaagggtccttggagtggttaaggaagagagaaggtttttgagttcagaatttggacttatggcatgtgt

SEQ ID NO: 16879 - DNA, 809 bp, Emericella nidulans
cgcgcctcaaaggctcgattcattcaccactcatctcttccactattggcgttctaggacgcggacaggaccacggtcaatccgagatatcgcctgcacgtccacaatgaagttcaaggttttccatttatcgaccaccggctacctcatcatcttgaatctgtcatgcattatcgtctctgcatccagcttcgaatctttgctccgcggccttcaccccagcgttcttacccgcagtttaccgggctctcttgcttttgttccaggagaagctattggaaattaccagcctccaccagggcccatccattatggccctttgccgacgactgaccccgttagctcggaagcgcctgcgattgcttcggcagctgcgaatgcagatggtaacgacattggatacgggtcaaggcgggccatggctgcgaccgaaagccctgacgctgcggacgagtaagtcatccttgattatgcctgcaatgctacgaatgaagtttaatggtcgctgctagggtaacaagtcgtatcccctctgtgacggagatggatgcgatgatagcaaaggctcaagcggcatcggcgaataaaggcgtggcgtggccatcgatgggcttgatagtgccgatactcgtgcctttcctacagttatgacagaaacacagaatattgcgccgaatactccgcaacgtctcccaccgggaaaagacgtggctagagatgagttagcaggattttttggtatgactggacgtaccaattatatgtacagttacccatcgccactagatattatgtacatcgttcacatt

SEQ ID NO: 16880 - DNA, 810 bp, Emericella nidulans
tggcatccagcctcatctgcagtatgtccattcctcaatccaattcacccgctaccacaagctaactggtcctcagcatctcaaacccggtctcactcaccaactcaccgtcaacatgtcttacaagcaggagaaggacttcggcgagggccctgtacgttgtcaattcctctaagtggtcgcgctggtcaatgccgactgcgactctattgtgctaacaatcggtcttcctgcatatagaaggtccacaaaatccgtatcaccctcacctcccgcaaggttgcctctctcgagtctgtgtgcgctgctctgatcgagcgtgcccgctccaagtcccttcaggtcaagggccccgtccgtcttcccaccaagaccctgcacatctccacccgtaagacccccaacggtgagggttccaagacctgggacaagtatgagatgcgcatccacaagcgtctcatcgagtatgtacctccggcccttactctggagccacgagcttcatgagaaaaatgaatgatggaaacaatactaatcataaagtacagcctcctcgctcccactgagaccgttaagcagatcatcatcaacatcgaggctggtgttgaggttgaggttaccattgccgcctaaaatagttcatattccactctggaaggagggaaatgaactggcgcccgcatcaacccttagctgggttcatgacggtgtggttgtcgatgggcttgcagaagatctagcaacgctgggtcgacttcgatacccgttaaaaacagtcataaaaatggaagagttgcaaagcgtatacta

SEQ ID NO: 16881 - DNA, 812 bp, Emericella nidulans
cgagcgcctgaatacggagcatgagggtgattatatgcacgacgaggagcaagacgatgagaccatccagcatgctcagcgtgcgaagcggaggaagcagctccctaccattgagcttgatgaagctgttgagttcaaaggaaactcttatttccgaatccaacaagaacagttatccgagactctgaagcctgcgtcttttcttccccgcgatcctgtgctcctgacacttatgaacatgcaaaagaacggtgactttgtctctaatgtcatgggcggcggccgcgggcgtggctgggctcctgagatccgtgatcttctctcttttgacactgtcaggaaggctggtgagctgaaacgcaaacgcgacagtgggatctcagatatggacgttgatgctgccgctgctccagctctggaaatcgaagaagaggcgattgtcccggtggatgagggtgtcggcatggaatcaaccctgcaccagcgctcagagattgacttccctggtgatgaagaggatcatctgcgtctcagtgacgacgagggagctcagcagccacttgaagattttgacgatactattacaccagttgacagcgcgttggtgtcggtcggtacgaaacgtgcggtacacgtcctgcgggactgcctcggcaacgcagagcaaaagaaagccgtcaagtttcaggacctcctgcctgaaaagaaggctactagggctgacgcgaccaaaatgttctttgaagttctggttctggcaaccaaagatgctgttcaagtggagcagcgctcgaataccgtcggcggaccga

SEQ ID NO: 16882 - DNA, 816 bp, Emericella nidulans
cgcgagaatgccgacatgaccgccattttagacaaactcaacctagctggggacaacaaccgcgtcttctccatatctgacgaaacccaagaactcctccgcaaattcaagctcatcttcaaagacctcatcaacggcgttccaaccgcataccacgaccttgagatgcttctaacaaacggcaacaagcagttacaagacacatactcgaatcttcccagcttcctacaaaaactaatcgaaaaactccctgagaaatggactgagtcgcttgctccggagatgatcgccgtcgctgcggaacgagcaagtcggagcggtgtgaatgtagataatatcggcaaggcggcggcggcggcgaataaaataggaatctcagtaccgagcttgaaggagcttgtgggcaagcccgccgcgattgtggggatgttgaggtctatcatggcgttcttgagagcgaggttcccggctgtgctgggaatgaatgtgctttggtcgttggccttgtttagtaagttccttaccgtaacctactgtttaattcttgggttaattggctaatcttgcatggacagtcctcctctttgtcctctggtactgccacaaacgtggccgtgaagtccgtcttgagaacgaacgcctcgttacagaggaggaaatcgagaatataaaccaagagtcttctgagaataaggcggcagaaacgggaatgggaacggaaacaacacctccaattcgcagtaccgagactctaacgaccacggccgcacagggtgcatccgcatccgaggtccgtaggggcatcaaagaggcgca

SEQ ID NO: 16883 - DNA, 820 bp, Emericella nidulans
ccatctcttatttgcatattttgagaatggtatgtttaatttaatcaccaaatgtggacctgagttggataatgttggacgcgtggcgttcgttatgttgacatgtaaatcacagggcaaacgcaagaagtcaagccgccaaccccagcagcccaaaaaggtataacgaagtaacttctacttgatcgatgctaatctcaaggagcagaaagagcctcttccgagcacgtttgcatgccttttttgcaatcacgagaactcgattgtggtgaagttagacaaaaagctgggcttgggtcatttgtcctgcaaggtttgcggacaaagattccaaactggcatcaactgtaggcattgggctcttctacaacctctcaccaactaaccactttctatttgcagatctttccgctgctgtcgatgtatactccgactgggttgatgcttgtgatgctgttgccaaggacacagctagtaaatatgaagccgatgaatatgccacacgtcccagtcctcggacctattcaccggaaggccgcggcattggcgtcgcagagcctgccagcgacttgggggaggactgatgggattactgcacataggacatccctctctaaaatgcgaagatttcatgaattcccgccttatatatcagatttcgcctaggtacgatgccctgacgattacacctggccgcacagctgtgctgcataagtgttggttcttgctgtttaaacagattcagttcatacagtatgcctagggaacctcgtacttctatgagactagtactacagagtatagtagcggtcgccaaagt

SEQ ID NO: 16884 - DNA, 821 bp, Emericella nidulans
tcgctatcaggggcgtctctcaaaatcgattatcttgtagttattacttagttgctgtcaaaatggcttccgagaagaaggacaagctcgaacgtaagcgttgcccaccatacaagctcctctaagttcactaacgccgattccagcccaaatcaagtccgtcgacatggtaagagctctgatgctatgcgaatatattgaggctcacgaggggatagtcggaggacatgcagcaggaggctgtcgaagttggtatgaatatcctctgcgatttatgaggttcgaggctaattgtttagctatcgaggctatggagaagtatcatattgagaaggtatgttcttgctgcggacttttgggcccgatacatgcctgtcgatactaacggcacctaggacattgctcaatacatcaagagagaagtgcgcgccgcccaaccaaacctacgatggctcggaatcttacaatggaacagtttgactctcgcaaaggcgctacatggcactgtgtggtgggaaggaactttggaagctttgtgacgcacggtaatgccgcattgcaagtgatgccgagtatagacacttgctgattgatgcctaccagaaacgaagcacttcatttacttctacctcggccactgcgctatccttttattcaagacacaataagccagcggaaaacaacactcgatacctttcactcaagtcggaaggaacgcatatgctacttcaactcccataccactttgtcacgattccccaaccgcattgagagaacacctcgagccaaaatagtcataactccttagcatgcgacatttt

SEQ ID NO: 16885 - DNA, 822 bp, Emericella nidulans
atcgccctcgcaggcaacaagcttgatcttgttaccgagaaccccgacaagagggctatccccactgctgatgctgaagcatatgcgcgcgaagccggtcttcttttcttcgagacttccgctaaaacgtcttcaaatgtgcgcgaactcttcacagccatcgcaaagaagcttccacttgatcaagctggaccccgaaacatgcgaacagcacctcgccctggtgtagatctccgaccggaagcaccgggaacccaaagtggcggagcgtgtaattgttagagcctattcgatccgtccgtttctgtatctcttgtccgcggatttcctcgttgtccatctttccttcgctctttagacaaggaaggcgcacgcctcctatagtgactgttcgccttcgttatgagcatgaagtcgcttgcgccgatccattgcgatgatacatgtttaaagcggtttggagctgggttaatctgctcgcgttggccactcccgtcatactgcgcttttctaataccccggttcccatgatccggtatctcggtctctttgttactggaacaaggcatctgatgtcggtcattgcgtgtaaacattcagtgctgtgcaatgatccattggattcgaccgttggccagtaactcaggcagtttgagtgctgtttcattgtgctttttccgtctgttttttttttttcccgttccatctgctatcggcgtctgtatccttcctcgattgggtccaatctatgctatttttctaacaccgtcgagtactctttagtttcagtgtgtgatgaccatataatatctgctgaatctt

SEQ ID NO: 16886 - DNA, 828 bp, Emericella nidulans
cgaaggccgtctcaagtccatcaagaacatcaagaagatcaccaataccatgaaggtcattgcctctacccgtttgacccgcgcccagaaggccatggacgactcccgtgcctacggtcagacctccaacaccctcttcgaacaggctgagaccaaggcccttgaggacaagaagaccctgctcgtggttgctagctccgacaagggtctctgcggtggtattcactccggtcttagcaaggccgctcgccgcgctctcgaggccaaccccaactctgaccttgtggttctcggcgagaaggccaaggcccaactttctcgtaccaaccccaacgccatcgtcctcagctttgccaacgtctgcaaggatatccccaccttcgctgacgcccaggctgttgccgaccaaattgctctgctccctaccgactatgccagcgttaaggtcatctacaacaagttcgtcaacgctcagagctacgagcccgatactgtcgaggcttactctgaggaggccatcactcagtcccgttagttccggtttccattccagaagctcttcagtactgattgttgtagccaacttctctgcgtacgaggctgatgaggaaacactctccaacctccgcgagtacgctcttgctaacagcctgttctgggctatggctgaaggccacgcctgtgaaatctcggtaagtttgtgtttacgatacgtttagccaataatactaattcaataacaggctcgtcgcaatgctatggaggcaagtattctcgaagaacgtgtggtggagatataattaaactaacccttttccagaacgcctc

SEQ ID NO: 16887 - DNA, 832 bp, Emericella nidulans
acctccaagtgctccctaaaatcctacaagaaggggtcatcttcgttgcctgcggcccagctgtcctcctgcaagcggcgcatcccggcctcaacaccgccagcagtgcaagctccaatctgactgacgacctcacatcgtacctccatgcagccctaagctacatcgcctgcctcgtcctcggcagcaaggacgaaaaacaagcacttctggctcgcttagggctcggacaacctcctctgcagtcgagcttgaaggtcacatcgcccacatcacaactctggctcgtcgcgaccatctacgcaacagcggcagacttctaccagcgcatctacggggccttcgactaccgcactgccgaggcggcgtatgacgaattcgccctcgtcctgcgctatctatcgcctaccgtgcttccatccgcctctgccggcgaccagagcctgtcgcaagtatcctggccgtcaacgcgcgccgagttctggaagtactgggacgccgagctctcgaagctcgtagtctctgcggcggcacatgatgtcgcgtccgagctgcagaagcgggatctaccgcgaggagtagggcttacaaagcctgtgctgagggctattacaatcgagatgcttccagagcacattcgggacgggtatggggcgaagagcacgtttatgacgaggcagttatatgcgactgcaattgggttgttgaggcctgtttacccttgccttcccaaggggtggtgatctggccccgccagctattaaagaaccccgtgcggaaggagattaagtagacgtggtaggatttgatcattatttctagaaactctcta

SEQ ID NO: 16888 - DNA, 839 bp, Emericella nidulans
gatcttgggtccgctttagaagaagtcgagcagtacttcaacatccctgatttctacaatatcggtcttttcggctgctgccagggcaacgtcaccaacaacaacgactaccgcgtcaccaactgctcttctccagaagcacagttctggttcgaccccgttgaagtctggaatctcaaaacccttggcctgcagaacgccattcccgacgacctccaggatgcactgaatgtgtacaagaacgtctccaaatggatgtgcattgcctatatcatcgccttcgccgctacaggtcttgagatcctcctcggtatcacggccatcttcagccgttggggatcctgtgtgacgaccctcgtcgccatcgcagcgttcctcttcacccgccgccgcctcggctacttcgaccgccatgttcgccgttatcgctggagtcttcaacgacaagatcaagccgtacgggatcgacggacacatgggccgcaacatctacgccgccacctggctcgccactgctttctcgcttgctgctgctttgttctgggccatcagctcctgctgctgctccggccgctcgccatataaccaccgtcacggccgcaaccgtggtggcatcactgccgagaaggcgccttacacctacgagcccgtcggcgaaggctacccttcgcctcaaccgcctttccacgccagcgcccctaactactctgcgcagcagcggccaaccgcctatgagccataccgccacgtctaaaacacaaaaataagaaaacaagcagaaaattatctttggctcgattcctcttcgagtgaagagtgacgacattatgcaagttgca

SEQ ID NO: 16889 - DNA, 840 bp, Emericella nidulans
  unsure (1)..(840): unsure at all n locations
cgcaggtgcctggtactgtttgccctcgtcaaccagggcgccgcactcgtcttttaaatatacatctcactgccggtgctccgnggaaatcgatacactgtcaccatgcctcatttccaccacaagcgacgtcattcctggccatacagcggttcgaccaaggacctgaacgagcgcaacctgcccgtgatcacggtcacgggacctgccgatgaattcgaaggccagtttctgaccccagtcgaatcgaacgaatggttcgaggacgacgccgcatctgctgggatcgttcgcacccagccgacgcattcacaccgactatggcatcacaccaaagacaagccggagaccaaccgaaccaccaccggtacggtatcgctgcgtaagatgatgcagccaccacttgatagagcccgctcgcttttcgttttgccctcaacgtctgcgaaggaaacggtatcgctcccagactgggtccagaaactctctgcccatcccataaacaccaaggagaggggaagaccccgagatgacactcgagaccgcctgatgattgagaagaatcatagacgctgccactcggagcggccgcgttcctggaagcgaccaagcgaggatttgtggacattgctggaggaataattcgggtcatcctgttgcctgcattttcatggtgttgcatcattggtatttttgtatcgttctttgattatgtttccatagagcataatcctggcgtacggactggaaactgcatgtgttgttcagatgtattgctcatctgttgtccatttttttgcttgtttgcattattatcgaaagattgcatggttgggctaa

SEQ ID NO: 16890 - DNA, 845 bp, Emericella nidulans
tggagtcgggcatcgatgagaggctgattctattagttaacaggaactggtgagacgaagaaaaagcaatgctgcagcctataagacgagctcttttcagggcgatctgttctagattcccatctagcaccgctgaatctgatgcagcattacgtatggctccatgttctgaggaaggatgaagaaagttattgttttgactggtcactggggatatgattagttgaaaatccctggaaacatcaggcaaagagaagacctgtggagtcccagatggctattattatgcctccccgccttaaacgcccaaaagtctacagtgcagtacactgcttgccccatactcactagaaggatcgccctttcagctaatataacgaccaaggaactaaccaaagtctgcaattttaagcgaacaagcataccccctaacctgggctgtccttagtgcatcgtgagacagttcagcctcagctcctggtaccctatgccatagtgtatatgacgtacatccagagtctgccaatgccaagagaacaaggaaaaaggaattggacgtttcccaatcgtgatttctgtgcagcattatatggctgacacctcatatacatcactgttaatcgtcaccaggtaactcgcagctgacctcttaccaagtcaagctcgaggcctgaactactgtatcccaggtactccgtacgcggagccccttcatcaaaccgaccggtatataaatatattgatccaatcagcgtcagcccctgtgataaaccaagattaacagtaacagcgggccatgtggagtagagtcaagaagtaaacaagcaagcataaaagagtcaaaa

SEQ ID NO: 16891 - DNA, 851 bp, Emericella nidulans
tcgataccgcctgggaccacaagattgatgtcgtgcgcaaccaacacaccaaccccaccagagcagccgtcgttgtgccatccaagaagcaagaagccgtccgcggcaatctcaagacggacgccagcgcgctcgagatctctctaacatcctcggaagaaaaaagcgccgccgagcaaaaggaggaagcagcccgcaaagccgcgctggagaagcaaaatgcccttccagtctggcacacccactccacagtctccacaacagctggcaacgtcagctcgatcaaaacagaacccgacgtcaagatcaagcccgagcttcttaaggaggaagaagaccagaaaccgagcctcgttgatctggacgacaaagtcgccgcgtactacgccgaaatggagcgtgagaaggctctacaggcacaagaagatgccagcagcgccgaagactcagatgaattcgatgagttcgaggacgtcggtgtctctgcttctgcttctccggctgtggggggtgtgaatggtgctgacccaactcgtgcaccgagtggcatcaagcgggagcttgatacagattccgggaccagtgcgccgcagacggcgacgggaacgccctcgactccggcggatgaggggccagcagcgaagaagatcaagactgagctggaaaatgaggtcaagaaggaggagtctgatgaggatgacgaggagtttgaggatgtctagttctcttttctatgggcgctggccgtcaaagtactatagactaaagattttgtgttttttcctggtcacgctctggcttacttaggtgatttatcaagcacgagaatcgaaatatgtgaaatcatctca

SEQ ID NO: 16892 - DNA, 862 bp, Emericella nidulans
cgggcgagtgctcaaggaggatatccaccggtttgtcgcgatgcgggacgcaccgagcgcaactccatcactgtcacaggacgccgacacagcggttaacctgacacacatccaaacccagatgttcaagacaatgacacggtcacttacgattccgcatttcgggtacgccgacgagctcaatatcaacaacatcacagccctgcggaagaaaattgccaatgacaaaagcgatccgaggaagatcacattcctctcatttgtagtcaaagcggtgtcccttgctctaaacgactaccccattctcaacgcaaagctcgacaccagcaatgctgacaagccgcaactcatcatgcgcccaagacacaatattgggattgcaatggatacaccgcagggcctgatagtccccaacattaaggatgtcggcagtcgttccatcctagatgttgcccaagagatctcgcgtcttagcgcgctcgggaaggaaggcaaactcacccctgccgacctcagcggcggtacgatcacggtctcgaatattggaaacattggaggcacctacgttagtccagtgcttgtccccaacgagctggccattcttggaatcgggagggcaagaacgattcctgtttttgatgatgctgggcaggtaacaaaaggcgaggttgtgaactttagttggagtgcagatcatcgagttgtggacggtgcaacaatggcaaggatggcgagcaaggtcaaggagcttattgagtcgccggagcgtatgctcttgagtctgcgatagcctgtttctgatcaagaccgcagtaattagagctaatagactttaatgaacgagtgttgagaatattgcttg

SEQ ID NO: 16893 - DNA, 866 bp, Emericella nidulans
cacagtcctttgacaaccacattcttttgtctgtagatcagacccagtcaatccttgatatacttatcaacctcgttcgtccagtccacacgacagacaatcacaagcactctttgaaaatgctcttcaacaagatcatcagcctcgctgctaccctggccactgcctcggccctgcctttcgctccggcgccccgcagcatcagcggcggagtcaccctcatcaacaacctgtcccaggacctctacctctggtccgtctcgggcaccgcctcacccatggtgaccttgcccgctggccaatcctaccaggagacctggcagatcaaccccactggcggcggcatctccatcaagatcggatgctctgaggatggctccaacgtgctgcagtacgagtacaccaaggtcggcgacctcctcttctgggacatgtcgagcatcgatctgagctcaggctcgccgctcgtggctgccggcttcgatgtcagcatcgatgacagctcgtgcgacaccgtcacctgcgcccccggcgacgtcaactgctccgaatcctaccagtaccctgacgaccacaacacccgtgcctgctccagcagtgctgcttataccctcaccctgggtacagcgaactaagcaaaacaaaatcgtccttgaaacgtcatgtcactctttcatttcccggcgtttcttggacttccacgacccgcatataggcaggccctcgcccaggcaggcggtcttacgactcatgacggatgcgctctagtagcgctcacggtatatatgggaacggaacttggcgcatatgaaggatataccagatacctagggttgggatagattgaaaaatacaccactttacac

SEQ ID NO: 16894 - DNA, 866 bp, Emericella nidulans
cctgttggactgagtaggatggctattcgctcatgctatgcaccttgtcagcctaggcaagggcccgtcttttgagatgcgtaagcacggattgcagctgggtcagcattcaacaaggaccaggggagcagatcgagcagtgctgcaggctgcggctttcgagccgggccataggctggaaaggggcattttcgcgtctccgagtccacagctgtcaaatccagattcctgttgaccacggtccatgaatttgaccatacaacccagcttggttgggtctccctgggagtgctcgataggttccaggtcccccgctgactcagagcaacatctgattctttacatatcaacggccacctcgcagagaatttgcacaagtcttgcatatccgccgccccccacagtttgttggaccaacggctgggacaagcaaatctggccgttgagccagagcgagagccaacgccgccgagaagatttggaatctgagatctggaatttgagtgcagctcagcctatcggctggggtctgtaccacatctgacgatggtatttcactgctaggctgtacgctgctcttaactcggccacattccgtgagcaaagtgttggacaagcccatccaggacgggggcttctatccaaccatgctcgtggcatgccatggtgcctgagaagatagtatagccctctaggatccgcttgagatactggcacggggcggcagattgctccctagagatatctcctcacaccccttgtccgttcatacggtattactttgcggtttcttctctcagaacctaacacaataacgtagctatatctcaataaagtatgaatcatcattcatctgccaagttgct

SEQ ID NO: 16895 - DNA, 867 bp, Emericella nidulans
ccctccaaaactgtcctgtactcgttgctaaattctgtgatgatgttgagaatgatgttggcgctgttgccgagcatggagtcaccgagttgagccagttcagacgagtacttttgcagcgaggacgagattcgagatttgatgtccggcagcgtttgcttaatgtgcatcataaggatctactccagttagaatacgctttgtagcagtgcgtggaattactcaccaagttgagcttcctggcgaggtacggcgttccgcagtaagacgccttgttccggtacgccttgtggctctcaaagaagttcttctcgtgctccaacgcgtaggaaataggccgcttgttctcaatgtcgcgctgtccacgattgaccacaggaacgtaacccaggcgcagagggataatcctgccagcaagaatatctaccacgtctgtaccctcgtccatgagatcgactttggtcaacacaccaatggtgcgctgaccttccgggtccacctcccgtgcgagcttcagtccgtccgagttggcaagatcctggttggcagcagtgacagccagaacgatggcatttggcttgctaatgtatttcaaaaccatgtcacggatctgcctctcaatatccttcggctggtcgcccaccggcaccttagtcaaaccaggcaaatcgacgagtgtcagggtaaggacgttgggagagtaaattcgcaggttgatgggagcggcggagattccagcgttgcggccaaccttcgtttcggtttcgcgaacgatttcatcacggatcttgttgaagtcgtagaacttctggccgggaatgtgcaagaactcgccatactcgtcaagattcgcttccttatccgtcg

SEQ ID NO: 16896 - DNA, 871 bp, Emericella nidulans
cacagtcctttgacaaccacattcttttgtctgtagatcagacccagtcaatccttgatatacttatcaacctcgttcgtccagtccacacgacagacaatcacaagcactctttgaaaatgctcttcaacaagatcatcagcctcgctgctaccctggccactgcctcggccctgcctttcgctccggcgccccgcagcatcagcggcggagtcaccctcatcaacaacctgtcccaggacctctacctctggtccgtctcgggcaccgcctcacccatggtgaccttgcccgctggccaatcctaccaggagacctggcagatcaaccccactggcggcggcatctccatcaagatcggatgctctgaggatggctccaacgtgctgcagtacgagtacaccaaggtcggcgacctcctcttctgggacatgtcgagcatcgatctgagctcaggctcgccgctcgtggctgccggcttcgatgtcagcatcgatgacagctcgtgcgacaccgtcacctgcgcccccggcgacgtcaactgctccgaatcctaccagtaccctgacgaccacaacacccgtgcctgctccagcagtgctgcttataccctcaccctgggtacagcgaactaagcaaaacaaaatcgtccttgaaacgtcatgtcactctttcatttcccggcgtttcttggacttccacgacccgcatataggcaggccctcgcccaggcaggcggtcttacgactcatgacggatgcgctctagtagcgctcacggtatatatgggaacggaacttggcgcatatgaaggatataccagatacctagggttgggatagattgaaaaatacaccactttacactacct

SEQ ID NO: 16897 - DNA, 871 bp, Emericella nidulans
aagaatatgtcctttctgcaccaattttcaacttttcgactgagtcagtcagagtaaaattccgtccttacgggagcagtgggattgcgccaaatttgtccttttgagccatttcacggttgagttaccccaaatatggtcagtcatgcatgcaatattagtcaaaaagcagcttgttctaacctcactgttctgaaggcttttccatccaatggctcaattcttcggtctctctacatctgtgccgtttccttctttctggacaatggcctaccaaatcgcaatcttcttcgtcatggaagacacatggcattatttttcccatcgagctctccactggggtccactttacaaagccattcacaagatccatcatcaatattcagctccattcggcatggccgctgaatatgcgtcacctatagaggttatgattctgggatttggtactgttggatgcccaattgtatggtgcgctgcgactggggatctgcatatctttacgatgtatgtttggattgtgcttcggttgttccaggccattgatgcacacagtgggtatgagttcccatggagtctacaccactttcttcctttttgggctggagcagatcatcacgaccttcaccacgagaagttcgttggcaactactccagcagtttcaggtggtgggattatgttttggacacagagtacagtcccgaggcgatcaggcggaggcgggatcacaaggcggtcggcggtgcgaagaaaaccgaataacgctatcgtacttgaggtctcgtgggtaatttttatttctgcactgctgtgatacttagaatggcattaatatgagcattgtcactccccttgccaggagtacttccc

SEQ ID NO: 16898 - DNA, 872 bp, Emericella nidulans
ccactttcctcctgcccgtgatatcaatcctcacatctgcggctggcggcggcgtcatctgtgagagcagcagcctgagcgcacgacttcgcgtccccgccatcatcgtctcctacatggagctcggggcaggccttgggctggccacctgcatcgacgcctgcattgtctaccaccacttggaccggaagtaccccgcggtacggcgaggcgtaccaggacatggtcctgtgcgggccctttggacaggcgagctttgcgctgcagatactaggcactgccgtccagcacagcttcggcgcgtacaacagggggctctttactgacagaaactcggcagcgccgattctcggtcagccagtttgccgggttgatggcgtggggatttggcacgttctggtggattttggctatactgagcattgtgtatacgctaaatgtgcagtcaggggggttgagaaatgcggcgttttcgctgagtgcgtggtcacttatttttccatgggtgagtcgggaggttctttttccccctctggatctggtaactctaacatactcgcacagggtgtatataccaacggggcagtgcagctgggcaagttgatgaactcacctgcgttcgatgtgtggtcgacggcattgttgctgatgctggtcatcttgtgggctgtaatgaacctcttcactatcaagggcatcgtaaccggaaagctgttgggactggaaaagggttggagagttcccaagagcgagcatcagactgtttgatgtacataaaatccattcttgccagatgagcagctgtaaaaacagtatactctgtgtatatacagtttacttctatcactgattatatcacgttcattaaccca

SEQ ID NO: 16899 - DNA, 872 bp, Emericella nidulans
cgctttgggtctccgctcctgttttcatttatctttcccattgcattctctgttagccatctacccgttttttcgatcgtcttccggtgtccaccgcttcgatccgaccgcgttttcattcgtcattcgctctactatcggcaatcttagactcggacttctcaagtgtattcggattattgaattcgccggttgtgatctttcataccgtttgaatcctgagttttggatttcgtgtggaaggcgccgatgtcgacattgaaacgcttcatatagtggctatatttacgtctcagtcaccgcggtttcccccagctcgtcggatctgtcgactttcaagtttatgtccggcgatacgtggtgtgactggacggaaggagatgcaattatctcgatcaactagtcttacggagttcatggtggtctgacgcttgagtgctcgtcagattcgtcaagactctcctgcggattgtttttcgacaaccatctgcccacttccccttgtttgtgcatgtttatggcttccgcatttcttaatttccctccgcattgcaccgacatttgttatttgcattttcagactgtcattgtggcttattgacgtatgactggggacgaaggagacgaaggaacgactggcgaagaggggatgactagttaggggtgtggtggagtgtcgctttctcgcacgaatgctctcggtgatttgagccgagtagcagaatggacggtgagggcgatgtacgcgggagcacatctttggtattgggtgaatggcgaaggaaactggctagggtcgcttccggggtggtattacgtcaatctatgctgtttctcttagtttattaaacatccaactgtttgcgctcctt

SEQ ID NO: 16900 - DNA, 877 bp, Emericella nidulans
cgacgacaacaccacgaccctttctccagagtccggtcagatatcaaaaggaggctctgcaaaaatggccgtcacaaaccagggtatgtcttacggaaattccgtcggctcgttttgttttccacgcttctgatcgcctctgattgagttgggattgttcttcgaagacggcaatggcgattagaccacccttccacgccaacaaagctacgggatgaatgctgatgttttttcttcgaatagcaatctcctcctcgcgccggaagtcgcgcaaggcgcacttcaacgccccctccagcgtgcgccgtgttatcatgagcgcgcctctgtccaaggaactccgtgagaagcacaatgtacgatccgtcctttccatccatcaagtcattctacaacgatcttccccatgcgcatcttgggcggttgagaaaagggtggactgaagattgatttgaggaattgggaacaatggcaagaggaccagagctgacggatatcaacctaacaggtccgctccatccccatccgcaaggacgacgaggttaccatcgtccgcggcaccaacaagggccgtgagggcaagatcaccagcgtctaccgtctgaagtggtgcgtccacgtcgagcgtgttgtccgcgagaagtccaacggccagagcgttcccctccccatccacccttccaaggtcgtcatcaccaagctcaagctcgacaaggaccgtgagcagattctggagcgcatcagcaagggtcgtgaggccgtcaaggccaagtccgcgtaaggaactggaactgggacttgcattttgtgtttctatggatgaatggcgtgggagtacaatgagatcctgctgaatctgatcttatcttgattctct

SEQ ID NO: 16901 - DNA, 878 bp, Emericella nidulans
agcagcacttctacaactagcggtgattctacaacgacaaacgcgaatggtgccgttgtgaccacctcgagtgctaatggacaacaggaaatggccaccagcacggcgtcggcagacaacgactcaagtaagaaggacggacctaatactgctgccatcgctgcgggtgtggtcattggtgttgtgggtctggctgctctgataggtgctggcttcttcctctggcgcttcaagaagcgcacccagctgatcagcggatgcgcgaaatgagcaacgttgaacaattcggcaaacccatgtcgcaagactccatgtctgaccatcggtttgatggtgactttatggcccacaggcgccagagcaacggtagcatcgatgatgaccgagatttctctcgccgggtcttgcaagtcacgaatcctgaccggcactaaccgttgtgtctactacccagtatttgcacctcatgatattcggtttgcacctccggatttacattcacgaactcaacctgtcttagcggacaatatcgccttctcggataagctatcgaatccgccccatagtttcaagctccgcccattggtcgtcttccacgagtttagggtgccttggaattcctcgctagactcaacgctagattgacagagcaactttaccgcggatcgcggatgagattttggtatgaaggcgtttgggctggttgacctttttattctaattcaaaatatttcgtatttattctgttacctgtatgttcttgaattgagaaccacattttttctcatgtcctttttggttctcaatcatgtcgtgcaagcatgcagtctgcacgcctggctcccaacagggatgcgcttcgttcaattggcacgcgg

SEQ ID NO: 16902 - DNA, 888 bp, Emericella nidulans
aaagcacctttttgtaaatcagttctgaaaaaaggaacgatgctgccaccagctctaaatattcctaaatggtatctccctccggaattccttccacacacctgcatgcctttatagtatttactgatctacccctcccccgcttcctccaaccccggaacaggtcaactaacagcaacttccaaacccatccaggcttgaagccaactctcacctccttcagcccccggtaaacaattactgcgtctaccacccctcctctcccgcaacctctgggtacacggtgatgatagtcggcggcccgaacgcccgcactgactaccacatcaactcgactcccgaattcttctaccaataccggggctccatgctgctcaagactgtggatacgagcaccaacccgcccaccttccaagacatcccaatccatgagggttcactgttcttattgcccgcgaacaccccgcactgccccgtgcgctttaaggatacggtgggcgtcgtcatggagcagccaagacctggaaatgcggaggatgcgatgaggtggtactgtcggaaggagggatgtggggaagtagtttgggagaagaggtttgtctgtacggatctggggacgcaggtgaaggaggtggtggaagagtttgcgggcgatgagggaaagagaacgtgcaaggcgtgcgggacgattgcggagtcaaggtttaaggaaggggaggtcgtacagcctcccaaaataccggagtagatcggtcagatgcgatgatgagatgaggtatgacaaaaaaaaagtagggtgtcagagttagcaaagcaaacggtgaacaccatgtataagttagaagacttctaattatcgattatggcaccagtggctagtactagtag

SEQ ID NO: 16903 - DNA, 888 bp, Emericella nidulans
aagcttttcgcaggtggagttactaggatgttgagatcagggacatctcctttttttggtgtccccttgcgtttactgcgatggagggtttttttaaggcgaagggcggtcttattgcgttcagttgggagagaaattgaagggatgcagacgggcaactgaatcgcaagggaatagcatgggatagaggattacacagtaccatcgagggtaaacgcgcgctgacctgcaattgcctacagcgactacatccagatccgctctcccgtctacctgcctcacaccgctggccgctacgccgccaagcgcttccgcaaggctcagtgccccatcatcgagcgcctcaccaactctatcatgatgaacggccgcaacaacggaaagaagctcatggctgttcgcattgttgcccacgctttcgagatcgtatgtgtacccacatacggcaaactggttgagtatttgaataatggatcagaaaactgacttgatatcagatccacatcatgaccgaccagaaccccctccaggtcgccgtcgatgctattgtcaactgcggtccccgtgaagacagcactcgtatcggttccgctggtaccgtccgtcgccaggccgtcgatgtctctcctctccgccgtgtcaaccagtccatcgctctcctgaccatcggtgcccgtgaggcctctttccgcaacatcaagagcatcgctgagtgccttgctgaggagcttatcaacgccgccaagggcagctccaactcctacgctatcaagaagaaggacgagcttgagcgtgtggctaagagcaaccggtaaaacggttttgttgggtgtattctccgtttatggtcctatttcatgcttactggagtggacggggagtttctgg

SEQ ID NO: 16904 - DNA, 892 bp, Emericella nidulans
cgttacccgcgctccagacgagtggtcgcacagacatcaccaatcatcttcgtctgttcggtatcattattagctaagtcgggctccgaaatagatggttcagcattatggaactgaacaatgtctcagttattttaggagcgttttgtttctattcagatataacaattgccacgctgctcaggggagagctctggatacttcgattcgaattccaagtgtccaaacagcatctctggcaaacctacgcaaagtcaatacggctcgatgagttagcaaaccaagccgattgggtgccgcttctgaccagctgacttgacgggtggacttcgcaatatgataacaattaatgacctgtgacgaaaactggagaatcggtctttggtgggcgcttgggcccatcctttccgacagaacgtacgagaaccattgccgctcagtctggactctagacgtgacccaatatagttcgtccgtctctatgctagcctatgctagccgttgtgggtagccatgtggtctaagccatgacttgcagcccgacgcctgggcaaatacgtggaatacccttcgatttctagccagcgagtgattaaccttcggcaagtctgcttacgccgggctgctcattgttggggaggtttactggtcagcagcacacgagctctattccacaagcagtggctcgattgagccatccggactttccaacaaccaggcattcgtggacaagtggtaattacacaaagcagacacgctcggcattagtccaaggactctcaaactccctgtctcggcgtcccgggagggtgggatctcgtcaaacagaatccggagcatatctactcaatgttgaccacagttataggttgaattcgtagactctattaca

SEQ ID NO: 16905 - DNA, 896 bp, Emericella nidulans
ttccatctacagagtaccacaatctacaatcactatgcttcgccaatccattactcgtcctctctccacgacatcccgtgctatcttcacccgccctttctccgcaattgctccaagaatgggtgaaggcgataccggtgctccccggcctggcggtgctgcgcagaggtgcgtatacagaatgcttttgcttctcactactctgagacttgagcaaactacgttccttgctccatctcactgcgttttcatgcactttgatcggatgatgtcatatcctcgtccaagctttagacaacaccatcccattcagttctcaggccagacagctaacatcttgatctcgcaattcagtgatgtgtggcagaagcgagaaaccgctcaggagaacctctacatgtacgaaagagagaaggaaaagtaatactcctacctcgcagtgcctgcaacgaccggtgaccgctcttggacatcttactgacctcagaatccaatttcataggcttgaggctctgaagaagaagattcaagagcaacgtgagcacctgaatgagctagacaaaaagctgtatgctttaattcctccaccccttggtggtcccctgcgatttcgtgccgggtggaactttcagctaacgtgattccactaccagtgaccaattcacccagaacgggaagaaatgaacttgatttattaaagctattctgaaagtggtgctcgtcggacatgttacttcatggcgaaggatatcccgccatttcgcgcagcacatatcatccgcatcatccagcgctgatgtatttggctcaatgtaccttaattgacaacccttctcagctcaataatagctcgtaattatgtgctctccgtttgaaagcaggattacgaagactac

SEQ ID NO: 16906 - DNA, 900 bp, Emericella nidulans
gacctggtacgcacgcgaaggtatctcaccctgatttcttgctcgtagtttggccgccaaattgctgatgttattttcaattcggtacacagatatatccaaaagttctatcaaatgcgaacacaactacaggctatctccctgcgcattcaagtatgatgttttccacccctgacgcctggcagaagcttatgtgagcgtgatatagaccgttagaagcaacgaacagatgatgcagtcgatgaaaggtgcgaccatgttactggggagcatgaatcggcagatgaacctcccagcgctacagcggattgcgatggagttcgagcgagagaacgacataatggaccaacgacaggagatgatggatgacgcaattgacgaagcaactgggatagagggagaggaagaagaaggcgaagacattgtcaaggaagttttggatgaaattggggtggatctcagccaggcggttcgtattctcctgctggtttacgtagacatggatcgtactaatgcatcgttgaaacagctgggagagactccatcggggatacagaaagagtcggtcagtgagggccgggtggctcaagcgattggtgctggtggtgccggcggcgcaagtgacgatgacgacctccaagcaaggcttgacagtctcagacgataactacgacagttgtaggatcaacatatgagtcttcggaacacacttacaatctctttgtttatctgcgtcagtgtacgagccctgacttgtcgacgacagcctatttcttatcattaaatcgacgatgacacatacccttaatgttaccagaggagcgaagctgaacgaaccaattgatatcgcgagttggtctttaagactagctaattccatcctaggcagtctcttcattt

SEQ ID NO: 16907 - DNA, 903 bp, Emericella nidulans
tctcgcccgtctccctctgcctccaagccgccgcttcacgcagttgtcatgtccgcagcgtccaagtcagggccgtcagaaaggggttccgagaattggtgcagttatttttgcagcactcgctccaggcgcttttgtgaagattgcggaaacagaagatgacggtaaaaccggggaaagactgatgttggaggcttcgcgccaggagttcagagaagatgtccttgagaagacagaacaacgaatagggctcgggggccctgttgtagcttactggacatattatgtctacgacacaatagcgactggctttcgtttcgtccacctagtcatcatcttcctacctgtcatcctgacggcgcctacgatatggcttggaaggcgcatcaagaataacgacggggctcgcacaggcaccttgtggtggtatagttttcttgttagggccatggagcgcgcaggtcctgcttttatcaaggtaaatacttttgactatattattcaaaacctgctgacttcgtagcttgggcaatgggccgcatcacgtactgatattttccctcccgaaatgtgcgaaatcatgtcgtcattacactcgaatgctcccggccattcgttacatgaaacaaagcggataatagaaaaggcgttcagtggaatgccctttgaggatatcttcgaggaattcaacgaggaacctttgggagtgggcgccatcgcacaagtgtacaaggcgaagctcaagccgaatctggctaatcttgcagataaccagctaacctgtgagcctcagaacctaaggggcaagctcagaaaaaacgttgacgccttggtcaagagcacccccaggcgagttccgtcctcatacgttgcagtcaaagtactgcatcctcgcgttgagcg

SEQ ID NO: 16908 - DNA, 906 bp, Emericella nidulans
tgccaatggcatctccgaaataggtacagatccttcatctcgcattgcacaaatacgacgagcgacgaaggcttacaactcgcttctgaaatcggagtcaaacctgccgacgccagaatcgccactaccatccctaattgcacttgaggagacatcgcgcataatcgatgaaagtaaagtctcggttttagcaacagcggagaatcttgcgagtgtgcgacaacgtttgaagaccgaggaaaagaacttacacgatgcgcaagcgataagtgatgggttacgaagaagaatagacaatatacggaaagacaagtcagcgagccatgagaaactgccctctgaagttgcgcgagaatgtctggaagaacgacgacggaagaaagacgacctcgacaaagacacggtgcgcatcagggctgcactacatagtttctgtgatgaaacccttgcgtcgctagtagcagcggaagatttgggaggcccggcagttggagatgtagctgaggtttctgaagctacattggccgctgggtacacacgccatggtaaaccgaaaaaaccgaaagccgcagaagaggacaatcatgacaacagtcagcatcggattgatgatatgcttcgtcgccagaccggacagcagagcaaccagccatcaagtaggaaagaagttgcagcgactgaaatacacgaactactcgatgctctactagaggcaggttcgtcctatacatatttaccgcgtgattcagccgcgtccaggtttttagttagggccaaggttgctcaatttcacccacgcgacgctagacggttaaggttgattgatttcgggcgttcattgagtgactaaatcgaatagactattgagggctacagcaagacctccgggataccagcggaggccgc

SEQ ID NO: 16909 - DNA, 908 bp, Emericella nidulans
aaagaagagggctatgaatatgtgctgactgttcttctcgaatagtttcgtcaagaccctcacgggtaagaccattacccttgacgtcgagtccagcgacaccatcgacaacgtcaagaccaagatccaggacaaggagggtatccccccggatcagcagcgtctcatcttcgctggaaagcagcttgaggatggccgtaccctgagcgattacaacatccagaaggtatgaggcctggtctaccgattgagttttgcgcgtggtatagatttgcggttgcggaggcggaaggacggttatcttgtgtcatagttttgacgccagttagccgctcctagttagaaggagaaggggtgtgtcgcaaggagaatttgcggaagaattttgattgggatgatgacggttggctgactatgcctctctcaattttataggagtccactctccacctcgtcctccgtcttcgtggtggtatcatcgagccgtcgctcaaggccctcgcttccaagtacaactgcgagaagaacatctgccgcaagtgctacgtacgtctaccggattaccactcgactcagttccatcttcgacgaaggatttgagaactaatactagaataggctcgtctccctccccgtgctaccaactgccgtaagaggaagtgcggtcactccaaccagttgcgccccaagaagaagctcaaataaacgactcgttcatgcttacgtttttttctgcgttgctggtgcggaagggtgtgattgtgatgagccggattgtaacgctaaaaaggttcatttttttacaagcggcgttgaaatgctgaagaaacatcagaagagctggagtcgatacattttacatggctactctcggaaccagttgcagtcaatgaaacaattgtaaaatc

SEQ ID NO: 16910 - DNA, 910 bp, Emericella nidulans
ccccgaatccgaatccatcgacatccagcacgatatcaacaacaatcacagacaagtctacctccacctcctctacgccggctcccttcccacccttaccctcagaagaacaaaccttcgagccagacgaaatgaccaaaccagcccttccatcccccttcatacaggatctgaaaacccttatgcacaagaacacaccgctgccaccgctccgcccgcacgcctctccccctactgttggcttcttctccgcaacagcctgccgccacttcgacgtgcggcatctctccgaggagaattacgagcagccgaacagttcggaactggtggcgccggattttcgaaccaggttcgcggagcaaaagaggattgcggatgagtattatgcgcagctttctcggagaaacgcggagcaggggggccaagagcagaatgatagttacggtcagggtcaaggtcaggttgctctcgggctctttgctcaaaatacgaatctccatccagcagatgaagtagatggggcaggaagtccaggggcaggaacgacaacggaggaaacggagaccatctcgccatcgaaatcccgattcggcgactcacattcacatacccagtctcacggcgcatcgacagttgcgacctcgatcctgactggtgggagcgctagtgcgggtccggatatttaccacggggcgcaaggcgccgatacggcaacaggaatgctcacaggtatggatccagcgtcgattcaaggacatgatcgcaaccaagagcttgggatcgaacatggacaccgggacgagcatcaatatggatccgtgaaggccagtgcgaatgcagcgacatcggccatggccgtgccgatgtcagtgcctggaacaggaaatctgttctcgacgccgccaggtct

SEQ ID NO: 16911 - DNA, 912 bp, Emericella nidulans
tcctgcacgagaagagccctgaacacaccattgccgagcgctccctcgggcccctcggcagcgacgaggtcgccattaaggtcaccgcgacagccatcaaccccgtcgactggaagatccgcgactattctgtctttctgacctcctatccggcagtgctcggtagcgatgctgccggggaggtagtcgctgtcggcgacagcgtccagaacctggctgttggcgaccgcgttttcttccagggcatcattcgcaactacgacgcgagtactttccagcagtactgcaaaatgccagctgagctggtcggcaagacgccgaaagctatcagcgaccagcaggcggcgggcatcagtcttgccaccattgccggtatcaccggcctctacgacaagacgggccggggcctcgccccgcccccttgggagcagggcggcgaccgcgccggcagtggaaatgctcttgtcgtccttggtggcagttcctcagttggccagtatgttattcagcttgcgagactctctggttacgaccggatcgtgaccaactcgagtctcacccacgaagcgcacctgaaggagcttggagcccatgtggtgcttgaccggaagcaagcaggcccgcaagactttgtggctgccctcaacggtcttcccttggactttgtctttgacgccatctcaaatgctgatactcagaaactcggcgtcgagatcctcaactcagcaggcatcgagagccaggtggtcgtagtccaggccgtcaactcagaggctaaggaacttggtgcttccaagtcactcaagatcgatgttcgtcaggtgctgggtctggggagcagccccgacctgcgatacctgagtgtgccgttaatgaaaagccttgggggggaagatggttggctggcgaccg

SEQ ID NO: 16912 - DNA, 912 bp, Emericella nidulans
tctctgcggaatatattatcctatttttattccttttgagcgcctaccgagctggtacttccactcatcacaagcgtcaacaaatcaatccattcatcaaacggactttgtctcggtcttcgactgtctgctcagcctcctctgctcttaggtagtccaaagcaaaacaaacacacctatctgtgcactcgcacctctgctactctcccaaaatgagtcgcccaaacactccccgctcgtaccccgcgggtatcgacacatccgtcccgcgcgactcgttctcatccacagaaagccctagccctcttcaatcaaccccgcgtcgaactggctcgagcaaatcgcgagccagctctgacagccgccggcgttacgacaacactgtctaccactacggtcgacactcaaactactggctcttcggggggttcagcgtccgagacactgtccgcgacggcgttgactggatccgccagcaaaagaagggctgagctgaatcatgcaacaacttcaaaaatgtcaatttatcgaacaatcgaatctatgcgcctcctccatcatccaagcagatagcttgcgttgcgaccgccatgcaatgtttgagaacatatcagtctcgttcccaacacaatttcgccatgatcaagcttccctatccattcgtcaaaccagatgaaaaaggagccaagcgaaagtcaatggtagcacagtgcgcctgtgacttttgcagatccagcgtcaagttaggagaaatccgctactgaagaggagagattcgcttcaagagagaggtccgagaaccctcgttttgtcaggatcttgttattcctctccatgcccttatctatctatacatattctacgaatggaatattggttcttttcttgaatctggaattacagttgctactt

SEQ ID NO: 16913 - DNA, 918 bp, Emericella nidulans
accgatattctcaacaatataacttctacccgcacccaccttcacagcaacaatgagcgactgggattctgttactcgcatcggctccaagaaccgtggtggccccgtcgttcgcgagaccgtcatcaagggtaagagcgcactcaacgctgcccagcgacaggggctcgttgtcggaactgaaaagaaatttgcgtctggaaattctgtaagtaatctctccccattgtgactattcaataatagtcgccacatattaacgttgcttaggctggacgagccagcgccgttgaaggccaacatctcaccaaagtcgaccgcagcgacgacattgtaaagcccaagactgttgggctgcaagtagcagacgccatcaagaagcgccgaacggacgagggctacaagatgacacagaaggagctcgccaccaaatgcaacaccacagttaccgtcatccaagacttcgagcggggtacagccgcaccggaccagaaggtgcttagcgccatggagcgcgtgctgaacatcaagttgagaggctctgacatcgggaaagagaagttccccaagaaaaagtaaatcgaccgggggtgagcccgcgactttttctttaggggaggcgaggggcatcgttgatgatttcttttctatggccttcatgtcccaggctccttctcggttgttatgttatgccctccattgaatgatatgacgttttctttactcttgatcggtttgcgttcattcagaagcgtcaacctggtgttgaattgcctaaactcgaaatacctttttccccggcggcgaatagatgaaatagaattacgtctggtaacactgccttcatcttctaatagatagtgaagtaatagttctttttattaggacacgaaagcgaccagaaatcgaatatgatac

SEQ ID NO: 16914 - DNA, 921 bp, Emericella nidulans
cgctatgcccgcccaaagaactttaccattacccccccaacaaaggagctggaatcgaccgcatccagcttgatgagcttgaatcagatacccggcgtctttggtgatgccatgtccaaaatcatctacgacctgacggatctcgtctggtacgcggagtgggtcaaaggtggtccacaggagcaagactttgacgaagaaaccgagtgctactataacacggaggtgctttacgtcgagtatgccctacacagcgaccgctatacatcgtcaggagaagtcaaaggggacgcaacaatcgaaggctgtgtccgcctggcgtgtctcttattccacaacaccgccatctgggacttttacccgcagatcgcgccagtattccccaaaccgataatcgccctgcagttggctcttgagtcaaccatccgcgcaggctgctaccacctctgccgcggcctgctgatttggctgcttttcgtcggggcctgcagcacccggttgccgaaccagcggccattctttgtcaacgagcttgcttcagcggtgcgcctccagggcatccagtcgtggcaggagctccgcgccgtcctgttcggctacttctacgtcgaccggtgctatctgggcccgttgagggcattgtgggacgaaatccagacgacgccggcttcgcatcaacattgtataaacggttgatatgattatatatacaggtatctatctagctaatgagacatggtatgagatgagccatgtcgtgacgaatatactataccctcactgcgcatcgcatcgactatattaagtggaataataaactacggagtgaagcttggaaattggaaccctacaggatctgcctgattaaatagcacagaagatcagtcaataattctccaaacaatcgaagttggatccatc

SEQ ID NO: 16915 - DNA, 930 bp, Emericella nidulans
cccgtatgaaggagcaccagaagcagatctattacattactggcgagtccatcaaggctgttgctaagtcgcccttccttgacaccctcaagcagaaggactttgaggttctgttcctggttgaccccattgatgagtacgctttcactcagcttaaggaatttgacggcaagaagctcgttgatattaccaaggacttcgagcttgaggagaccgacgaggagaaggctgagcgtgagaaggaggagaaggagttcgagaatctcgctaagagcctcaagaacatccttggcgacaaagtcgagaaggttgttgtctctcacaaacttatcggttccccttgcgccatccgtactggtcagttcggttggtccgctaacatggagcgtatcatgaaggctcaagccctccgtgacacctccatgagctcctacatgtcttccaagaagaccttcgagatctcccccaagtctcccatcatcaaggagcttaagaagaaggttgaggctgatggcgagagcgaccgcaccgtcaagtccatcactcagctcctctatgagacctccctgctcgtttctggcttcaccattgaagagcccgccagcttcgctgagcgcatccacaagctcgtgtctctcggtctgaacattgacgaggaggccgaggctgagcccgccagcaccgaggaggcacccgctgccgctacgaccggcgagagcgccatggaggaggttgactagatcagctaatgaataaaaaagggggaaaataaaaagcaaaacgaaatattctgtcttcttatgacactgaactgcttcggcttacttttttaattgatggtatggtagcagatgatgtctttcatgttatcaacgatgtcaatctcgtggcgttttgagcgttctcattttctaaacccaatacactaca

SEQ ID NO: 16916 - DNA, 931 bp, Emericella nidulans
agggcagcctcaccgggttcatcagattgttcttcatacgactatacagctagctcaggcacgggctcctactaccacccctacgctaggcacgatccgtatgcttatcacccgcgtcccgacaaacggctcagtggtaactccatggccgaacccccatcacctcaaacgtcgatcgctagcacgtcaaaggagtctgttggcgctaaaccagcccgcaagaacaagtatccctgtccgttcgctgccagccacgcctgcactgcgacctttacgacatcagggcatgcagcacgacacggcaagaaacacacgggggagaagagcgtacattgcccgatttgcaacaaggcgttcacccggaaggacaacatgaaacagcatatccggacgcatcggacacattccgaagaaatgtctgctaattcgacgtcgcggagtagcgatgctagccgggagtgggcggccaggagaacgaaccgattgtacgatcattagcaatttgacgcatggtttcggagatatgattgcctacgataatatgaggacgatgatttcggtgtgatgcggtcaccgcgacgtctcctgccatcacaaaaggcccacaaataaggccctgagaggacttctcttcctcaaaagaccatcgcggtccaggcattgatggaactcatacggccgacgcgctcacctggttccttctatacaatgaaggctgagcgaaacgacagccgttaaaggcaggtggctgctgagacatgaccttctgcatccttctactgccttactattcttttctcttcttctcgccgtctgaaaaacgacggatagaactggatagacttatgcttcccagcagcgtgaattttttttttctctcttcgttcatcttccattgcattgtttatttgtttttgccgtattctttttc

SEQ ID NO: 16917 - DNA, 942 bp, Emericella nidulans
gataggtgtcaatcgtcatatggcatccaatccttagtaggccatgttggtatagttgatgcagtttcctcctgccctttctcctctgagcatattccacaatattggttatgagcccaggctgctacgtctagcctaaccagcaggcctagcacctcgggggattgtgtgaagcctaatcgctttgcccaatccagcaggagattgaaactgtacgtgacgtattgatcctcgatcttgtgaaggtggccaggcccgtacaacctgcctatctatccctgatcgagctatcgaacctcgaacctagaaccgaacacgacggatgccaccagctcgaagacaagaacaagacccatggactgggagatatatatcaagctgagaaaatactgaagacctagcaggaccaaatcggagcatacccagggcatttgatgaactggtagagacaattgatcagaccaagacggcgccaggggcgagtgagacggtcgagatagagccaactgagacgaccaaggcaactgtatacgagacggccgagacggacgagacagtcgagagaactgagccggacgagagaatccgaagcgctagttgcattgagatagatcctagcgagcagctgcaagcagaattggcagctgaggaccctgattggcagctacaaggagaaccagtatctgggatactaggtatagaagaatcgacatccaggatatcaaggaattcagaaagacttcctccccttgataagggtgaccgaatcaagccagtgggtgtcaaatatgatatactggacgcgtcgaatgtatgactatggaagaagaagattaaaggcctattgaggctttagaaatgctggaaagtggttgaaaataccaggaagataagacttgaagagaaaactgagcttctctgtcaagcaatgcaagataagga

SEQ ID NO: 16918 - DNA, 943 bp, Emericella nidulans
cagagtgcttgaccttgagacacttcgaattgacgcaatttttgtcttcgccgacagccgtgactgggctggcgaccagcagatcattctcgactgcctgatgagcaagaatggcaatatgcttgagcgctccacgaccttcgatgagggcccgcccgtcttcttctcccacaacgacgtggtctggtccacctcgcaccagcactcccgtatcggcatgggtgcgcttcgcgctcacttgaggctctgtacaaggcagtgaccggcaaggaactgacgacagtcgccttcggcaagccgcagctcggcacctatgagttcgccacacgtcttcttcgccagtggcgcaaggagttccacggcatcaacaaaccccctaagaccgtttattttgtcggcgacaccccagagtccgacatccgcggcacaaacaagttcaatgagattagcgatacagattggttctctatccttgtcaagacaggtgtttaccaggaggggacaattccgcgctacccgccaaagaagacctgcggaactgtcctcgatgcggtcaagttcgctatcaaccgagagcttggactaaagacagatgatcttcgtaacaacgagccatctcctgagcgatatggggaagtccgtgcctgagctggatatcgacggctgtccctgctattgggagaacttatgcttaggcttatgattttttgctatctttcggttttctgttctcttcttcgctcctatctgctttcttctcttcgcgtttatgtgctattccctagattcccctcatgtttgcccttttcagttctattcatttctttcccatcccgttcgctctgcatatctgctactgggatagagtgcctcatagaatccggtacctttccatatctagatagtgctacaaagtacgaagaatgaacggtgcataggtccc

SEQ ID NO: 16919 - DNA, 944 bp, Emericella nidulans
cgcggttggaagcttgggtgtcacgacgctgatggagctgcagcttgtggaggcgaagaagttcgtcaaggcgacgtatctcccacagcggagtgtgcgggactctattaccaatgtccacgccgcgacgctgaacgatgcgaatgactacgttgatggaatcatatacggccccgaccacggcgttgtcgtcgccggcgagatgacgaatgagatgcccgatagcgcaaaaattcagacatttagcaaggcgtgggacccgtggtactatctacatgttaaggccaagacgcgcggcaactcgcccgtcacagactatatcccgctggcggagtatctgttccggtacgaccgaggcgggttttgggttggccgggcggcgttccactacttccatttcccgttcagccgggtgactcggtggtggctggatgacttcttgcacacgcgcatgctctataaagcgctccatgcgagtggggaatccagccgcttcgtcattcaggatctagcgctaccgtatgcaaacgccgagaaatttatcaactataccagcaataagctaggcatctggccgctctggctgtgtccgttgaaacagagtccagcgccaaccttccaccctcactcatccgtgcaaagccccggcttcaccgaagatcaaatgctcaatatcggcgtgtggggattcggcccgaaagacccggaggctttcgtgactgcgaaccgagagctagaacatcgactccgcgaactgggtgggatgaagtggttctacgcccatacgtattacggagaagacgagttctggagtatgtatgaccggaaatggtacgacgagctgcgggagaagtataacgccaccactcttccgagtgtgtatgataagatcaagatcgatgtggaggcggatcgtaaggaacgtcacgagtcttggagccgca

SEQ ID NO: 16920 - DNA, 946 bp, Emericella nidulans
ggctgcagcgaagccggtaacctgacgtggaatggcggggcagatggtaagggtgaccgcttacttgctttccttccattcttccacatatacggcttgacatgtcttgtccaccaaacgatctacaagggctatgagctttttgtcatggccaagtttgacctcgaaaaatggtgccagcatgttcagaactaccgtatcacattcagctacgtagttcctccggttgttctccttctgggcaaacaccctatagtcgaaaagtacgatctttccagtctacgaatgatgaactccggtgccgcgccgcttactcaggagcttgttgaagctgtctacaaccgcctccacatcggtatcaaacagggttacggtcttagtgagaccagccctactactcacactcaaccatggggtgaatggcgcgagagtgtcggctcggtcggtaaactcctccccaacatggaggccaagtatatgacgatgcccgaggacggttcagaacccaccgaggtgcctacaggtgaggttggggagctctatctccgtggaccgaatgtcttccaaggctatcacaacaacccagccgcaacagcagactcaatctctccagatgggtggtttcgcaccggcgacgtcggctaccaggactccaagggcaacttctatatcacagaccgtgtcaaagaactcatcaaatacaagggcttccaagtcgctccagccgagctcgagggtatcctggtcgataatcctgcagtcgacgatgttgccgttgtcggtgtcgagagcgctgaacatgggactgaggtccctgttgcatttgtcgtaaggagcgcgaagagcaagagctcgggtgtttcggcggcggaggaagcaaagaatatcgccaagtggctggatggcaaggttgcgcatcacaagcgcctgagaagcggcgtgcgat

SEQ ID NO: 16921 - DNA, 946 bp, Emericella nidulans
ttatatatctatgagattctcaacgctgatggagaagctggagacactgatatgggttcggtcctgtcttatctcgagtcctttgctggaaaccgaagtatggacccaagcagaaggatgcatataaagggcgctcttgagaactttgctgagtatattgtcgacaacttccttcttccacgtatgtttgcccgctgccattcaaaatcattggtttgctaatgggacccattagtcagggcttcatctgtcaaaacaccacaaataacacctacagcattgtccttgagtcaaacacctacacaagtgggcacgaaacagcgcatctctatcttacggaaggcctgtcttgtacgtgatcaccaccggtgtgtgatatcccgcaaattcgatatcgtcgaggcccggaagcgcttccaagagaatggggataattctaaagacgacgacggaaaccttctgagcaatgaatcacggggtggattccagcatctcgaagttgcgcacattctccctcacagcttgacaacgttagcgcagggagaatcagaattggtgcgtacgtcgttggcaattgcctttaattgttactaaccgttccaagagcgagtcaaagatgaatgtgtttcgcatcttagacatgtttgaccctgggctcagccaccgtcttgatggaccaaatatcgatagttctgttaatgctcttacattgacgcttgattatcatcgactttttggtgaattccaaatttatttcgaacccacagggaggccgcttgagtataagatcgactcgcttgaaaacagtcccttcctacgcgatccactcttcccggttactcgtacgctgacccttagtccaaacctgacgatcgacccgccagaccccagacttctccgtgtccacagtgccattgcacatattatgaagctcagcggggcgggt

SEQ ID NO: 16922 - DNA, 947 bp, Emericella nidulans
ccctccccagcaccaacagccactaagcagtccaccccccagcggaccgcccctgccccctgggtgggtggcccagttcgaccacgccagccaacgatggtactacatcgagcagcgcacaggcatttcccgctgggagccgcctgcgtacccggcgccatacgggcagtacggccagccccaggttccgcagtatgcgggggcgcctgtttatccccaaggacagcagggtccggacccatactatggaggagggcccgggcaggatcgagggtatcacccggggtacggaccacagggagggtacgcccctgggtatggttactcgcagggaggagaacactatagtggagagaagtcgggcaaggataaggataagagcaaggatgataagaaagctatgctccttgcaggtgctggcggtcttgctgtgggcgctgtcggaggtgcgctgattgcgaatgcactcggtatgctcaaagaatccaaactatcttatccctatgccctggttataggggcttgaatggctaacaggcccagacgactcggacgatgaaacccgcgcggcggcagcagcagcatcggcgccgccagaggccactgctcctccacctgttggtctccccccagatgagacggcggacggtgactccgtttcctccagcgaccgtgaggaggttctggaggctcgacaggaatatgagcgggcgcagctggcggcacaagactccgatgcatcgagcagtgaggaggaggcgctggaagaggccagggaggagtacgaggagatctatgaggaagtgtacgatgactagccttgtaaacgatgaaatagtggaaagtcctaggtagcagttgttgtagtgtccctggataggacggatagacttggataggataggagaggacaggataggatatagaaatgcatgtacgtatgcgtc

SEQ ID NO: 16923 - DNA, 952 bp, Emericella nidulans
cctaaaacgcgccgccgactctcttaacgtttttgctctcctccgctccggcggctgcccgggaataatgtacatcgaggcaaaggacaaggacgctgtcgagtcgtgggttagcgtggttcgaaatctgcggtataaggactttcagcttgtgagtcggccggcttgcgtggtaattgaggaggattttatgaaggtggaggggaaacagaagaacgatgcccaaagaagaggaaaggcgttcttagatgctgggctggaggaggtggagagtgtcaaagagtttggggacttgatggcgcagaggggggtttggcagtggtggaggaagaggatggggtatgttcgcggagattgagccagattcttttgtctgtacgccgtcaattcagtgcgcatccacgatctgccattacaaaggatttgctactgcttttggaacaccaatcgttctgcaatagcggttcaaacgggcgaatgcgagatatgtgacaagtcatatatatgaagggatgcattgacgttgttctggtcaggctatatgcatgttctggcctaagtcagcccacagcatgggtacttctggattcaatgataaggcagccacgggcctcgtttgattttttgtgatcgagcatcccggatcctgcaaccaaattttccccgtgcatgtctcaaacgcgttggacagggcagtctggtcagtccagccatttataaagtctccgtgcaagccatatccaacccggtcgcctgttgcatatagcaagttgtgataatctggaaagggcgccgtgttgaaaacaaattcaacgaagatggaaaagatcgctacgggatgagactcggggcagacgcctttattatagtccccaaatgcgggatatgccatctacggaagatatgagctttagaaaaacatccaattgacacaaagagaatttcacatggc

SEQ ID NO: 16924 - DNA, 958 bp, Emericella nidulans
ccacgcaagcacggttacattcagtatgtccactgggcctctgattcgttgccagcccattggcatggcttagcctctcagttgtccacgagtcattctgtgcaactgcaacggcagcgaccgttcgaacttcgagttgttcgagggcggcatcccaggtcactattagacctcgtcggccagtcagcactgcggcaatgcaaactccaggctgatttgagactgcacctctccaggcgcggttagcgattactccagcgtgttaaactgagaggagatggacggatttagtgcgtgatttaacaaagtctccgactgggcggcgctcttggcgggcgttcctaaatgtggagcaagcaagacagccatcgcgcgctgccacccggcggtaaccaccatcgacaaaggatgcctgtcatcttgtctccagtaagcttccagcctccatgggggaggagtcgtctcatgataccccaggtattctggcagagacgtcatacaccgaaccgcgcgggcctgacaggttgtatcgcactaggaaatccaacgccgaaccacgtggaattccagaaatgacatgaatgcgtcctagccaatcatacaatttattgcgatccagcgccaattgaccccaactttgtggcactagcgtcatttcgcttgtcactgggtttgtcagctctacgcgagatctggcggtgcggtcgccgcgctattgcaggtcgtggaatcagcctattcggaggcatgggtcagcctgaggcttgcacttcgtaacaagtttcaaccagcctcaaccagtcttaaccaggactcaacgcagtcgaatatttaggtatcattaggttatatagggaatctcgaagtggttaaattgtggaatctgaagcgagatcccatactactagtgcaatactgtatattgcacagctagacagataaacaacccgttgctccg

SEQ ID NO: 16925 - DNA, 964 bp, Emericella nidulans
caaagactaaatggggccacccaagagtcaatgatattcttttcaaggcctcctatcttcacagacattctggtcatgcgttttctgccaaatgtacttgttttgagagtgacttacatggacaaatttgtgaggtggcgctagggaaggactgtgatgacctcggatgcgacaaaggccaagcaatccgatgccgagaggcctcgagtgctatccaaacttccttatatattggaactgttgcctctgctgacacagtaatgaaatctgcacagcaccgcgatgaaattgccagcaaagagggggttatcggctttgagatggaggcggcaggagtgtgggataacattccttgtatcattatcaagggtgtatgtgactatgctgacagccacaagaacaagtcatggcaagcgtatgcagcagcaactggagcctcggcggcaaaggcttttctagaatactggacgccttccactcgcaaaacacagggaacaggaggcctaatgtcgcctttccaaggaatatattctcctacgaattcccccattgctggtcggaatataggaaatgttaactacaacacatattaccttggaggcagttaaagaagtaatccggggtacgctgccggatattggacctttttacactatccaaaaaacgcaatcgtcttgactcgttcgaagccagtctggaacggcagagcatacctatacaacgtttcaaagacggtggcaggatctccaatggcagcggttgattactcgaaatatagcgttagtgttgacgcgggtacaggacagaacgtcatcaacctggaggacgatacagtattgaggaaaaatagtcatatcaaaatagattcagtgtgaaggccgtgaagatgcgccccatgtttgatatgattaaatagcctcgttccaccataagtaggtgattttgatagcaagcatcttggtca

SEQ ID NO: 16926 - DNA, 976 bp, Emericella nidulans
tgctcccatgtactaccggaatgcgaactgtgctgtcgttgtatatgatatcactcaagctgtatgcttcggacatgatctcctatcgctcaagatacttgctaatactcgggaatccacaatagtcatcgctagacaaagccaaatcatgggtcaaggaattacaacgccaggcaaacgaaaatattgtcatcgccctcgcaggcaacaagcttgatcttgttaccgagaaccccgacaagagggctatccccactgctgatgctgaagcatatgcgcgcgaagccggtcttcttttcttcgagacttccgctaaaacgtcttcaaatgtgcgcgaactcttcacagccatcgcaaagaagcttccacttgatcaagctggaccccgaaacatgcgaacagcacctcgccctggtgtagatctccgaccggaagcaccgggaacccaaagtggcggagcgtgtaattgttagagcctattcgatccgtccgtttctgtatctcttgtccgcggatttcctcgttgtccatctttccttcgctctttagacaaggaaggcgcacgcctcctatagtgactgttcgccttcgttatgagcatgaagtcgcttgcgccgatccattgcgatgatacatgtttaaagcggtttggagctgggttaatctgctcgcgttggccactcccgtcatactgcgcttttctaataccccggttcccatgatccggtatctcggtctctttgttactggaacaaggcatctgatgtcggtcattgcgtgtaaacattcagtgctgtgcaatgatccattggattcgaccgttggccagtaactcaggcagtttgagtgctgtttcattgtgctttttccgtctgttttttttttttcccgttccatctgctatcggcgtctgtatccttcctcgattgggtccaatctatgctatttttctaacaccgtcgagtactctttagtt

SEQ ID NO: 16927 - DNA, 988 bp, Emericella nidulans
cgatccgagcgcaagtgacgagtaaattagtcgaacttcgcacatacctggaccgtggagtccggcctttggaaggcagactgaagtatcaagtggacaaagttgtcaaggcagcagaagaagcggaaagggctgaaaagagttctcaggccaccaagccaagcaagtctgaaggcgacgatgagagcgataatgagggatcagcatcggacaattccagcagcgaagaaggtagcgacagcgaggaggacgaagacattgacgaaatggcttatcggcctaacgtgtccgcattctctaagaagatggtgccagaggcaaaggcggataagactgcgcgaaaaacttcgagcgacggcatctaccgaccaccgaagatcatgccaacagccatgcctactactgagcgtaaggagcgcaaggaacgacctatccgcagatccaatgttatcgatgagtttgtgagcgctgaaatgtcgtccgcgccgatggctgagcctagcatcggtagcacaatcgtctcgggaggccgacacacaaagagcaggaaagaaagagagcacgaagcagagcggactcgctacgaagaaaccaacttcgtccgtttggcaggtgaaagcaagaaggaacgtgcgaagaaggcggcggctcgtcgtgctgaagggacattcggaggcgaggaatggaaaggcctcactgagggcgcagatcgcatcacacgactcacaaaacgggccaaaggaagcagtagtgcgctggagaggagtcggaagcgcaaactcaccgaagacgggcagcgcggggatggtgctggagttggtcaaatctttgagaagcgccggaagaagattgaatcctggaagcgatagtgccttgctgtctcaaaagtcaattgtcttgaatcgatttggagtacgtctgctctatgtgttatccatagattacccttttgcatcagcgctgtgattctgacgccagccaaatggtg

SEQ ID NO: 16928 - DNA, 994 bp, Emericella nidulans
aggccagcaaggctcctttcatagccttatcgcaatcatacaccctccaacagacaaaggaagatctccttccattcgaatatcaagatggcctgacagctcgcgacgttccggagacaacgctcacccgtcagcaagcctcgaactcagtacaatcaatcgaccagaatgaatatctcccggcaagactttctcggattcacgaaggcgccgacgacagcgctctctgtgctcagaaatccgtcctgtacctagcctatgggtcgaacctcgcatcccaaacctttctgggcatgcgcggcatcaggcccctctcacagctcaacgttcttgtcccagatctaagattaacgtttgatctgccgggaattccatacttcgagccatgcttcgcgggaactcattttcgggatacatccgctaccaatggcggggaggctgaagaaaagcgcgccctaataaacacgccagacaccgaccaagaccgctacaagggtcccctcattggcgtcgtttatgaagtcacattatccgactacgccaaaatcatagccacagaaggaggtggccgtggttacaaagacatcgtagtgacttgctacccgttcccaaacggctatgaccccgccgatccaataccggagcgaccagagacacggcctttgaaggcgcacacgctgctctcgccggccgggatgcaggagctgctgctgcctcaaacgaggtcaagaatcaggaccccacgaaatgcacgctacactcaaccctctgcacgttatcttagcttgatcaccactggtgcagcagagcataaccttcctctggcgtaccaggcctacttgaatcaactgcagccgtactgcatcacgtcattccggcagagagttggcatggtagtgttcctggtcatatggggtccctggatccttctgttgctgggtttgccgagagtttttgctcggccggatgcgtagtcctgagtgggtgggccgac

SEQ ID NO: 16929 - DNA, 997 bp, Emericella nidulans
aactatcctaaccttcaattggtaacagttcctcaccatgccggcacttcaatcgagcaagctcgccttcattggcggtggcaacatggcgtcggcaatcatcggcggtctcctcagccaagggatcaacaagcagaacatcaccgtgtctgagccatgggaggtcaatcgcaacaagatcgccgacctgggtgtcaaaactaccacttccaacgtcgttgccgggggtgaagcagacctggtcattatcgcggtcaaaccgcaggtcacaaaggctgtgtgcgaagagctggccgacgcctggtccaagcgtgagacactgccggtggtagtcagcattgctgccggtatcactctgggtagtctacagcagtggctcaagacatctgacggcaggaccacgcatctggttcgcgtcatgccgaacacacctgcgcttgtcggagagggtgcatcgggcctgttcgccagcgcggacgtgactgcggaggagaaggagcttgtcaacgcgcttctcggcagcgtcagcaaggctacggaatgggtggacaaggaggaattgatcgatgtcgtcactggtctttccggtatgttgtttttgcttttacctctagtctggtccatcgtcgtactgacaagaccagggtccggacctgcatacttcttcgccatggtcgagcacctgatcgccagtgccaccgcgctcggcctgccggccgagcaagccacgcgcctggcggcccagacctgtctcggagccggaaagatgctgaccgaatcgtccgacagccctacgcagctgcgcaagaacgtgaccagcccgaacggaacgacgcacgccgctctggagaccttcaatgcgcagactttgaccaggttgtggataaggctgtgaaggcggctacttcccgcgcggccgaattgggtaacactcttggcaaatagacacccgatgtatattatagacggaagaagttgaatccaactaatgcaaccg

SEQ ID NO: 16930 - DNA, 999 bp, Emericella nidulans
aaaaactttgaaagaggttcttttggaagactgtcagcaagatgtctaagatcacagtcggtatgttagcttttctcgattgccctgagcctgagcaccatcgctgacagtgttttctacagccggagtgcgccagaatgtcgagcagctgctcaactactctcaaaatgagaagaagcgtaacttcctcgagagccgtcgagctccagatcggtctgaagaactacgacccccagcgtgacaagcgtttctctggtaccatcaagctccctaccgtgcctcgccctggcatgaccatctggtacgtcgactctgcaatagaaacggggaggaagaacgagaacggataaggagaatggaaaatagttcggactgaggctgacgagtttaattgcagtgttcttggtgaccagcacgatctcgaccgtgccaagcaccacggcattgatgccatgtccgccgatgacctcaagaagctgaacaagaacaagaagctcatcaagaagcttgctcgcaagtacgatgccttccttgcttccgacggtctcatcaagcagatcccccgtctcttgggtcccggtctctccaagggttcgtctacacttttgtcgcctttcccatctcaagtgaaaagtatgcactgacaatccacagctggtaaattccctacccccgtctcccacaacgaggacatggccaacaaggtcaacgacgtcaagtccaccattaagttccagctcaagaaggttctttgccttggtgttgccgttggcaacgtcggcatgacccaggaggagcttgtcgccaacatcatgctggccatcaactacctcgtctctctgctcaagaagggctggcagaacgttgggtcccttgtcatcaaggcgaccatgtctcctccccgccgtgtctactaagggacttatcgtcttttcttcttaactggagtaaaagaaataagaaaataaaacatcctaaatctctgggcctccggtgtgg

SEQ ID NO: 16931 - DNA, 999 bp, Emericella nidulans
cgggaacggaatagtcggtggaggaggaaaagtttggaaggcgaagaagttctcaacgaaatcaggtagatatccacttctatggcgatttataagtattcagctaacaggaaaaagacggcaactgcgacgtgatctacgaccttgacttttgctcagatgtcgctcactcagtaccctctaacccttcaatgaacatgtccgaggttcgcgccaaatatgacaactatgccgcaaatctttacagaaacttcaatttctcccttcaacaaatccaatgtaatacctccaacgaaacaatttactcaatggcagtcagctgcgacgactgcgcggccgcttacaaatcctggctctgcgccgtcaccattcctcgctgcgacgactactccagcacatccaataggactgctgtcatggtgcgtaatgcggcgcaacctttccctaatggcaccgagatcacaaaccagaccctccgcgatagcccgatcaccaatcgtcctagaaacagcgggctgattgatacggaaatcaaccccggtccatataaggaagtgcttcccaatgtcagtttctgccataacctcgtgcgaagctgtcctatgtcacttgggttctcatgtccaagcggaaagtacctgacttattcttatgataccagcgctgctccaagtggacgaatatcaaatcctttgtgggctgttataatggtttattttacaattgtgatggtgttttagtccttttcaaactcgtcttccaatctgttacgcgctacgccctatgcatggaagttcgatttactctacatataccctttctgttcgtatagatacaattcatggatcaccctgggatgaatactcatctaagagtttatgactttgatgtgcaaggtggctatcgaagttccgtggaaacaattgtccgttgccttgaactacatgtcgataatgtgcctaagcaggatactctgcacaacaaacgcaagggtcgtgc

SEQ ID NO: 16932 - DNA, 1001 bp, Emericella nidulans
ccagaaccacgtcacatacctaccgtaccaatctatccaccctcctatagacaacacttaaccggcgtctaaccaaatatgactcaacacgagacaaatgctcctatcgtatcacatggccgtggaggtttgtattcatcgcctgcttcagccctaccccgcctttgtccctgtactccacgcagaaccagcatgctcaactgacattcatcgtaaggccagggaaacatcggtcctgatagcaacgagtacgtccttatcccttccacagccataggaccaagcactaacaaatcaaggtacgttgacggcggaatcgtccgcgaagggcccgttggcgaccaaggcgatggcgcttattccgctggtgtaagctctttcccattcacatcaccatccatataaaggcattttcatttgctcgcgatactaatgagacccgcagcgtggcggcgccggaaacatcggttcccctcacgtaaaacccgcgaaacagcctcacgatgtcgaattcatccctgaaatctcagtccgacagtccatggatggggattatcatactggggtatgtatctagggttatatttgtcagttatggcagtcactaacggtgcctatttcggtgatatagcgcggcggccagggtaatgtgcatctagatcctcagcaccagaaggctaaggaggagaaaaaagaggagaaaaaagccagccttgcgcatgagggcctggcagataaattaaagcataagattttggggaagaagtgagtgattcgctcgtctgcctaggatcttcccgtcctaggtctggattatgaggaacaacccggagggagggcttttgattttatctgttttgctgctgctttgcttcccttggctgggtaggaattgcagtttttcgtttgtattgcttggatttggcttcgattacccctgactgagtaatgtcctagatagtgcttaagctatgatgaaatgcaatcctagtgcgcgttgc

SEQ ID NO: 16933 - DNA, 1006 bp, Emericella nidulans
ggtgcggtggtaccttccgtcttttctgctcaagatcctcagttacctgttgatccgtttgtttcgtcgcccaccgacagtcaatggaaatctgatggtggtcctcaggccggatcctttcacctccaaggccccggagcggccaaaaaaaaaagccgagatgactccgctgtgccggcaagtgaatttgttctgcagcaaacgctacagagtctcgaatggggcgtggacagtgacttgcaaaaacaccaacttacagcgctccagcaagagctcggtagtagcttttttgcagctctgagagaccacgcctggaaccaggcgcaaaagactgtcgctgttccccgcacgggcaccaacttcagtgaatcgtctcgactgtcacctgaatctttgacgagagctaatactcagccgattctgagcggtcgccatcctatcgtataacctaatccgagccgccttcttcccttgtgttccaaattatcatctctcctcgcacctctcctttctgccgaggagacttaccatgaaacgcaaatcgacagagacttctttagacaaaagttctatttctgccttgattcgtttcaagctatacggcggttctattcttgccatcgtccactatctcgaggcatataccgcaacagcttgttgactgcattttttcgtggcgttatgtgatcctttgatgtcgcgggccggatgtctgagctattctcatacctccgttttacttcccatcagcccacagctttcacttcactccgctatatccggcactctcaaaacatcacgggaactgctgcgtactctttttagagttcttgtattttatcggcaagggaatcggcgtcaacggcgttgttgggacgatttgtgtttttgagatctttcttgttgagttttggggtgcagattatatcgataccttgttctgcttggtttgtcttgtttcctttatcccgccctaatgatttcacgacgacgatctgatgcgtgc

SEQ ID NO: 16934 - DNA, 1008 bp, Emericella nidulans
tcgtccgacccgatcttccattctgagcacttcaagcgatataacccctacggcaaccctaccattcatgacctgcatattaagagagttcctttatctcagatagatcctaagctccgcgcggacgaagacaagcttctagagcggtattgtggaggcgtctgggctggtttaggtgggtgcagaacatccagctccagctactgcaatcaaagtataggccattctgacaagaatatgctaacttatgccacaacaggtttcgccccacaacggattctcctcgcactgctgtgtaaagagacggatcgaaccgacccagcggcgccggaatcggtaacgctatggtctccctcagagctactggaatccgagtacaaaccgggaactgacattgcgggccattttgaggtgatcgagcggccgaagcaaggccattcaattctcatccgcggcggcgacaaaatatctaatcgggggttgcggccgctggacgggttcattgagctcacggcatccgtcgaccagcaacatggtctggtcgagtttggatgcaagactgttttctttcaggggctgggccccgctgcaggggggaagcttccaatgcctgggcccgtggtatggctgcatgagcaatatgcgaaagcccttttggcgtctggtgtaagttatgtgtgtatgtgaattctactataagataggctcttattgaagtgcgtattcgagccagaacgttcgggtaggcatataccagatagcccacagtcaatcaaggcgatgaaggtgatgggtctgttgcatctttctgtcatcaagcgattcgccccagctgtagcggccctaactggaactcagctggacccttgtatgatgtcagtttgttggacgaactgcataacctgaccgatttcctggacgaggaaggcgcctggttaggactgacatgtggaaattgtgggctgctatttgcaaatagaatgtgagagcctgtacgttgtaggtaca

SEQ ID NO: 16935 - DNA, 1009 bp, Emericella nidulans
caacctcccgctcgccctctttgagccccagtttgccggtatcgtcaatctcgttcagctagcttatgactcacagcagaacgcccgcatcatttttctctcctcaatcgctaccatccagggctgggataagggtacgcctgtcccggaggcaccgcttgatttgatcaaatacacccaaggcgggtacggacagagcaagatgcttgcgagcaaactgctcggccaggcggttgctacaagcggtgttcattctgcagtctgccgagtcggccaggtgggcgggcctattcatggggacggtaaatggcctgagcgcgattggttcccgactctcctgcgtgcgtctgaagtcatgggcgtcttgccgaattccataggacacttcgacgacgtagactggctccctgttgactctctgtccgcggccctcgtcacactcgcactcgacctggacgatctagatacagagcaaacaggacccaagactaacaaaggagcagcatattaccactttaccaacccctccgtctcttcatacccagagctcatcccggcaattacacgccatttagcaaatggaacgtccaccatgaagcttgaactcgtcgacaccctcgctgagtggaccgagcggctagctgcctggacgccaacgagcaatggcactgactccggcgagtcgaaggccgtggagtcatatatgaccgcagccacagccttattggagttctaccagggtttggcgagtaacctggaccaaccgaatgtgatgctcgatacgaccttgacgacagggaagattccttatttgacgaccgttggtgccgtcaatgaatcttggatcgagctctggttggatcagtgggggtttaggaaatagattggctttagagttcctgaatctcagccaagattgagcgttgggatcggagactgtagagaatttaggcaacaaattaccaggcactatcttgggaacgaggaagaaaatataggtccctatccg

SEQ ID NO: 16936 - DNA, 1011 bp, Emericella nidulans
aatcgggccacccagcacaacggagggaactgcaccgtatgcaaacagtccatacctggcgaaggttgtgaacacaccagcgatgctgttaagattcccaagcccgtccctgtctcggagcgcatgccagagccggttagctataatgaggagcctacttacggcctgcacagacgcctgctgttgcgctcgctaccgttctgaaggcgttggaagacgagctctcgcatctaagaatccaacttgtctcttgccaaggagcatataataaacttgatgcatctatcagcaaacgtcagagaaaagcgcttggtgagaagattggtaagttgctgaaggacatggacatgaaagcggaccaaatatacgctctctacgacgtactcgaaggccagaaacagcgcggacaagagatgactgagcaggagatggaggtgacactccaatcgattggcattgaggccaaccctaagcaaggcgaagtgacgggcaccactgagaggtcttctcgcaagggtggtacagactatgatgtggatgacgatgattctgagcttccgtgggaaggaattgagagcactgttgagatgactggaggaagtcggcataattaaacagatattgttttggtttccccggctgttgctgttagcttaacgagaaagcagttgctgtttgtctattgcttggattatctgtttcattggggtgttcaggtcgcacttctgcattcggtttggtatttttcgcattttgggggaagcgtgcgatggcgtcagtctgtcccaaagtagcaccattgggcatcatgtttatccaattggtatgttcctttctctgcgattccggagtatctccacagtcttgggggtgtagttcatattccagtcccatctttgaggcccactgtgaggcagtggcagcgctcgccagcctactgcagatcccaacccggcttagcgcagagaccgagccgatatccggcctcgctccttcaagtctttatttctc

SEQ ID NO: 16937 - DNA, 1013 bp, Emericella nidulans
tcggagcccagtctgctctggctcctaagatcggtcctctcggtctgtctcccaagaagatcggtgaagatatcgctaagaacactggcgactgggtaaggaaccatgattgatctgtcaaggaacacggtggttaatatagggttttccgcggttatagaagggtctccgtgttaccgtccgtctcaccatccagaaccgtcaggctcaggtttcggttgtgccctccgcctcttcccttgtcatcaaggctctcaaggagcctcctcgtgaccgcaagaaggagaagaacatcaagcacaccaagtccatccccttcgacgagattgttgagattgcccgtaagatgcgctctcgctctctcgccaaggagctcaagggtaccgtccttgagatcctcggtactgctttctccgtcggctgcaaggtcgatggccgcagccctaaggacgtcagcgacgacgtcaagtctggcgagattgacggtaagttcagattgatccccttcaagcttcgcgtcattcgctgattgcccacagttccctccgagtaaacaatggtcttgattcttatggcgttcgtcaatatgtattgggatgctagctacagcgaataggatcattgcttctaccggtcaaaaaaaaggtttacgattcatgactttaggattcccactcgcgctttcaatgtgatttttcacgtttctttcatcggatacggtaatcttcgctatcttgaatgctttgcctggcttggccatcgctcgaatttgagcggtgaaaccgcatgcccaaggtacctttgcaacactctggctcttaccgttctttcccgcctccgggcctggattgaacaactacctcgtggtataggcttattttgcgcaaaggagatcaacgaccctctactcaccgcggtgttctcggacgaagcaagcttcgtcccgtggatacagtggtccatttcatcggtctacatactcgtaaaaaataccatttagcttgtgcaacagg

SEQ ID NO: 16938 - DNA, 1020 bp, Emericella nidulans
agcttcctctcacagtctgctttctcttgtgtcctaatcatcgagttactcgcatcgtaccataccccgctccgcttccggaaacacagacttgcccggtagcgacgttcgagtgcagcaatcaggcgtatttcactaatagaacaaatctttagagcctggccagcaggtgccgcaagagcaaggagctagcaatatggagtctctcaaggctgttttctttggtcccgatcctcagacgcaagtaggtcagacatagccgtttcctcgtcacattctgactttatttgtctacagatgcgaaaatgtaaccagctcatccgcgcaaatacgcgtcagttggatcgtgatatcgcgcagctcaaagcacttgacggcaaaacgcggcagaccatagtcaacgcctcgaagcgcgcccagcggaacccagcgcgcgcgaaacaggcgaacctcgaagcgaaaatgcttgcgcgggaacttgttcgggtccgaagacagacgactcgcctgacaactagccgggctcagctacagagcgttcaaatgcaggtcaacgaagcgttcgcagtccggaagatccagggtagcctacagaaatcgacgggtataatgaaggatgtgaacacattgatccgtctcccacagctgtcagcaacaatgcatcaacttgctaccgagttggtccgcgccggtattattgaagagatggtggacgacgctattccaaataacgaactactggaggatgaagaggcagaggctgatgaggaggtcgataaaatcctacaggaaatcttacagggaaagctatcccaggtggacgaagtcaaaccagaaagacctctggaggagcctcagcaggccgaggaagagttcgaggatcaggaagccgctcttgcgcaaatgaggggccgtctggaagctctcaaaagctaagtcgagaaatgctggctctctgggtatagaagttcagcgcacctcgtctcgtgtcgtttgtttttacggagttggggcgcggta

SEQ ID NO: 16939 - DNA, 1020 bp, Emericella nidulans; identical to SEQ ID NO: 16938

SEQ ID NO: 16940 - DNA, 1020 bp, Emericella nidulans; identical to SEQ ID NO: 16938

SEQ ID NO: 16941 - DNA, 1021 bp, Emericella nidulans
gagggggacgtagaacaggctactcaggagtacaacctatacaatgatttgctgaaggatgagctgccgaaactcttcgccctcgaagcagaattcatccggccgcttttccaatccttctattacatgcagctgaatgtcttttacacattgcacgagaagatgcaaggcatcaacattggttactttgatctgacacgcgacatcgaagaagcgtatgaggagaagcgcggggacgtcaaagagcgcgctgaagaactcaccattgttcacttcaagaccacaggtggtcgtcggccgggctcaaagctcactggcaaagataaactagctgcggagcacaaaggccgcttcggatcacggcccagtgaccccgatgttgtcgaaaacccgccgcctccgtactctcctggcgccagtggaagcgccctcgcagcagccgcagccaaaaagccggcacccccacctccaaagcccaagccatcgcagttccgtgcgcccgtcgagacagttacggcgttgtatgattacgaagcacaggcccacggtgatttgagcttctcggccggagacgtcatcgagattgtgcaaaggaccgataaccaaaacgagtggtggacaggccgtgttgacggacgagaagggcagtttccaggtaagcaatgcccagaggatgtctctggactatgctaatgtctcacagcgaactacgtccagttgaattagtgaggatcagtgatatcttagcggctttaattctattctctgcaaattatatgttcgcttggagtctcatcaggctttactcgcataaagaattgttactcgttcatcgctctgcactgctgtgtccaggtggcattaactgtcgccgtgtatatatataccttggggttcgagcaatgattcacgagctgctgtgctttgccagcggcgttgattcttgacctgatacctatcctcgaatgttcttgacgttgtgtacaaagatgaacaaatagcttggactcgtgccaagata

SEQ ID NO: 16942 - DNA, 1025 bp, Emericella nidulans
aaggctaagggtgaagctcaacggctggaggaggccagcaaggctcctttcatagccttatcgcaatcatacaccctccaacagacaaaggaagatctccttccattcgaatatcaagatggcctgacagctcgcgacgttccggagacaacgctcacccgtcagcaagcctcgaactcagtacaatcaatcgaccagaatgaatatctcccggcaagactttctcggattcacgaaggcgccgacgacagcgctctctgtgctcagaaatccgtcctgtacctagcctatgggtcgaacctcgcatcccaaacctttctgggcatgcgcggcatcaggcccctctcacagctcaacgttcttgtcccagatctaagattaacgtttgatctgccgggaattccatacttcgagccatgcttcgcgggaactcattttcgggatacatccgctaccaatggcggggaggctgaagaaaagcgcgccctaataaacacgccagacaccgaccaagaccgctacaagggtcccctcattggcgtcgtttatgaagtcacattatccgactacgccaaaatcatagccacagaaggaggtggccgtggttacaaagacatcgtagtgacttgctacccgttcccaaacggctatgaccccgccgatccaataccggagcgaccagagacacggcctttgaaggcgcacacgctgctctcgccggccgggatgcaggagctgctgctgcctcaaacgaggtcaagaatcaggaccccacgaaatgcacgctacactcaaccctctgcacgttatcttagcttgatcaccactggtgcagcagagcataaccttcctctggcgtaccaggcctacttgaatcaactgcagccgtactgcatcacgtcattccggcagagagttggcatggtagtgttcctggtcatatggggtccctggatccttctgttgctgggtttgccgagagtttttgctcggccggatgcgtagtcctgagtgggtgggccgac

SEQ ID NO: 16943 - DNA, 1027 bp, Emericella nidulans
tggcttcaggaacgtcatcactcctggagatttcattaagacgcatcatgacaccacgccgttccgcaagttgaccgaagaagaatacaacaactccagagtgcttgaccttgagacacttcgaattgacgcaatttttgtcttcgccgacagccgtgactgggctggcgaccagcagatcattctcgactgcctgatgagcaagaatggcaatatgcttgagcgctccacgaccttcgatgagggcccgcccgtcttcttctcccacaacgacgtggtctggtccacctcgcaccagcactcccgtatcggcatgggtgcgcttcgcgctcacttgaggctctgtacaaggcagtgaccggcaaggaactgacgacagtcgccttcggcaagccgcagctcggcacctatgagttcgccacacgtcttcttcgccagtggcgcaaggagttccacggcatcaacaaaccccctaagaccgtttattttgtcggcgacaccccagagtccgacatccgcggcacaaacaagttcaatgagattagcgatacagattggttctctatccttgtcaagacaggtgtttaccaggaggggacaattccgcgctacccgccaaagaagacctgcggaactgtcctcgatgcggtcaagttcgctatcaaccgagagcttggactaaagacagatgatcttcgtaacaacgagccatctcctgagcgatatggggaagtccgtgcctgagctggatatcgacggctgtccctgctattgggagaacttatgcttaggcttatgattttttgctatctttcggttttctgttctcttcttcgctcctatctgctttcttctcttcgcgtttatgtgctattccctagattcccctcatgtttgcccttttcagttctattcatttctttcccatcccgttcgctctgcatatctgctactgggatagagtgcctcatagaatccggtacctttccatatctagatagtgctacaaagtacgaagaatgaacgg

SEQ ID NO: 16944 - DNA, 1028 bp, Emericella nidulans
agattgagaagttgaaactggagattgaggcattaaagctccgtaatcgctttgtggaagagcacacggcaaggcagacccaacattccttagtcgttgaggcacctcttccagaagtcagatccccaggacttcttcagggtagcagaaagcggccgtttcccttcccagagcactacaatggtgttcgcgaaagaccagcctcagactcttttgatgaggaggacgtcctcgaagacaatttagccgggttctctctgacagagtcgagcataccctctgtgaagattccgctgaaagaccatgaaactaccagagaaccagttcatgaatcatctcctcgattacagatcggagttgacaactcgacataccaaacgccacagtcccttccttccgacgaacctgctgtgaaacggcctcgactctcaagcgaagtctcggtttccaacaaaaggccaaggggccgaccgtcccgaaaatcgctcagccaagcagactcaacgcagaacccaggaccaagacttccagacgaacaaggcagcagcagcaaaaatccccaagctacgcccaatatcgagcaaaaacctatggaagacctctcagcccgttcgcacagactacgcagccgatcacgggcagcgtccctgagcacaagaaaccagttgtcaacggaaaatgcagacaaatcacagcaagactcaaccacatcctcagagccatctacgcaattagctgtgcaactaggcaaggaaaatgccgaactagaatttaccagacttaaagctgatgagggcaagagaacaaaagccgaaatgaacgaaaagcgaaaggcgcaggccgctgcgcgtgataacatggtcaaactggctatgcagcgcgaagaagctatggatacggaggaggcccggtagccaaccctccctggcatagcctattctagccttgagatattatccacatttacttctatttacgatgtattatagtactcgactgatgaaacatattggctagctttgcgcgcc

SEQ ID NO: 16945 - DNA, 1032 bp, Emericella nidulans
cctgcaccaacgcagctataatcgctctcatcttctcaagattgctctcgaagcaacgatccttgctttgctcatcccggccgcctaccgcgactatcaagcgtatctggcgctcgggcctgggggcccgccatataatgtcgtcgggtggctgtgtgtaaaattattcttcaacccgctgaggcgggagatgttcggcaccagaatctacgaccagaagatcgcaggcggcgatgatagcgggttcctggcggagcaggagctgccgccgcgcaaaggagagcgaccggcgatggcggaattcgccgtgccccagaggcagatcaatcaggtgcccggcagagcaattcaagaggtactcagggctttacaggaaaatctctactttgagtgacaagggctgacctggaggtagaaattgatggctgaatacgccgcgttcctggatcgcaatgcccacctcgtcgatcgggtaccctcaatcctcgagagatataccgatgccgcgcatgtatgcggccgtatccagctcacgccgattgcgcgagaaatgaggcgagagatctgtcatgtccacgggacaagcgatcactcggtgcatgttactctgtctccagctgactgtacgcaggcgccaggcgcccctttatccccacattacttatccccggcacttatgatgaagttcggatgaactgatgaaggcaggtaaacgagtcatcgacgctggctggggccagagattcccgctcgccggctcaagcatcctcaggaatgtcaccttcgggaggctgggaatcctgcctaccgagtatttgttcatttatgcgcccagaaacgaaaaggagatcgaggtggtgttgaggattattaaggcgagtgtgcagtatgtgacgggagcccgcgatgtgcggtagttttgtattggcagtaaaaagaaagaggcactgtttgccgtctctcgactcagtgtacaagtagagcgaacggacatcttccctcatccgaatatagccgtgcaatgcctgaccg

SEQ ID NO: 16946 - DNA, 1039 bp, Emericella nidulans
tgtccgcattctacattgattgtccagacacgggagtatctgctcgtggattcgatcagatcagtgccaaatttaccgggacaagcattcgtgttgcccctggtcagcataatctcggaatcttcatcaacattagcaagagggacgacgaagaatatcagttgacgcatcccgctgctcatctcggtggcctgttgaggggagctttgtcaataagtgtggctgacacatgttacattgtctgcccaaaaacaaggattaaggttattttgcagtacttagaggatggctggatcagccgagctcagaataaggttgagggagtcattttccagtacgatccagaaaaggataccattaccaggataaaagacgtccaagaaggtgacatccttgccaaaatatcaggatcgtggcacggcgaaatgtactacactctagcaggaacgagtgagcctcgccttctgattgacatcgggcctctttttcctgtcgcgaagactttgccgccggtggatactcagctttccaacgaatctcgaaagttctggtcaggtgtgaccgaggcaatattggacaagagatatagccaagccaccaagctgaaaatggaaatcgaggaccgacaacggcagaaggctgcggaacgtcaagaaaagaacgaggagtggaagccgcgcttcttcaccgggtccgtcacacctttgggcaaaccggccttgagcgaggaaggcgtgaaggccctcgagggtattcgaactcaacagtaccatctagatgaaagcgagatcaaaggcgcctagtccggattttcattggagtatattactaagtccctcatatgggcccgatctttgtgcactatgaggagtgccatgatgatcggtgtggttttgacttccaccgcttacattctcaccttctttggcattgccttttctcgggaccgtacgcagcaggctcatgctgtatctatatgttgcctaaagccattcctaatatcttagatttcgagctattgtcacaagtggcaggtcct

SEQ ID NO: 16947 - DNA, 1040 bp, Emericella nidulans
ctggtgctgtccgccctgagcagggtattctcaacgtgcgcaaggaaatgggcactttcgccaacttgcgaccatgcaatttcgccgctccctcactagtagagagctctcccctccggcctgagatctgccgcggcgtcgacttcaacatcatccgtgaattgactggcggtatctacttcggtgaacgcaaggaagacgacggcagcgttcgcccttgacacggaaccctactcacgcgctgaaattgaacgcatcacccgtcttggtgcccacctcgccctgcaacacaaccctcctcttcctgtgtggagcttggacaaggccaatgtccttgctaccagccgtctctggcgtaagacggttaccgaaatcatggcgaaggagttccctcagcttaagcttgagcaccagcttatcgactccgctgccatgattatggtcaaggaccctcgcaagctgaatggtatcgtcatcaccagcaacctgttcggtgatattatatcggacgaggctagcgttatccccggatctttgggtctgcttcccagcgctagtctgagtagcattcctgatggaaagggcaaggttaacggtatttacgagcccattcacggtatgtattcctatgttattgcacctctcgaggattgatatgctgaattgattttactaggctccgcgcccgacatttccggaaagggcattgttaaccccgtcgctgcaatcctctcagtcggcctgatgatgcagtactctttcgccctcttcgaagaggctcgcgcggttgcgaccgccgtgagcaacgtcatcgaggccggtgtccgcactggtgacattggcggcaaagcttccaccaaggaagttggtgatgctgttgctgctgagctggagaagcttctcaagaaataaatgattgcgccaagggtgtgtaaagacgctacataatgaaaagattgactggtcgaaaaaagtacttgtcatatgtggcattaaacatgccaaatgaaataacgaacgacttaaatagaataccatca

SEQ ID NO: 16948 - DNA, 1043 bp, Emericella nidulans
tcgcgcgcattcaagatcctcagatgacaggatatgtttcgaccaggtactaccgtgcgccagaaatcatgctcacatggcagaaatatgatgcaaaggtggatgtttggagcgcagcgtgcattttcgctgagatgttgctgggagcgccattgttccccgggaaagaccatgtcaaccagttttccatcatcacagagcttctcggaactcctccagatgatgtaattcagaccatttgcagtgaaaacgtgagaaacagctccctgccatcttttgattttggaatcgcgcgctaatagacttctcacaaacagactctgcggttcgtcaagtcgctaccaaagcgggagcctcaagatttggcgaaattgccgaagttcctggcgctcgtgcatcccgacaagaaacccgaagaggatgaagattataaaaacagtacgtgtcccgcttttgtattcatatatgcttgatggtggcctctaacggaaaatagctatcaaccttcttaaagcaatgctcgtttacaacccggaaggaccgaatcagcgctgaagcggcgctcgcggccccatacctagcgccataccacgatgagacagatgagccggtagcggaggagaaattcgattggtctttcaatgacgccgacttgcccgtggacacgtggaaaatcatgatgtgggttgcattctgtttatcaacatctattaggattcttgaactaactcggcactcaggtattcggagattctggacttccacaacatcgatcagggcggcgacatcaaccccgcccttgtcgagggagccgggctcaaccagcaaggtttccaataaagccctaatgaatcgcgtggatgcggcgctggtagcagtataagcacgatatcgtgggctttttttccttttttcctctatctctggcatgtagactgggcgcgagagctgtgatgtggctatatgttttatttatgaacgattatatttatgtcatgcgcgatgtgtctttattaaagtctaatccacccttgtcctgctga

SEQ ID NO: 16949 - DNA, 1045 bp, Emericella nidulans
ggtcgctgccattcccaaagcctcaatccagcgtccacctaggcaaaaaacatactgcaccatgtgtaacgaccagcccgacggctttcacggagaacatgagcttcgtcgtcacattgagcgtgttcatgccgtcgtacgaaaagtctgggtgtgcgttgatatctctcctgacaaaaagttgcatacctcttgctacgcttgtcggaccggataacggtttggatggttaagcaatgctgctgctcgccttcgtcgtacccatctcaatgcatgccaacgtggccgcggtgggcgcggaaaagacagtgagaaacgtggtggcaaagggggtggcactcatccacctatggacatcttgaagcattggatggtccagaaagaggagattgttgttgaaaatgcacagatgtatcctctcgatgcggacggactagttgatgatattgtgcctgttccaaccaatccgctagacgacacttcattcgaatcgctagcctctgaggacttgtcttcacagggcacggaagcaaccggcatgaacagttacgattcatttacttcatttcctacgacgaattcgtatccgtcgtttgagaacacctgctacctcgattctcaacctctagttcctgaagtaacctcgtacgtctgatgcctctattctaggaatgttcgatgatttcccgatctatattcgcaccttgtgtttaccaagtacgtcgtcggagttggtgcttatgccttttcgcctttaagcatgctttctccttactttatctttcatcttcactttttttctcgtctcataattccacaagcttgtggaacttgttttcttattcacttttattttcacattctcttttttttttatctatttacgggcaactggtttccgacttttacctcattgggggcttacaggtcgaatcgcgacctcgtaatccccctcaaagagggatacgacataatgtgtgatgatgagcagcgaagcagtccacgagactatacatccagaatatactgattcggcgagcacgcc

SEQ ID NO: 16950 - DNA, 1050 bp, Emericella nidulans
tgaaactcataacattctgacaaggtaaaaagcccttggatcaacaattagtgtggtgagtaaccgatcacatcgatcatcgccgacgtcacccgctcagccctactgcacgatcgggcgtctcgtctccatctttgcacctcacgaacccctctcacctactcgaccatccaaccaactactgagactcatttttcattcgttcagacattatcaggcacactaacttttccaacgtgcgtgacagaatcaaagcaagaatcagcaccacctccttcccattcataatccaatcgccatggcaaaccgcctgatcccgctggtcgtcctcctcatcgtggtcgtcgtgctcgcagtgattggcttcgtcgcatatagcatcattcaagaagtctcagacaagacaaggagcaagatggagaagcggaacgtcatgtttacaaaagacgggatgaaggttggtgttcgtgaggttggggaagaggagtatgtggatcggagtcagaggtacgtacccagttatctcataccttcttgatatgagggtcggcagtctggagtgggcaagtggctaacgcgccgtgtagtatcctcgtcaacatttggaaccatacttcattcccggcgtacaagagcagactctggaatatgacgggctctactgggtctgcgagcgggactgggaatggcgagttcagggctgagcataggaaggggtgagttgtgtaacctcttttgcctgtcttaactggaagggtactttgactaactcgagcaatctgcagacgttccaattgactatcgaaacgtctcctgagacaaaggtggtctaagacatcgatctcggttgaaggactcctgggagagtcttaatagggttatataagaatcagtgatcctatacatggctgcagcacagagctactctcactcttctagcagtaacgattgacgaatgatgaatcaggtgaagtcattctttgctaccagctcccaactttatgtatcgagtaagagggatagctacatactactcatttatcagaaagc

SEQ ID NO: 16951 - DNA, 1051 bp, Emericella nidulans
ggccgacattttcgttagccatcctgttaaatctttcgtaccaaagatcgttccccgtgaaaaggtgggctacatgccggcgtcgacaactggctggacggactgaacaagaacatgagaaacgaagatatcgcctattacggacgaatcttcaactcctgggtgcgaaattcaggaatgccggtcattgactatcctgcaggtgagttcacgcaggtatctttgagaaaactacactaacgagagaagacgagtatattgtccagattgcacgcttcgacccatccaaaggcatcccgcacgtaatcgagtcctacgagaaattccaccagcgtatgcaggactattgcccggataagcctatacccaagctcttgatctgtggccacggctccgtcgatgacccggatggctcgatcatttacgacctggccgtcagatatattgaggactctattcccgacctcgccgaccagatctgtgtcgtccgccttggcccatctgaccaagtcctcaacgcactcatgtccaaagccaaagtggctctccagctttctacccgcgaggggttcgaagtcaaggtttccgaagctattcataagggtcggccggttattgccaccagagccggcggtatcccgttgcaggtaatcgacaaaggtaacgggttcttggtagatgtcggcgatacggatgctgtggccaagcatttattcgacctgtgtaccgacgacgtgctgtggaagaagatgcatgagttcgcgctggcccatgtgtgtgacgaggtgagcacggtgggtaactcgctgaactggttgtatcttgcttcgaagctctccaaggggggagtaatcaagccgaacgagcgttggctcaatgatatggcgcgcgaagatgcaggtatcccctaccaggagggtgaggaccggctaaagcgggagcttgaagtgcagaagatgggttagcatttattctctcagagaagctttttgtacatattagcgcctgagatacatctcaactatttttgagcgataggccagctatccgc

SEQ ID NO: 16952 - DNA, 1051 bp, Emericella nidulans
gcgtgcagtcacccaacggtaagcactaaaagcatgatatctgcacctgctaacagcgtcttatagcatgttcgtcgttggacaaactgtatctggcacggatgtggtccccgagctgaacttcgacatcgtcggctcaactggcaacatttacaagacgaccgtcgggaaggtgccgacctgcaactgcccggatgcaaggaaaggcaaccagtgcaagcacatctgctatggtaagctatcactgtttcaacaactttacgcctcaatggactattctttcctcctgctattattatccttggcatccttatacctatcgctaatggccaatgcagttttagtaaaagtcctgaaggctccttcgcatctccagtaccaactagctttcctatcatctgtcagtgcgtcaaccaaaactttgggcaacagactaacatatccttaggaactccgcgaaatttatgaaaactctcccctccgaaacgtcaaagacaaagcggaggaccacgacactgatgggaaacgtaagccagtcgaaggcgactgtcccatctgcttcatggaattcgagccggacaaggaagacatcgtctggtgccgcgcagcgtgtgggaacaacatccacaaagcctgctttcagaaatgggccgcttcgtcaaacaaccagggagtccgctgcgtttattggtatgtttgcgcttagtcctaccctcgactcacagactaaccaattcccaagtcgctcaccgtggcaaaaccaagacgccgacggtaaagtcgacgttaccctcgaacaactcgtcgctcagggtcgagtcggcgaagacgggtacatcaacgtggcaagtcaaatgggcctatcgggtgaacgcggtacgagccatccctgtagaagtccctttcccctacttttttatgcgaggacactaatttgatgagaagactcttcaacatactatcagcggtgggtgcaccggcgctcgtattattctggctggcgtgacgcgagactacgtggactactactagacgcgcattggatgttgga

SEQ ID NO: 16953 - DNA, 1055 bp, Emericella nidulans
gcctatactcacatacaacccgtcaataatgatacgcagtccagtttcccgaagtcagttgctggcttctgctttcgcgacacgacgatccacagcaattcgcaaactctcaggctcccctcaaacgaacaatgcccagcctgaagccccgagctccaagccgaaacctcacgacatcgacccccgatggcttacaatgacgaaacggcgcgttgggagatgcatgatgtttggattgaagccacgtcaggtgcaggaggctggggatattgtgcagcaaatcgccagggactggcgcgagctgattgccggtagtgagggatacttgacggatgctacaaggaggggattgttcaggcagagggttgcgtggggtgagatggtaagctcatgcgattaaaccggaatttcatgagccttaataggcacatacatgctaatacagggttgatggtttctggtaataggatagcatggtaaggctgctgcaactctgtcctggcgaaatgtcttgactgatttctgaaagggtatatctgctttctctctcttcgagattctgagagcgtggccctaacaaattgtataggacatgtcaacaacgtcacatacgtccgctacgccgagaccgcacgcgtatacttcacccacaacttcgccctacatattgacccagcacataagaccgaatggatgaacctcgtcagcaacaaaggactaggcattattctccgtagtatcaagattgactacaaattcgtacgtaccatgcataccctgtcatccacatcaacagcactccccctcgctgacggcttgtgtacagcccatgcaataccccgacaaggtgactgtctaccataaactcgtacacgacccctcagcttcgcactcgtcgcagtttgccttccatcttcaagctatgatcctttctgaagcgcgccagcgccctgccgcccgcgtccatgaggatctcgtcacgtacgattacaaaataggtaagaaggcagctatcccaccgtggcttatgaagcagctcaaggacacttgggagc

SEQ ID NO: 16954 - DNA, 1057 bp, Emericella nidulans
cgtcctcctgcgacgtaggcttttcgccatgaaacgtcatactcttcctccaatcgttactcataacatgatcaatgactccgaggatccgatccttaaccagatccggcgtgtccagctcttcaatcaatcttctgatcgcgtcaaaatcgttttccatccagaattcctcaactcatctaacccagtgttgcctttggactacgatgactttgttcgtggtacacaccttggagtcttcccgtcttactatgagccctggggttacactcccgcggaatgtacagtcatgggagttcccagcattacaaccaatctctcgggcttcggatgctatatggaggagcttattgagaactcctcggactacggcatttatattgtggaccgccggatgaagggcgtagacgattcagtcaaccagctgaccgatttcatgtacaacttcaccctcaagagccgacggcaacgcatcaaccagcgtaaccgtacggaacgtctcagcgacctgctggactggaagcgcatgggcttggaatatgtcaaagctcggcagttggctcttcgacgaggtatttctcgcagcccgggttattctttgtttgcttactgactacgtgcagcatacccctcgtctttcgacaaccaggaagattactttgacgttattggcgggacagagcagaagatatcgcgaccattgtcggttcccggatcaccacgcgatcgctctggtatgatgacacccggtgatttcgcatcactgcaagaagtcaaggagggtctctcgaccgaagactatgttgcatggcgccttccgtaagtcctgcacatctacctaggaagctcgagctaattcagcatcagaacaagcgaggaagatgatgcggaagaccacttttaccctctcacccttcggacgaagaagtccgaccgaccgtcttcacctcttgaccggatatccataaacgggggtcaatccagctagcatggagtttattctttgttcgcactcgcatgtcagcatacttgtaatgtcctgtctgttcatattgct

SEQ ID NO: 16955 - DNA, 1060 bp, Emericella nidulans
aggattctaatccggcactctatcttcgtgttgatattgatcctatcaacaagaacccggccgatccgaacgatgtcgagatggaagttgaaacccctgctcctaggcccatcactagcaagctgcgcactacgcttcgccacctccgcgcgcgcggcggccgtctctcacgtttccgtggcttcagcatgttcatcaccttagctgttgcccagtgcatcgtctcttctattattcctatgtctcctagctcgatttatagtggattcatccaatccacgcttgtccatattctccttgccaatctgcgggtcgcctgggtgcacattgtgatctcggagccttctcccaagcgtttctaccagcgtatcccgagctttcgatctctgaagaagattatccctgcagctgctttcgaaagccttgttgtcaacggctcgtgccttatcgcttttttcatcatccgtctagtccatggactcaaggaactcgatcttattcgcgatggtgatgtttctcccgagctcgtgcggcgtgccgccggcataatgagcatcgctggcttggttggctggcttgcgtccttccccgcaaacgtcatcttcgtccgcgtggcggcgtctatgctccctgcagaggacgagccaatcatccccttcgaccgaagcttcggtgggaaggttgctcccgaagtcgttggtggtggtgctctgagcattgccgatgcttggaaaacaatggaccgcgacggctggaagcgctatgctaaagctgaactcaaggccatgggcttatacatggctagctcgatcttcttctctatcgttattgcggcaacgttactcggtggtgctttcgcaattaagcctaagggtggcaactaaactgcggaagaaccgacgttaataaacgcagttaccgtccctgggaagcgcggtgcctcttggacattggttctatgattgtctcgaatataatatctatccagtatttttactcaccctgtacgctcgccatttacataccaaccattatacttgcttaaatgataaatcattta

SEQ ID NO: 16956 - DNA, 1062 bp, Emericella nidulans
gccagtgcgagaacaccaacgagaataccatcaccaatgccatgtacggtaaacgcacggccggcattttcgggtacagccatttcaccggcggtttcgcgggcgggcaggcagagtacctgcgtgtgccgtacggcgacgtcaacctgttgccgattccagacgatgtacctgatgagaaggcgctgtttctcagtgacgttatcagcacgagctggcattgtgtcgtggatacgggggtcaacaagggggacattgttgctgtttggggcgctggtccaattggccagatggcggtggattttgccttctaccatggcgcagaaagggtcattctgattgatgggggcgacggcgcatggaggctggagtatgtgaagagcaaactgccgaaggtcgaggttattgacttcacgaacctgcccaagggggagtcggtttcgtcgcacctgcgcaaaatcaccgatcacaatctggacgtctgcctggaatgcgtgggtggagagtacgccaagggctggattcactttttcgagcagatggtaggtgctgagacggacacgtcggagattgtcaacgagatgattacggctgtgcggccgtttggacgagtaggccttaccggagtgtatgctggctacgtatgtgtctcttacggttttcctagaatcgaaatctgtactgatcgtgcttctagacaaatcacttcaacatcggctcgctcatgcagaccggcgtgcgacttattgggaatggccaggcccctgtgcagaaatactggggcgatctgatgaacctcatccagaagggtgatatcgacccgctacgtatggtcagtcaccgcttcaggctggaggatatcgacaaggtgtattccttgttcaacgagcggaacgggggcgtacagaaggtttacctggagactaggcattcggcgcctgcggcgaaggagggaccgcaattgacgaagttggagtaagtatatcacgacatttacagttggcacatgatcttcatctgaagtaaattgcaaagacaaaataaaacttttgcattcggtga

SEQ ID NO: 16957 - DNA, 1063 bp, Emericella nidulans
tctggttgagtgtacggctatcgaagaacttgtggataaactgaaacggaggaaaacaattacgagggagcaggtgctccaagaaagtacgcgtaactatctaaaggacgaaaaaatgctgactccttcagtgaaaagcaaagccgaagatgcagatatcgttgctacgtcgaccgtgatgtcgctaaagtgtccgctctcgactcgacgaatagaggtgccatgtcgctctgtgttatgcacgcataatcagtgctttgacgcatcgtcgtttctccaactgcaagaacaagcaccaacatggtcttgtccggtttgcgcaaaggcaacgagctatgagtccctaaatgttgaccagtaagctcccaacatcccttctttgtattgacgctgttcttaccttctagatacgtggacgatatactccgctcaacgccgctcgacgttgagcaggtaattatagaacctaacgggcaatggtcaacccccaaggatgaggcggtagcgactggaccaggcacctttacacctgcaaccgacgacgacgaattggttgagattagagaacctggagttacacctgtaaaacaagagaacctatcttcgctggatttgtggcggcagacaccagctacctcgcgagagcagtcctcagcgtggtcgagcagcaaacgaccagcgcctgtcattgaccttacgggtagtgacgacgatgacgactccccaataaggccaccgaaaagacaggcagttcatttgcatcggccattgcccaaacaggatccccgcagctcatacacgggcgggtatcctcttccgacctttggctcagaataatccttaagacggccgtcccatgcacgatttatctagcggtgcatctttcccggcgttatggcgtgtggtttttcttgggcggggggaataggagtgcatttgcattataggccattttggcgttcaacaggaaacaggttaaacattttagcagaagactgtgccactgaccccgtggacgtacaattcactgtgccctgcataagataagagtaatataaattaa

SEQ ID NO: 16958 - DNA, 1063 bp, Emericella nidulans
gcaccggtgtccaggccctaatcggcacttttgataatgggcctagctctgttacactcctaattacaattcgaattcacagtgacctggatttggctctgattggtataatatggaccgcttccgaagatggatcgctcctaccgcagattatgagcctatccaagagcctacagtctacggcgatgatctagatacacagcccagacaaacccagtccggtccacctttctcaaggcctgtatattgggtgttctttatattgggagtatcaatgttatgggcatggtacgtgttcgaatccgtcctctgtgtaggggatccctgcttaccatcagtctcaacataggaatatgttgctcgctgccgcaccgttctttcatcagcgattccaacaggatgaatgggcgatatctcactaccaatcatccatattgtctgtatcgaccgtcaccaacctgggttccgtcttcgtgctcgcaaagctacaggaatcagcgtcatatccgagacggattatcgtatcgttaatgatcaacattggtatatttacattgcttgctttctcgacgcttgtgctcaagaacgccccggtgttggtgtacttctggttcgtcatggtcatggtgtttggggctagcatggccacgggaatcaaccagaacggagtcttcgcgtacgtctcgggtttcgggagagaggaatatacccaagcaattatgagcggccaaggggtggcgggtgtattaccttgtctagctcagatgatgtccggccttgcagtttcagaacgtggaaagcagcaggcaccggaggcgtcctggaaatcagccttcggatgctttataaccgcaacagtcgtctcatgtctgacactggtctcatttgtctggctcacaaagcgacaatccctgcacatcatagacgacgaatctggatcgacaaacaccgacgaccaaacaccaatgaaaacagtgagcctaaggactctcttctcgaagctgcgcctctccgccatctcaatttatctctgcttcgtaataacaatgatttttcccgttta

SEQ ID NO: 16959 - DNA, 1064 bp, Emericella nidulans
agaagaggcggcggcgaaagctgctgacgcagcagctgccgaagccactgagaaggcgaccgcggacgtacaagagaaaattgcggctgcagtggcagccagtaaacctccagacaagaaaccacccatcaagttcaaggacgctctgggtaggaaattcaattttccctttgatctgtgccgcacctggaaggtaagcatccccgcctttgattgagtatatcttatgactcactcggatcaagggcatggaggaactcatcaaacaagcttttcttcacattgaggtgataggacctcatgttgcagaaggacattatgatttaattggtcccaatggcgacatcatactcccacaagtatgggagactgtcctcgagcccgactggaccatcactatgcatatgtggccaataccggaaaaacctaaagaggagccagctccgcctgctggtggcggcacctctgaaggtagcgcagccccgccgagcgatgccgcacctgctgagccggcaaagaaatcaggtgtgtttgtgaatcctgcaaatgtatgattttagctagtggctcatgctaacgttttcaggcgccaagaaagcacggccaaaacccggcgatcccagcccatttgctgtgtggatggttggaggcccagcgcggtttaagaagcaggctttaaaagcgggaaaaaagcctaaagcggccgaccacgctgtattgcgtgttgtctgatagggtccagctccttcaatatatcatcttgagctttccttaatcaggtttgtctgctttagacgggcatgacttttcctctcgttgaaacgggattggtttctcatgcctggcgatgcatccttcttttacagggagtttctattagggagtatcaaaacaagaactttcatacttcggagttggagaagtattttgagggtgcaactatcctgctgatatacccatagatcgttggaagcgagttcctcttgcaaagcgcgcgtttgtatatgtatatatatatatatgttttctttatattcagctcaagccggtttcaggctacgatc

SEQ ID NO: 16960 - DNA, 1066 bp, Emericella nidulans
ccagcttatggacccgcagctctatttgcatctccaatccgccgacagcacaaactttttcttcttctttcgcatgctgctcgtctggtataagcgggaattcgaatgggtggatgtcctccgtctctgggagacattgtggacggattacttaaccagtaatttccacctctttattgcgctggccatcctagagaaacaccgcgacgtcattatggatcatttgaagcagttcgatgaggttttgaaatacagtatgttccctctccatctcacgtacctcactcacgtaggtgacggcctatgttcggcctgcgctaatcgactggggatagtcaacgaactctccaacaccatggacctcattccaatcctcacccgcgcagaaactctctttcatcgctttggtcggcagattgaagccattgacaagaagaataatttccctacgccgccggggcagcctcaagctcagcgacctacgcctgctcagcctcagtcatcaaagggaaaatcacctgagcgacaattagcagccagcacgggtgtcagctcaagtacacaagcggggcctggtagtaaaccggaagcagcgaaaattataccccaagagttgagggatttgttcaggaaagatgttttttggaatgggaatagccagcactcgaattcgaaaccctaaaactatatggtaagaaaggcactttagctatctgcaccgtcgctgcaggacaggacatactacggcaggatagcttgatgaggcagactgggctacaatatgttatgatatggtctttttattttcagacccttttctatgttggtttacgctttctggcagtatgcattgttgttggataggcagcggctgctatgactttgttccagcaaaccactcaatacctacaattattcagtgggtgctcatttacgcgattataccttagcacctgtgtaaatgcccagttgctcctggagtcgcagaaggattgcaaggatgaaatgcaaacatagtttggctagagttatatatacctatcctaatgcaagcatgcatctagtc

SEQ ID NO: 16961 - DNA, 1068 bp, Emericella nidulans
tcccttacgacaattcctgggagcttttctttggctcatcaatttatttgaccttggaatgggccgttgacctattcacttcccctaggatgacctcgcgtctagtcctggtcatcggtgacctctttatccctgacagagctcccgtatgtgatcagacgcaagttgcccagaacatcacccacaatgtactaacattgcgccattaggatctcccggcaaaggtacatacaaacccctccgcgtcgcatcttctccggttaatccttcgtactctcccttattgacaatatcgcagtttcggaagctcctcacgccaggcaagattggccagattctgtgtctgggtaatttgaccgatcgcagcacattcgagtttctccgtcaggttgcgccggacctacagttggtcaaaggcgatttcgatgtcgattctcccaacctgcctctctcgaaagttgtgacccatggaagccttcgtatcggtttcacccatggccacacaatcattccccaaggtgatgcagatgcgctcctcattgcggctcgccagatggatgtagacattttactatggggtggtactcatcgattcgaagctttcgaattggaggggaggttcttcgtgaatcaaggcagagccactggggctctcagcacaggatactggccagaaggagaggaaccgacacccagcttctgtctaatggatgtaagtcacctgatgttttctctgcgcaagccaaaactttgggcactctctgacacccagatagatccagggtgacgtcctagtgctgtatgtctaccagctgaagacggactcgaacggagtcgagactgttgctgtcgagaaagtctcttatcgaaaaaatagcgtcctttcctcatgaactgatcctttcttgcttgcctgtgcttatgatatagataccgactgtgttatgacgtcaatgctcatgaaataataaacctctaatatcagagcctagtacacaccagcagtccaaatatagcagccctgtatataagtttatggttgtgcttgtcttatgcaatgcatcaatg

SEQ ID NO: 16962 - DNA, 1070 bp, Emericella nidulans
  unsure (1)..(1070): unsure at all n locations
gcttctgtcaaccagataaactaggcctaaggcaacctgtcagccctccgcattgatttaccaaagcccactcgaagctcttcaattaatcanacnccactcccgcccattatgcctgtcttctcgcgtgtcttgtctgtgatactccgtattgctgaaatcggttttggtgcggtacggttcctggcgcagttccacgctacaatccacgaacctatgctaactctcataggtggtcgccggtataatcggctggttcctccacaggttcggtgaccttgacatctggcccgaggcgcgatggatctacactgaggtcgtcgctggaatatccatactgtttggtatcatatggctgattccgttctcgtcggggttcttcacatggccgcgtatgtaattcctctctgcacagcgattcccgtgccgatgctgatctcagtttccgcacagtggacttgcttctttccatggactggttcgcggtctttggtgtccaggtcgatgccaacgaccgactcaactgcggcagcatttggcgttggggctccataacggatgacacttactgtggccgttggaaagccgcacaggcattcagttttctctctgccattgtctggattgtttctgcgctcgtggttagtactccaaggacccagaatctcacgctacatgctgacgagtgtgtagggcatgtggttcaccttccgcgtcaggcggcatgctactgacagatagtaagtttcagcggctactctagaacctgggtgtcagttctaactttttttcatagcggccatcgctctcgagtctagaccagcatcaagtcttggttcaatgccagctcttcgtgatttggcgaagatcttagcgaagaacactcattctcggaggatccaagcgttattgttgcgcccgcaatctaccgcatcttctgtgtttctttattttcttctataaagctgctcgtctcttcagctacgacgaatgggtcgatgatttcacgaagtaatgacgcgagcatgaagttctaataccctatgtgttttggaattggcaatttttcc

SEQ ID NO: 16963 - DNA, 1079 bp, Emericella nidulans
gcccctcaaacttgccttggtgcagcttgcatcaggtatgtctttcctcaatctgcttagcgttcaatctaataggtgtcggaacacaggcgcagacaaagccgctaatcttgcccacgcccgtacgaaggtcctcgaggctgcaaaggccggtgcctccttgattgtccttcccgagtgctttaactccccatacggcactcaatattttccaaaatatgccgaaactcttcttccgtctcctccaacaaaggaacagtctccgtcctatcacgccttatcagctctcgccgctgaggccaaggcgtacctcgtaggaggcagcatcccggagcttgaaaccacatccaagaaatattacaatacgtcgctggtattctcaccgtccggcgcgctcattggaacccaccgcaagacccacctgtttgacatcgatattcccgggaagattacattcaaggagagcgaagttctgtcgcctggaaatcaactgactattgtggacctacctgactacggcaaaatcggtctcgccatctgctatgacatccgtttcccagagcccggcatgactgctgctcgcaagggtgcattcgcactgatctatcctggtgctttcaacacgactactggtcctttgcactggcagttactcgctcgcgcccgcgcagttgacaaccaggtgtatgtggcattgtgcagccccgcacgggacacaactgccacctaccatgcctacggccatagtctggtggcagatcccagtgcgaagattctgtcagaggcagaagagtcggagactatcgtctacgccgatctcgaccccgagacgattgaaagtacgcgaaagggtatccccatctacacccaacggcggttcgacttgtacccggacgtaagcgccggcaagaactaacgcacatgtatgaacactggacgatgctccgagtacccagtttatagagaattgaacgacgccaattcgagcagttagacattaagtcacttctaagctattagtcagaagttgtattttgctcggcagtataattgcagctttccagcggagtttggactac

SEQ ID NO: 16964 - DNA, 1079 bp, Emericella nidulans
tccgtgacgttgaagcgcaacttctcgatgcagagaccaagtcccacgacatcgctgtccggatccatctcgacgatcttgtcgcagcccatagaaagattgtcgaacaactccaggcggccgcgacgcctccaccagcgccagagcccgaaccccagcctgaaccccaacaggcaaacccggacgagttgcctaatgctgtggtaagcccacacatcctgccacatatcgggcgatccgcatggcaaaggctaacctgcaccctcctctgacagaccctccgcaaccccaaagtcatcgtcggcggcctctctggtgcccctgaagacgtcgacgacaaggtcttccagctcgatctcccgttcgccgtctctctctacggccactccagctcgacattgtgggtcgtcgacaacgggatgatctgtctggacgaagctcctactgcaagtccggcgagtgtgcgaacagggcagcaacttccattccgcgacggtctagcaccatactcgctattccccctctggaaagatctgaagatcgtacagggcaagccgcacggtatctactacgacatcgaaggaaacgcacccaaccgcaccctaacaattgagttctatgtgacgaggtataacatggaggaccagtacttccatttcttgatgatcttggaagaggcgaggcccaacatcgcgacgttccggtactttgatgtccaggatgagggggctgaggggacggttggagtgcagggaccgcagagtacgtttcgcactcgccctttcgttctttgttcggtcaagttgatactaatctgctgcagactacaaactattctcgtacaaccagcgcaagatctctcctggtttggagctggtgttcgataccacacctaatgttaatcgcgtggagacgtcgacgttccccttgccctaggctaggaacggctatcattgctttctgaccggacgttattggtacgagttcgatctgtcaagattattggtggttctggacaggatgcatcgtttagatctgcgtagcctccaactttcagttaggtgggagccacggcatcc

SEQ ID NO: 16965 - DNA, 1081 bp, Emericella nidulans
cggcattgaacagcattaacagcatagcaatcgcatttcaaaatgtcgttcaaagtcttcaaaggatccgagaagggggtcatcgaatccaccaccaagaaacccgccctcgagggggacagggtgctcgtcaaagtctcccactcaggtgtctgcggcaccgacctccactacaaggccgccgacatggtgcttgggcacgagggtgtgggatacgttgaggaagtcgggccggatgtcaaggacctgaagaagggcgaccgggtcggctggggctacgagcacgactgctgcggtcgctgcaagcactgtctgtctggcttcgagaccttctgccccgagcgcgcaatgtacggttttgcagacctggatcagggctcgttcgccagccatgcggtctggcgcgaagcgttcctgttcaagctcccggacgggctcgataacgagtcggctgcgcccctgatgtgcggcggatcgaccgtgtacaacgccctggtgggcgccgaggtcacgcccacagataccgtcggcatcgtgggaatcggcgggctaggccatctagccatccagttcgctgcgaagatgggttgctacgtgatcgttttcagcgggaccgactcaaagaaggaggaagccatgaagctgggcgcgaaggaatttgtcgcaacaaaggacgccaaggagctcaagaccagtcgcaaacttaacaatctgatcgtcacgacgagttttctgccggaatgggaactgttcctgaacgtcctcgacaaccgcgcgaccatcagcccgctgacggtctcagataagccctttacaatccccaatcaggagatgctcgtcaagggactgcgcgtgcagggcggcatcgtggcggcgcgccaggtgcaccgcgaaatgttgcagtttgcagctttccatggggtaaagccgatcgtgatgcggtatccgatgaatgagaaagggatcaacgagtgcatgaagacgctagaggaagggaagatgcggtaccggggtgtattggcggcggagtagcggccgcatagcagcttgactttttggtagtgttgacaatttactataa

SEQ ID NO: 16966 - DNA, 1089 bp, Emericella nidulans
gcgtccaccagcgctcacagaggccaacattggagatcagtcaggaaaggtacctacacccctctttccagccggcagccaaccgacgggccagtccatatcgagaccaagctaaccccagcgcgaatgctaggtcttcattgtcactggcgcaacctctggctatggcctgctgctgtctacatacctctaccagaacaacggcacggtctacctggccgcgcgcaacgccaaaaagaccgccgaggtgatcgccgacctcaaacagcgcttcccagcctccaggggcaggctcgacagcatctcgcttaacctgtctgatctgagcacgatcaagaaatccgccgaggagttcctcgctaaagaaaccagactgcacgtcctctggaacaatgcaggcgtcatgttcccgcctgcgggttcgacaacatcacagggctacgagctgcagctagggacgaacaacgtcggtccgcacctgttcacaaaactcctctatcccactcttgcggcaacggccaaggaggcgcccaagaatacagtccgggtcgtttgggtctcatccgacgccgcctcctgggcccccaagcccgcgatcgacttcaacaacctcgactaccgcagaaacgagtcagaccggtccaagtacgggcgctccaaggctgggaccgtcatgcaagccgttgagctggcgcgccgggccagaaaggacggatctggcattgtcagcatcgcgttggatccgggcattgcgaatacgggactgcagcgggatatgggccggttgatgtcgacaatggtcaaactgatcgcgaacaagcccgagatcggtgcgtatacgcagctgtttgcgggactgagtcccgagatcacggctgaggtggcggagaaggagtgggtcgtgccgccagggaagataggatgcccacggcgcgatctctttacagataccgagacaagtaggaaatggtgggagtggaatgaggagcaggtgaaggcgtatttgtagtttgtctctgcgtgtgaagttgtgcttttgatacctcttgttttgcatggttgtagtttgagtcttagataattcctatc

SEQ ID NO: 16967 - DNA, 1092 bp, Emericella nidulans
tcagacttaaaaccagaaaaccttctttaccttacccgtgatctggactcgcaactagtcctcgccgactttggaatcgcaaagatgttggataacccagccgaagtgctgaccagcatggcggggtcattcggttatgccgctcccgaggtcatgctcaagcaagtacatggcaaagctgtggacatctggtcgctcggtgtcatcacatacaccctgctatgcggatactcgcccttccgatccgagaacctggccgatctcatcgaggagtgccgctccgggcgcgttgtcttccacgagcgctactggaaggatgtctccaaagatgctaaggatttcattctcagcttgctgcaggtggatccggcgcagcggcccacgtccgaggaagccctgaagcacccctggttgaagggtgaatctgccagcgaccgcgacttgctacccgagatccgcgcgtacattgctcgctctcgcctcaagcgaggtattgagatcatcaagcttgcgaaccgcatcgaagcgctcaagatgcaagaagaagatgaagaagacattcccagtgcagttgacgtacaggcttcggaagcgtctgacaagtccggtctatcaccgttccctgctctttcaacagagaacagcaacacacaccctgcatcaaccggtaatggagaatcaggcggtactaagaagcgcagcttaagcaagattgcgcgaggtgctatcttccgtgaggtcgtcctcgccaaggtgcgcgagatgaaggaaaacgaggagcgagaaaaggtcgaacgcgaagctcgcgagcgggctcactcatgaaacctctgaatattgggcggttgattagcatttcttttccatcttctcaagagtcgagacctgaaatgtcggacacatacgtattctgtgactactgttcaagtgattcccctttactatttttgaatgacggatatttactatcgataaattgggttctgcacagatctatggtacggggcagtcccggttcttgcttttttcgaatttgcctgagctgcagtttgcatgacgactccataatcaagtccgctatttgcatcatac

SEQ ID NO: 16968 - DNA, 1093 bp, Emericella nidulans
tgccgtgctcatggcatcttatactcgtgaaagtctgaagccgacgccgtttgttgaagctttcatgcagtttgaacggcgccaaggccatggcaagtcccttaacgacttgattgacctccgatgcggccagtggattctcatttactgcattattcaagcactaccgctggtcgttgttgatgtccaggacgttcgttataccgacgacacggaatatttcctgtgcattgctcctcgcggcggcgcaccttgggtgaacagtgacggcaaggttgcccgtagctggttcggcgttgccggcggcaatggtctcgttagcttaccgtccgatgtggtcgttaacggtgtggaaggtgtctaccggcgcagccattgttggcaaatggctgagcaatggtgcgtaaaaggatgccatcttggggccgcaccacgagttgatgacccgtatgataatgagtcgtcaatctcatccccatatcccgcacaccaatcatctaccgggtcatcatctgagcatcccgcgcacctacagcggccgatgcctggacagcagatgcctcctactccgctgctgacccctggaggtggtcttgcgccgccacctgctattccgcgaatgaactcgcccgctctacgtgcaagggcagagcatcggcactcgatcaatcccggtctggaggcgctgccattaccagccggtgtggctccgattgatccgcccgcacggcccgtcagcaagttcaaccccaacatgagcttcgacgacatcttgaaacaggtcccgaaccaaaagggcaagaaatgatgtccctttaaccgaaattgtacaatgtttgaggaggagctatactatcaacattgcattttattatacaccttaataactctcttttatcatcgtcatccatgttctctgtaatggtacagcaggcaggactaggacggggacggcgtacatgcgtgacaaaagatattcagctgattgtttgcggcgagcattttgattccgggatttgcattcaaccttgtcttttttcccctcccttacctttgctttttggaaactgctgttagacgcggtctcctggcc

SEQ ID NO: 16969 - DNA, 1101 bp, Emericella nidulans
tgattccccctcctcctcgtcagactcacaccagttcctctcatccagtggtacctcgccagagcccagtgtgcaatctccggacaatcaggccaaggaatcccacgaggggcacacttgtaccatcgacggagaaaagtctttctgtgcgcaattgggcatggcatgcggtaacatcaacaatcctattccagctgtgaggcaacggagtgagagtgctacaaacacacccaatgcaccatctagtacagataatgttcctgggatcgacttcatggctcagcagaatggcggccagttcgacccgctgctatttggagactggcgagaaccgcaagatgccgttctgtcgcaggattttaacacgttctttgacgacgcgttcccgttgcccgatcttggtagtccgtcacataatcttacagaagttggccttggcgcgcaacagaagaagagcatacttgaggaaatggataacaaggaggaggaagaggttgtgcccggtgaggacaaggctcaaatgttatcttgcactaagatatggtacggtctacagttacagtttgctaccatgtatatactaacttgtttctctagggaccgtttgcaatctatggagaagttccgcaacggtgaaatcgacgttgacaatctgtgttcagaactgcgcacgaaggctcggtgttcggaaggtggtgtcgtcgttaaccagagggatgtggatgacatcattggccgcgtgtagtcgattgttcaattcgattcgcttgaccaacaactatggaatatctacttctcacacgctacggatacccacgatatgatacctcgacgaatacttggagtaaaggatacgagcgggtttatagctatgtcgtttttacttgggacacacaacaattgcagcttgagccggtgctgaataatgaattacggatgttttctttctctattgttaccctttcttgattttaggcgaatgggcggtggattgacgcgcaataaactggaggtctgtacaccatcgaagcttgacttatttggtttatgccatgttgcaggtggaacatattgtccgtcacctttggacttccttcggcg

SEQ ID NO: 16970 - DNA, 1102 bp, Emericella nidulans
ccccggcactttccatgacaagtaccaggattctagcgcaaacaaagacggcaaagccgccctggtcacctctaatatcggcccctcaaacccatcctttcaacaccctgaccctgttattggcaagcagcacacctctgggcccgcgggcaagagcacacttaaggatgagcctctcagtacgcacaaaagcaccctgaaggatgagggtctcacctctcgcccgaagcctgacgagcctgccacaacctacaacacacgctctaccgacgacgccgaaaccactgcaaagaaggtaaacgcggctggccccagcgctggccttgggtctggtatcgccgccggcgctggagctggatcactttcaggtgctgcagtggcacctgctgcccagcctcgctctgagcaacggggcaacatctcattttctcacgctcagagcgtgagccagcccaatgacaaagggccctccacttccgtcgccggtactgccaagagcgtaagtcagagcaagtccaaggagccttctgctaccgatctcagtgcaccccaagctcccaggcaagtgacagagaatagctctggacctaccactactggtacgggtgccgctccaacgagcgtgagtaaggatgagcgcaaggaaccttctaatgccggcaccggcgcaggagctgatgctgagaccactgactctcgtccgccgagaagcttgttccatctaccgaggaggttgctgagaagcacggtgtcagtaaggaggctctccgcggtcccagtgtcccacctcctcgcaagtcctacgaaaggcagatgcaaggtgccgaatcccagaagaaaaaggacgatctgcctaagacaaccaaaaatggttagtaatcgtgtttcacttcacgtcttagttctactgacaagctcgatttagatgacaagaaagagaaacaccattcgagtatgaaggagaaattgaacaaggttctccaccatcactaaacaaaatctcttttcgaaacgttcttagtttttgctttggtaatactggaaacataagccggttcaaatggacagtgaatataatgctttttggtacgcagcgggggtc

SEQ ID NO: 16971 - DNA, 1102 bp, Emericella nidulans
gcagccagtacgtttaccccgtgatattaagcagtgatgctactctcttggaactgccagctaacatatcttttttccgcgcctttctagtgcagatgtaggtcttccgaacatgccattaaccccgttgccatccacaactctcgtctatcgtcaaccgaatttacgcaataaaagaatgccggaaaatcgagggtgaaagaagagggctatgaatatgtgctgactgttcttctcgaatagtttcgtcaagaccctcacgggtaagaccattacccttgacgtcgagtccagcgacaccatcgacaacgtcaagaccaagatccaggacaaggagggtatccccccggatcagcagcgtctcatcttcgctggaaagcagcttgaggatggccgtaccctgagcgattacaacatccagaaggtatgaggcctggtctaccgattgagttttgcgcgtggtatagatttgcggttgcggaggcggaaggacggttatcttgtgtcatagttttgacgccagttagccgctcctagttagaaggagaaggggtgtgtcgcaaggagaatttgcggaagaattttgattgggatgatgacggttggctgactatgcctctctcaattttataggagtccactctccacctcgtcctccgtcttcgtggtggtatcatcgagccgtcgctcaaggccctcgcttccaagtacaactgcgagaagaacatctgccgcaagtgctacgtacgtctaccggattaccactcgactcagttccatcttcgacgaaggatttgagaactaatactagaataggctcgtctccctccccgtgctaccaactgccgtaagaggaagtgcggtcactccaaccagttgcgccccaagaagaagctcaaataaacgactcgttcatgcttacgtttttttctgcgttgctggtgcggaagggtgtgattgtgatgagccggattgtaacgctaaaaaggttcatttttttacaagcggcgttgaaatgctgaagaaacatcagaagagctggagtcgatacattttacatggctactctcggaaccagttgcagtcaatgaaacaattgtaa

SEQ ID NO: 16972 - DNA, 1103 bp, Emericella nidulans
tcatatagtccatcggcgtaagtccattttgtattccatagatttcatataagagaagaaccataccacaaacgctgaactccatatgtgcattgcaagccgtcacgaaaaacctcaagcagggtattcttttatcaaaagcataggagcagaaccaaagtaccaaggccccctaatatctctgcctccccagtgttggagcccacgtcacaggatgagtctctggcgtagcctgatcatcctgcttccagaccttgatagtcttatccgcctcaccggtaatcaagcgcaggcccgtcctatcgaacgtagacgtcatgataccagcttcagcttcaagcgaacccggctgggcggttgtatcgatagtctggtagcggtatcccgtcttccagtcccagaaggacatggagccgttgtcaccaccggagaagaggacattgtcttcattgacggagagggtattgatgatcgcgttatgaccttcaaagttctgcatgaactcgccaccaggacacttccattgcttgatgctccctgtgctagcagatgcgaaggtgaattcgcgagggtgcgtggctagactgcgaatgccctttttgtggtgagtgaggacgcccatggtctttccagctgcgagatcccagaggcggacggtcgcgtcgagagatccggtaatgacttgagggtcggcttcttggcattgtacatctgcgacagtgccggtgtggccggacagaacgtgaatgttgctgcgagtgcgcatatcccacacacgtgcgacgccatctcgaccaccagttactagcaggtcaagacgggggtggagcgcaagtgtgtatacaccactgagatggccgtggtaatgacgaatgaccttgttcgtttccagatcccagcatttgaccatcttatcctcaccgcaggagaagaggtatgggtgtcgcggggatacggctaaaccgcgaacagtcgagatatgacccgtaagggttaaccgcagtgcaccggtcgcaagattccagatcttaattgtccggtctccagcaccactggcaaaccactcgttattcggttccacagccaaactccgcacccatccc

SEQ ID NO: 16973 - DNA, 1111 bp, Emericella nidulans
tgccttgttttggctccgtcaggtctcttcctacggaaatgagatctgccccttgggacaaaccaaggccctccttacttccgtagccgcagtcatcaagatggaggcgctcgttgctgcagcacgccaaactggagaattgccgtctctccttctgttctattcgagacaggcccaaatcttgtctgctgacctcgggcccgagaatgcaagtcgtctccaaatgttgcacatcaacttcatcagtacagctgtatggctctgacaaccccttttcaaactacagaggatttcccaccttgatggccactcttccaaccaatagactctccgtcaccatcaaaggccctcagattcagtgcttcgaaaatgagctcatcactttatcagattcgctaccgcatgcgctctttcctagtctggtaatagcctctacggaatccagtgacagtcatgcagatgttcaatatgctggcactgcccgccgagacccacgccgttcaagcctaacgctcaagctagaacccgctagattgtcaccagaatccgctgatggagtcgtccgcgttccgactatttgtcgctggcgggtcagtcgagggctcgaggcgaatgaaggtctcaatatggagcagtgcatattgtgcaattacatggaatggagagcttctgttttccaaaccgggcagagacgtctgtcatctgcagggctgcacagcgcagtgcgagttctgaaaagatggtagactaggagacaacgaactgccaacctcgggttccaggcttcgagtccaagttagcccctgtgcgtcgactagatcgcccaattctcccgaatagaggactggcagctgagggtccattggttacccatcaatcaaattagaatatcggaatcccgggccatcccatccgcatggttcctggatttcggaacatgggtagtctgaagatccccagccttgacggcacactgccacaatgataactaatgacctagtctactcctgtcttgatgtagtccactcttactcatactccacgagaaaggggtagtggaacgtctaacggcattaccaaggataattttcggagtcatttctcttagtcc

SEQ ID NO: 16974 - DNA, 1118 bp, Emericella nidulans
tcgccggcaatcctttcagcctctctgtggacaatatgtgggctcctcatccgaccactcatcctactattaatccgtcatgcatcgccgcgggcggtgccagtgacgtgcattcctaccttaccaatcatccctttgacgaactgaatcacaagcaaggcccgagcaatcgcaggcgaagctcggccgaaactgagcttgaccagggttcttaccgggtccgccatggtcaagtcacccctccttcagaccattctcccagcaccgtctactccgttccttcccacgactctaagtcagcatatctcccgtccaccattgaaggctcatctgagtccccgccaaagcgcagaaggagcggttctagcaacatgagtggcagtcgaggcagcactcgggcctcaacctcggtcgagcctacgtcgcccggtgatgataaacaagagaagactagagcacggaaccgacttgcggccagcaagtgccgacagaagaagaaggagcagaaccatatgttggagaccaggtacgagcaggagaagatgaagaacgaggagctcactcgcactgtgaactcgttgagggacgctatcgtggtggccaaggatcagcttcttgcacactccgaatgtggccacgaatccatcaaagcgtacatccaaaacatggcgaagaacatctccattcagcatgagcaattcgattttgggacagccccggcacagtacggatgccactcggagcgaaagcctagtggatttggctttgatgtccacccaccgacggcatgatatcgtgcttttcgtctgcatttgacggtgtgttactacattggtgccctggaggaccaattgacgaataatgagcttacttacaccggagtttggccgctggtcgtaaaaaagcgttgggaatcgaccggctcagtgacatattggcgggttcgcttagcaagcgggtgtgtacttttattttcgttctggagtttggagtcagggatgaaggatttgcagtttattttcaatcacgagcacgaatacttagcttttgttcggcctatgccatgtatttagtctagcatctcagtgaactatatcgtctgaaatatgtaccaggaa

SEQ ID NO: 16975 - DNA, 1119 bp, Emericella nidulans
cgctgccaagcgcatcgatagtgaggggaggtttctccgcattatggcaaatcgatgcattctcatgcttgaggacgaagagtcggaagcaggtatgacctttttcctgagcaatcttctagagcgggtaagtgctgactgtaattaaagcccaagctttatccgaatggttacatcaggccctcagctgctcccgcaacattaccctctgccgctttctctacgaccaacgtcactcggccgccatgaaagagctttctgcgcgggctatatccgacaaaggaagaccgggccgcgccgaagaagactcgtgctttagctctgccaggcatcatattggtagacttatccatcatatacgtgcgccgatagagctcgctcaagacagtcgtcatctgatgtatctcaccgacgcctataccgtctgtcctgtcagcccatgttccgctgtgtcatgcccggtgtctgacatgcataccaacctgcaggggatcctgaactggatgttcatggccgacgacgaagacagggtagccgttggggatggtcttgtttacatcaataagacgcggccaatcttcgacacattcttggccgaatacaacggtcgggatcggcaggttcacgctgagattcaagttctcgagcatttctaccagcagcgactctccttcctggatggcgatcgctatatagcctgcagcaaaccggcgtgtctctgctgccaattgtatttcaagcaccatccggctcgtatggtcgtacctgcctcccaccagaatgtttatacttcctggagccccccactactgcctcggtttgccaaaggtgacaaggacacgcagctgcagaaacaggttctgagctacatggcacaagacatgcgagagcagattattcagcaggttttgcagcgctctcgctcgatgataaggcatcctgattcgagaacctcattgaccgatctaccagctgaggcggcttttggctttctggagtagcaacggaatacgggagcacatatcagcgtattaaaatgagggaccggtggagtaattgggtttatttggttgaaaaaaggttcgatcacctagtgtttagtcttttcatagtcaatag

SEQ ID NO: 16976 - DNA, 1122 bp, Emericella nidulans
ccgtcggccttaacacgaacagttgtcgagtcagtacagaaagccgatgtgcgctgcatcctttccaaagggtggtcggcccgtctcggggacccgactagcacgaaggtagaaattccgctgccacctgaaattcaccagattcaatctgccccccacgactggctcttctcgcagatcgacgccgctgctcatcacggtggtgcgggaactacaggcgcaagccttcgtgccggcgtacccaccattattaagcccttctttggtgaccaattcttcttcggcaaccgggtagaagatctgggtgtcggtatatgtatgaagaagctaaatgtcagcgtgttctctcgcgcgctctggacagctactcatgacgagcgtatgattgtgagggcgaaacaacttggggagcggatacgaagtgtaagttcataaataaatatgctaggcatgccctaatctgtagcaggaggacggtgtggcgactgccattcaggctatatatcgtgacctcgagtacgccacaaccctaacccgacagcgctcaagtatttcaagcacgccattttcgccaacgccctcaacaaagacatcggatgatcaaaacgcgaacgacgacattgccgacattgaggattggaccttcattggagacgagtctgatctggaatttccgaggcgagcgcgagaaagagcggtgtctggtgcagacaatatacctgaaagaaccattttgggtagtagatccatttatgcggattcttaggtagaggcagagcctcctttttctacgatggatgatacggtaatgttctctgacatagcaccattgctttaattctggaatgcttctttcattgtttttacttggtcaccatcttttgatgccctgggtcaactggcgtttcctagcatgcttttgtttatagatgctcactcgacttacctatgcacatttgcgaaccagctggtttatatgcctacgatatatttgctgatttgaagcctttgcgagtgataacgcttctaatgttgatcatgatagacgatggagtcatactggttttggtaatgaggattatgtacctaggtacctttgtggtggagttctgaatgtctacg

SEQ ID NO: 16977 - DNA, 1129 bp, Emericella nidulans
ggtcaactcttatctcattccatcatcttcgttgtgcgaagaaccccatgcggcagaagcgccatcccaatgcatttgctgaatccgggtactgagcgatcgagcctatcctttctcttgtgctaaagctcaattcagggtccaagatatggtaaggaattgccgacgtacaaagatctctggtattcattctcttttgacgttataagggaagcttaaaatctctcgctggagttggctacctagtgttcaatagccatcgactgagcgctcaggtaaagtgatgggcttgcaagttacttgtactacagctattaataccccgtttattaagactctgtagtctgcaactgtgagttcctttatctgttgccgaggttattgctaactacatccaccaacacaaatctactcttttctttttcaaagttcttctgcaacaagaatgcttccttttcttctgcgaatttcgaaaggcaagccggtcacgtccgcttcgtggctaagactttgtaaagtcgtgccagagctaagcatcccaagctgatagctcggtgggcgcttacagcaactcacttaattatggccatcagctcctacaaactttctgtgtcggcggatatttcttgccaactgcgctcccgcatgtgggaattttgcgcaaacccataaccttgccgaataacagggctatctactattcaaagcacttctgccacatatacgactatgagcctcggccctcagcttgttgtggcacacactattgacatctaggccgtgcccacacaccttgttcttgatcatttccctgcgatctggaggtacatgcgcggcatgaacttcggcactcacgtttggtcttgttgcaagcaattgagcctctcgctgcgcagctcgtaaagtctctcgagccacgactggcaagccacctgagcctatatagacaggtcccggcggtggacggcgtgaattacaaaaataaggtctagtgagtgagcgagcccttggactgcctcgagggtacatattggtctgctgtgagattttcagactgttaatcaggaaataaagaacatatttatttatcgctagagcctcagttacttgacaaagctgcctccgtcca

SEQ ID NO: 16978 - DNA, 1137 bp, Emericella nidulans
agccgcgcgcaaagaggaccgtatccgagggagctggaccgatcattcatcatacatgtcgggagacgagcgtaatcccaatgttgctcgtgctcagaaacgacaaacccatggtggtgattttttgtcagatgacggcgaggatgccgtgctgatgctggtgagttgcatcaatcctgttctttgtcattggcgtcttagcgtgcgggactaatcgccggggccgcagttccggatgtctcttcctattcccgttttctcatctctcgcctctatctatactgtcttcggacaactatttactcttttcaccttgcctcttcggctctgttcctgcgtgccgtatttgcggaagacttcgttacgtacacaattgtgcgacctcttggtcccgcaattacacatccatgagcggttgagccgcctcaggccgccatcagtctataatgacggcgaacaatcatctgtcggtgaaatcggcgaaggctactcagtcggtggtctaataatggtgcttttgctatcgtcgttcatgtcgtttggcctgctccttctcgcatggatcgcagcattcttctgggttttcgccatgatgcttggtaaccctgacgggacggaacgaaaggacgacggccgagcagctgtattgggcgtttccagatggtggcaaatctggcttagcaaagcccgttcgccctctgggtgactctgattaactgctcatttcatgtcattcacaccttcttgtccagcgtgcacgagccttgatttccgattaaaccgtttaatgcagcatgataccaatgttgggatatgtggaacgataactgggcgcttatttttctccttcggtacatttctttatactacctcgacagcggcacatttgatttggagtcggagttctggttgcaacggcgcgtgggctttcatttccttttcgaattggaatacgaaagtacgccatttatcttttcattattatagttgtccctgggaacgggcattacgggcactacgggcattggggcccgtagttagaaggccttgcatttcagttcagtttagttcattcagtccatgcttgtactctatcagcctacacctctcaagaattgatacccgggccggtcttgc

SEQ ID NO: 16979 - DNA, 1147 bp, Emericella nidulans
cccgctgcggatggaggattagatacactcctagtcgtgctagaaggtctgactgacgaaattggtatgacgatgttgcgtacctgtgatgatttgtatatatctaactgtgcaacttacagggaggtcaattcaggctgaatatcaagatgaactgctaatcactgaattcgtcacgggttctgcggaagatacttttctcgattacattctggaggccaggcttgaaggcatagtcagcccggaaagcaagcgctgctcactcacctctgatagcaatgaggtaactgtcgacaagtcccctgccagattaggcaatgcccagctaacattcgtcatcggcgccttcagggttttgtcatgtcatgtcttcctgccaacttcaatttaacccttggtagtgggtttctcggtcaaatcactagtggcgagtcttggatcgataatcgcaaagaacttgtggttatgcatatcgccttcaaggtattacatatttgttcgaagttagataaaaggccaatgctaagaatgtctcttccgatgtcccagggcagtacggcttacataaacgatctgaaagcattcttgtctggtttgcgttcactgtcactaaatggcaggagggtgactgctgtcgctctgcccgatctaaacgcatcgcagaagctgtctcgtacgcggcgggcaccggaacacacggcgcttgacaccacttttagttgggatagggacgagcggctcatgatagctgatcaacacgcacaagcgtcgctctcccttggccccgtttgttacgcgtcgaattcttcttgcaatgatgcgacagacacttgctcgggacatggtgcctgctacgagaaatccggtggctgctatgcttgcctttgccacgatacatatgttaagaccgcaagtggaacggagcggaagatacgatgggggggctctgcttgccagaaaagggatattagcagcccgttctttctcatcatgggggtcactgtagcagtactgttggcggtcatttctgctattgcgatgatatttggtatagggaacgatgaattaccaggcgttatcagtgctggtgtgggaactgttagggcacagaagtagggtctcaaaacacataccgtcggcgctgatg

SEQ ID NO: 16980 - DNA, 1149 bp, Emericella nidulans
tttttgactttattcgatctgtcctcacctgtggttcatctcttgcctaccttctaccggatccgtcctcccaccaccagactcactcttaggtagcttctttccttccccctcccattacctgaggttctgtctctactcaccagttccgttcagggagcgccatttctcgacccctcctcaaacgcctctacaatccttatatcgcacggctgctggctttgctgagaaacttatgcctcattttgaaaacggcgcaatgggtgaaaatgcggtcaacggcgagcgggctcagtcccaattcttggaggtaattttcgtcggcaaccaagtcctattgacatgctgtgcaacatacacttacacgctggctgcgtagcacttgacctcctacccggttgtctcagactcaatctccttctacaaaggcaacaaatacggcgccaagtcattggagtttgctgaccaaggctacggctttgccaaaccctacctctcatacctgtcgaagccatacggatacgttgcgccatacgtcactcgtgcagattctcttggtgataagggcttgcagaaggtcgacgcaaccttccctatcatcaaggaagacactaagacgctcaaaaacacaatctacgataccgcttactttccactacgactatttggggatgctaagagccatgtcttcagtacctatggcgacgaatataagaagtgcggcggtgatggagtcgttgcgagcggcaaggctattatcaccaccagcctcgtcctctctcaggaatcgctggcatttatcagctccttgctgcagaaaaagaaggcccaggtcaaggacttagtaaacgagcaggcgcaggagtaaaacatataccattcgtcttgtttgtgtttgctaataattgggtcgggagttgtgttttagactttagtgtctagcgttcatcattctctgttattttttatcgggcttgacgcattcattgtcttatcccgttttcttttgttgcagggtgcggttggatatgcattacagctcactccattcttataccttctctgtccgcactcggtttgagagtcagtgtatgtcacctttcttcggtgcttattaagtagcaactccctagttcgagtgaagattct

SEQ ID NO: 16981 - DNA, 1152 bp, Emericella nidulans
gcaaacaacacgcccaagagggtgaaagttgctggggtgacgttcgtccggagcaagaatggcaaccttcatcggctgggtgcagtaacctctaaaaggtgatcgttttgattcgcttcgagtaggacaatactaatttgactgtagagtccctcggcggtcaagaaaaaggacgagctttgccaaagattcactacgacgggtaccaattcttccctcaagccctccggattccatttgtcaactgttcgccatcgcaggtccaaagagtcatgctaaccgacatttcatctaggtacctgctacaagggaccttcgtgtccttatatccacgatccgaacaaagtcgctatctgcaaggacttccttcagactggcaaatgtagcgcaggtaacagttgtgatctctcccatgaaccatcacctcataggtctcctgcttgtgtgcatttccttcgaggtcgttgttctaacccagagtgtcgctatgctcatgtccgagtcacacctggtgcgccagtgtgccgggctttcgcgacgctgggatactgtgataagggcgagacatgtgaggagagacatgtgcacgagtgccctgactacgccaacacgggtgtatgcaagaagaagcactgccggctgccacatgttgaccgtgcaggacagattcggaagaatgctggtcctaaagaaggtgaaggtgacgatgaatcagacgcttccagtgaggaagaagagtttgacgaaattggctccgatgatgtcgactctgattatctctcggatgagggagaacttatagaaggaacggaaaccggtgaagtctcgaagcagcaggatttcatccggctttgattgtactcaatcactaactgacagtctgtaatctcggatcgctttgtcggcacccggaagggactgcagaaaggattggtagagggatgatcccatcagcttggatacaagtcgactttcctttcgtttgttgtttcatggaagataccccggatatcttattcagaatttgtacatcatcgtctcgcggtttcggctcgggaggagttgagacagtgctgatgtggtgtgatatggtcatagttgtagactattattttacaaagagattagaaaatcaatggagttggttgtttt

SEQ ID NO: 16982 - DNA, 1154 bp, Emericella nidulans
tattacaaggaggaatagttggtggtaatcataaaactctcattatggctgaccgcttcccgtcgttggatgacttctctgcgggttagtttacccgcatcacttagatagtgtccctgaggctaacaatgcattataggacagacccaagctatcgaaaccagcggcacagatgagaatgactttttagcccgtgagcgagctctcctcggcgatgatgccgaccaatttgcgactgcccaagacgtcacttccacagatgtgaacaatgacgaactactgggaggcccggaagaggcacaggccggcgctgggcctgagatttcgggctttgaatcctcgttcccggccattgacacacagaatgaggtatgcggatggcttgacgtcaaaactcatcgggtttatatgctgatattctacagcaagttgctcccggcggcaccattaccggaactggtgcgccctttccgccaaccggttactcaagctaccaggctcctgaggaggaggccgaacccgtcaggtacgggccgttgtgcctccaacccttatacaaatgttatatgtcaattgctaactttacgtttgctttcagggaatggcgcgagaggcgggatgcagacatcgcacgtcgggcggagctctcgaacgagaagaaggaagctactataaaaaaggctcaggaagatatcgacgacttttacgtatcttataacaacaaggcggataaacttcgggcccagactgcggccgaagctgagcaattcctcgccaatcgcgaagatacatcgtccgggggaacaagctgggagcgcatcgcgaaactcgtggatgtatctggaaagggcaccagaggcggtgcaagcggatcaggcaaagacgctttcgcgagttgctgctgagtctcaagaaggacgagagacggcctggcgctagcggggtttgatttacttttctgctgattccctaatattctggcctttatcttctcctgatgtacgtaattaggcacttgactttttagcttgcattccaccgtctacacgttcggtatgtagttattgcgacggcacttggcccacaaaggagcgttggagttggtcggatataggacggtagtcgtgattaactgggttcccggacatggaagc

SEQ ID NO: 16983 - DNA, 1158 bp, Emericella nidulans
ccccaatctcctgcccagcacgtacgagggtaagtctgcccgtgagaagaaggcgctcagcctgagctcgacccggaaagaagtctccacgttcctgaagaacacgttgaaggaatctggtctgcccgtgacggcggcaagcgtcaagaacgatgaatttgccgagttcttcaagaagattagaagcaccggcgagaccccgtcggctgaagacgtcatcaaggtttgcaagatcttcaaggatgatcttactctggacaacttgtcccgaccccagcttgttggtatctgcaagtatatgaatctcaacacattcggcactgacgccatgctccggtacaacattcgtcaccgcatgcgccagatcaagcgggacgaccgtgctatcttttacgagggtattgactctctttctgtgcccgagttgcagatggcctgtgcctcccggggtatccgtacacacggtgtctctcccgcccgcctccgcgatgatctctctcaatggcttgacctccgtctgaagcagggcgttccctcgactttactggtcctcagcaacgcctatgtctacgcacagggcggcaaggaagcagagatgtcttctcagattgagtctctccaggctgtcctgtcgagtattcccgaagaactcttccacgagattgagcttgaggtgcacaatgccgagggtgctgccactaacaagcagcgtctcgaggtcatcaaggagcagcaagagctcattgaagaggagaaccagcagaacagcgagaacgaagagaagggtgttgccgcccccaaggacaccgagaatatcgatgaggaccacaaatacgagaccactcagtccggagaggcttccgaggcgatgcaagagggtgagaaggctgaaaaggatgctgagcctgccgtacaggagaagaaggacaccaaataggttgcttcctgtctcatgcattcgcattcttgtctgcgttatgttgtactatagacttgttttaccacaccaccactatctactcttatttccttgtgttttatagatgggaggagcgaggatttcttgacttactgggaaggacgacggttggagcgtcaccggttggatggatacggcggatttccctgcgactgatatgtacctaaacgatatataaa

SEQ ID NO: 16984 - DNA, 1158 bp, Emericella nidulans
gcgcctccttctgtcgcatttgatcctcatcaggtctctttcttttttatctttctttctctcttcagcgctcgtccataaggtccaggattccttctgagtggaacggcctggatcacctccctcactgcacccgctgacactgcaaaaccacagaaccggagtggcagaaatggaaaccctcaaggctcccagcacgggctggaaatcctggacggccaagaagaaagctctcctaatctcgtcgattctcatcttcataatcgccctcgctgttggtctcggcgtcggtcttggcctcggcctcaacaaggggagcgataatgacaatgagagcggcggtaacaacaccaccccgaccacccccaacaacaccgccatttggcagcctgccgtcggcacctcctggcagatcgtgctgcgctatgccctgaatgatacctcatatgacgttgatgtatacgacatcgacctcttcgataacaagaaggcgatcatcgacgagctccactccgacggccgcaaggtgatctgctatttctcagcaggcacgtacgaggactggcgcgacgatgcagacaagttccccgaagacgatatcggcgataaccttgatgaatgggaaggcgagagctgggttgacatccgctcgtccaaaatccgcgacatcatgctcgaccggctcgatatcgccgtgcaaaaaggctgcgacggagtcgatccagacaacgttgacgggtacgacaaccagaacgggcttgacctcactcaggatgatacggttgactatatgaatttcctggcggatgaggcgcactcacgcaatttgtcgatcggactcaagaacgcgggcgccgtgatcccgcgcgtgattagcaggatgcagtggagcgtcaacgagcagtgcgcgcagtatgacgagtgcgatacatatgcggcatttgtccggcgcggtaagccggtctttcatattgagtatccgaagggggatgacacgaataatgaggtccaggttacggggcagaagaaggcgacggcctgtgactttgacgactcgaatgagttctcaaccttgatcaagaacatggacttggataactggctgcaggaatgttagctcttactgtctactctaaggttatgttgagaacgagcagg

SEQ ID NO: 16985 - DNA, 1159 bp, Emericella nidulans
catgctaaaaatctggtctatggtatgcactctccccttctgcaacctagactggatgccagtcaacccagcaaacgacgtctaaccgcttcgcctcgcaacagaaacaacagcagcagcaagctgaaaatgctgaaggcgctgcaggaaagaagaagaagaaggttacagctgctcagctgcgtgttcagcgaggtatgtctgcatctgcacctgcatgcgcttctatcctgtccaccccgcaagtgcttacacgactttaccacgcctagaccttcaagaactcaccctcggaagcacaatgaaaatggcgtttccaaaccctgacgacatcttgaatttcacactgaccattgagccggacgagggcatgtacaagggtggctcattcatcttcaccttcgccgtcaaccagaacttcccgcatgacccgccgaaagtcaagtgcacgcaaaagatttaccatccaaatattgacctggaggggaatgtttgtctgaatattctgcgtgaagactggaaacccgtgctgaatctgaatgcagtcatcgtgggcatgcaggttagttaacgtcctccatgactttcgtcttctacgcggcgcttggctgcttgggaagcttactttaatcatgatactgacatactttggatggccggcagttccttttccttgagccgaacgcttccgatccgttaaataaagaggctgctgaggacctgcgacagaaccgcgacctatttaagcgcaacgtccgcaattcaatggctggtggaaacgttcgtggtgttacatttgatagggttctacgatgatgcggcgggtgtgcggcagccatataagaaaacgctgtcttgccggctcttcctctcttctaggccggatggagataagtctgggactctgtgatgtgagaaaggattaacatcgactaagacctgcaagtcaacagcctgtggtattggcactggtggcggtgatgcagtatgattttgaagagcaacaccatgattaaaaatctaagccacgtatggaacgaacactggaagagggccgacttgattttgttttcgtgacacggactctctatgactacctgatgaactacttttagcgactggatagattccctgatgaatatgaactctttgacttctt

SEQ ID NO: 16986 - DNA, 1164 bp, Emericella nidulans
ggtggatactgggctaagcggacagtgttcgaatggtgttctagtcggcgaagatggtgtggttcaggccctgtggctgaactatctgggcgaacgtacgccaaactctcacaaagatgtcgagtatcatctcggcttcgcgacgccctccttgctgccggtcgttagcaaaattcagcaaggaatcctgccaaaactacggattctgaacatggagagctacgtggtgcagatgagccaggcgcgcattatgggtgtttcagatgagtggattgagaaggtcgcccaagcaaacccgtctcgacaccagctgttcatggtgcgcaaggtcgactgtccgccgcccgagttcaattctacggcggacagcttccaagagggtgatatcatcctcactttggacggacagttgatcacacgcgtgtcagagttagacgtgatgtatgagaaggagatgcttgaggcactgattgtgcgcaacggcgaggaaatgaagatccaggtgcctaccgtttcgacggaggatctggagaccgaccgagccgtggtattctgtggcgcagtgctgcagaagccgcaccacgctgtccgtcagcagatttcgaagctgcatagcgagatctatgttagcgcaagagtacgtccatagtcgacatgtgtttacatgtgctaatgaaagcagagtcgcggatccccagcataccaatacggcctctctcctacgaatttcattaccgctgtcaatggagttccaaccccggatctcgaccgcttcgtagaggaagtcaagaagatcccggataacacatacttccgccttcgcgctgtgacatttgacaacgtgccgtgggtggttaccatgaagaagaacgaccattacgtcagactccgttccctccataaacccattaccagactgactgatattgtcctagttcccaatgtccgaatacgtcaaggacgaatccgaaccgcttggatggaagtcgatctcgcacgatgtcaaagggaaggacggagtagctgcggacgttgcgaacctgaacccggacgctatggacgagggactagaaggaggtgtgagcgatatagagccggaagctgtataatagattggcgccgcgtataggccgtgatttgcttacctcgcaggtatttagcggc

SEQ ID NO: 16987 - DNA, 1170 bp, Emericella nidulans
  unsure (1)..(1170): unsure at all n locations
accgagtcactcagcctacttcgccttaaatatcaacttgtcttatagaacgaaaacaaaaacccgatagatacgccatcttccctcacatcatagatttgtctgccaccatcaattgtcttcacacaccatgtcgctctgcaaaccaacgatgcaatattcggtgacatcatccgccttcttgcgctgcctgaagcagcctcctagcatacgcatggcgccaaattaccgtctcttctcttcatatgggaacgctcatcggtcgtcgaagcgcgatatgcagacagcaacggcctaccgacctcatacgttgccttcttctttcccaatttcgcccagtcctggagcaaaggattcctctgtcgccgccgactttgtccattaccgcgaacctgcccaacgtaactcacagatacagaacactgagctaaaggcagatgtcaaccagggagagccccagaagtcgaagcccgttgaatccacgcccaccacctcgaaacccgccgagaaacctcgcaggaagctccggcctgcaaggcggctatgaaactgacgcctattgccgtcgaacagcttcggaagnatgtgtcgcagcctgagccgaggcttatccgagttggtgtcaagaatcgtggctgctccggtctcgcttatcacctagaatatggggataggccaggctcttttgacgaggtcgtcgagcaggacggcgtaaaggttctgattgacagcaaggcccttttcagtattattggcagtgaaatggactggcaagaagataaattgagcgcgagattcgtgtttcgcaaccctaatatcagtgagtgtcctccttaaccggagcttgcttgttccttttgctaacgcacgatttagaggaggaatgtggctgtggcgaatcattcatggtctagcgtttcatatgaaactttcccttggttatacattatgaccactgctctcttgagctgtgtcctcagtgcatcgggcggcgttctttcggatgattgcttagaaataccttattaatgattcccggggtatttatcccaacacctgtacaacacacaaggctcggttttcctggcctgttttcaagcaccctgatcctatcacattttcaccttctactgagcagcgctatagaacgaccaacacgaactctttcga

SEQ ID NO: 16988 - DNA, 1171 bp, Emericella nidulans
agatatagagctgccgttctatattgccctggcttctctcaagataaatcatgacaagctcgatgattccgcgcgcaaagttctgggcctgtacgagttacgcccgtcagacgctcccaacgcctcgtgcaggattcaaatacatgggaatgccctcactagcgacgagtgagcccaagaccctcttatagcatagtatctagacgtttgcctgacctagctactttacagagttccgtctacttattaccgagcggaaggcatgataaaaaatgttaatactattgaggagtacgcgaaggccgataaaatgggcatgctccaacagtctggagaaacggtcagtctagtggcggtcaaaaacgtcctcaccgtataataacgctgcggttctagatatggaatgctatcaacaacggcactatctactcatgtccatctctgctgtccgccttcgtcatcctctcttacgctgacctcaaaaaatacaagttccattactggttcgcattccctgcacttcactcagacccgtcttggaccccactggaggagggatgcgagggagcgcaagcacatcgacttcccagtgtagagagttctgcactcgcccgttcggtacaagagtgggctcgcgttgtagatgcgccgcaacgaggttttttcctagcacgaagggtaaggatgcgggatgatgatactgtctcctggaaaatcgcatccctgtcaagctacgaggacgggtttttcaaacacgcggaatttgcggattgctttacctgttttgtcgatccctcaaactatgaagaggcccctggctggatgctccgaaatctgctcgttctcgtgaagcgaagatggggacttacaaaggttcagatattacgctaccgggatggaccatccccgcgtgactgcgggcggagtattgtggtgactctacgactgaagacatcacagcttcccgatgggggggttaaggatgaccgtatgcctaaggtgacgggatgggagcgtaacccgtctggtaaactgacgggaagaattgttgatctcacggaacagctagatcccaagaggtacaattacaccggacagtttacttcggcacaatgctgactctactattactaagactagctgaccagtctgttgacctcaacctcaaact

SEQ ID NO: 16989 - DNA, 1171 bp, Emericella nidulans
gggcaccggtagcgccagtggctggtatctgtcgctcgtctacccagggcctggctacaacatctgctggcatcgtacgtcaacgccgttactcttcctcatcctctaagccgagcgacggctccagaaaggtcgacgcttcgtctcaagcgcccgcgaaagacgtcagctccgccggagagaagcagggtaagtcccctagacgccggggcaaggatggcagtggcagtggccgcaacggctccaggtccaaccagccgaatgctttttcgaaccttcccagtgttccctcgacgcaacatttgcagccacacggtaagcggagcaatctttatagctatatctggtatgataaatcctctgacggcgtggtatcagatgttcaactcgcatcattcttttctatccaccgaccaatctccgtctccacgacagttcctccaccctccacccccgaagcgttcgactcgatattcaccaagcagccttctaaaaactcttcggacgatgtgatattcaccctatcctcggcagttaactcgatggagcatgccgcgcaccatctcgccgagaacgacggaataatgaacgcgtttgagatggagagcaaccagctcgatggcctagacatgaccgagttgaagatgtctgtggaggaaatgaccaagcgtctccgcccattcaaccctccaccaccgccgactccttacgtcgcctcggcggaggctgagcaacgccaggaaacgtcgagctactccgctgtccttaccattcaagagtccactctctccgacggcagcaagacctatgaagctcacaccaccccgttcgtccaagctaggaccatggaggctcctagcgctgaggggatcgatgccgtcatcgacgttcctcagggctcccagaccacctaccttgagcgtgcgcaaccctggaaccatgcaggcgctcagtacacgacgacgacgtattcgcaagatgaagaatcacaagttcaagaagctgctgcgccgcacgagaacactgaggcgaaagctcgacaaggcctaatcaggtcaacctgcatttgctatttcgcttattacgtgccttggtcgctggttgtaactctgtcttcacttgttcatccgactcctatatctaacctctccaatcgagttcattttcattt

SEQ ID NO: 16990 - DNA, 1173 bp, Emericella nidulans
tgctttaaaataccgccatacgaaacgtacgctgaaacagggcgactggccactccatcaactgtgaagcgggcgaccgcagctacctctacagccacccttgaaccctacctgcgaaccatcccgacgttctacatcaaaccccccaaaatgagcctcactcacttccgaccctcgcccctcctccgtccgagcctcgtactatctcagccactaatcccccgcacatcccaaagcacctacgccacacacagcgacctcggccgaggctccgcatccgcaccgcgacgaagaaacgtcaccgtactatcagatgacggccggtatacatggagcgagctgagcggtcgcgagaaggttgcgcgagcaacacagcagtcgatcaacttcgtggtggtgttagccggtgctgctcttacggtaaacacgatcgcgagtcggtatgagggattagcgctgataatttgtgtgatagggcggcgtcttctatctactatacactgaggtcttctcaccgaatagcaaaacatggcaatttgagaaggctgtagagcgaatcaagaatgatgcgcggtgtacgaacctcctgggtgatagaagggaaatccaggcgtatggagagaacacttggagtcggtgggcgaggaataggcctattgcgtatggacatgccatgctttagtcactacgttagttgcgaatctaattgccggcagcacaactatcgagaaagatcaccaaggtcgcgagcacatgagaatgaactttcatgtttcgggaccacgaaactcggggactgttttcgtacatatggtgaaaccgaccgatgcgaatgagtgggagtatcggcttcttgcattggaagtcaaaggtctgtcatctctttcgagtggaactgaaggtgtgctgacgcagccgcaggctattcccgcgtcgtccttgaagagcgccatgaccctaaagtcggcggcgaggtgaagatattcggcatccggtggcggtaggcatctggcgttatcatcagggcattatgccccttgtattatatggctggtttgggacttcgtttcattcttacttatgggtctaagatgatatcccaatgaaacaatttcctataaagttgtacgaagaaccagccttaactcgccaaaatatcagattattccaaca

SEQ ID NO: 16991 - DNA, 1174 bp, Emericella nidulans
cccccagaatgcggtcacctcatcagcatatctgctcttctaccgccggcgctcggatcgtccactcggtggcaagattctggaagagatcaccgaatcgtccacccggccagccagtgaatccgactcgcaggaatcgcgcgggccgtctccgtcgggggaaggtcggcgtctcggcggctcctcccgcaatgggtcgtcgagcgccttagccggagtcggagcagctcaccagttgggagatggtggtttgcgaaccggagcgaagagcagtgaggatgccaatcccccggagtactcgaacagcccgtcgtatggtgagcgcagctcggcggtacaggtatggacactatgacctatgaagacgacgattacggtagtgggctgggcaacaacgacacgtttcgcctctccaatccctcgccctcctggtcgttcagtcgagtcacggatgctcatcatggcctttcacagatgacagagctcccgggatccctctctgatgatgacaacgacgacgacgacgattcgaacaaggctgtaggtggtggcgacatgagcgataccgacttgcgcctggcttctttagcggatagtccgttccagggtccagtctaccccgggacaccgctagatgagacagccccaacgctgacgacggaattccctcaacacgatgcggacgacgacgacctccctgtggtggaactacacgtgggtgaagaggaacgacttgactgattagatttctttcattctttctttctacgaattttggatgtgaaaatgagatgacattctagacgcctgtcatgaggacgacaggtatggtgcataggcacgcgcatacgctcgggctctgccctccctgctttgtttttgcttgttttcgatggacgggatctataatatattcctccttccctgtttctgcatgtatgtccccaaaagcttttttctctttttgtgacaacttctagagcagaaggtgtcaccactcgccaaatcggatgtgatgtgagacggatggcgatatggagccttgctgtgctacgaagaggagcatggcatgccatgatgtcggagtattgtgtataggatgagtcctcagctagagggtatacggcaaaagatcgtatgaactggcttttcttgtcaggctcgctactatgat

SEQ ID NO: 16992 - DNA, 1175 bp, Emericella nidulans
tctatcttctgtctccccgtgacaatcagccgcggagcgcctaaccccgctttcaacgctccccttctccggctttggagagaacgcgttctacgcctcactgtcacagctaacttctgtgttggagccaaagacgcctatttacctgttaatccgccggactggatctaatctgattgccttaacgtacattccctccaacgctggggtgcgtgcaaagactctcttcgcgtctacacgggcgacgctggtgagggaattgggaagcgagaagttcagtgagacaatcttcgccacagacgaggaggaagtcatcggagagaatgcatggaaggagcgggaggcagagaagaacgggacttccactggcggttatagaagggaggatctaatgggagaaaaggaaagggaattggaagctgtgcggagggcggaggaggctgcaaggagtgggactccagggagggatattgggatcggtggaacgtttgcgagaggtccttctaggatgaaaattgaaatgcaagtggacgaggatgcgaagaatgctctaggggggctgcagcagggtggacttgtgcagatggtgagtttgacaagatatattcaattgcactgtgcgttgattaaaagctaatgttgttctaataacaggccattgacgtttcaacggagacattcaagctcactgcggctgagtctggagttgacgccaattccgtccagaatcacatctctgcttcctcaccgagatacacgttctaccactatcccgactccgacaccatcatcttcatctatacctgtccatcaggctcgtcaatcaaggagcggatgctgtacgctagttcccggatgcatgcgctccaggtggcggaagaacagggtctgaagattctgaaaaaggtacggcggcttgacgaatgacagaccgggaactaacaaagaaatggcagattgaggccggggcgcccgacgaagttacaggcgaacgccttcaggaagaagtgaaccccccgcagaacaacggtctcaggcaagggttcgcaaagcccagacgcccggggaggtagatgttgaccgccgctctctagcaagtcctgggggattgatccgggcttcagcgtaagagatatcgtacacatatatccgtagccaagattcattgccgttct

SEQ ID NO: 16993 - DNA, 1184 bp, Emericella nidulans
tgttctagctttcaagctatacaaattcaactcaagggacctgtacccaaagaactgtatcacagatatgtggagtttaagcctttcgtggcagggatgttcacgtcgcatactttgcgggggcggatactcaacagagcgcttcatcaccagcatgaaaggatctataattttgaccgggcaacattggacggtcttttcgacgagccatgcctggagctgacgcagaagtttcttgaatttgttcattatgcccaagggggtaggatattcacttacgttcttactctcgacggtcagcttcgctttacggagacaggaaaggaattcggcatcgatttattgagcaaacacacgatgcacagcaatgtatccatctatattgcctattcaggggagttcttcgttcgacagcgcaagcacaatcatcgaatgcagtccttggtatcaaatagctcatccacggagtatatcatggacaacgatggcgaagagatggaggtatcaaccgaccccactaaatatgagctctttatagataacgacagcggcacctaccggccgaatgccaaatatttgccgcttctgaagcagttcatctcgtctaactttcccgggctacacatcaccactctggattgccaggctgatgcagagcgaatggaaaggctaaagaatgaacaaagagaacagaaaaatcgtgcgcgcggccaaatggctttccttcagcaaaggagcaggtcttcttcctctttatccatatcgagctctgacgaggatgaattgaacgagcacagcggcttagagaacaaaaagaggggagactttgctagaaaggtgcacgagatgcgggacgtcaagagtcaggtactaaggtgggcgcaggcagatcaagatgaaggtgcaaggaagaatgcgaccatgtcctcacgtcctcctgagggagcacctgaccaaaagaacccccaacaatgatttcccaaattgatacccagatggctcctaaaagctacgattgtgcgttcattcctctcacttttcccggcgttttctctaaacccggctcctccttctacggccgctgttttcctaggtcaactctatgaatttctacgcgggaccatcgttattgtttatttcctgtgattataatagtaatatgcttagatgggaggggtgagatt

SEQ ID NO: 16994 - DNA, 1187 bp, Emericella nidulans
cggttgatccccgtccgacacaatggtgcgtactttagagcctattttcgctgcttgaatttagacaggagatgaaattccctccatgtccagcggaggaaacgtgctaacgaggtttctgtcggtgtataggcgatcaagcacaacaaccagattcagaagcaccgtgagtggcacccgacgatcaggattaggaggctcgttttctttcgaacgaatgcgactgggaattcgacaggcgattggttattcaggaattggaatcactgatggggttttgttgtagacttccacaaggactggcagcgtcgtgtccgcgtgcacttcgagcaggtacgcttttcaaacctatcgcggaacgaattcgtgtcggataaacaacatggaattatgaagttttgacgagatgaattgttccggacgatttttttgagcgtgttggactgacagggttttcttgggatataggccggtcgcaagcacagccgtcgtgaggcccgtctcgcgaaggccgccgctgttgcccctcgccccgtcgacaagctgcgtcccattgtgcggtgccctaccgtcaagtacaaccgccgtgtccgtgccggtcgtggtttcacccttgccgagctgaaggtaaacaaatgactttgctatgtgcccgactggaagctcatgatttgtacaggaggccggtatccccaagaagctcgctcgcacaattggtatcgccgttgaccaccgccgcaccaactactccaaggagtcccttgttgccaatgtcgcccgcctcaaggactacaaggctcgcctgatcatcttcccccgcaagagcggtcagttcaagaagaccgactctaccgccgaggaggtcaacgccgctaaggctgccttcgccgctgagggccagacccagggctacgccaccaacgttggcgccatcctgcccatcaagaacaccaccgccgaggaggccgtcactgaggtcaagcgcgacgacctgcccaagggtgaggaggctgcataccgccggctgcgggaagcccgcagcgaggcccgctacaagggtatccgggagaagcgtgccaaggctaaggctgaggaggagtctgccgctaagaaataagctccgtgtacctaacatattatgtgctcaaaaattctcagctaatgatgaatctggtcgtcgattttta

SEQ ID NO: 16995 - DNA, 1190 bp, Emericella nidulans
tcatccggcgacgctcgactcctccacaattccccaccagctgatggatcaggtagcgatctcgacgaggacgaggacacttttttgcgccgatggcgcgaatcacgcatgcaggagctgcagagcatgaaggctaaacggcctagtgcccggcggagatattatggatcgttggaaacggtcgatgcggcggggtatctggatgcaattgagaaggtccagcggaccaggttgtcgtcgtttgtctttatgaccccaaggtaggtgcctcctgcacccgccggtcacggcttctgctgttataaggagcgttagcgtagcttaccagcacagtccaacaccagcgccctcgtcgaagactgcctgcacacgattgcttctcgccaacaactagtacacttcgtcaagctccactacgagattgcggaaatggataacattgaggcccccgcgttactagcataccggggcggagacgtcttcgcaaccattgtccagattccgcagcagattcccaaaggtcgaagctgcagcgcggatagtcttgaggacttactaaaatcgtgagtgtttctttgttctcgtatcttatatttttgcttcttctgccccggcgcccccactgctacacctacgtaagattcgctgagtgacatgaaactaactctcctccctagacatcgagtgctgtaaagtgataaacatagttctttatttcgatgtctctgaattttggagcacggagtacgggttgcctattactttaaaacggtatacccgtaacgagattcacgctatagcctacaggatctgaaaccgacagacgtgcatactcctgtgtcacagtatatcttcgcatcttccttcctatccctccgctctcgctctcaagttgctcatcatatatccaggcatgtccaagcgcccgtctttcatgtcatagaagctatctcgtcttctcccattttcatttgtcttgtcatctgcgtacatacattttttattgttttgcttcttcgtttttcttctgctcggagttcaggataggacaggtagggtaggcaatttggctttactggtcagtcataatttcagcatgcgtcttatgccgcttactagcttctctgtttcagctgggctatttttgtacatagcatactcacaacgtaatatgatattcgatcagcttc

SEQ ID NO: 16996 - DNA, 1192 bp, Emericella nidulans
cagaggaaggctaccgaccggagtatagtctaaaacgactggatgagtcgctagagtatctccaaccgtacaaccagtcgttcaatgaccctacccatcccgcaagaaacttcactacttccgccgacgatgccacgatctgcgtcggagtcgtcacagtgaagcgaccgcttgagcagaaaatctctacgaccgttgcttccatcctcgataatctgtccgagaaagagcgcgacaccatcaccgtccacgtcctcttcgcattaacttccccgaccgaacacccggactacaaccagccatggctgcccaatgtcgttgaccgcgtcctgacctacgaccaattcgacgtcaaattttctacgcttcgtcggctcgaggagaagaaggacgtcaagcacaagtctctcatcgactaccacctctcgctgaaatcctgctacgaagatacccaggcgccatggataatgatgctggaggacgacgtggtcgcacagcgtaactggtacaaccacaccatgcagagtgtcaaaactatccagtcgtggcgtgaaagaggcctaatcaagaactggctatacgtgcggctcttctacacggagaagtttctggggtggaacagcgagaactggctcctttatacggcttgtagcgtcgggattatcgccacagtcgctgtcatatgcatccagactcgtcgctcgatacgaccattgcaaggaatactgaacaattcctttatcggtgtggtctgtttcggttgcattcccttgcttattattctgtacttccttgcgggccgcgttacaatgctacccttgaaaccgggtatacatcttatgaattctcatggatgttgctcccaggcacttatgtttccccgtgagaacgtccccgcgcttattgattacttagggcaagcgcggtatgcacggcctcttgcggtggatagtgcgatcgagcgcatggcggatgcaaatggtctagaccggctggcaattgtaccctctcacgatgcagcacgtaggtgctgcgtcgtacacggagaataggaagcaatatcagctgaaagggccgcatccggtgcaaggggctcacggagtatggagtatggggtttgagaaggcttatgaactataatgcccgttattatgctctctgtctattattcatttctgtacaacggtacata

SEQ ID NO: 16997 - DNA, 1193 bp, Emericella nidulans
tggctcctgatgccgaactcctgcagcactctctgtgccactcgatgccactggatcggattccctggacgatccaagcaaccctcttgacctgcttgatgcatagcagcctgatcatcccacgaggagtggctgaattaaacgcagcgggagaatctccactcgtcatcttccaagttccaactctcggatgattcctgtacattctacggttaccaccctgagaggcccagaggctcctagtaaccaattggtgcctcatctaatgcaagccatcccgatctcagcacggcacaacggggccaagaccgccggcgaaaatgttgacagttgaaaccaggagtgttttgagttttcgacacggcaacctgcccaacttgacttggaatcgaacctggaaggtgagtaagcgcctttctctctgtttccagcggcagctccaaccccaggattccgagcatcattaccctatcagattggctggtcaattatcgattgattcttcccaccggagttgacgtcatcgaagcccaaccagcactccaaattcggacagcgacagctttcgggttaattatcgatattggattttattaccagggcctacggcgtaacagctaggcgccagactcggatttccaccctcgacatcatatccacatgtggtgttccgtggcagctggtggtctgattgcttgaaagagcctcgtgtcgtttgggtttccccattgtgcctaactactgagttgggcaataggctaaactctcattttcctatcagcactatggcacaacatcgtggcggcggttattacctccaaccgcggagaaactcgtaaactaggtcgatattggctcagaaccctcaggacctgagagggggatgcgcatcctcctctttcctactttaccctaccttctcggcaggctattgactaggtatgccccgggtatgtctaggtccactacgtagacttcaaggatctggacaataagtacgcgttgccaggtataaccccgatgagtctaactgtagaggggcttcgccattcatgccgtacgactgtaatgatgctagtaaactttggtcttgatgctagtatctaagtatatggacggatcgcttgtggtaaatatttattttgatgcggcacaatggaatgtacgctacacgaaagaatggtgcgcccatg

SEQ ID NO: 16998 - DNA, 1200 bp, Emericella nidulans
tttcacccaccgctcacccaagtacgttatcacatcgactcaccgcatctcagattacgatagagagtgcggaggattggatcaataatggagactaactcagacacagcatctgaggaacttgtcattggaaacaaccggttcacaacctttgacttgggtggtcaccagcagggtgagtctagccgaatccatgcgttccaaactttgattctgaacaacaatactaatgctgttaacatcagcccgccgcctgtggaaagattatttcccagaagtcagcggaattgtcttcctcgtcgacgccaaggaccacgagcgcttccccgagtccaaggcggagctcgatgccctcctcgctatggaagagctctccaaagttcctttcctcgtccttggaaataagattgaccaccctgacgccgtcagcgaggacgaacttagacaccagcttggtttgtaccagacgacgggtaagggtaaggtgccgcttgaggggatccggcccatcgaggtgttcatgtgcagtgttgttatgaggcagggtgagttctacctcgcgattatttgtgcatttctcttttgtgggtggtgaaaaactaacttttatcctttgttaggatacggcgaaggtataaggtggctatctcaatatgtctagacaagctagctaccaacctgtgccgcaacgcgccttttcacgaaatcgtcaatctccgtgtaattgttattcgtatgaccggagacttatacccacttcatcaactgaaaaatctgcacaaccatagccgtcagttcccagtctacctcatcacccctcagaacggaccaagtacatttcagttatggaatcttgccccccttcttctacacttcccattctcaatgattactacttagccagccagcaaatcagtcaaccattcatccattgatctaattagctgctcacgcaaactctatgacaaatgtgtgcctactcttccttcgcctatgtcattttagaaagttgggaaatctatttttttccctcgtggattatggtcgttgctcgctacatcggactaattagaggctctaggctgtctgggtgtgtgacaagtcgctggaggagcccgttggatttggtcaatatgctaaggcgctctggatagtcatatatacttaaccatgaatttcaagggccatatttcaatgcca

SEQ ID NO: 16999 - DNA, 1205 bp, Emericella nidulans
ccgcccgtctaggattcttcgacactttcatgaaagcattaacgaagaacgctgatacagcgaaccgaaaagtgacttttgccgaagcgcgtggcgcaggtttgacagctggtggtatcgccgctatgatcggtaacccggcagatttggcccttgttcggatgcagtcagacggtctcaagcctccggaggcgcgggctcactaccggtccgtcatcgacgcattgttccgcatttccaaagccgaaggagtgactgccctgtgggctggcgctttccccaccgtcgtgcgtgcaatggccctcaacctcggccagttggctttctttgcggaatcaaaagcccagctgaagacgcgaacatcgctttcagcgcaaaaccagacctttgctgcttcagcgatcgctggtttcttcgctagtttcctctcgcttcccttcgactttgtcaagactcgcctgcaaaaacaacagaaagatcccaagacgggtcagttgccatacaagggcatgtttgactgtgctcgcaaggttgttcgtgatgaaggctggctgaggttctatcgcgggtttggcacatactatgtgcggatcgcccctcatgcgttagtcccccccactccgtgcatactttgatttttctttttgcttatcgctgacccactgctccacttttagaatggtaactcttatcgtcgcggattacttgaacctcattaccaagtaaacgcagccgacagaatactccgtgcgacaaggcctcgacttggccaaatttgcttttttcgcggtcccaatttcgaagttccacaatgatccggcgagtggattcaaattctcgtatctttaccacgaactctgtctttatcgaacagtttccagatggaacatacagcgctggagtgcgaatacgtcattaccatctcaaactggaggcaatagaactgtctcggacgctttttcaaagctcgattattacccatttatttgatggcgacagcccagtatctaggatccgcgacactatctggaattgtggatcctcggtcgcccttatcgaggaagacctcgttgttgcgaaactactgctgtgttgcatttccccattcagttttgtaggctgcgtgctacgtcaacaaactgacgtgatttttcgagtttcttgttttgagtgtgtctccctacgtctcacgaggactgggcatg

SEQ ID NO: 17000 - DNA, 1220 bp, Emericella nidulans
tgacgccggtattctctgtcgtctctactactgccatcttcgctctggaaactccctccaccgtttttctcaccgtctagagacatgccgaaccatcgcagttacccatgttgacctgggctacagtggcgttcgctggtgccttgcctacacatacagcaataattaccgcaattgttcgaatatcttacatcttgccctttctaccgggaaaatgccttaaatcttggagcgtaagtccaagactgtggagcattgccgtgcgaaaacgctgatttcgatgatatgcaaagtttacttgataagaccagaagtcgcttcttgaactttcgtatcaactcatcctaatcacacttggcacatgtgaaatacgctacgtcgcattcccaaggtcatgtcttcctctccggagagagatagggaaggaatcttggattccacctcagcttcactaaacgagttaataaacaagaagcgctccaattccgaagcaacagaatatcctcgaaggcgcgcaaccatcgctgtaagtcctcgcaaccctgcaacttttccattcttcttgtctgtccatccgatctgcgctggatttctcggcttcctcattctgctctcactgcctcgggacaaaaagggttggcttcggagcactgttgaccacaaattataagcacaatagtgtcaaatctgtcgtctacgaaagacgaggtgcaacggagctcgtccaaagtgccagctctgcactgaccttgatgcagaatgcgtctaccgagaacctgggatcaagctggatgctggggacaaattgatcattgaaagacttgcaagaattgaagggctcttacaaaccagcttagcagcacaaaactcacagcttacgttgtcttcgacttctcccgcaaccagtaacggaaccaacgttgggagcgacgacacggttgcgaaagcgtcaactcatctggcggtaaccgggagaactacttccattgtaggactcgcctcatgggcgaacccgccgacaagcatatcgaccatgccgagagtacacaccacgcctgcattgaaccttttgaaatggcccctgatccgggacttagtggctcgaccatatgattcccagacccttttgcagttggaaatggctcgcgaaccgctgaaaatgacacctcctatggccgtagatctatcttgtgcgccgctttatatcagaaccttctttg

SEQ ID NO: 17001 - DNA, 1221 bp, Emericella nidulans
aacctatttagggaagaattcactctggatatacttttcaattctcacgtatagcatctactcaattccgcgcacaccacacaataacacaagaaaactacatcatggacccgaacatgaacaacctcctcaagtggggaattcaaaactcaacagcaactcaacagacctccgactcaaacaataatgcctcgcaagctcctcgcagcaacatcaccccggagatgctcagcgcactcttcggcggtccgtccgaagccgacttaatgaaagccgccatggaagccctgcgctcggacgaagtcgatctagagaacaagctgatcgcctttgacaacttcgaacagcttatcgaatctatcgataacgcgaataatttggagccgttgggtctctggacgccgctcgtcgagcttctgaagcacgaggagcctgatatgaggcgcatggcggcgtggtgtatcgggacagcggtgcagaataatgagaaggctcaggacaagctcatcgtaatgaacgccatcccgaccctagtttccatgtctacgcaagaccctgtcccggcagttcgcaagaaggccgtttacgccctttcctccgccgtccgcaattatcagccaggcacgaatgaactagtcaagcaccttcctggcggatatgccagtggaaaagtggatgccgcggacatggataccattgatatgatcatggataaacttagggcgcaccctgtatcgtcgtcgccaccttctgctgcatgagccgaaagcataattcttatgccttatttttttcttttctgacagacctgtcacacatataatgacaggcaaaggcttttcgcaacgtcacctcccggcttcacttagttacctccaaaccattcgaaattgtcgggcctgtgtacgaacggactaccagtattaattgcgccgtcgtttgggatgtcgccataaagaagcatacttacgcatgcaatttattcgacatccagcggagatataagctcgtgtcgcggttggtagcggtttccctgcttacagcatgacgatataaaatgcgctacggaatacatcaacagatcagcttgagcttggggttggcataaacttggcgctatcaacatgatgattgaaaccggatatatgggggacagagtaaatataaataatgcatcattatccgcatacgccgtccatcaaataaacctatagggtagaa

SEQ ID NO: 17002 - DNA, 1226 bp, Emericella nidulans
cgacccgaacctctgggagcacgagtggaacaagcacggcacttgcgttagtaccttagagacgcactgctactccgagtactacccacaacaagaagttgttgattactttgacaagaccgttgagttgtttcatgaccttcctacttacatggttcgttcctccatcatacgaaccgagtaatcacaactttactaaaacgttagactctcgccaatgctggcatcgtcccgtcgtacactcagacctacacccggcatgaagtcgaggatgccctctctaaagcgcacggtgcaacagtcacagtgcggtgtcgatctcaacggctgcaagaagtctggtacttcttcaacgtagagggacccctccaaacagggaaattcgtgccatctgaaccaggttcgttcattcacacccgacttcagtttctcacgtcgtctatctcaccctgctgataatgaaacagatggccagacatccaactgcccagccaaaggcataatataccagccaaagacccctaacaaggaccccggacacggccatgaacccaccaaaacccggcacccccatgggccgacaggtgccccctttattggaaaagggaacctggttgtttctaccatgggtcagcagcgcggctgcataatcggtcgcggaacgtggtattcgtccggcacgtgtgctgatttcagagcgaagagggcgtctggtttgtttccctccccctccccgccgagagggaagacgtgacactaatgcacctcatccattttcaggagacacatttacgctctcatctcgcaaaggaccctgtgcattcaaggacgatattttcacctgcggttcttatatctcaagccctgcggagttcagcgtaagattaatctctagccccttacggcagcaacatcattaggcaactaacatgactatttaggccgaggatggcaagctctcctaccacggaaacacgaccttcttcgcagataaagcgccaaagggtaaagtgcagagtgacatcttcgtctcggaggcggaccatcccattgagctgtctatcgcatggagaggatgagtatcataatagattattgttagatgagtatatatctgctttcctaagcgtttgggtatgaaaagctattatctatttggtgcttagcttagacttgagaattggccaaggccaaaactaaccaatacatatatccacataacagac

SEQ ID NO: 17003 - DNA, 1229 bp, Emericella nidulans
gtccttggccacgaggtgccagtatcagcccgtctattgggcttaacccctcccaccaagaacagagagccagtatacggctcgctaatccttgtgtcgaacgaaggatgcgacaaggccgactatccttctgagctcgctggggcaattgccttgatccaacgcggtacctgtcctttcggtaccaaatcagaactagctggcaaagcaggcgcagttgccgcggtagtatacaataacgagcatggtgaagttagcggaacgttgggaaccccatcaccttaccacgttgctactttcggcatatctgatactgacgccgcaccctacgtccagcaattgaaggagggaaagaaggtcgattcgattgcttacatcgatgcaacagttgacactatttatacaaccaacattattgcgcagacgaggcgaggggaccctgaaaactgtgtaatgctcggaggtcacagtgacagcgtcgcggaaggacctggtatcaatgacgacggctctggcactctgacccttctggaagttgcgactcaacttagcaaatacgacgtaaacaactgtgtacgcttcgcttggtgggcggctgaggaggagggtctgttgggctccgactattatgtatctgttctcagcgaagaggagaacctgaagattcgtctcttcatggattatgacatgctggcttcgcccaatttcgcctatcaagtctacaatgctacgaatgaggttaaccctgttggatccgaagagctacgtgatctttacaccgagttctacacttctcatgggctcaacttcacatacattccgttcgatgggaggagtgattacgatggtttcattcgaaacggcattccaggcggcggtatcgctactggtgcggaaggtgtgaagaccgacgaggagcaggagatgtttgggggaattgcaggcaactggtatgatccatgctatcatcagttgtgcgatgacctcggaaacgtcaacgcaactgcttgggaggtcaatagcaaggtatattttgaaattctcggtgctggtacaaagctcacagttgactcttctcgcagctggtcgcccacactgttgccacctacgcagtgtcgtttgaaggattcccaaagcggacaactaccaatgttaagtccgtcgacctcgagaagcgcaagtatcacggccctaagctactcatgtaatataagcatgccgactgtcaa

SEQ ID NO: 17004 - DNA, 1234 bp, Emericella nidulans
cgctattgcctcccgcaagctgtctgaggctgtccttgagaagatccactcggtcatcccagaacttttgtctggttccgccgatctgactggctccaacaacacccgctggaagaacgctgttgacttccagccacccgagtacggcattggtgagtggtctggccgctacctccgttacggtgtccgtgagcacgccatggctgctatcatgaacggtcttgctgcatacggtaccgtcatccctgccgccggtactttcctgaacttcgtttcctacgctgctggtgctgtccgtctgtccgccctctctcgcgttcgtgccattcacgtcgctacccacgactccattggtctgggtgaggacggccctacccaccagcctatcgagactctcgctcatttccgtgctcttcccaactgcatggtctggcgccctgctgatggtaacgagaccagtgctgcttactattctgccctgactgctaagcacactccctccatcctggctcttacccgtcagaacctgccccagcttgagaactcaagcattgaggctgctctcaagggtgcttaccctgtcttcgaggctgctgacgccaaggttaccatcatctccactggatccgaagtcagtatctgtatcgacgctgccaagtacctgcaggaaaagcacggcgtcgtggcccgtgtcgtctctattccttgcttcgaggtcttcgatgctcaggacaaggagtacagactcaaggtcctccccgacggcatccccattttgtctgtcgaggtctgctccaccatgggttgggagcgctactctcacgagcagttcggtctgaaccgcttcggtgcctctggtccctacaaggaggtctacgccaagttcgagttcactcctgagggtattagcaagcgcgcccttgccaccattgacttctatagggtgttcccgttcggtcgcccatcaaccgcgctttccagcagatcctgtagacgtctcgttctagcgtcatgactcgcttgcattttccttcgacatctttccttgctaacgagtattacatgggttatggggtggccatacggagagaaactccgaatgcgtggcacacttggtttaatgtcctacgaatttccttttgagaagaataaaagccaccattgaacttatttcaaggtctggccatctctgatatttttagacatctgcgaaaagaataccatctatctgttc

SEQ ID NO: 17005 - DNA, 1240 bp, Emericella nidulans
cttgcagtacatttttatctttgaattgttcagcattcagtctactctatggcgacaacgcgccgcttcgttcctcttctcggctgcggcttcttctttttctgcttatgggggctatttagtctgtccagatcatggacgcagatgaaagtgtcgcaagccgtcggcttaggcgaactcgtttctacgccgtcaccaactccgtccgggtactggaatgtcactgaaggaccaaagcaaccgttcgcgccgcgtccccaatatgtcgctgggattgccagaccagatggacatgagtacacgaagacgttagtgatacctcggacaacctacgaagatacctcgtggacggagtttgaaatccccggctgggaaaccgctgtatacgtcgttgacgacccatccgcgcctctgcatccgccgaagaataaagggcatgaggtcatggtctatttgagttacatcattgagcactacgatgaacttccagaaataattgctttcatgcactcgcatcaatttggatggcacaacgacgaccttcttgacgggaacgcggcaaccattttacaacgtttgcgaccagagcgggtcatcagggaaggctatatgaacttgcgctgtggctggggtcctggctgtcccgattggctgcaccccggtactctggaggaggatgaatccaagcaggaagaaatactacttgccagatcctggggcgagatctttcccgatgaccctatcccggacgtgctggcgcagccgtgctgtgctcagttcgccgtctcgcgcgaacgagtgcacgctattccccgggcgcgctttgtcttctatcgagattgggttcttcgcacagaactgagcgattacatctctggtcgtatttgggaatatctttggcatgttatttttacaggtcagaatgtggtctgcccgaaagagcatgtgtgcttttgcgatggatatggaatctgttttggtggcgaggacgaatataacgcctaccgaaacatggactccgaacgcgaagcttgggaagatgagcttaaacgttggcgcagtcgagcggctgtgatcgagtctgctcggcgtcgcggtactcttggagagaaaagtcacctatctgttccggaaccggggcgagacattgaactcgaggaactcatcgcgcgacatggtgagctgaaagaggagctgttgctcaacgctaccatacgcggacaggatgccaaggcgcgag

SEQ ID NO: 17006 - DNA, 1240 bp, Emericella nidulans
actttcaattgatcttcttctactacctctcatacacatcatggccgccaacaaagcccttgtcttcaagaaaatccccgatgggtaccctgttcccggtgaacatctaaccatcgaacctgctgcatatgacgcaagcgccgctgcccctgcagatggagttttccttcagtcgctttacaccagcttcgacccctacatgcgcggacgcatgcgtagcgcagagatcaagtcctacgcacctcccttctacctcgacaagcctattgaaagcgcaagcatcgccaaggttatccgttccaacaatggttcctacaaggaaggtgacctcgtcattggacgcttgccaatccaggagtatgttgcggtcgaaaaggatgaactgtcacgcatccgtcacctcgagaacccgctgggcattgaggacatccgcgtctttttaggcgcactaggcatgcctggcctgacagcctactcatctctttatgaaatcggccagccaaagaagggcgagactatctttgtctccgccgccagtggtgccgttggtcagctggtcggtcagctcgccaagcacgaaggcctcaaggttattggcagtgtcggatcggacgagaagctcaactacatcatcaacgaccttggctttgacggagggtttaactacaagaaagagaagcctgcagacgctttggctcgtctggctcctaacggtatcgatatatactacgagaacgtcggaggtgaacacttagaggctgcgcttgaagcaatcaacaattttggtcgcgttgtcgtttgcggtatgatctcgcagtacaacagtgcaccatatcccatcaagaacattgcctacgtgctcactaagcgactgactatgcgcggatttattgtcggcgatgctggcatgggcgacaaatacaccaaggagcaccaggagaatgtgcagaagtggattaaggatggctcgttcaagactctcattcacgagacggagggcatcgaaaatgcggctgaagggcttgtcggcatcttctatggaaagaacttgggcaaagctgttctgaagttttaacgagatatggcagtcatgacggcatatttcttcctgagaaaaagaaaacctaacccttggcattcgaggaatgaccgcaccatatatatttgattgcaataatcgtgcttaggaagcccgtctttagcatgtaatctcaatgaaacgaatatagcatgaagtgct

SEQ ID NO: 17007 - DNA, 1253 bp, Emericella nidulans
tttaatccgttctactgccttttcgagtactctgcgcatgataattataccctacagattaatcctcattcaggggtcaacccagaacacctgaattacttcaagtttattgggcgtgttgttggattggccattttccaccgtcggttccttgactcattctttattggagccttctacaaaatgatgctacgcaagaaggtgtccttgcaggacatggagggtgtagacgaagatctgcaccgcaatttgacatggacactgtatgtctcatcattatttgctggagatgtcttctaaccatcagcagggaaaacgatattgagggcatcatcgacttgactttcacagttgacgacgaaaagtttggagagcgccgtacgattgagttgaagcctggcggggaagatatacccgtgactaatgagaacaagcacgaatatgttgagtaagttatttacagctctttctatgagccagtctaatcatttctaggcttgtgacggagtggaagattgtgaagcgagtagaagagcagttcaacgctttcatgtctggcttcaacgagcttattccggcggatctagtcaatgtgtttgatgaacgtgagctagagctgctgattggaggtattgccgatattgatgtcgatgactggaagaagcacaccgattatcgcggctaccaggaacaggatgaagtcatccagaacttctggaaaattgttcgcacttgggatgcggaacagaagtcccgtctgctccagttcaccacaggtacatcacgtattccagtcaacgggttcaaggatcttcagggctcggatggacctagacgattcaccattgagaagtctggagatccaatcgccttgcccaagtctcacacatggtaagtctcaacttctgttcgcttctacgttctttgctaattcttttcagtttcaaccgtcttgatcttccaccgtataagtcacatgaggtgctagagcacaagctgtcgatcgctgtggaagagacattaggtttcgggcaggagtagtaacacatctgaatggatttagaaagccagcatttatactatccattcgattcaccaaacagcttcagagatcagcccaacgaggaagggctattcatacggagcgtattttgctcctcttgtttgatcttctccgcgaagcgctgcctagggtcacgccatacccgtcgagtccatttctaatctgtcatttctcctgtcacggtgcaggc

SEQ ID NO: 17008 - DNA, 1258 bp, Emericella nidulans
gagtatttaaccagttaatgatccaggtagacgttcctgcttgaaccgccccgaatccaccttctcgcgatcaaactctcgctttgcagcacgattcaaacatacgtcgatggcaaacctcgtgaatcggcgccttgtcgccaacgctctggcggtcctcgctctcagtggaatcggcgtgtatactgcctcgaattgctggatcaagaacgcgtccgcagagtcgcgcagtgcagaaccacagaaggtctttggtcgtggacctgcattcaagtcgctccgtcttcatagctcagagagcgttagcgacaacacaaagcggctgcggtttgagcttcctggtggagagagttcaataagtggactcagtctgacttgtgagtctgcctctgggctcaattgtttgcggtgctagacaaggaaagagaaagagggggagagggctaatttggatctcacccagctgctctccttacgttctcgaggccagaaggtagctggctacccgctgtgcgaccgtatactcccatcagcaaactgggtaagcaagacctcccagccggttctactcgcgctctccgaccggattgaccaaacatctgactggaaccatagatgaacccggctttgtcgatctgctagtcaaacggtatcccaacggaaaggcaagcacgcatttgcatagcttgaagccaggcgacaacctttttatcctcgcatccattcccggtttcaattggaccccaaataagttttcccatgtctacctcatcgccggcggcgctgggataacgccaatctaccagctcgcgcagggcatcctcgacaatccggcggacaagaccaagatcaccgtgatattcggcgtcaatacggagaaggatatgcttctgcgcgaggagtttgatgcgtatcaacgggcgtatcctgaccggatcgatgttctctataccgtcagtcggccgggcagcgagttcaggccggctccaaacgtgcgatcaggttatgtgacaaggcaggtccttgcggaggtcatggggggccctgacgaggccgatacgaagatatttgtttgcggaccgcccgcaatggagaaggcgctggttgggggcggatttggccagggccagccagggattttgcagcagctgggctatccgagagataggatctaccggttttaaagcacgacaccgctcaaagttttgtactataaacgtctcttcaactctttcaatctcatatctctttctggaat

SEQ ID NO: 17009 - DNA, 1260 bp, Emericella nidulans
cccgggaacgttctccgttcagacaaaattctcccatggctgccgagtacgaacagcaggctatgactagcgcgcctaccagccaacctggaatggcaatgcagcatcagccccagactgagccaaagacaatttccccaaaggacgcagtgctcaacgatttcaatgagggtaacgatcatgggctaccgctttaccagaccgacttcaacctaggtgacaatcttggacttcgtcaggaaagctttcagccggctccgaatttcccttccatggaatcattccctgctcagttcaaccagtcccagttcaccttcaaccagccacagcctcagtcgcaaccttccagtcgacgaccatcccagcaacagcaacagcaacagaacttcctgcatcacactcctgagtttcctgcgtcaatccctcgattcgagtctacgaacagtgaagcttactcgaatggtctaacgtcgcctactctgtcgaagacggctggcccagtgcagcgacctgcgaacacatcgtcaaatggtggcacctacacctgcacgtaccatggctgtacgcagcgttttgagacaccatctgatttacaaaaacacaaacgcgaggcgcatcgtcaaaccacaccggggggtcacctggcaccgcgtgacgggacatcacgcaactcgcaagctggtccccacaaatgcacccgtccgaatccttcgacaggaaagccttgcaattctatcttctctcggccttacgatcttacacggcacgaagatacgatccacaatgcccgcaaacagaaagtccgctgtcatctgtgcaccgaggaaaagaccttttcgcgcaatgacgctctgacacggcacatgcgggtggtacatcccgaagtggaatggcccggcaaacagaagcgcaggacgagggagtagagagttatccaatttctcaggggatgcagtattgctctgctagagccttccctaaccccgcgaacttagcgaatgggatcaactgcctcacgagttcgtgagagcaccgaatgactcgacatgcgatgagccagcctctgatgtcataggcgtcgctcaaaggggaagaagggggtacgcactgctgacaaatcccgatcgtcatcagactttccattttggcgggtgcattaggacccatgacgtcacctataacacaacttacgtcccaactttcagtttacctccttgttgatgctcgatgacgcatttctttctccttctctcatcttcg

SEQ ID NO: 17010 - DNA, 1269 bp, Emericella nidulans
acaccctcccgcccggttaccgtttatactccggcacatttatattcaaaatgcgtgacgctgctccccgtggacgtggaggattcggctctcgcggagaccgtggtggtgaccgccgtggacgcggccgtggccgtggtcgtcgcggaggaaagactgaggagaaggaatggcaggttagttggatcactcgtttggcccatgaagtgctcggatacggggatatgtcactaacaagtgatggcagcctgtgaccaagctcggccgtctcgtcaaggccggcaagattaccagcatggagcagatctacctccactctctgcccgttaaggagtaccagatcgtggacttcttcctgcccaagctcaaggatgaggttatgaaggtacggatacgaattcttttgcggaacggattgcgccgatggacgtggaattagaggatggacgatacgtgccacagagtggattggaatacaggaatatacagcaacaggcgctgactgccgcgttatagatcaaacccgtccagaagcagacccgtgccggtcagcgtacccgtttcaaggccgtcgtcgtcattggtgactctgagggccacattggtctcggaatcaagacctccaaggaagtcgctactgccatccgtgccgccatcatcatcgccaagctcgctgttctccccgttcgtcgcggttactggggtaccaacctcggtgagcctcactctctgcccgtcaagcagagcgccaagtgtggttccgtctccgtccgagtatgtttcgcactcccactccctttttccctgttacttacatacctagcttatccccgctccccgtggtaccggccttgttgcctctcccgctgtcaagcgtctccttcagctcgctggtgtccaggatgcctacacctcctcttccggctccaccaagaccctcgagaacaccctcaaggctaccttccttgccgtcgtcaacacctacggcttccttacccccaacctctggaccgagaccaagctcacccgcagccctctggaggaattcagcgacgttctgcgccagggcaagaagtattaaaagtgcgatgatgggaattttacttgcatgacttcgtttttctgattccactatttcctaagggttcaattttggctgggagaacggacttttagaacgcctgctatgcgactgacggtgtccacgaatgtaattatcatgggaaggaaggaaaagcagcggagtgaataagagatacttctaccagt

SEQ ID NO: 17011 - DNA, 1280 bp, Emericella nidulans
tgcctccgacccgagcacttatacgattgaaggaaaccccgaaggcattcgggcttgtgaggagtatgaagtgattgtgcaggatctgaaggaagcactagcaccggagcttgagatgattgattctcgtgtcgtcagccccgcgcaacagctcttagaggtgattaaggccatccgcaaggttgctgtgaagcgagaccacaagaagctcgactacgaccgccacaggaacactctgaagaagctccaagataagaaggacaagtcgctgaaggatgagaaggccctttacaaagccgagggggacgtagaacaggctactcaggagtacaacctatacaatgatttgctgaaggatgagctgccgaaactcttcgccctcgaagcagaattcatccggccgcttttccaatccttctattacatgcagctgaatgtcttttacacattgcacgagaagatgcaaggcatcaacattggttactttgatctgacacgcgacatcgaagaagcgtatgaggagaagcgcggggacgtcaaagagcgcgctgaagaactcaccattgttcacttcaagaccacaggtggtcgtcggccgggctcaaagctcactggcaaagataaactagctgcggagcacaaaggccgcttcggatcacggcccagtgaccccgatgttgtcgaaaacccgccgcctccgtactctcctggcgccagtggaagcgccctcgcagcagccgcagccaaaaagccggcacccccacctccaaagcccaagccatcgcagttccgtgcgcccgtcgagacagttacggcgttgtatgattacgaagcacaggcccacggtgatttgagcttctcggccggagacgtcatcgagattgtgcaaaggaccgataaccaaaacgagtggtggacaggccgtgttgacggacgagaagggcagtttccaggtaagcaatgcccagaggatgtctctggactatgctaatgtctcacagcgaactacgtccagttgaattagtgaggatcagtgatatcttagcggctttaattctattctctgcaaattatatgttcgcttggagtctcatcaggctttactcgcataaagaattgttactcgttcatcgctctgcactgctgtgtccaggtggcattaactgtcgccgtgtatatatataccttggggttcgagcaatgattcacgagctgctgtgctttgccagcggcgttgattcttgacctgatacctatcctcgaatgttcttgacgttgtg

SEQ ID NO: 17012 - DNA, 1285 bp, Emericella nidulans
ttgttcgtttatttctgcttccttttgtcctacaatcatggctgagacagattctttcctgcacctttcccgtcctctaggccctgtcctggcggggtctgcacccacaactgctcccttgaacgttgtcatccagcctcaggtacaactcctttgtttgaggaaaatcaagaattacgtcgctaatttgctgttcaggcccttttctcaatcctcgaccactctcttcgccgtaacgctgatcaggaacgcgtcattggaactcttctgggaacccggtctgaggatggcaccgaggtggaaattcgtagcacgttcgctgttggacacacagagacgacagaccaggttgaggtggacatggaataccagaagcagatgcttgccctgcatctcaaggcgaatcctagggaggttcttgtgggttggtacgctacctcgtccgagctgaacaccttctccgccttgatccaaaatttctacagcggccagggcgacggcacatggcctcacccagctgttcacttgactgtctctaccgaacccggaaaagatatcgaaacccgcgcctatatctctgcgccagttggtgtgaccgccgagagggctgccgacagtgctgcctttattcccgtgccccacgagattcggtacggcgaacaggtaagagcggtttggaggccattgctgcggctcgggattcagaggagcgttccacctccctcttcaccgatattgaggccctggagcgtgcgatcgaggaggttcttggtatgattgacagggtttctcgatacgtcgagtcggtcatcgatgaggaggctcccgcctctacagcattgggccagttcctgctcaatgctcttgccttggctcccaaggttgagcctgctgatattgagcgtgacttgtatgagccacactttcctatgatattgtatcagtttactaaccatattctagtaacaaccacatccaggacgtcctggtggtttcgtacctggcaaacaccattcgtacacagatggagctttctaaccggcttgcaactgctcaactcacccttggcggcgagtctggtaacgcagagcaaggtggtgcccagcgtaatcagcgaggcaagggaggccgtggtgggcaacagcgcaaccaagagcggggtgctgaggaaggtcgcgcataggatgattagatttcactatgaagatacctttgcatttctctttcagctgttctcgggcatttcttttccctcatgcaaccactccatttcaattccttgccg

SEQ ID NO: 17013 - DNA, 1286 bp, Emericella nidulans
aagctcaagaaaccacggcacaagtagtgcatttagtcccaatgccaacccgaacgaggactggaccaagatctctgatcttgctgaacggcgccgtatccagaaccgtattgcccagcgcaattaccgtacgtcctgcccattaccggctctggacgagtctaactagtgacaggcaagaagctgaagcgccgtctggaggaccttgagaaacgcgccgcctcagcttcagaatctccagagcggactctggagaagccagaaccgccagttagaatgacggctaagtctcgcgcaaagcatgcccgcgcaaccaagtctacctcagacgtgcacgcccctgcttcaacagaccgagtctcatacgacagctactccgcgcaagaagatcgggggtcgatgttctcataccagagtacgcgccagctttccacgtcgccgccgcccatcctttcgtatcccccatactcctctctagaccattactcccactcttcatacggcagccacctaccgtcataccactcctacagcgacgtcgcctaccataacgattacccgcctcccgtgccctctcttttcccgctctcaatgcacggcgctggctccgcagcaaagaagtactcctcctacggcgacgacgacatcatcagcccgttcaacatgagctacgcctcgatggcgggaatcgacctctctccgccgcagcaccaccatcacgcggagaatagtaacgttcctgtacatacccataccctcccttccatcagggcgacgtacccgcagttccaaagcagaaggagctaacgcattctctctttcttctcgccagatgccagccttgtcgcaaggatacggcgacgatcactctgagagctcgccctcgactcccgcggagttgtcgctgcattgcccgttgaccccagagttggagcgggtgtcggaccgggtctccttgcatcctgcgtacccccctctactgtgaactcttcctttgaatcttgacgaattacgactcttgtttgcggtttttttttcgcggctattgctccttcaacacgttgtgcaatagcaccggctgttatctttttacgtttacaggtacgggctagatgcatagcactcggcgttacttggtctggttggaacttggagactggactagagactggagtatttgggaaattgtccacaacccctctgatcattagtagactacaatcctgcgtttcctactatcactaatcttaccttcagacttagagtagacaacaaaattcccatct

SEQ ID NO: 17014 - DNA, 1291 bp, Emericella nidulans
tccgccctttttgattccccaccaacgacagggctgttgacatcagccctcaaccgccaacattcctccaacaacgtcgtcgtcgccgtcgtcgccgcgtacttcctcaaccatacccctgcgacctctacgattcgagtcccagaatctgcccgctggagccttagaatctgcaagcgagaaaggcagccgtcgctcttctatctcctcagctcactcagttgggacggatttctcgctttggaccgatactggagatttgggtgaacaaatcgctgatgcagaggatcctctccgaatccgcctcataaattccctgggtcgtggggggtccggtcgagccggatcgagggcacggacgaaacgagcgaaacgtgtgcactaccaggagcagcaaaccgctggcgactttgatcttgagaaaatagaaatcccacaaccaccacccagaaatatatctggtattgaacgctttatcgttgtcataatgtcacctggcagccggcaatcaactcaaacgcatggcttagttgggaagccattgctgtgaggaaccctgctaccctggtatttctagactaggccactaataagctacagttacttcacgagtgtattcgtgtcattaggtgtcttccttttcggttatgatcagggtgtgatgtcgggaattataacgttcgtcttcccgcatgcatgctgaagtacaaattgagactatctttactgacagggagacagaggcttgtacttcaaggattacttcaaccaaccgtcgcgagcggaaattggcactgtcgtcgcaatattagaagttggggccttcatttcctcattactcgttggaaaaattggcgacttaattggtcgccgcagaaccatcctttatggatccatggtgtttttcgtaggaggcgctttccaaacctttgcgacggggctacctatgatgatgcttggccgtatagtcgccggtctgggcgttggagcgttgtccactattgtcccggtatatcagtccgagatatcggtacagttgccctcatctccctaatcaagaaggctactatggacgatgctaatttttgatcaccagccccctcacaatagaggcaaattggcatgtattgagttcacgggaaatatcttcggatatgctgctagtgtttgggtcgattacttttgcagtttcattcgcagcgacttttcctggcgtctcccgctgcttttgcagtgtatcatggggtttttacttggcctgggaagtctcatcatttgcgaatcgccgagg

SEQ ID NO: 17015 - DNA, 1294 bp, Emericella nidulans
cggaaagcatgctgtggcagaatatcttatccaacagcaaaattttcggcgtcttgaagtgacgacaagcgctcctccgcaatttgctagcgaccctcgacttcatttctctgacgcaaccaataatacatctggcggagagccatctttagtatttgagaacttcgggtcgctgatcgattttgcaacaaagagatggcaggaacgctgggtgactacgaatattggggacgcctccacggtagatcgctttctacaacgcccattttttcttttggtgagcgttgatgccccagtcagtctacgatggcaacgttttgcgaacaggtaagtcctagctctgactctgttcgtagtttaatctaagtctgtcctagatgccgaagaaggcgacttgatcctcctagcctagaagaatttgttctctggaatgataagcagttgtacgaaaaggacatcggccgcgcctttctaactgaccgagcacaagttcgcctcttcaattcatcatcttcactggaaaaactgcatgctgctctcaaggcgcttaatttggccgatgaacaacgactgcggcctaactgggaccagtatttcatggaactcgcttccctcgccgcacagaggagcaactgcatgaaaagacgagtaggctgtgtccttgtccgagaacgtcgcgtcatcagcactggctacaatggaactccacggcatctgaaaaactgcaacgaaggcggatgtatggtaccatgacacgataggaactagagttgcttacaatctattaggtccaaggtgcaatcgcggcgaaggcggaggcgtcggcctgtcaacatgcctctgtctccacgctgaagaaaatgctttgttagaagccggaagagagcgcatacgggagggtgcaatattatattgtgacacgtaagctcgtttatccattccctctttccaccctggtccttcccacgatagtctataaactaatctccgtctgccaaagatgtccgtgtttgacctgcacagttaagattgcgcaggtgggaatttcggaggtagtatactcacagggttataacatggacagtgaggtgcgatgaccctcatagctcctgatgaacctgagctaaccacgaacaatcagagcgcagctattctcgcggcagctggaatccgcctccggcagttttctccagtaagattccaacctacccctggcaccagcatatgctaaaatgtatcagccccgaaatggtctaatttaccttgaagaacccgacagaggagaatggtagga

SEQ ID NO: 17016 - DNA, 1299 bp, Emericella nidulans
tcagagccatttctcccgtcttcgaagtgccatagggcttatgggtaatccacggaagctcaatacacctagggaagcaaaaaatacgcctcctgtcccaaaatactatacgaaaagcagcccgacaactatcccacgaggccgcttcttgatccgagaatctgcaattgcagcgtggcaatatttggctctagatgtattggctttacaagccgccaaatcagctctggagaaaaaggaaaaagcaacggtccactattctcaacccaccgacaacttatgggtggaagtctggatcgagaacgtcatcgccgctttggtggcttggtttgttttatcacgaattctgatcagtttctattatcgcttgttgtccactatctctgtggctctgggactttcgtcgccggaatcgttcccaccgctattcaataagatgactgacgcgtacacattacgaaacttctgggggtaagtccctacatgaacgcccgtttatagttataattagtgctatactgacgcattctgacagaaaattctggcatcagattctacgagtagatttcacagctgtgagcaactttgttacctgtaaggtactcagtctccctaaaccatcaatactagaacgctacaccaacgtgtttctggtcttcttcctctcgggtattctacacatcacaaatgacgttgttatgaatgtccctatacgcgactccggtgctatgacttttttcttgtctttcactattggatacatgattgaagatggcgtccaagctgtctggaaacaattatatggctctcagaaagctcctcaggagccagagctatggaaaaaggctattgggtttatttgggttgtggcattcctggcgatagcatcggctggatattttaggccatcgcagacgcgaccagagagtcagttggcattcgtgccttggagtgtcacagagattattggtcttgatgtcgtggtaggcatgattgcgtttggtgcggttgtcttgagggtcgtctttgaatgtgagatctgaagcagatgtattcggaactcgctctctttattgacagggttaccgacaaacacggaggcctgataaagtctctccataaccgaccgtgaaagagctgttcgtctgatcttcccattctctaacatagtgagctacgctgcatgaaccatactgaagggatattattagcgcacacgtccgctaaatgggcaaggttacccagtgtccatttgttgactggtatatacatgggcgaaataatactcctttctttggc

SEQ ID NO: 17017 - DNA, 1300 bp, Emericella nidulans
cgtcttggtggaattcctcatgacacatatggaatgactactctatctgttcgccaatatgtccttggaatctatcgcaaactgaaaattgacccctccacaatccgaaagctgcaaactggtggacctgacggtgaccttggctcgaatgagatcctcctcgccaacgagaagtatactgcaattgttgacggatccggtgtcatcgtggatccgcaaggcctgaaccgtgaagaacttgtgcggctcgcgaagaagcgggcgacaatttccgagtttgatgtgtcaaagctttcacctaatggttatcgtgtgttggtggatgagagcaatgtccaccttccaagcggagagctggttcataacggaatggtattccgcaacatgttccatctgcgcaaggaactaacatacgacacttttgttccctgcggcgggcgcccgagtcaattgatctttcaaatgttggcaagcttattgagaacggcaaatccaccattccgtacatcgtcgagggtgccaatttgttcattacgcaagacagcaagctccgacttgagaaagctggatgtattcttttcaaagatgcctccgccaataagggtggcgttacctcttcctcattggaagtcttggcctcactatcttttgacgaccaaggttttgtgcagaacatgtgcgttggagatgatgacagcgttcctgaattctatagggaatatgttaagcaagtacaagaggtcatcaaagagaacgccaccttggagttcgaagcaatatggcgcgagcatgagcagaccggaatccctcgcagcgtcctcagtgataggctcagtgttgccatcactcagcttgatgaagagctgcaaaagacggagttgtgggataatgttgagctccgcaggtctgtcctcaatgacgctctgcccaagctgcttctggacaagataggtctcgacacgattctccagcgggtaagtagatgttgtgcttttggatgccgaatgacaagcagactgacaaatctgcaggttcctgagaactacctgcgggccatctttggcagccaccttgcgagccgcttcgtgtacgaatacggcagcagccccagccaattctctttcttcaacttgtaagtggctaccgccctgcttgtcgagttttgtgttgctaacaagatgaactacagcatgaccaaaagacttgcacagtccaaagcataaatccgtctagacttcaggacttctgttccataaacagtatcttcggttccacagtgatatacatttgcagcgtcacg

SEQ ID NO: 17018 - DNA, 1322 bp, Emericella nidulans
tcgcgcctagaccactcaccatggctgatacacaacaacttggcgcctcagaaggcagtatggtgaagcggaagcgggagagcagtgacagcggcggcccagatgctcaacgcctcaaccggtcttctcatgggagtaatggcagtctcccgggcgctgattcccagaacttcactcacagtgccctcgcctcttatgaccatggtttaccaaattcagcatcagagctgaatattgaccaacaaatccttcagcatgttgggacccagaacgggatcaccgatgaaaatgcccttactacggccaaggcagcactagcagcccataatcctcagaacaagtatccgccgcctccggagaacgcattcgataacaacctggcccatggcctgacgtttggagacgatatcggccagaatatcggccagaatcacaattctactgctgccgcagtttacgcagctcgcgaggcgcagagcatgaaccaaaaaccgactgtcggttctcctgaatggcaccaagtcagaaaaaataaccataaagaaggcacgtgctcaggtctatccgcgtccagtatatactaacgtcgtcccagtggaacgtcgccgccgtgaggcaatcaacgagggtatcaaccagatcgctcgcctcgtacctaattgcgacaaaaacaaaggcgcgatcttgcaacgtgccattgagtacatcaaccaactgcatgaggaaaagaggcagatgagcgaacgatgggagcagagcaatatgacgacaagtcacgctatcaacgaaatcagtgcgcaaaactcaaagttaaaggtcgaggtcaaccgccgcggtgatatcgcgctgaagtggctgcaacgatgtcgcgacgcaggactcgaattcgacgactacgaagaagcaaaggagctagagccgctcgacgttgatcagacacaggtataaatccaattcgccgctttttccgctctacagtacacaaccgccgtttcctctccaggccatatacatagtgccctcacatgctccatctgccaagaggagagcagggctctccgctctcatcattttcaccctcagctcatctggttaggggacgcctggcatgtctaatcttcctccgtccggttcggttattgtctttgtgtctctgcgttagtgtcgtttggtttgtttttcctcgttataccgtagtaacggcgacatgtggccagccaagcccggtgtccatctttatcccccttactcatgttagttcatcttgtctttccagttaatctttgttcctgttctatttctctgtgttgtacgttattcga

SEQ ID NO: 17019 - DNA, 1331 bp, Emericella nidulans
cgacgaccctgcagcacttcaaaacactcgttcccaaactgtccaccattacttcaggttcttgtcttttaaaaagaaagcgactcaaattgccgttgcatgtgcttcatactggtgacgcaaggtcaaatatgtcggtgctaggccaggcgagcacaactgggccacgccccgcccacaactcctaagagctccccacggtagctggaacaggtgtgaaaagaagaaacgacgatttggcagtataccgagcatgacaatactcgaaatttccatcagaccgtagctcggtacccacaacagccgagatggtcaagacctggtaacaccgacaattcaccgacgagaaaggtgtcggcacccgccaatgcagtcggcgtggataacccggttgtcgaacccacaacgctgattcctagtgtcggtaccggcgatccagcgttagcctttggagtttttagcagcagcagcgcagacacttccatacaaactgcaagtcgcagtcgtattcgccctctcggcactctacagcagcatgactggaaagtcttcttgattgacgaaatatctactcgagctgcttgtagccgtcactgctcttcttccgacaagaacgctggccgatgcccttatacagacctattgggattataagtgggcgctttatttcattgtaattcggcatcagagaggcgacatacaatatttatgagcatctacagcgacggcggatcactctcctgttgtagtgagcattataatctttgttctgcgctttactgccgacattgcgaggcgctaccggccaaggagtgcaaggtcacggttggttttcttcgctcgcgtggaacgcctataccgatggataggcaactatccgtcttgcgagggcgtgcaatgtctcctctctcggaatttacctgcatggtacaaacgaggtcctccaatgttggatgagcgtaggataagcagtatgaaaggctcatagctgaggatttacctcttcggtccgcttgcgggccatgccatcaaatcagagagagcatgagcggcgcatccggcacgaattcgtctgactggatctgtgagcggcggttacatcgttcccttccttgtcgcttttctaacttcgcagtcaccgctaactacctagcgtactctaccactggtgattctgaaatgatcctaaactagctcctcaactttataccactgctcttgtgaccgacgatgagctctttgaagtttgaaccgagggttcccagtaggccagatagacggccctgtgtgttaatatttggcatcaaaacagaatggagacgtactgactc

SEQ ID NO: 17020 - DNA, 1333 bp, Emericella nidulans
gaaaaatagacgaaaatatcgggatcgaagttctattgttgctgccttccttttagcctgactcatcaggcatatcaggccttgattaacctctaaccttgtctacagaaaatctacggaaacagggccgcgggctctaacgagcttgggttcacaaactcgattattggggataccatcactgacaatgccgttcaatctgactcctcccgcatcctccatgtaatgtgtcgacgccgatcttgttatgtatgtgttttcttgcatcgccttgaaaagacctgttcctgtcttctgagaccagatccatccatttgaacccagggatccttgggtacaggcagaccgtcgtcatcgaaactcgtcacggacacagttcatcacaggcctgggccatgctgggtgtggagactcgatcccacacattttttttttattccagggatcctggggccgggtccatagtgcagtcgtcgacaagtcagcgggttgggaattgttattatgatcaaatcaaccgacctcaacgaaaacaactacagagatttttcttcatgaagcttcttcagccgggaactcgcggatgttagtggttttagaccatctattccgactttgttcgagctagagggctctaggcccagtcaagaccagcgacacgcctgtgccagcgacacgccttcggcccgcggatctgaagtttcttgcgtctgtgacagaaaacggtcgcctgctgttcctggcctgacccttttaccaagatcccgttttccaggttccaggctgttagccggtaacggaactcggtaaagattctgtatgtacacaaacggagtctccagattgcctgatgcttgcctgatgcgagttgtgcgcttaccacgacgtgtttttcggtgtcactcgtcacttggcactgtatcagtttgccgattttcaggtctagtcgcagctatacttttgccgcctcaatgaggctgatctcagacagagctatcatgcagagtcatggaattccgcacccaccagtcaccagtgtcaaggatgtcctggttgtcgcgaatcactgtactcgagaccgcagtgatataaagtggctgtgggcttgaatgtgcaggtatactcatagtagtatctttggctcgacggcctgtctggacggcgggtctgccgccgcacagaaagccacatgctagccaggggtatgaaacccaatattgtccgcatcgttgcgaactgagctgcgtggtgcccaggagccttacttatgtacaaggggaaattctccgagtcgtagctgctgtagcaaaaagctaataacagatggactgtg

SEQ ID NO: 17021 - DNA, 1373 bp, Emericella nidulans
atctattcgccgataagaaactctgcatttcactcatttcaaatacttgcaaataaatatctttgttccgcgagcggccatgaatcattaagttctgagttgttaatccatttttgccagcccacccagttatttgacctttgcgacgtctgcgacaatacaaccatcctgaatcgcccttcgaaaaccgtgtcgcaaacttacgccttcgttcgcaactacaagcagacctcctatcttcggttattcgttatcccatatcgccgaacctgacgtgcctttgccatgtttttcctcaaagaagagacaaaggtcatcactctacatccctcgtacttcggcccgaatgtgcgagaatacctcatcaaccgcttgaatgaggaggaagaagggcggtgtaccggagatcattttgtaatatgcgtcatggacatggtagatatcggcgagggaagagtgctcccggggaacggacaagcggaatatacgataaagtatcgagcaattatctggaaacctttcaggggagagaccgtatgttattttttgacgtggtctcaggtgatatctaaccggtcaataggttgatgctcttgtcacatcagtcaaacctacgggcatcttcaccttggctggtccgttgtcggttttcattgcgcgcaaagtacgtttcctttgtttgttgctgcgctcgttgttttgtgggtgctaattgttcctcaagaatatcccctccgacatcaggtgggagcccaacacagtgccgccgcaatacaccgaccacgcggaccaggttattgagaaaggtaccagtctgcgactgaagattcttggtgtgaagccagacgtcgccgcgatcaatgcgattggaacaatcaaggaggattatttagggtgggtgtgcttcgcggtctgtgttattgccagtgctaacactcactacttcttattcctagaccactctaaatatacaaagcttgcggctctttatgacaattacgaccatcgaaccataaccgaaggaagaacgctgggaagtttgttctatgcgcagttaccaaacttatcgaggcgcgagagtcaaccctgaagttactcaacagtagcatgtgagacaccggttctacgaaacacttccccagaaacacgatgaggattattcaatcaactattctccttgcaaccttgaggatgacagacgaatcgctgattgcagcaaaagcgaccttgttttggctgatgcagatctattcacgccaccccatggggtggacggattgagtgatatggtgtctgagcgccatgactgtgaagaattatttcataagcaaaatacccatacacataaagatgttggagtcaaggaggcgtga

SEQ ID NO: 17022 - DNA, 1375 bp, Emericella nidulans
gggtccaatcaaggagctcaaggaacagattaaggcgaagaaggagaagaacgaggacgtctcgaagcttgagcaggaactagcgaaactcgttgatgtcagtgaggatgagaatgctcgtcgctacttcaagagcatggaggacggcgaccccgacgccctaagtctctggcgcagattccgtgacctcagtattaagaagtaccgcgagacgtatgctcgtctcaacatcgactatgatgtctactctggcgagtcccagattaaacaggaaagcatgtccaaggccaacgaaattctgcagagcacaggcgtttccgaaaactcggatgggcaaccattgtcgacttccccaaacacggtgccaagaagctcggaaaggccgtcattgtccgaaaggatggtactcctctgtacctgacccgtgatattggtgctatctttgagcgtgatgaagcctatcacttcgacaagatgatctatgttgttgctgcccagcaggatcttcacttggctcagttgttcaagattgtagagctaatgggcttcaaggatctggccagccgctgccagcacatcaacttcggtatggtccgtggaatgagtacccgcaagggtactgtgaagttcttggacgatatcttgagggatgtcgccgacaagatgcacgaaaccatgaagaagaacgaggagaagtacgctcagattgagaaccctgtggagacggctgatatcctgggtatcacttccgtcatggttcaagatatgtctggcaaacggtacgtactctactccttcttttccatgtcttttctaacgccagcacagtattaacggttacgacttcaaccttgacgccatgacatcgtttgaaggagacaccggtccttacctgcaatacgcgcactcccgactttgctctattttgcgcaaggcggaggccaacgttgaggagcttccgtcggctaaccttgacctcctaactgaatcccatgccgtcaaccttgtccgcctgctctcgtcatggcacgacattctcatgatgaccaacaaaactcttgaacctaccaccatcctcacctacctcttccgcctgactcacatgatcagctctagttacgatgttcttcaggttattggcagcgaacctgagctgaagaaggcccgtctagccctgtacgaggctgcccgacaagtcctgcacaacggcatgcggattctcggtctcagccccgtcagccggtaagtcgtacctactataggattcgatgtggatgctgacgttttgtccaggatgtaaacgacgtacgaccaataaaaaacaggatatccattttttagatctcagacagcggaatacaaatttctcgacttt

SEQ ID NO: 17023 - DNA, 1383 bp, Emericella nidulans
ggctgaccgagtaggcgacgacagctacacttgggacaattggctgcctttcttcaagaaaagcgtgcagttctcaggcccactgacgaaccctcgccccgccaacgcaacggcctcgaatgacgtctcagcatttgcagcaactgcagaagaagaggggcccgtccaggttgcgtatccgtaccttacgaacgccatttcgtcgtgggtagacaaggccctcgaaaagatggggtttcctgaagcccagggattctccaacggccagctgctgggccgctcatacatcacgcatactattcatcctaagactcgtcgacgggatactgcgtctacctcgtacttgcagacggcccttcggacgagtaatagtctgaatgtgattacacatactctggtgaagaagatcgactttgacgaggagaagcgagcgacaggcgtcgttgtcaataccggcgggttcgagtggcagattggcgcaaagaaggaagtcatcctgtcggcaggagtaatgagatctcctcagctgctgatggtctctgggcttggccctagagagacactcgagaagctggacattcccgtcctgtctgatctccctggcgtcgggcagaacatgcaggacaccatcatcctgggccccacgaaccctgtgaaagtcgagagccacagccagttgatgggcagcaaggagactcttcctcgctcgatctacgaatacaacaacttccgcacaggcttgctcaccaacccggggcaagactactttgccttcgaaaagcaccagccaggaaaccttagcgaggcgactgctgccgatatcgacaaggcctttccggctgattggccgaccttctcatatattgcgctggatgacacatttgtgcctcagtatgacggcaagaactacttcagtatgtcggctgcgctgctggccacgtttagccggggcaccgtcaccatcaacaccaccaacacggccgacaaccccgtcgtggacccgcggtggctggacgacccgcgcgacaaggagatggctgtggcagcgtttcgccgatgccgcgagattgtcgcctcagagacgatgcagcaagtcattgacggacccgagctgctgccggggttcgagtatcagaccgacgaggagatcctaaactacatcgccgagacttcggacgcgtactatgcgggagtcggcacatgtgccatgggaaaaccggatgatccgcttgcggtgctcgactcaaaggcaagggttaggggcgttaaaggactcagagttgtcgacgcgtctgcatttccgactgcaattgacggccagcccatggcgactgtctatgcattagcagagaaggttgccgctgatattattgctggaaattg

SEQ ID NO: 17024 - DNA, 1411 bp, Emericella nidulans
caaatggcgcgcctgtaacacaatcagacacaaataatcaacaaatgcagaaagacacaactccccaacagggtgtgaaacgcaaggaactcgacgaacgcccggttgatcctgacgcgacgcctgcgctactcatctcagagttacactggtggactacagatgatgatatccgaggctggacacgcgaagccgggtgcgaggacgagctgaaagatgtaactttcagcgaacacaaggttaatggaaagagtaaagggtaagttgtcgagctttagtatgtcacatccggtactcatgtgtgttctctctacagtcaggcattcctagagttcacatctctccccgccgcaacagccactaagcaccacatcgactccctttccactacaggacagagtggacgcaagttcctagtcaactatactagccccattccgaatccattccgtacactccctaaagacaaccccatgcgcaaggacaatgcgcgaaccggaggattcaattctccaaaccagaacaacgcaaattttggcatgggcaacatggccggagggttccgtggaggtagaggagggttcaacaaccgcggagggatgtcgaacatgcccggctacgtcaaccgcaatttcaataaccccatgggcggtttcaacaaccctatggtcggcgccgggttccagggtaatcaaatggccatgggcaactacggattcggtggccgtggcggtatgatgggcggaaacatgcgcggcggaccaggcggaatgcgtggccgtggcggcggcatggctggcggacccaacatgatgggtatgccaaacatgggtccaatgggtggcatgggcatgaatccgatggctggaggtatgaatccaatgatgggcgggataggagggaacatgggcatgcaaggtacatcacatacacctactaccggtatatgtttgccctagatatctaaccattcattttttcccagttataggtggcttccaaggtcccaaccagggtttcaataccggcttctttcctcagaaccaaggcgtaggtgacggctcgtggaatccacacggcactaagcgcagtcgacaggaatgatcgcttccagttccgctttgactaatatgcactttttgtttgttgaagtcacagtgtgctcgtgcagctcatggcagggttatgtatctcatcctttctctttctctctgaactgtacttttcttttttttttccaatttttttttgttcctttatttaacttgggtccgtcggtgttctctcgatatttcttcttttcttctctttttactttaaacgatgtttcagagaaattggctcgtctttatatgcatgggttgttcatctgttgcttttctcttacttcgggcattgctcagggtgtatt

SEQ ID NO: 17025 - DNA, 1413 bp, Emericella nidulans
gggcaggcctaccgtcagcagcagaacccttacccgcaatacggtcacccttcacctcaaccgtaccctccacagaatggttacagtgtatgttggcagaatgagatgaatccaccgtgctgttcgatgttgactttgtattatagcacccatcatcgggctatccgccttcacccgctcctccaaatggcggccagatgtaccacggacggcgtgcgtgactcttctatcgatagtcgcttgatatccatgctgattcctcccagaaccctcatacccgccaaatcaatacccgcctgcgcatgggggcccgacggctccgccaaccaacccgcaggcctttggccatggcgcacctcaaggatataacttccagtactcccgttgcacagggaaaagaaaggctctcttgattggtatcaactatttcggccaaaagggtcaattgcgtggatgcatcaacgatgtgaagaacatgtcgacataccttaaccagaactttggctacgcccgggaggacatggtgatcttgactgacgaccaacaaaaccccatgagccaaccgacgaaggctaacattctgcgcgccatgcactggctggtgaaagatgcacaacccaatgattctctcttcttccattattccggacatggtggtcaaacccccgatttggacggtgacgaagacgacggatatgacgaagttatctatcctgttgatttccgggtagcgggtcacatagtcgacgatgaaatgcatcggatcatggtgaaacctcttcagcctggtgtgcgactgacggcaatcttcgactcgtgtcattcaggttctgctctggatttgccgtacatctactccacacaaggtattctgaaggaacccaaccttgcaaaggaagctggtcaagggttactgggcgtcatatcatcgtacgcgcgcggcgatatgggaggtatgatgtcaacagccgtcgggttcctgaagaaggctgccaagggcgacgaagcctaccagcgaaccaagcagaccaagaccagcccggcagacgttatcatgtggtcaggaagcaaagatgaccaaaccagccaagatgcccaaatcgccggtcaggccactggtgcgatgtcctgggctttcatcaccgccatgcgcaaaaatccgcagcaaagctatgtgcagctgctgaatagcatccgagatgaattgtcgaccagatatacgcagaaaccgcagctgagctccagccaccccttgggtacgccccttatccctcaatgagatgtttttcgtaaaagggcttttctgacggattttttagatgtgaacctactttatgtaatgtaatggacttgtggaagaataagctcctggcgttttaatacaacaatgtcgttgactcgatctgtctttgc

SEQ ID NO: 17026 - DNA, 1420 bp, Emericella nidulans
gggtggtggacggtgccattttctgcccaatacaacggacggtagtgccgcggagatgatcgtgatctggtggcagtcgccaaggagaaggggttctcttacattgacgaccggaaaggttttgacagcctcaatggtgggacggaagcaaagctaccgctgctgggactctttgctgagaaggacatcccttacgaactcgatcgccgcactcagaatgatgtgtatccctctttggaggagatggctcggaccgcgttgaagatccttagccatgctacagaggacagcgatcaaggatttttcctcatgattgaggggtcccgcatcgaccacgcaggccatggtaacgacccagccgcgcaagtcaacgaagtgctcgcctacgataaggcctttgctgcggtcctcgagttcctcaacgacgattccaccccaggggtcctgggtgcaacatccgaccacgaaactggaggactcgcctgagctcgacaactacatgacacttaccccgaatacctatggctccctggcgttctggccaacgtcagtcactcctcggaatatgccgctcaaaagcttcaagactaccgccgccagaagaccgacaagccctctcaggaggcctacacgcgggacctcctcaagaaatctttaggcatcgaagacgcctcacagcaagaaatagacgccctacttgatcccaacaacccaatcatccctagctatgtcttcgccgacatggttagtcgccgagcccaaatcggctggtccacacacggtcattctggtatactatcgcccttccttacctaaacctctcatatcatcggaactagcaactaatccctccaaaaggtgtcgacgtaaatatctacgcttcctcgtcaagagacgcctggccgctacaagtaaccacgaaaataccgaaatcggcgccttcctagccgactacctcgacctcgacgttagcgccgtcacaaaacgcctccagaactctgagttctggaccgccgctgaaagcataagcgtaagcgagagcttcaactggctgggcaacccgctcggcgacgacgtccgcaccgacggactcgatacgtatcatggggactttaagcggaagcgcggattcagcggtgacgctgatgagtgcgggtgtggtggtgttcattagtctgcattcgggttttgatagacctaaagacaagtcggtattgagttgttattgttttgatttctcttttttctggggttttgattaggttataatgtatggtgttatttatgcaatcgttagtgcttcttacgggtattaaaggacaggttacgatttgcgattgattgtttgggtttcagctccgagatatactgcgtattacagtcagtcatagtcttagctattcagggcgatgacttatgt

SEQ ID NO: 17027 - DNA, 1422 bp, Emericella nidulans
tgcttgcctcggctagggctcgggcggcggagtatgagggtagtgagagcgatgaagatcaggatcagatggacgaggacgacgagatggaaggcatgagcgaggacgacgaagttgcagatgaagatggtgtgcctgcgcttgttgccgcgggcaaagaaacttcaaggcgagcattcgacaaagtatttaagaaggtcgttgaggcggcggatgtcattctttacgtgctggatgcgcgtgaccctgaaggcacacggtcaaaagaagttgagcgggaaattatggctgcagacggtggacaaaagcggctcatcctcatcctcaacaagatcgatctcgttcccccgcccgtgctaaaaaactggctcattcacctgcgccgctacttccccaccctcccacttaaggcctccaatggtgctggcaacgctcacagctttgaccacaagcaactctccatcaaaggcacatcggagacccttttccgcgcactgaagacgtacgcgcagaacaagggtcttaagcgcgccatctccgtcggcgtcatcggctaccctaacgtcggcaagtcctccgtcattaacgcccttacagcccgcatgaacaagggttccagcaacgcctgtccgacaggcgccgagaccggcgtcaccacccaacctccgcgaggtcaagcttgacagcaagctgaagctcatcgattcccctggaattgtcttccccaacactagcgagaagaagggcaagaagaagcaagatgatcaagctcgcctcatcctcctcaacgctattcctcctaaacacatcgaagaccctatccctgctgttaacctcctcctcaagcgcctttcctcctcggaaggcctccttcaaaaactcctccaggtttatggtattcccacgctctactcgggtacctccaccacggatcggacaaacgacttccttatccaggttgcccgcaagcgcggacggttgggtaagcgcggtgtgccaaatctcgaggccgctgctatgacggtcatcaatgactggcgcgacggacggattcagggctgggccacgcctccagtcctgaaagtcgtcgacacaacagcggacggcgctactggggatgccaacaactcggcagccgcgccaggtgtcgacacgagacaagtcgtttctgagtgggcagcggagttcaagatcgagggattatggggtgatggaaatgcagaggacgaggctatggaggagtgaagtctcatacttctcagttctttttctttcctgtcgttcgttttttgtcacgttgtgtcatgtcatggtcatgggataccagacggcgttttagggtaaagccaaaatagattcctgcctagtccttactgcggtcgtcctgtctagtcgagtcgaatcaactaagcgcgtttgacg

SEQ ID NO: 17028 - DNA, 1428 bp, Emericella nidulans
caacgtccatttctaagctacattcaaaatgctctccctacgcacacttactcgcacagtgcctcgcactttctcgcgatcaattgctacctcctccagatccgccattctccgccccatctcaaacctccccaagactagcttcatccagccctcattgaagcaggccattagaccatcccaagccgctttttcgacgtgcaaggcattcaggcaagctgaaggtaagcgaaatctgaataatcaaccactaactgcaccggaacctacttcggataacttcttcgttattcgacagactgttgacctttgacttcgagccatctgaagcccaaaacgatattttcaagcgaataatgctaacggactcaccttctttataggcgatgctgagcttgctgccaagctcgaggacgaacttaagcacgagaagtcctccggccttgaggacttggaatcctctgtccagaacatccaatatgttcttcagaataactcctgggaggtatgtacgaaacatttgcgtctatgatgagttatggaacctcattgtattgtaggtcaaggatgttcctggagaacaggaagttgttctgacaaagaagttcaatgatgaggagtaagtgtctcttctataactatcccttctcgatccatggttatcagcgtccacgcgctaacgtttggccccttcctagaattcgccttacattcactgttgcggatcttcagaacctgagcgagcatgaggatttggatgctctcgatgagctggactatcagggccaccagcccgtgaaccagggcggtgctggcggcttcgcccagcatcccgaggacagcgtctctcccgctgaccgtggtgaacaggacctggagcctagcttccctgctcgtgttaatgtcactatcgaaaagtccggcaagggcgccctgctcatccagaccgttgcccaggacggcttgttccaggttgaggaagtttcttacttctccaagcctgacttggctcacgctcgtaccgctgagaaggattgggccagacagagcctgtacgccggccctccatttgagaacctggatgaggacttgcagacctacctcgagcgataccttgaggagcgcggcatcaacgccgagctcgccaacatgattcccgactacatccaggttaaggagcagaaggagtacgtccgctggctcgagagtaagtgaacgaacctaattgatgtcatttcgcgtactaacgttctcagatgtccgcaacttcgttgccgcctaaagcacacgaatcacgtatatctagcctctgtatacctaccaactcattgttgttcgcccagcgaacgttctgcttttgcccttatctctgtctagttttctggaagtgatcaggatggacatgtattaatatagaaatgaattagg

SEQ ID NO: 17029 - DNA, 1439 bp, Emericella nidulans
tcctcccatcccaacgtccatttctaagctacattcaaaatgctctccctacgcacacttactcgcacagtgcctcgcactttctcgcgatcaattgctacctcctccagatccgccattctccgccccatctcaaacctccccaagactagcttcatccagccctcattgaagcaggccattagaccatcccaagccgctttttcgacgtgcaaggcattcaggcaagctgaaggtaagcgaaatctgaataatcaaccactaactgcaccggaacctacttcggataacttcttcgttattcgacagactgttgacctttgacttcgagccatctgaagcccaaaacgatattttcaagcgaataatgctaacggactcaccttctttataggcgatgctgagcttgctgccaagctcgaggacgaacttaagcacgagaagtcctccggccttgaggacttggaatcctctgtccagaacatccaatatgttcttcagaataactcctgggaggtatgtacgaaacatttgcgtctatgatgagttatggaacctcattgtattgtaggtcaaggatgttcctggagaacaggaagttgttctgacaaagaagttcaatgatgaggagtaagtgtctcttctataactatcccttctcgatccatggttatcagcgtccacgcgctaacgtttggccccttcctagaattcgccttacattcactgttgcggatcttcagaacctgagcgagcatgaggatttggatgctctcgatgagctggactatcagggccaccagcccgtgaaccagggcggtgctggcggcttcgcccagcatcccgaggacagcgtctctcccgctgaccgtggtgaacaggacctggagcctagcttccctgctcgtgttaatgtcactatcgaaaagtccggcaagggcgccctgctcatccagaccgttgcccaggacggcttgttccaggttgaggaagtttcttacttctccaagcctgacttggctcacgctcgtaccgctgagaaggattgggccagacagagcctgtacgccggccctccatttgagaacctggatgaggacttgcagacctacctcgagcgataccttgaggagcgcggcatcaacgccgagctcgccaacatgattcccgactacatccaggttaaggagcagaaggagtacgtccgctggctcgagagtaagtgaacgaacctaattgatgtcatttcgcgtactaacgttctcagatgtccgcaacttcgttgccgcctaaagcacacgaatcacgtatatctagcctctgtatacctaccaactcattgttgttcgcccagcgaacgttctgcttttgcccttatctctgtctagttttctggaagtgatcaggatggacatgtattaatatagaaatgaattagg

SEQ ID NO: 17030 - DNA, 1448 bp, Emericella nidulans
caacgtccatttctaagctacattcaaaatgctctccctacgcacacttactcgcacagtgcctcgcactttctcgcgatcaattgctacctcctccagatccgccattctccgccccatctcaaacctccccaagactagcttcatccagccctcattgaagcaggccattagaccatcccaagccgctttttcgacgtgcaaggcattcaggcaagctgaaggtaagcgaaatctgaataatcaaccactaactgcaccggaacctacttcggataacttcttcgttattcgacagactgttgacctttgacttcgagccatctgaagcccaaaacgatattttcaagcgaataatgctaacggactcaccttctttataggcgatgctgagcttgctgccaagctcgaggacgaacttaagcacgagaagtcctccggccttgaggacttggaatcctctgtccagaacatccaatatgttcttcagaataactcctgggaggtatgtacgaaacatttgcgtctatgatgagttatggaacctcattgtattgtaggtcaaggatgttcctggagaacaggaagttgttctgacaaagaagttcaatgatgaggagtaagtgtctcttctataactatcccttctcgatccatggttatcagcgtccacgcgctaacgtttggccccttcctagaattcgccttacattcactgttgcggatcttcagaacctgagcgagcatgaggatttggatgctctcgatgagctggactatcagggccaccagcccgtgaaccagggcggtgctggcggcttcgcccagcatcccgaggacagcgtctctcccgctgaccgtggtgaacaggacctggagcctagcttccctgctcgtgttaatgtcactatcgaaaagtccggcaagggcgccctgctcatccagaccgttgcccaggacggcttgttccaggttgaggaagtttcttacttctccaagcctgacttggctcacgctcgtaccgctgagaaggattgggccagacagagcctgtacgccggccctccatttgagaacctggatgaggacttgcagacctacctcgagcgataccttgaggagcgcggcatcaacgccgagctcgccaacatgattcccgactacatccaggttaaggagcagaaggagtacgtccgctggctcgagagtaagtgaacgaacctaattgatgtcatttcgcgtactaacgttctcagatgtccgcaacttcgttgccgcctaaagcacacgaatcacgtatatctagcctctgtatacctaccaactcattgttgttcgcccagcgaacgttctgcttttgcccttatctctgtctagttttctggaagtgatcaggatggacatgtattaatatagaaatgaattaggaatcttattgtaatcatgcc

SEQ ID NO: 17031 - DNA, 1449 bp, Emericella nidulans
tgcagtggttttccgatatccatttgagaacgacatagtgcctgcatcaggtaagtcagtccaacaattccagatgcttgtggaaagcagtactgacttctttcaggaatcgttggctcggatccatatttggcaccagaggtttatgacgagaaaaaatatgatcctcgcccaacagatatctggtctctggctattattttctgctgcatgagcctacgcagattcccatggaagcaaccccgagttagcgataactcttatagactgtttgtttcaacgccaacaccgggcactccggtaccagacgctgatccaagacggcaccgccccgtcaaatctgcgccggatttacatagtgccgccattgaggacaagcctccgcagtacgcggcaaacataagcgaagagccttcgaaaatcatggctacgcccccgcggtcccctgttaagcccacgacaggcaaccaagaggaaaacctccccccggagaccacacaggagaagccaccaacaaaggacaccaactgtgataaggctaatacacagaacaaacccactcggaccaccagcaaagaggcacctccgcttccgcccgggtcggcgcaagcggctggtcaacgtcaggaagtcataaaagggccttggaggctacttcggctccttccccgggaaagccgctacatcattggtcgcatgctcaaagtgagcgtgaaagaccgggcaacgcttgacgacgtgctcacggacgagtgggtccgcaatatcagagcatgtcagcaggaggtgactggagaagtgatcaaagctcctggccatacgcacgtccttgagcccccttcccctagtgtgccggtggccagcaaggccaaatgattctgccagctgattgtgtataatgagcaacctgaaaagcttctatctttccgtgttttgcgtttctagatgcatggcgtctgtgtttataccgttctttcatatggatttttacggctctgctaactatagttagaccagacgtgtcatcaatcctttctggaatttgctttctgttttcccccaggtggtggatttgttttactttctttgcgaaagatgtccgtggtcaattgtttatacaccatcttgccttgactacctaatttccaacttgtgttttcagtctcgactcggcgttgtgggtgcccatgctgcagcactttatttgcctttctccgggacttggtcgctagattcctttctccttttcttcttctttttactttcttctctccgtactgtgttattcccttttggcttcgttcttaacctccaagaaagtccacagaaagtccaccttgtacatgagtctcgcgatacggtctttgccatcctcaatgtctgtttcctttatttacctgtcgttaattctacccaaagaccagcatagcaatagattatctatataaa

SEQ ID NO: 17032 - DNA, 1455 bp, Emericella nidulans
gcggcactccgtccaggagactagccacccccctataacaaacaaacttgtcgatacagacgaagccgacctccccagaaatggttatgggtcaagcatcgagtccggacgcaagtactcaacaggaaacatcagtatcggatctgctgcaaaagatggtgcccataatccgccgcatcagcatttccatccgcccaactcaagacgaggaagctgggcgtgggaaagcctgagcgagtacgtcagcttaggaaaaacgagccggtcaagctccatttcgacaagctcaatatcccagcgcgaggactgggagcactgggcagagaagaacctcacaaagcaagaccagcccgtcgagaaggacaaaatggcactaatcactcgcaaatacggcgagatccgccagatcacaggcctgagcgaccacgctgtgatcctccagtcgcataaagtccagtactgcccgccgctggatcgctactatgccatcaaggtctttcgccgcagtcccggtcagagcacggacgagtacacaaaacaagtcaatgcggagttcgccgtcgtcgccaatctgcaccaccagcacgtcgtctcgaccttcgaactcctccccatcggcggaggaaatctagccgcttgcatggagtactgtgcgggtggggatcttcactccctgatcacggctggtccctcgcacagattaccctcggaagaggcagactgtcttttcaagcagcttcttcgtggcatctcctaccttcacaaatcaggcatcgcccaccgcgacctgaagccggagaacctcctcctgacacacagggcttgcctcaagatctcagactttgcgaatgccgagcgcgtccgtttcgatggtgatgattctcagcatgccaatgacctggcggaaactgaacgccgcagcttagaaccgacaccgtatcttgccccggagcgataccttgacgagggcgacaggtacatgtccagatccgaccccagagccctcgatatctgggccgcggctgttatatacgtcgctatgaggacaggaaggaacctgtggaaagcggcaacggagaaggacgagggcttcagggcgtatgtcgaagagcgtaaggccgagaagacgaatactgttatccaggattcgtgccatgtatgcctcacctttcccatcttacttgcgtctggacaccggatcactaatagctgtccacaggaacggggccgcaaagtgatatacgccatgttaagcactgatcctgggaagcgacctatcgcgactgagattctttcctcagagtggcttcagaacattgactgctgtatctttgatcattcccaagcagagtctaatggattttcggcctgattcgtgccgtcttggagagccggacttcgttgcgggcttcgtttcttacagcacctgtcattcaactactttccatatattat

SEQ ID NO: 17033 - DNA, 1455 bp, Emericella nidulans
gatccgaacagcttcatttttgtcgactactaacttcatacttctgcgccaatgtctttggcttcgggtcctggcagggccgctgggacatctgtcgatctgaagctatgcgtcgagaaacatattgactatatcaagaaactggatagcgtgcgtcgtcctttttttcctaccgtgccacttctcttcacgaggagacggttgacaggtgttggtagcgaaaagatgagctggaatactggctcacagagcacctgcgacttaatggagtctactggggcttgacggctttgcatctccttggatgtcctgatggcttgccgcgcgacaatgctgtcgactttgtcctctcgtgccagcaagagaatggtggcttcggcgctgcaccgggccatgatgcgcatcttctgtatacagtctctgcggtgcagattctggtgactttggatgctgttgacgagttggagaagcgcggattgggcggcaagctgaaagtcggttcctgtaaatatagcccttatcacttcggagagggttaaagaacgcatggctaagtgttttcagtcatcgcagggctgcaggacaaggagactggctctttcatgggcgacgagtggggcgagttggatacaaggtttctttatggggcgctcaacgccttgtctctcctgggactattagacttggtagatgtcgccaaggctgtctcgtatgtccagcgatgcgagaatcttgatggagggtacggagtcacccccggtgcggaatcgcacgccggtcaagtctttacctgcgtaggagcactggccatcgctgggcggttggacctagtcgacaaagaccggctgggaggttggcttagcgagcgacagctcgaccatggcggactcaatggacggccggagaaactcgcagatgcttgttacagctggtgggttggggcgagcttggccatgattggcaagctcaactggattgacgggtccaagctcgctgcctatattttgcgctgtcaggtttgttactccattctagcgctagtgcttttggctaaccctccttaggatccagaggctggtggctttgctgatcgtcctggcaatgccgttgacgtctttcatacgcatttcgcgattgccggcttgagccttctggggtacgagggcgttgaggaagtagaccctgtctagtgagtcaacgacatcccaaccgcacagttccgtgataactaatcatgccacttagttgtatgcctaaatcaattacaagcaagattttgtctgcgtagcatgatttcctatccttggcgttgtccttcgggcgaattgtccgtgcttacctcctgcaatctaataacccatatctcttttttgtggtttatgggatacaatgcgggagaagattggaagtcaggcactgtgacttatttccgcttcacccctctacaatggcctg

SEQ ID NO: 17034 - DNA, 1471 bp, Emericella nidulans
tccaccgcgtcgacaacaccccagtacggtgggacgtctgcttacggtaacacatcgaccaccggtcctcacaactccaaccttctgaacaaggtcgaccctcgcgttgataacagccagtacggcaacacctctcacggcacctacggatcaagcacacatggcgcctctgccgcgggccctcacagctctggtctcgccaacaaggctgacccccgcgtcgatagcgaccagtacggcagtgcaggcaacaccttcggtgccggcactggcacccacggccgtgatagcacttccaccaagacctttgaggatgctcacttcggtaccggtcctcataccggaggcaacacttccaccaacgccggccctcacaactccagtctgatgaacaaggtagaccctcgtgtcgatagcgacgccgataaccgcgctcgctacactcccggtgccacaaccaccggtactacacactcggcgacctctggcaatgccggaccgcacaactccaacctcatgaacaaggccgaccctcgtgttgacagcgaccgtgataaccgcgccaagtacgcgccccagacgaccagcaccggcaacgaatacactgcgacttctggaaacgccgggcctcacacctcgaatctcgctaacaaggccgatccccgtgttgacagtgaccgcgatacccgctccaagtacgccccgggcacgaccaccgctgctccttccagcaacgccggcccgcacaacagcaacatgatgaacaaggccgatccccgcgtagacagcgaccgcgaccaccgcacgcagcacggaaccaccactggtgctaccggtgctaccggaactactggtgctactggcgctactggtgctactggtgccgccggaaccaccggaaccagcggcgctggtacttcccacggcactcacaccggcgagaaagtccactcttccaacctcctcaacaagctcgatccccgcgttgacagtaccaccggccagatgaagaacagccacagcaacacttcgtccagcaccaacgccggcagcactggcgcctactcctccggcggtgtcggccacaacgtcgccacggcctctaacagcgctcaccacactggccagacgaccgctacccgcaccggcgagaacgctggcagcggagtaaagggggccgctgctgagattcatgcaagtcctacctcccgcgccatctagacaccaccctctaacagcatcatagggcatgggtgagtctctccgtggcggcttaggtgctgccgttgacagagcctttggcgatgaagaaggcgtggccaagaaccgtgccgttgctcagcagggcgatcatgaaatgagcactgggcgattccattaagggctcatgcgctgcttataactaccccctatctttcatgagtgatggattatgataccgattatcatgcgatggcttttctcattaccc

SEQ ID NO: 17035 - DNA, 1471 bp, Emericella nidulans; identical to SEQ ID NO: 17034

SEQ ID NO: 17036 - DNA, 1489 bp, Emericella nidulans
aacgccacggcatcgaaggattgcgacagttcgacgagctgagattgaaggatgacccggataggaatgactacttttatcgcgggacaactgtcaatccgtatgtgacgagactgttagatcaattctgtgactcggggtgcaatatgacaacaagatgtggaaatctcttgaaatcgatgctgtctatggacaaaagtgcgcgacccactgcttgggacctccataacgacctcaaacagatcacggacacttgcgaggaattcacacacaccgtgatccctcttgagctcgagtcccagagaccacagaaagattcagtttccgacgccaaatccgcaaacaccgttgatcgcagtcccaaccccgtatttctcgctatagagaaccaacgcgaggatgatgcattggtccagattaagtcttttcttcgcgggagtatccgagcgtattcgagcatagagcagtacgacgaacgcttgacccccctctgccacgctgcagaaaaggggtatactaaagttgtcaagtttctgcatcagaagggtgcgcaaatcgacgagcgggatacgcgcagcaatacgccgctgatgtatgcctgcaaaaggggccattgtggaacggcggagtacctgatcgatcagggagcagattggaacctccagggtgaagatgggtatacgtgtctccattttgcgacagaatgcaaaaacaccgaaataatagacgttttcattcaaaagcagcctgcgagcagggtaaagctcaacgcgaacatattaaacacattggaccgaacacctctagagctcactctatatatgaagtctgggcaagctcgttataaactcatggaacagttgatcagcctccgtgcgaaagcttgcgctacttcgcgcaaacagaatcataaaacagcagtcgattttgctctggagaggcgcgatcaacaagcgatgaagattctagttactgatgtcgataaaacatggaagataccaaaaagtaatatgggtggtttcgggcccatgaaagacatcttgaggagagctggccggctcgaagggtagaatgaagccttccctcagcctctgttgatgagatggaagacatagaactattcgtcagcctttctacgccaggacagagaacagatcaccttactaccgagctgtgtggtgaacgatcatgcttggcctccttcttcagcttgctgcagctcattgatctgaacctgccgaagagcgatatcaggagcggcagtattgtcctcatccctcggtctgaaaacgttgactatggatctggtattggcggcgacacggcccttggtcggttcggtaactgcgtgaaaacgtcgagtcagactctgagaatcgtttgtcaataggacatacacagttggttcatttcctcaagtgccttcctctccgtgcttggaatctaagacggcgattgttagaatatcattagaagggcatttagaatt

SEQ ID NO: 17037 - DNA, 1489 bp, Emericella nidulans
cgctcatccgtgaggccagatccgacctggcgaagatcctcacccatgaaacaggcaagccaatcgccgaatcctatggcgagatcgactacgcgaccggtttcacctggtggtttgcgggtgaggcagaacgtatacaagggtcaatcgccgtgcctgccgcgcctaaccggcgcgtcttcactgtcaagcaaccgatcggtgtcgctgctgcccttgtgccgtggaatttccctattgctatggtgttacggaaggccggtgcagctctcgctgccggttgcacgatgattgtcaagcccagtcccgagactcccctcacagccttggtattagcgcacctagcggagaaggcaggcttccccgccggagtgttcaatgtgcttacgacggatctggaaaacacgccgccgctaagcgaagcgctgtgcaagcacccgctcgtgaagaaggttacgttcactggctcaactcgggttggcaagctgattgcctctcactgtgcacacgggttgaagaaggtcacattggaactgggcggaaattgtccattccttgtgtttgacgacgcggaccttgaccaagcgctggaccagctgatggctctcaaatggcgccacgctggtcaggcttgtattactgcaaaccggatttacgtgcaggctggaatctacgacaaattcgcgcagtgctcaaggagcgcacggccaaattggtgatcggccatggtgctaaagaaggcacgactctgggaccgctcacgaccccgcgcagtatcgacaaggccattagccaagtcgaagacgcgcgacggctgggcgcagacgtgattcttggcgggagccgtgtccaaggaacacagggttacttcttcgagccgacaatcttaaaaaacatgaccaaggacatgttggtgtcgcgcgaggagtcctttgctccgatcgctgctctctatcgctttgagactgaggaagaagccgtcaagctggcgaacgacaccagcatgggcctggctagttatgcgttctcgaagaacattgaccgtatgtggcgactgctggagaacttggaagcgggcatgatcggcatgaacacaggaaactcgtctgcggctgagtcgccgtttggaggaatcaaggaatcgggttatggaaaggagagcggaaaggaagttgccgtgaatgagtacctgattaccaagacaggtactctaacgattgatgggcagtactaggttgtccgtctccactctttgaacggctcacggtactagcctgctgcctggagacgaatccaaaacgtgagcaggtactgtttatatgcttcaaggctcgagcttgtaagattgctcctttcaatcaaattggtatcctctcatgaagtgctagcatagtcaagtttatagtgttcatcatattatcttattcataaaggccgtggaaatattgtgaatacgctcaggagaaagattagactcaatacctctcca

SEQ ID NO: 17038 - DNA, 1495 bp, Emericella nidulans
ggaaatcctgaattcaagcacagcggacattatcaagcggcggcgaatgctggagaacgagcttcgcataatgaagagcgaataccagcggctgacgcacgaacaaaatacgatgaaggagaaggtcaaggacaatcaagagaagattgagaacaataggtgagacttctagctcttctagatggcgtggcgatttggaactccaccggaaaccaggaactgggcgcagagtttcctgcgaataggggctagtagtcctcgttcatttctaacattcatatcataggcaactaccgtatctcgtcggaaatgttgttgagctgctagatttggacgtcgaagctgaagctgccgaggagggcgccaacatcgatctagacgccacccgagtaggcaaatccgctgtcatcaaaacgtcgactcgtcagaccatctaccttcctcttatcggcttagttgatcatgagaagcttaagcctggtgaccttattggtgtcaacaaggattcatacctcattctcgataccctgccggcagaatacgacaaccgggtgaaagcaatggaggtcgacgagaagcctacagagaagtacacagatattggtggtctggataagcagattgaggagatcgtcgaggctattgtatggcccatgaaggaagcagagagattcaagaagcttggcatcaaggcgccgaaaggtacttatcaaacagtatctggtgtaaacagactcacaactaatactgctcataggtgctctgatgtacgggcctcccggcacaggaaagactcttctcgcccgagcctgtgcagcagaaactaacgcaaccttcctaaaactcgccggcccccagctcgtgcaaatgttcatcggtgacggcgcgaagctcgtccgggactgcttcgcccttgctaaagagaaggctccctcgatcattttcattgatgagcttgacgctgtgggcactaagcgtttcgactctgagaaatctggtgatcgtgaagtccaacgaaccatgcttgaactccttaaccagctcgacggatttgcctcggacgaccgcatcaaggttctcgccgccaccaaccgcgtcgatgtcctcgaccccgccctcctccgttccggccgtctagaccgcaagatcgaattccctctccccaatgaggaagcccgcgccaacatcctccagattcactcgcgcaagatgactgttgaggactccgttaactgggctgagttggcacgcagcacggatgagtttggtggcgcgcagttgaaggctgtctgtgtggaggctggtatgattgcgctgcgaaaggggcacagcaagatcgggcatgagaactatgtggatgccattgctgaagtccaggcaaagaagaaggatacgaacatgggtatctatgtttgaacaaattcttgtatccttttgtaagcctagatttggtttaactctccttccgcatacaatgcgatgtgtatcaacttac

SEQ ID NO: 17039 - DNA, 1521 bp, Emericella nidulans
gccgttcttgcagcggttcctgcggcactccgtccaggagactagccacccccctataacaaacaaacttgtcgatacagacgaagccgacctccccagaaatggttatgggtcaagcatcgagtccggacgcaagtactcaacaggaaacatcagtatcggatctgctgcaaaagatggtgcccataatccgccgcatcagcatttccatccgcccaactcaagacgaggaagctgggcgtgggaaagcctgagcgagtacgtcagcttaggaaaaacgagccggtcaagctccatttcgacaagctcaatatcccagcgcgaggactgggagcactgggcagagaagaacctcacaaagcaagaccagcccgtcgagaaggacaaaatggcactaatcactcgcaaatacggcgagatccgccagatcacaggcctgagcgaccacgctgtgatcctccagtcgcataaagtccagtactgcccgccgctggatcgctactatgccatcaaggtctttcgccgcagtcccggtcagagcacggacgagtacacaaaacaagtcaatgcggagttcgccgtcgtcgccaatctgcaccaccagcacgtcgtctcgaccttcgaactcctccccatcggcggaggaaatctagccgcttgcatggagtactgtgcgggtggggatcttcactccctgatcacggctggtccctcgcacagattaccctcggaagaggcagactgtcttttcaagcagcttcttcgtggcatctcctaccttcacaaatcaggcatcgcccaccgcgacctgaagccggagaacctcctcctgacacacagggcttgcctcaagatctcagactttgcgaatgccgagcgcgtccgtttcgatggtgatgattctcagcatgccaatgacctggcggaaactgaacgccgcagcttagaaccgacaccgtatcttgccccggagcgataccttgacgagggcgacaggtacatgtccagatccgaccccagagccctcgatatctgggccgcggctgttatatacgtcgctatgaggacaggaaggaacctgtggaaagcggcaacggagaaggacgagggcttcagggcgtatgtcgaagagcgtaaggccgagaagacgaatactgttatccaggattcgtgccatgtatgcctcacctttcccatcttacttgcgtctggacaccggatcactaatagctgtccacaggaacggggccgcaaagtgatatacgccatgttaagcactgatcctgggaagcgacctatcgcgactgagattctttcctcagagtggcttcagaacattgactgctgtatctttgatcattcccaagcagagtctaatggattttcggcctgattcgtgccgtcttggagagccggacttcgttgcgggcttcgtttcttacagcacctgtcattcaactactttccatatattataatatatcccccgaatttgtgattgtctggcgtttctgggacggt

SEQ ID NO: 17040 - DNA, 1541 bp, Emericella nidulans
tgcccatcccaggtgcctttacgtcctacgctactcgattgattgaccctagtctgggttttgctatgggctggatatactggttctcctgggccatcacctttgcccttgagctgacggcaactggattgattatccagttttggaaccaggatcttaacatagcaatcttcattggtgtcttctgggtcttcattactctattcaacatgcttccagtcagtttctttggtgaactggagttctggttctctagcatcaaagtcctcactgtcataggtagggatgccgctaatagcccaatattactttaactaaccatttgcaggattcatgatcttcggtatatgcattaacgctggtgccggaaaacaaggctatatgggattcgacacctgggtgcatccggggccatttgtggcctacgataatatttcacctgattcgaccgccaaatttgttggtttttgggctgtcctcatccaggctgcattctcttaccaaggaacggaattagttggtattgctgccggtgaaaccgagaatccccgcaaaacagtgccctcggccatccgcaagacgtttttccgtatcctgttttttttcgttttgacgatcttttttatcggcatccttgtgcgcagtgacgacaagcagcttttgaattcttccactgatgcgaatgcctctccgttcgtcatagtggccagaaatgcaggagtcgccgtcctgccggatatcatcaacgcagttctgctgactgtggtgctctctgccgccaattccaacgtctacagcgccagtcgcatactgatcggtcttgcccaagaacgttcgccccccgtttcttcaagaaaacctcgaaggctggtgtgccctattacagtgttgcattcgcctcggcgtttggtctgctaggattcatgaacgtttccaattcaggtgccacggtgttcaactggtttctgaacatctccagtgtggctggtttgatttcatgggcgtccatcttagggtgtcatttagcgttcatgcgtgctctaaaagctcgcaacatttctcgcgaccttctcccttacaaggcgttgtggcagccatggttctcatggtacggccttttcttcaacgttcttatcatcattacccagggattcactgcctggatcccagaattcagcgtgaccgatttcttcgtcgcatacattagcttgattctcttcgtcgttctgtaccttggccacaagattgtctatcgaccatcgttcattcgccctatcgaggcagacatcgacactggccgtattgcgctggaaaatgagtactgggagactacaatctccgacgagaagtggtataagcgggcctatcgatcagttttttcatagatccgtgtccttactgtctataaccctgcacattggagagcaatcagttacgatgttcctatcttcctggccatctccgttttgtacattatgactttacatatttggtgtttgcatcgcatggagttgggtgaattgagttgactgtttcacaat

SEQ ID NO: 17041 - DNA, 1552 bp, Emericella nidulans
cgcgtcttcaccgttccgaagcctgtcaaaccctctgcgttttcgccgatattcgatcctggcaacaggagagatctcagcaaggataggaaccaagatatggctcgtgcaattaacaataactttaagaccatgtctaagatggtgaaagaagtaatcgggaacaagggttaccgggtgttgctcgttgaagacgatgaaacgaaccgcatggtatgtcaattcggaccctcgtactggcaatatggctttactgtattcacagattttgctgacaaatcttaggttatgatgaagtatctcgacaagatcaaggtcatggcggaaaccgccggcgatgggcagcagtgcacagacatggtattctctaaagaaccaggatactactctctaattatcgtgagtgtacagcatattctaatcttgaagcacctaactaaaaattatatagtgcgatattcaaatgcccattaagaacggttacgaaacttgccgcgagattcgcaagtgggaaatgaagaatcattacccccagataccaatcatggccctttcggcaaatgcgatgacggaccaaattgaagacgccgcacgcgccggcttcaatgactatgttacaaaaccaatcaagcacaacgagctagggaagatgatgatgggccttctcgatcccggacgcccgctgcttctcctccgcgatcggcttaaggaaggaagtgaggaaagacatcgcactggttaagagagctacagccaatggctaaaaccagtaacgtcctatcaaactcgcgctgcggatgcgccaccgaaacgccctagctggaaacgtcctccgtggacatgacatgacgtttctgtgttcttttgttcatattgcctttgattttacggccacggaggcctgcgcgcaggaggcgcaccgggttgatttaaggctctacttccacttgatttgggcctgttctcgtccgcttgcctaaacagtcgcggacttttctcgtctctttctcgtcctttttctcctcttttaccctcgtgcatctgcatttggctttgcgtgttatggatacctatgagcatcaagggggcctgcaatttcaggagtattgttcttttggacttttcaacccattgtatggcgtcaatttccggctttgatcagggttgcttttgtttttcttgggcagtatctactacctgctatcttccatcatcttcctcttcctgctgtcgcatgaattaccctgaacgacaggttattctataccacattatcttcttaccttcggcactttgtattctcacaaacatgcattttttctgccctcttcaagtacctcatactctttttcgtgtgcttgcctttccttacgcattgctcccctttccgatcatggtttcatcttctctcttggcccgagtagagaaaatatcttttgctctatatgattgattgattgactgtttggtgatatacgttgtgctgggatggttgtttagatatgggggcagttatagttgatacttctgaaaggatacccgcctgagatag

SEQ ID NO: 17042 - DNA, 1555 bp, Emericella nidulans
ggaggccaactcactgcgcttcagcccatggcagctaatgaggggagctcggatgttggatcatcgcatccttccattgacatggtcaagaagaccgagagcatgaagcgcatcccgcgaggatccagtcttcctgtccctcatcaaaaatccagagtatctcgtttatctggtctatcttcggagctttctgtcgacgtcatagaccccaaggaagccgcggatgcgcggctatcgtttgacacgcgaagtctcaacgagtcgagtgctacaataccccctcacccccttgcacatccaccttccccccctatgactattcaaaatcatcgctcagttcattcatatcgagcttccctgtatcctgaccttgccaaagctcagcccctgaccccagacccatctccgatccataaggctgggaagcgggcaaatatcccatctttggatatgcaacatgtgtcaggagacgttctctgccgatcggaagcagaccaccatatttctgcaatcccgaaaataccaatcgctcaacatgtgccctttgtcctgtcatgcgaatctcacgttttggccgagcagttcactttggttgagatggctgctcttggtgaggtagattggagggaccttgttgacatgaagtggaatagcggtcctccatttaccacgagctgggtgcagttccttatggacgaggagcgccggggcattgatttagtggtgggacggttcaacctcatggtgaaatgggctctgtcagagattgttctcaccctggatatcaaggagcgggctcttaccatctccaaattcatacacactgcggtacatgcacggagaatgtgcaactacgccaccatgctgcagatttgtattgcacttacttcgacggattgctctcggctccagagtacgtgggcgctagtgccgctcgaggataggcggatgttgaaggatttggagatgctcatccagcccgtccgcaacttccatgacctccgtgtcgaaatggagactgcgaacgtgcaagaaggctgcattccatttgttggtgcgtccatttgtaaacctttcccttggattcgcaatactaactgggaatcactaggactctatatccatgacctcacgtataatgctcaaaagcctgcccaggtggcagcaacccgcgagggagaaccgctaatcaacttcgagcgctatcgcacgacagcgagaattgttaagagtctcctccgattgattgacgcgagcacaaagtacaatatcgagccggtaccaggaatcgttgagcgtgtgctttggatcgcctccctctcggaagaacaaatccaggtccgcagcaagctattggtataagggggtgaaggatgacccttactacacacgacaccatctatttactacctatatttctggtatatagcgcttgcataatacccccgcatttttcgactttttttggcgtttagcgactgatatccccgacaatttgtgatttgtgcatgggcggccttcgtcctgaaactaatgtatagtattcgttcgttta

SEQ ID NO: 17043 - DNA, 1564 bp, Emericella nidulans
gcgcttgcgggaagttcaacaacaggtacgaagctgtgaccacagggtggattgtaatggcgtgttactgacggcggcaaatagtatggctacgagaattgcatatgcctttatcctccttataaactcaattgtctcgtggatcatgctcacgccatgggcgctgaaaaagcttcaacatcttacgctggactatatggagataaagtgcgacgggaaggaatgttacggctgggtcgcggttcatcgaatcaactttggtcttgggttgttccatttggttctggccctgtttttactaggtgtgaggtcgtcgaaggatggtcgtgcggctcttcagaatggtttttggggcccgaagatcgtgctctggctcttgtttgtggtcatgtcgtttttcatcccggaagcgttcttctttgtctacggacactacattgccttcttttgcgctatgcttttcttactcttgggcttgattctgcttgtcgatctcgcgcatacctgggcggagctgtgcttgcagaagattgaagagagtgattcgcggacgtggcgtgggctgctgatcggctcaacgttgggcatgtacattgcgtctatcgtgatgacgatcttgatgtatatcttctttgctaaaagtggatgctccatgaaccaggctgctatttcggtatgtttcatcccttgtttctgcggccaaagcttacgtgacagatcaacttggtggttttcttaatcatctccttcgtctcggtgcagcctgcagtccaggaaaataacccccgcgctggattggcgcaagccgccatggtgactgcttactgcacctatctgacattgtcagccgtctcaatggagcccgacgaccgccaatgcaaccctttaattcgcgctcgcggcactcgaaccgccaccatcgtcctcggtgcaatcgtcaccatggccaccattgcatataccacgactcgggccgccactcaaggctttgccctaggctccaaaggccacaactactcggagctcggtaccgacgacaacgagcatggtcttgtcacgcagcaaccctctgcccgccgtgagatgcgcgccgaggccctccgtgcggccgtcgccagcggcgctctcccagccagcgctctagacgaaagcgatgacgaggacgactacgacgtaaaggacgatgagaaggggtcaacccagtacaactactctcttttccacattatctttttcttggcaaccacctgggtcgctacgcttctgacacagaacctggacccggagtcagttgacgactttgcccccgtgggccggacctactgggcgagttgggtaaagattatcagcgcctgggtgtgctatgctatttacctgtggactttggttgccccgatcctgctcccagatcgatttgatatgtactaggtatcaatgtactggtacggaggtgtatacgtcaattattgattatttctctggttagcgtttgaattggtatgatattgatgttgaaactcgttatgtcgcatatgatacgcttgtcccgttaccaaattcaatt

SEQ ID NO: 17044 - DNA, 1570 bp, Emericella nidulans
ccctcgaccaaacttggtgggattcacgtttgtctgcagctcttcgctttcaagcttgtggtttgaattcgtataaggatataatttgaggataacgccacacacccctataataactacgtctaggagtttcgaaggatatttgttcgccatggatagcgacgttgtggcccaattttccgaaattaccggttcaaagccggagcttgcaactcagtacctgcagttgaccgacttcaacattgagcaggccatgcagctgtactttgaaaacgacggagcggaattaacgcgcgatccggttccatcaaattctgcagcaaacagagcatcgcgttccacaggctacgaagatgcgtcgggggtagtgcacctggactctgatgaagacgaagctcaatctacgccacgaaaccggccatcaaatacatcaacgctcgaagacgatgcagctatggcacgccgtctacaagaggaaatgtacggaggacaaagtgctgccgatgaagtgcgtgcgccgatggcccgtaccactgaaacacttgttggaccagaggtagactttgcggatgatatgcatgagagtatcttagggcaaatccggaatcgtcaacgacgcacaggtgagtataccttcattcatcgtaatagatcctgctgctaataagtttgcgtttaagatcgacctggtattttcaaccagagagatactacgtcaatatgggccggcgaagaggaggaagagtcccaccgcgaaaggctggcggcagcaacaggcggcgcctccgagagatcgagcaaaacaaatctgcttgcagaactgtaccgcccacctttcgaaatcatgtcaagattaccttgggatctcgctcgggaagatggccgtgagcatgagaagtggcttctggtgaatattcaggacccatccatctttgactgccaggttttgaaccgtgatttatggaaggacgccaacgtcaaggagaccatacaagagcatttcatatttctgcagtacaccaaggatgacccccgtgccgcgccatacctacaatattacttccaggctagtgacgtttctgataactaccctcatattgccatcgtcgacccgcggacgggtgaacaaatgaagatttggtcaggccctccggtggtgaaggctgctgattttctgatgcaacttcacgagtttctcgaccgttacagcttgaagcacaatgtccgaaacccagtggcgaaacggaaacgcgaaattaaggagaagagcattgatgctatgacagaggaagagatgttggagctagcattgaaaaacagcctcggggcgaacgctggacagtctcgaaagatggaagaccccgacgacttaacgcggagcgctggagacgtcaaaggcaaaggtagagcggtcgatgacgaggacgctgagatggatgaggcagacgaaagtgcagatgcagacgctgagacatccgcattttggtctattgcaagtgatcgaccacacaccgaacctcctactgaccctgtaacaacgacacgcattcagttccgacatcccaccgga

SEQ ID NO: 17045 - DNA, 1570 bp, Emericella nidulans
tggagttgccggtccccttgttattgatggtcaaagctatttcattcccatggcaacaactgaaggtgttttggtagccagtgccagtcgaggcgccaaggctattaacgctggtggtggtgcagtgactgtcttaactggcgatggcatgactcgcggtccctgtgtcgggtttcctacacttgcacgcgcagctgcagctaaggtctggctcgactccgaggagggtaagagcgtcatgacagcagcattcaactctaccagccgctttgctcgactgcagcacctgaagactgcccttgccggtacctacttgtatatccggttcaagacgactactggcgatgccatgggtatgaacatgatttcgaaaggcgttgagaaagcactccatgtcatggctacagagtgtggattcgacgacatggccaccatctctgtgtctggcaacttttgtaccgacaagaaagcagctgctctcaactggattgacggccgcggcaaatcagttgtggctgaggctattatccccggtgatgttgtgcgcaatgtgctaaagagtgatgttgatgcattggtggaattgaacactagcaagaatctgattggcagtgcaatggcaggtagcttgggcggattcaacgctcacgcatcaaacattgttactgcaatctttctcgcaactggtcaagaccccgcgcaaaatgtggagagcagcagctgcattaccacgatgaagaagtaagtagtatactttgatgtctttctctcctggtcggcgctaaccacgttttagtacaaatggcaatcttcagatcgctgtgtctatgccttcaattgaggttggcactatcggtggtggtactatcctcgaagcgcagggtgctatgcttgacttactaggcgtccgtggctctcaccccaccaaccccggcgacaacgcgcgtcagctggctcgtattgtggcagccgcagtgcttgctggcgaactgagtctatgctctgcgcttgcggctggacatcttgtcagagcgcacatggcccacaaccgcagtgccgctcccactcggtcagcgaccccggtctcagcggctgttggtgctacgcggggactgtccatgacgtcttcaagatagatatcatgagtgcatgcctttctccttcctaccttttacgataaatacgatgcgactaggctttcttacgacggccattctggaactaactgtccctcattcggttcgctcacccggacttcttccacttccggcacacattttctgagcttttttacatgtgggttttacggcgaccgtgaatcatatggtcagcctcatttttttttgggagtctattgaatatactggagtctgggcatatacatagaactgcgctacggattgacctgaacaagagatatactaaaaagcaaaggagacgagcagtcgctctttgcacaagggcagctgttcgtcggactacatctgaagatgattgtttgcaatgtatggataataacatgtgtatgaataatacatatactagtcgaatcaacttcgccgagcaataa

SEQ ID NO: 17046 - DNA, 1591 bp, Emericella nidulans
ccgcaatcaagtcgacgaagaaacacagattgttctggccgagaaagaagcacaattaatgaaaactgaaaacgatttggcacggatacgcaacacacgagatgagcttcttgctgaccagcaaatgcggaaatcggcacaagagcaggagaggacggcgtcgctcaaaatccaggagctagcagacgctgggaaagctcaaatagctgcgttagaatctgaggttgagcggttgcggatagaagttggacgagagaaggcgaaacaagcagacaccaacgacatcacgatcgaggatttgcgcgtcaaatacggcaatctggaacgccagtactcgatgctcaatgcggaactggcatccatgcagactgcttgcaagaaatattcttcactggcatctcaaagagttgccgagttcagcgctatggaagaaaaggtgtctcgcctagcggcggagaagtcaaaggcagaccaaaaatacttcagcgcaatgaaaagcaaggaagcccgagacatggaagttcggacgttgcggatgcagaattccaagagttctgatatagtttcgcaactgaaggaatcggaagcagccacgcggtctttactcgccaacatggaaaagcaggtcagcgagaccaaggaagcattaaacagcatggtaaacaagtaccacgtatcccagcaacaaatcacagagaataatatcgtgatggagggtttgcgagggcagatcgcagagctgaaggcactatcggtttccaaggattcatccctggcgtcgacgtctagtgcttgtcgtcgagctgaaacacaggttgaagggctcaaagcatcacttgcagatacgaagaaaagtctggagaactggaagaacaagagccttgggaactcgtcttccgagtatgagatgctgagggtaagcacaccgtacttgctaattggaagctcacatttgctaactttccgacagactttagctctttgcaccgtttgtcgtcgaaacttcaagaacacagcaatcaagacatgcggacacgtcttttgcagagaatgcgtggaagagcgactaacgtcccgatctcggaagtgcccaaattgcaaccgctcctttggcaataatgattatatgcatatcacgctgtgacctttccctggtcgatttcgcaccctcaccttcatgtatcatagtttcttctgcttctctttcctcgtttcccgatgtttgggtttattacttcttgcgtttacgctgattttaatctatggaaaaggctcatggtgcggtgttttgtctacggtttagcaggataggtactctggggctggcgttttcactcttgttgccttttatcgaactcctggtcttggggctctgtttctcgaacctctctttctttcgatctcgtttcttggatacctacggtgttccgggtatctcaaaccacacaagggttgtgtcggttgtaggactagcaaggagcctttgcatggagtcatgggaatgacgatggcgcaggattacggaagtttgtctttctataccacttgtggttacagcacggcagtcgatttagtcaaaatattatgaatt

SEQ ID NO: 17047 - DNA, 1605 bp, Emericella nidulans
cagcacggtacccgggctttacagaagatgatcgagtttatctccaccgaagagcagacacagacggtcatcgacgcattgaaagatcatgtggtagagttggttcaggacttgaatggcaatcatgtcatccaaaagtgcctgaatcgccttactgcagaaaagtctcaattcatctacgacgccgttggggctcaatgtgtgactgttggcacccatcgacatggctgttgtgtcctacagcgctgcatcgaccacgcgtcaggagctcaaagagcccggttgattgagcagattactgaaaatgcatttgctcttgtgcaagatccattcggcaactacgttgtgcagtatatcctggacctagctgaagctcgcttcacagaacccctttgccgagagttcctctctcgtattccaaaactttccaagcacaaattcagttcgaatgtgattgagaaatgccttcgcacagctgatgaggagatgcgccgtcagatgatcgaagaaatgctcgctggcgatgagctggagaagatgctacgagactcttatgccaattacgttgtgcagaccgctatggactatgctgatcctgcgactcgcgctcgtattgtcaaatacattgagcccattttgccctctcttcgtgggaccccgcacggacgccgcatcggcagtaagatagcgccagagaactcgggaagaagtagcgccgcagccagtggtcaagttacaccaaatgagatgaactccgcgcagcttccacaaggatctcttcaaactcctcagaagccacttatgtatcaccacaattcctattctgtttctggcactccattcaacaaccagagttttatccctgtagctgggacaggttcgaacacgccatctggtgctagtgagaattcctctggtgcttatagcgccgctttaaagcagtcgaacaacaatcttggcgctcagccgcagttgtacgctccctactaccactgaccgagcgtcccggtgtcgacgattgattagttcactgcctgttgaactgtactcatacgatcatgatgctacgatctttgacgacttaacggctaccctcttgacatgctgtcaatgcattggggaatgataccataccaagtcctttgtcttttatgcaatgacgttgcatttcctggtccatttcttgacggatactacgcctattctgtcttgtatttcatcgaacatttgaatgctttcctttgcgtcttatgacgcttgggatgctatgtacgcttttttgctggtcctgtcttcctccttgttaacagttcgttcgcctgtggggggaacgaggactttccttgtgatctatcgcagccgtccagaggaccattctctgcgtcgtcttttcaccacttcttctatgctttggggacgaattacctatcgtttcccatgtcattgttccccttttgacacgccagaacatgcggtagaatagatgtatccatatcgacaggcagccaagatatccgtttcgcgattccatttgtcttgtattttctttcgttctccatctatgtaccatctagccatagcggtagaattgatttattgaatcat

SEQ ID NO: 17048 - DNA, 1608 bp, Emericella nidulans
tggcattgggcccaactaataacggcgatagtgacgactctctcctcgagaagtatggactcaaagccaacgatgctatccttgccgaagagaagcacatgggcctctacgaagaattgctccagcaccgtgatgccaagctgattgctggtggtgccgctcagaacactgctcgtggcgctcaggtaatccgccttcgtttgtgatatctgcatatgacaattgctgattcaattgctcatagtacatccttccggataactcgactctctacattggctgtgtcggtaaggacaagtacgccgacatcctccaggacgcctgcaagaaggctggtgtccacaccgagtaccgcgtcgatgatgctcagcccactggcaagtgcggtgtcattattaccggccacaaccgcagcatgtgcactcaccttgctgcagccaacgaatacaaggtggaccatctcaagcagcctcacatctggtcgcttgtcgagaaggcccagtactactatgttggtggctaccacttgacagtctgtgtccccgcgatccaggccctaggtgaagaggccgctgcgaagaacaaggtatgaaacactgggtccgtatcttacggcttgagactccgctaatcaagcctgactcattaggtctttatgctgtctctctccgctcccttcattccccagttcttcaaggaccagcttgacagtgtcctcccctacaccgactacacattctgcaacgagacagaggctgttgcttacgccgagagccacgaatggggcaccaccgacattgtcgagattgcgaagaagctggctcagctgcccaagaagaacaccaaccgctcccgaattgccgttgtgacccagggcactctgcccaccatcaccgctactgttaccaccagcggtgaagtcgaagtcaaggagttccctgtgcacgaaatttcgaaggacgccattaatgacaccaacggtgctgggtaagttttcaagctggctacgctgaacacatctgacgattcgcgctctagtgatgcttttgccggtggtttcgtcgccggagttgtgcagggcaaatcccttgaagagagcgtcgacctcggccagtggctcgcgaagttgagcatccaagagttgggaccttcgtgagttccctctttgaatatcagaagcacttaggagcactcatgctaataataacacagctaccccttccccaagcaaacctacacttctggacgctcataaatgtccctctggcactactctcgccaattggcaataaaatctcttcgacttcatctattatcattacttaggattcaaccttctatacccccgttgtccttgacttaacgtcttagactttgctttgcttattctacttacattactcttcaagtggaaaaggcgctaccatcacattatgatattatcttgatgaacacgcgatagacgggatctgcagaaaaaggcgttctcaacaacgatttaatattgaattttaatgcatctcttgaattgttctcttgcttatttacttatgcatccgttcgataagtataacttcaacactaaatgccacatcataaacgatgcat

SEQ ID NO: 17049 - DNA, 1635 bp, Emericella nidulans
gaaacctgtcgagcatggttgagttcaaccctctactgcgaaaagcctactggtctttagcagctgctggccttatatatgtgggcattgtctgttccctgacgtacccagttgtccagagattgtatggtggcatgcaccgagcttcctatgtccaaagtaaaatatgtgcagctaactggcatatctgccggaaacagcgcactctatgcgaacaagataaaccccgccctatgggaagacgtcaacttggtggaagcgttcggtttcttgagtatgtcgccggttctatcataaagaagaatacccaagactgagcttgatcccagagacacaagtccagccattccatctggtcacccctgataacgaaaccatctatggctggcacctcctacctttgcacctttgtcgagaacatgacggggagctggatttggacgagcccactggccccgcggatgattataccctgactccggcattcagactcctggccaatgatctaaacgccagggttgtcgtgagctgtaagtctcgaagctgaagtcagggctcagcagcaactaactacccgcccttagttcacggtaacgcggctcacctaggatctgctcaacggccagagacatatcgtatgcttctcggcctctcaacccctacaaaccccatccatgtcttcgcaatcgactaccgcggattcggaatgtccacggggacaccctcagaggagggcctcatcaccgacggcgtaacgctcctcaacttcctcacatcagccccgctcaacatctccccctcacggattgctatcgtgggccagagcctcggaacagccgtcagtgccgcagtggcagagcgcttcgcttttggttcgcctgatccaaccgccatccaaccagccctcacagaccctgaaccctttgctggcataattctccttgcatccttcagcaatctacccaatttgattgaatcatacagcctcaaggggattacgcctcccattctctccccactacgcgggtaccctcgcatccaaaactgggccaggcgccatattctcgacacctgggatacagccggacgagtcgcaaggctgacaggtgtgaactgcagcctagttcaagctaaccctgcttttgcagagaagggtctagatctggctatcatccatgctaaaaatgatgtggagattccctggtttgaggggcggcgggtctgggcagctgcaacgggtcaactgcagcaatattctcctggtgttctgacatatgagaaaagggatgctgataatgggccgaatgaggttcttatttgggaaaatagatctggcaagggtccaggggcggtcaagagggtgcgatgggaacgagttgcgtatggaggtatgtttctcttctttttggcgtcatcgtgcaatgacaacggtaacatatttggcaggccacaatcgtgtcgctacgttctcgaccgccgctctcgcggtgctaagagcatttgcggagtaggtccatcgttggttatacctcgggtccgcgatccagaaaatttagggctaagaatttgagcatctacaaatattagcgaagatctactcgtcttgagaggagtataggttcgtgagattagtat

SEQ ID NO: 17050 - DNA, 1635 bp, Emericella nidulans
tctcgaccagcgacgacccaaccccgcgctgtgcaacagctctagacaacgacgctatcgacctgagcgctctcgagagagatgggtattttaagactgttcccgggttcgaaacagcggtgttctctcaggtaaacttcgccaacgatggctagaacgtcaactgatgaagtcctcaacagcccacgctgaataccttcgccgcccttcccaagtctacccaccgtcaagtcagggctctcctaacagagcatctcgtggacgtaaacacgcgctcaaaatatgccactcccctcgaaaaagttacaaaccactatccaatggaaacgaagaatttctctgacttctattgttccctggaacatacccaaaacgtacctctatcctctcaattgccccttaccacacgctagatagtgtaggagaaaaagggaaggaaaggaaaaagaaaaagcaaagaaactgacaccgccaaaagtgcagcatgatcatgaatgcccccataagtccaaattggtacgtcattccgagtgtctacaacggccgcacctcgtccctccgcgtcagcgggacccccgtcgtgcgtccaaacggcgtcttcgcaagcaatccttcggaggagccgaaattccagcccgcgcgccttttcgactttgaactagaagtcggcgtgtttctctctcgtcccttcccacccggcgaaattctcgatattagcaacacaccggactatatcttcggtcttgtgattctgaacgactggtctgcgagagatattcaagggtatgaaatgccgcctcttggcccgttccatggtaagggcacggcgacgacgatctctccgtggatcgtcactaccgaggcgctagaggggtgtctgtcagggagtgcgaaggtgcagagcccggcgccgttaacgcatttggcgtggaaagggaagaaggaggaggagacgtgggatgttgagttggaggctagggttgtcagtatgtttgccttccatatactatatcgtctcgcagcgagagggtcaatggttgatgttaacgtgcacagggaacggccaatcttacgtcgtaaccgaaacgaatcttaaagagctctactggacgccctaccagtccctcgctcatctcaccagcgcgggagagggtctcagcacaggtgatattttcggtactgggaccgtaacgagcgcggtacgtgacctcttacctacctaatatctactagtacccttgcttcgattctttgaactaatagctagcagcgaacaaacagcaacggtgaaaatatcggcatagcatgcctcttggagcgcaacttgccgcataataaacttgctagcctcgctgcagcggggatcgtttttctagaagatggagatgaggtcattatggagggctggtgcatcaatcggcagacggggcggaaatttggtttcggagagtgtaagggggttgttcttcctgccctaaaggtgtgattagagtatcacagtctttcggcccccgagagcacatgaggattggaagactcaatgagactcagctacctgctctcaaggacctgggaatatgtgcagatgactctaatatagctagcagcgtttttattgaaatattccctgcacac

SEQ ID NO: 17051 - DNA, 1636 bp, Emericella nidulans
agccaccgtgtcgcctctggaacttctaccagtctcttcagttcgggatcgctctccatctcagccttggtgagcataattcggtatgctgcatcccccgtgggaatggcctgagaggcgccctcacccagtaactgatcgcggataatcgacttgattccgtcagctgcaacaataacatcagccctgacaacggtgccattgaccagcaccaccgatgtggattcaaagtcgacagttgctacatgcgaattcactcgcaactccacattcgggagttcgagtgccttttcgattaaagcgttgtggaggtctgcgcggtgaatgaccacttgttgcccgtaggtcttgttcacgggcatagtcccaagaaggcttccgtcttgccatcgtcgtacatggatatgctccagtgcaacatctttggcatgtattaacggcgacacaccccagcctaaaattccattagagcggtttcttaattctaccgtgaaggcacacttacggtcaaaaagccttagcatgttgggagaaacttgtatacccgcgccgacttccataagctaatatatgcttatcagtgcgtgtgtcttgcttgaaaaaattttgcatacctttggagctgactccaagatagtgatatgatgacctcgcaagcccaaagtcaggccgccgccataccaccgatccctaaacccgaattcttgtcagctcttgcccgacatactacgcattgcgcagtcaggatcgcccacacgtaccagcactacaatcttccagttagcttgagaaaggccaggtcaaacgaaagccaggggacttgcccaacaatgacaacctctaagggcgtcttagcttgcggtatatgcatgacgatttgttgacttggtggctaactgctactcgcccttgaattgaatttggctggtagaaagcaaggtttgagcaatggcaattgaccgcggacaacccggcgtctcagaattcactgaccctacaatggatatagctcgcagccggggtgtatggcctagatgtagggaccattcaactgcaagattgactccctgggagaaagcttaatatttttatatccggaatcccacccatctgtgtccggtaattgcggcaacgactacggaacgaagcccccccacttgacctctgcacagtaaatgttgacggcccttttattctagcaaaagcaactttcacccttgtttcaattgaccttatatcacgtctaggaaatatgctaatacggttcgtctccaagaacaaatgcctacacaaaataaaggtggcgaggccataaacgccggaaaatcctgaacgttgcttttcgctacgagtactcagggccaacccgtggccgaaatcgcctctcggggcagactcggcgggcctcgattcgtgggcggaacccaggagttcgtgtggaggtggccccgttcggctctttcgacagttgaaatttgccgagcccagcattcccgtccctactctagggtagataggactcggggttcacttgtttcactgcttactataacctcctaccactggatcacgccatgatgatactgcccaatattttcatcatgacttggaccattaatcaaacagctactcgtgt

SEQ ID NO: 17052 - DNA, 1660 bp, Emericella nidulans
aacaatcttcaagactgtcccctatccatctttctttctttccttctttctttcgacaccaccaggagagcagtctggaccactggctccaatacacattcttttctcttgaatttgcagtttctttgctctggagcaagtcctgtctttgccgtaatcaatatcacccgccttccaaatctaaaggctccgtgaagtccattcgtttcattcattcgcgatgaggataatcccatccgcgttgatcgctctggggttcggctatggagtggtcgcagctcccactctaaagcaagccgaacgccgatccttcaaggttgagactgtccgccggagcaacactatctacggtccagctgctctacgaaaggcctatgtcaagtacggcattgttgctgcggacatcggactcgacctagatgactttgaacccagcgttaaggttgctgctgcggccgatactgacgcggaagtcgctgagcccgacttgaccggtgctgtcagtgccaaatctgtcgagggagatgcgtcttttgtttcgcctattaccattggtggccaggaactcaccatcacctttgacacgggttcgtctgatgtgtatgtgctacggttctttccccacgctcgatagtgctaatcaagtttccagatgggtggtgaacacactgctccccaaagactctattgaagggcaaacggcctttgacccatcaaagtccactacgtacaagaaaatgacagggtcgacctttaacatcacttacggagacgactcgtatgcgtacggtcccgttggaactgatacaatcaatgtgggaggggtcacagtgacaggtcaagcaattggccttcctactgcagttgcctcatctatcctcgaagacacccacagcaacggcctggtgggactgggtttcagctcactcaacaccgtcaagcccacacagcaaaagtccttttttgaaacaatcgccggcgtcctggacgagcctgtcctcagcgcatctcttgtgagtgatggagtcggcgagtacgagtttggcactgtcgacaagtccaagtacaaaggcaacctcgtcaatgcaaccgttgattcttcgggtggattctggaaattcgagtcttcatactaccgtgttggagacggcacgttgaagaagcacgacgacgcaacttggacaatcgccgatacgggaacctcgctcatgctcctcgagcagaccgtcgtagatgagtactatgcacaggtgcgaggcgcgcagtacgcaaccagcgcctcaggctacatctacccctgcagcgccgagttgcccaacctctccatcgccatcggccctcagcatctggcgacagtacctggtaatttgattaatttctcggaagttggcaccaacaccaccaccggggaagctggtatgtgacaatcttttttctagagattaatatatcgctaatatttccgcagtctgctacggaggtgtccagtccaactcgggtcttgacatgcaaattctaggcgatgctttcctgaaagccttctatgttgtctttgacctgcgtggcccgtcgatcggcgttgcgtctcctgtctgatcgaattatctcgttcgtttctcctagctcttgagccatcttaatggatacttaatcaatatag

SEQ ID NO: 17053 - DNA, 1693 bp, Emericella nidulans
cttcgttgcccacgcgacaatgctgagcgcagtcttgattcttggatcttatgctataggtacctcctaaaatgtagggacgacgatctccagccgttatcaccaacactaattccccgataatcgcagcaaacgttcaaggggcactttctttgtttcaccatcttttcagccttccctcccttttcgatattcatcatgctatacactccttactgccaaaggttataatattggctgattaggctgtctgccttcgttttttgcaagtttgttttgttaggcagagacacatccctggaattcagcttttcatcatacgacaatcctttcagcaacattctcattccagtttgctagcaggatcttctccctgtgttcctttactctgaccgtagtcatctcgagcttgacggcaccgatcaacctgtacatctcattcaacgcaaaggccaccatgggagacgccccaaacaagatctcaattactatctgcggggacggtggatgcggtatgttgtgcgacattctcacgttcccagtctcatctgatgactgattgtggagaacgatatatctgaaaacagtcagcgcatggcattgaccgacaataggaaagtcttccatcaccctgcggctggttcgcagcgaatgggtccacgagtaagccaaatccaagcattatttgatcgcgtgctgaccttatcctgttcatagatatgaccctaccataggtaaataacgcaaacccaatcgctccgacaagcaataatactcatcacccggccagaggactcgtattctgtttcgcgtaccatcgatggagaacaatatttcttgtctattaccgatactgctggccaggaggaatatcgaggattgtgggcagcgtccaacctaaaatcggatgcgtttcttctcgtttacgacatcactagcaagtcctccttaagcgccctagattatttcatggatatgatcgagatggaagccgatcaacgtgcggaggacaacttgcggttgatgagagaactaggcgatagtgcacgaggggtagaatttggtatggctgccccagtgaagattgtcgcggggaataaatgcgatctgaaggacagccgggtcatcagcgcgaaagacggcctggaatatgcccggaaacacaacagcggatttatggaaacaagtgctcgggaaatggttaatatcgaagaaacatttgctcgtgcggatccttcccgattctcgaaatgcgcgatctgacattctttagttttggttcgacgagtcgtagaagctcgtcgagaacaccatcaatataatcaggagctgacaaagcccacccgtcatgtgggattctcactaaggaaaacacctactggcggtgtgtcgaagaaggagtccgaagcaaccctttccaaaaagacaaaccaacgccagagcatattccaaggcctgctgaaaggccgacgcgcaaacactggccaggagcaggttaagaaatatccagaaaggacaccagagacggacacgtcagaaggcgagactcccagccgatggaaacgactctgctgttaaacatcgtctccagcatgtcattgcatagcccctataccctttcgtttgtcgcgcttggtggacatgcatgtataatagtaccaactttctgcaattgtctaattaccttcttgta

SEQ ID NO: 17054 - DNA, 1707 bp, Emericella nidulans
tccttcctcctgctgaacccctctcattacgattccactcgctcgaaactcctcaaaactagaacttacaaacccaacccacttgacctcatacgcgtttgggcgagacatcgaacctccaggagcttggtttcaatcccaagctactcggacctatcgaggcccatttctttaccatctacccctcataatggacgtgattccatcgactacgccaggtgaggccgtgcgcatctcggcgaagagaacagccgagcttttcggtcccgaatatctcatggtcacaccctccgcctcgaacggatcgattggtgtttcctaccgacgaaaaacagaatatgaacatgtgaaggagcttcctccagctcttgccgcaaaacaagcgcaagcagccgcagcaaggtcgaagcggcctaagatcagttcacggtcagaaggatcgggctctggggacaagagtggcgcgtctacggcccttgtaaggagaggaggtcgcgcgagcggcgctgcgggagatgacaagccaacgagcttaattcagagaccatcagccacacggcaacaacctcccgagtggcacgcaccatggaagctgatgagggttatatcgggccatctgggatgggtgcggagtttggctgtggaaccgaataacgagtggtttgccagtggtgctggagaccggacaattaagatctggaatcttgcgaccggtgcactgcggttaacccttacgggtcatatctcgactgttcgcggtttagccgtatccccgcgacacccatacctcttctcctgcggtgaggataagatggtcaaatgctgggatctggaaacgaacaaggtcattcgtcattaccacggccatctcagtggtgtatacacacttgcgctccacccccgtcttgacctgctagtaactggtggtcgagatggcgtcgcacgtgtgtgggatatgcgcactcgcagcaacattcacgttctgtccggccacaccggcactgtcgcagatgtacaatgccaagaagccgaccctcaagtcattaccggatctctcgacgcgaccgtccgcctctgggatctcgcagctggaaagaccatgggcgtcctcactcaccacaaaaagggcattcgcagtctagccacgcaccctcgcgaattcaccttcgcatctgctagcacagggagcatcaagcaatggaagtgtcctggtggcgagttcatgcagaactttgaaggtcataacgcgatcatcaataccctctccgtcaatgaagacaatgtcctcttctccggtggtgacaacggctccatgtccttctgggactggaagacgggataccgctaccagactatcgatacaaccgcccagccgggttcgcttgaagctgaagctggtatcatgacgtctacgttcgataggacgggcctgcgcttgattaccggtgaggcggataagactatcaaggtctggaagcaggatgatcaggctacgccagagactcatcctgtgacgtgggctccaacactggggaggcagagatattagggggccttggtactttggttctgctcctatgcttttgataaaagaataccctgcttgaggtttttcgtgacggcttgcaatgcacatatggagttcagcgtttgtggtatggttcttctcttatatgaaatctatggaatacaaaatggacttacgcc

SEQ ID NO: 17055 - DNA, 1730 bp, Emericella nidulans
cgcctgcaggcgagctttctcccaacgaaccctccgccgaattgagccccagcgatccagcttcttttctgggatatcagtttgcgacagaccacggcgctccttcacaaaatcacggcctcttccttaatcactggatacgaccccaaaagcagtcggcatcgcccagtccacagcctctcgaatatttccactactcgtctgcgcggttcctgagagaccaggattcatggactccccttcgaatcaccggtgtacctgccaatgtgacttactccacgcggccatcggagatggttcaagagctgggcgagtttgatcgtaggtgttctgctagccattatagcgaaccctctgagactggaagtcagtacaatggcctacactcgtccgactctggatacagcactcgcagttgcacgacacggtccatcgctacctcatatgctgtaggttctgcttgcagtccgcgccttaccccgcaagagtacgaacatggcgagaaaacggcgccggtaggcgccgagttagcgcatcattatgaacctatggatattgtcggtccaccagagtcgccgtctatatttggtcatgaagtgatcaaatgcgactacccaaaatgtccgtggactggcaagtgtccgtctgataaaaggtaaacaccttaagccggttcgcgttttgtaccgatttcctgattgtattatgcagaaaacatgaagcccggcataagaagctatttaagtgtgatatactgaactgtagacgcaaggaagggtttggcaccatcaatgatcttgcacggcataagaaatgcgttcataagaaggagccggagcgtgggcccaaggtattatatatgtgctttggacggaactgcccacgaagcagtaagaagtggccccgcctggacaatttccgtcaacaccttgctcgcatgcataataatgaagacgccgatgaactgctgaggaggtaagctcacacgtaaatcctactaagtgaagtatgaagtctgaccgggtctcaggtctcgtgagtggtacgaaaacctaaagtcaaaggatactgtatctatacatacggacaacatgcctgaacaggcaacactgtcacaagtccgacccgaatcaggaatcatggttcaatccgctagcaatgacctccaagatccgcttgccgcgatccatacagctttccaggccgccaactcgagcatgttatcgttagacccagtcagagagcacagcatgctcgacatcgatcatactcgggccattgagctggcagaattgaagctggggccagcgttggagcagaatccttcccagcctgccaatccacggcatgataaaatggacaatatgatatctgaagcggcggtgagtgtgataaatgctatgacgaaaatgatcaacaatcatcagcggagacgtggccacctgggggaagacgatataaccgaacaggatggcgaattatcagatcggaaccgagacatcctgcagaagatcttggttacggcatcggagctgctatcggggagtccaggaccaggaaatagcaatcccctcgagaagactagtaacaggtcggacagggcgagctggagtcaatgtgagttttgtccagaataaacacgtctgcgctatgggatgaaataagtccacgcaagacgttagtcttgtatatatctaaaattgtccttagaaaacaccaaaaacgaggcg

SEQ ID NO: 17056 - DNA, 1737 bp, Emericella nidulans
  unsure (1)..(1737): unsure at all n locations
cccgctcctacactttccgtacctcttgtggatgcactctggaatgtgggcaattcttttattgtccgtacgtggggtctctttatcctaatgctggccctctgcgtgacgtgcggcttgtcttactctacctttccacggcgttgaacgattgtcgcacagtcgctgactcgatacctgcagcaggccaagatacgcccggtatgaggggttcaatcagcacggacttcttcaagttctttggcgctggaggacaggctaagaagactactcgaggtttgttctcgtcgctcctagactggacctcctggttaacacgtcttagacgggcaacctgccaaacgaagaggaccaaaacccgatagcaaaccagctcttacgcggcgacaagagttgaaccgtcaggcgcagaggtaggaactctaacatcaacctctaggattatgcttattcctctaggacacatcgtgagcggaaggagcaatacatcagagcgttggagagcgaagttgcgcggttgcgggaagcgtacactcaggagatatctgctgcgaaccttgctgttcaccaacatcgtgaaatggccaactccatatcggaggaaaacaacatgttgaaagagatcctagtggcccacaatatcaattacgatgctgaattggaacgccgcagagccgagcgacagatgggatcgggattccactccagtcccgttggagctgggagcgttggatcgcagacgggcangcgttcgcttacggcgcatacttacagcacgccgccaacgacggtgtcatcaggaatgagcccgaaatttaatggagtggaaaagttcgacttctcgtcagttccggacgtcgggccgaacaatcagggtattgctacagtaccgtgtgatgcacttgccgccatagaccgtcgcccgccgattcaaggagcggggatatttgaagacaatccccagcttcagattgacttcattctagcgtacgttttacgttaatatttttgcaaggtcattctgactctgaataggctggaatcaccctgtcgagatcataccgactacctctgccgacgatccatcactgaagccgatgatgaggacatgccattttcagggcacgcgctgatggccacctgcccaccgccaagctacatcgccaatactacgagcgagcaaacatatccgcacaagacctacgacctgccgcatgctaacctcacaacgctactcaatcttagccgacaactagtcactgagggacaggttaccccgataatggcactccaggctctaaagaaccatgagatgtatacgaagttgacgcgggacgacgttaaactgatcatggacacgcttgagaacaaggtgcgctgctacggattcggggcggtcctagaggactttgaactcatggactgctttagcagcgtcctggggtcaaaagtggagggttccggccccgtcggcgttgcgttttcccggcatgctgatgagacgatgtattcatgacctgacagctcgctttttttctgagctttctaatgcccttatttcccatttactttactgccgattcctaaccatccgcagaaactgtatatatatcattctcttcctcttcgagcgttgttccctttctaccctcacccttcggtcgctatatatagtttcatttctttctttgggttaagcgctataccaggtcttcatagcaagggcggttcattcct

SEQ ID NO: 17057 - DNA, 1739 bp, Emericella nidulans
ttcgccggctgaatgacgagctcctctcagagccaacgtttcaacacggatggattattcacgctctccactcgtcaattgccagcgacgagcaggagaaggcgttcgttgtgcctccagatggcatgcggaagatagtcatcgccaccaatatcgcagagacaggtatcacaatccctgatatcacagctgttattgatgcaggcaaggagaagaccatgcggtgggtaccagcaaaacgtccagaagaaggaagctaatccaagtaggtttgacgagcggcgccagctgtcccgtttagtagaggcgttcatctcacgggcaaatgcaaagcagcgacgcggtcgagccggtcgtgtccaaaggggtatatgcttccacatgttcaccaagcatcgccacgacaatctcgtacgtttccgtcttctccattcaacaaggtactaacacagatgtcagctggccgaacaacaaaccccagagatgctccgactctcgcttcaagacctggtcctccgcgtcaagatttgcaaactcggcgaagtcgagccaacgcttcttgaagcgctggatccgccgtcctcgaagaacattcggcgggcgatcgacgcactgaaggaagtcaaggctctaaccagcacggagaaccttaccccgctaggacagcagcttgctaagcttccgctggacgtgttcctcggcaaacttatcatccacggggcgttcttcaagtgtcttgacgcggcgattagcattgctgcgattctgtcatgcaagtcgccgtttgtgaatacgatgggctcgaacgctcagaaggaggcggtccgacttgggtttcgacggggtgagtctctagctccagttcaaatccattaaatggagaaaaatgctaatacagggcaggtgactcggacctattgactgtgtataacgcatattgcgcgtggaaacgcacacggagcacaccaggcgccaacgagtacgccttctgtcggaagaacttcctcagcccgcagacgctgctaaacattgaggacgtcaagctccagcttatggtctcaatcgccgacgcgggccttgtcacgctcgatactaaccagaaggcttctctcaaccggtaggtattctccaaccccaccttcatcaaaagggaccgaatacacaagagtaaggacgaaggagactaacaaatacggaaaaagtgcccgctcgacccgccaacgccacttcttcacaaccccgccatcccacgacacaaataacgcaaacgacacgctcatccagtccgttatcgcctggagcttttaccccaagctcctgacccgcgagggcaaagggtggcggaatatcgccaacaaccagtccgtcactttgcacccaacgtccgtgaacagagtcccttcagcttcgtcggagaggtcgccagggcaaagtcagtacctaagctactaccatataatgcaggggcggaacaggaaatacaatgcatttgagacgagcgcggttgaggattgggctgttgcggtgctctgtggagagggcgatttcaaggtctgttttgtcctatttgctcagttttgttctgttctgccttcggtcgaaacagcgtttctatatattttgcattcgttttccctacctcctgaatgtccctttcttgatcagtacattaacgtggtagtagatgtaccccggcgtcctctcgatcgacacaaacagactgcgcttctccctgcgtg

SEQ ID NO: 17058 - DNA, 1762 bp, Emericella nidulans
tctgcctggtgggatcattctcgctaatcgccaggttccaagagttatcaacgcatactccagaccttctaggtgtttcaacctcgcccatccgcattcttctacttgccagcacaatgtcagaaacagagaagacagtatgcctgaaacccctctccccgttattgtttgaggtcgagccgctcatgacaacccaggctagtaaaccagcagctgggccaaatagcccaagcccggaatcaccaacaactgcgcgccctctagatttcgacgatgaaatacaggagaccggcgtcgcctatgcatcctccgcttcagcccaacagaccagcacagagacagccccaccaaaaccacctcgtcctttgtctccgcgacaacaagcggagaacactctgaaagaagcgttcccgtcggtggaggtgtccgttgtcaaggctgttttggtagcaagctcctatgacgttgaacgagctttccatgctctcctcggttcgtgtgattgattccggattttagtgggtaggactaacaacccctagggatgacggacccaaatgcaagcgcacaggatgactatgcccctccgaagcctccacgcccatctgcgacgcaaagacagctggaagctgatgaactctatgctcgtcaacttgccgaacactacaatcgacgtgcgcagccacctcgtggaggggatgaagcctatcgtcggcagaggcattatgatgatgcagcagaggagaaagaatacaactttttcgacggtgcgcatattttatgatcttttgtgtccttgattccaggctaatgatattcaagacgaccttcccgtgattcgtgaaaatattcgtaaagggttcctcgacacccagtccaaggtcagctcatgggtccagaacctgaagaagaagatcgatggcgaggaagacgatgagaatacatcgtctgcacgtacatacggagaggaaagttatggccgatcacgaagaagtggtgagctaggtcgtcgcagcggtgaccgtgagcggtacgatgcagatccgcaagttctgagcgacgatttttccgtccttgaactaagggattcagaaggtcgcgactcactcgtccccttaaaatactcctcggtctgactaacagtgaactgcagtaccccctgcgcgtccaccaagaccgcttgcgaattcaacgttgtataaaagctcctcaccatccccagaccgtcgcaaggtgtcattccaggagggcccgcctacagagattggcaatctttatgatgcttccgagccagctaagcgccaatcccccgcgggagggaaaccgagtaaatggcagcctcttgcgactgtcgagccgtctcctatcggagaaaacgatccgttcagcttaggggacagcgatgacgagaaagacaccaaggctaaggacccagttgatactgaagcgcacaaagtgaatgttggagcttcttctgaagagctcggctcagcctctaaaggcggcacaacagcagagaacgccgggaaatcctcataagccttggtttcgttgctatacggttatagcattcttttcataagccgcgagtttgatgatattatttattctcaattaccttgccctgtacctcttaggcggtgttatgataccagactgtttccacataggcccacagctttgaactaatttattaagtgcttagcgtctaattcgtgttcttatacaagcggtaacatacaaacaatccagaatctattat

SEQ ID NO: 17059 - DNA, 1762 bp, Emericella nidulans
cacttctatattacatcacccacaggagcttctcttaatgccttcaaagagcaaaatacacgcctatatcaagtcaaaccagttgcatacgcaatacagccaactctacacgcaaaggacacccaaaaagatacaaatgacataatacctacagcaactatggaggaatggcatcagcgcctatcccatgtccatctacgagccatattgaaaatggcacaacagaaaatcatcaaaatcaaaggcccaaaaaccttggctttctgcgatatctgtcgacaggctaaggagaggagaaagagctccaaggagccagcctcgcgcgccacaaagatcctggcgcgaatccatattgatattgcaggaggaggagcaacattggactgcaaggatgaacaagcccctcccggcattagaaatattcgatatttcttgttgattactgatgatgcaactcgatatcgatgggtttataccctccgaaccagagatgaggctattcccaccttccagggatggcttgagcatatcaaaaaccaaggatacagcccaccagctttcgtacgaagtgatcgcgaatttctaactgaacacgtcaagaagctctgccaaacctatggcctaatttgggagccaaccgctgcagactccccatggcaagatggcgtcagtgagcgcggaatacagacggttttacaatatacaagggcaatgttatatgactccagattaccacgatggctatggccacaggctctacaaacagctgtctatcacatgaaccggttacctacaagaattcccttgtacaatgatcgacggcctatggcaccaaccagcgatccggaaatccagccatgtgcccattttacgccctattccgcctggaccaatggtgacactgatatcaagcatcttgtcaaatttgggtcacctgcttggatgcacctacatggagcatcaaaatatgctggcaagccaaccagtaagattgacccaaaagccaagaaggtccatgtcgttgggtatagaggccgccatatctatgttatttgggaccctgaaatcaaccaactacgcgataccagtgatatctccatcaaggaggagtttaacccgccacagagcaagccgtacgaagctgccaaagctcccgaagctgctaaagctctcgaaactgtcaaacctgccgaaactgtcaaaacggctgacactgtcaaaactgccgaagctgtcaaacctggcgaaactgccgaagctgcagaaccaaaaaccaataaagaccttcttatacaggatatatcagatattacctccagagaagagctataccgacctgccaaaggatttgctatccaaaaatctgtcgaatcacctctacctgagcccaaatcgtacaatgaggctatcaaaggccctgaatcagctcaatggcatgcagcaatgcaagaagagattaataccttgaaacggaaacaatgttgggatttgatccgaaaatctgacatgcctgctcgcacgcgccataccaggaagatgggtttataaaaagaagcttaatcctgacaactccatccgttacaaagcatgatgggtaatcagggggaatcttcttgataaatcggaatttgaaggagcaacgtacgccccagttgtcgacctgattacttcacgaatcttgtttggtgtcagcgcccaaaaaggctggcatattattcaggcagatgcagttctagcgtttctaaatgcaaagttaaaaggc

SEQ ID NO: 17060 - DNA, 1801 bp, Emericella nidulans
ggcccctcaggcctggacaagatgatggtcgacgagatcggtgtatgcttgttacggaccccgcaatctatggctatacctttaacgagtgctaggatgtcacggttacaaacgatggcgccactattttgagcctgttggatatcgagcatcctgctggcaaaattcttgtggatctagcccaacaacaggatagggaggtgcgtacagtccataattaatgtatcaaagcacttgtgctgaatcttccaggtcggtgacggtaccacttccgtcgtcctcattgccgcagaactcctccgacgaggaaacgaattgatgaagaatcgcattcaccccacaactatcatcaacggatacagactagcgcttcgggaggctgtgaaatatatgaatgagaacatcgccacgaaggttgaccatttgggcaaggacagcttggttaacattgccaaaacgtccatgtctagcaagatcatcggggctgatgccgacttctttgcgaacttgtgcgtcgatgcaatgctgctggtcaagaccacaaaccagaagaacgaagtcaaataccccgtcaaggcagtcaatctgcttaaggcccatgggaagagtggaacagagtcagtccttgttaacggctatgctctcaactgcaccgttgcctcccaagccatgaagactaggataacagacgcgaagatagcctgccttgacatgaacctgcagaaggagagaatgaagctcggcgttcaaatcacagttgacgatcctgaccagctggaaaagatccgtgaaagggaatccggcattgttattgaacgtgtggagaagattctcaagtctggagccaacgttatcctcactaccaagggcattgatgacatggttctcaagctcttcgttgagaagggtgccatggctgtccggagatgcaagaaggaagacttaagacgtatcgcgaaggctactggagctacgttggtgagcacgctctccgatctgaacggcgatgagaaatttgaggcctcctacctgggtcacgcagatgaggttgttcaggagcggatatccgacgacgaatgcatcctcgtcaagggtaccaaggttcacacttcagcgtccatcatcctgcgaggccccaatgatttcagcttagatgaaatggagcgttcagtccacgactccctctgcgccgttaagcgaacattggaaagcggtacacttgttcccggaggcggtgctgtcgagacagctcttcacatgtaccttgaagagttcgccgtcacagtggtacgtaatatggcccccgccagttctcattcattctgacaaaaccctatagggctcccgcgagcaattggctattggcgaatttgctcaatccctccttatcgttcccaagactctagccgtcaacgcagcgaaagactcttccgagcttgtcgcacaactccgcaagagacacgccttgtctcagcgcgtccaggaaggcgaagctaatgagaaagagaaggccgtcgctaagaagaaggaataccgaaactatggtcttgacttgacaaagggccgtgtccacgactgcctcaaggctggtgtcttggagcctagcatgggtaagctcaagcagcttaagagtgcggttgaggcttgcattgccatcatgcgcattgacactatgatcaagctggaccccgaacgcaaggaagatgatggacatggccacgaccactaaagtaatattttctcttggacgtgagatcttcctatctctgcatgtacggatttagataaaagtataatagga

SEQ ID NO: 17061 - DNA, 1875 bp, Emericella nidulans
tcccatccggcttgatcgtgcaaacatcatagttgtaaacacccgtcttgcgcgtgaaaacaatccgctcctcgaaccctgcgggcgaaaagaatgggagattgtcccactcgttcgtgagagctgtgatattacgagtattcagatccatgactctcagtcctagctgacccgtatccccgttcgtcgagttggcgccccagacacggaagacgatcttgctcccgtcatggctgtaggaggggaacccggagttcatgatcgaagtgttcgcaatagacgtgttagatgcagtcaggacttcatactcagacccgttggccgtcgcccgcacaagccatcccccggtcgaagcccgcgactggaaccaggcgccctcaccgaagacgagccactctccatccggggaccatgacggctggaacgctcccgcaagaccctgggagacaagagacgacgagacaagatcactcttcgcgttgtcgtatgccatcctttcatctgatgcatcaggcttcaccgttatgatagatgaattgcccagctgcttctctgtcatggcaatacgattctggttcgagatctgcgggaagacatcggtgaagcggtaatcccagtcctcgttccaagagtagagctccttcgccataggccgtatatcccagctcgtcttctcgtacacgatgtattgcccgtttggagaccatgccggggagcggatcgttttgttgaggtagacaccgtcggtcgtgtagatgccttccttcgatgtccccttcagatggtatccgatcgtgttgttggagagatactgcgggaatgccttcacgccgtcgacgtcgacttcaacacgtcgatctttgccagtcttgaagtcgactgagactatgattgagctggtgctgtcaattgactccggtctgtgcgcgccccatgttgcttctctcgtcatctcatagtacacaatccgttttccgtccggcgaccatgacggggagcccagggagtagccaggtttcgtggcgagttgtctgaatcccgacccgtcagcacgcacggcgtagatcgagagttcctgcgtatgctcccatccactgataccgagatatgtgtcgtcgccgtgtccccgccagtccgtattacggtccgaactgtatgcgatccatcgcccgtcaggcgaccaggaaggtcgaaagtacccgttcatgagggtctcgtttaccgatcttcgagagagcggcgtatcggtgacattccacctcttcccagtctcgatgtccaaaatccagatattggcgcggtatccgttctccgtcgagacgtacgcggctaaggtcccgtctggagacagcaccacactgtcttccattgacggcgtggagaggaggagctggagatcggagccgtcggggcggacgcggtagatatcagagttcccgtcgccggagcgttcacctgtgaatgtgatccagtcgcccgagggcgagaaggaggcatggtattcgtagatcggattcgggagcaggggacgctcggagctgccgttcgcggttgagatgtacagctcagatgtgccgggagcgatgcggttcatgtagaacactcctttcttggtggagttcgtcctggatgagatagatggggattgaggggcctgcaggtgtgcaggtggatggcctcgtggcgattcggctgcaccgcgggcctcgagaccgagctgactcgcatagggacagcctccaaggacgggaccagctacgaaactgagagaaaggaggattccctgccaccgcatcttgcagatatgtggttgagggagtgtcaggatcagataagattgatttaccccctaatgtgacgcttgtacaaggttgt

SEQ ID NO: 17062 - DNA, 1894 bp, Emericella nidulans
gacccgctgaccaaggccaccgttcctatcaagtgtcagagcaagcaaagaacgtgctcgtatatccccagtaagcgaggcgccccaggcccagaaagaaaaaggcctttcctgtggaagccaccgttcacgaggatgatgtccaaaaaacaatcaccccgttgactcctggcttggaggacagtaagtctagcattccgccgactctctacatcaagggttactctaaccataacaccgcagctgccttgtttggccagattgatgtactttccagtcctggtgctgggctgagaagcctagactttccatcggacttccaatctttgtttgctggtttacttggtgcgaatgatagtggcaacaccggtcaagctcgagttgaaccgacaccatcattatcaccgtccagcgtctcatcgccatccgtggtcaggacgtatggcagtgaacatgacatgtgggctgtacttctccagtatatgtgattgtgctgacggtggaatcagcctgaatgcgtactacgatttcattcataactattttcccatcctgccaccaagggtagggccagcctatatcgacagccccttggattgcattgagccttactccgagtctcctgaggagccagtcatcgcctatcagccgggttctccgctcagtctggccatatccgccattttagcattgataccacatccaaatgatccggagccgtcttcacctcgctcagtcatacgacggcgggcatacgcgcacaagtttgcgcagatggccaatgccggagtcgaatctgactgcgagcttcatgcttcccctacgaacccctttgaaacaacgttcaagggccgccctcgcatcaaccgagaacgctttcatcctcataccccagttgagctcgagagtatccttgcattactgctgcttactgtgtatgaatacacccagcgcggaaaccttctgaagatgaggtaccgtgctgggcaagctttagcaatagcactggatatgtcactgcatacccttggcgaagagtacgatgaaatggcagaagcccgaagaagggcttggtggatgacagtaatgctctctctatcatccatctcacatggatttcaggtactgactgcctgtccttcaaatagtactactgcgtcctccagggatcgatcgtgagcacaacggtatgtccgcatgtccagaagttcgctattgatcttggtcgagtcctctaatgttcaaaccagtctctgtcaattgatgccaacgattcgcaatttgtaacgccttaccccaggttcgccgctgatccaaatgtatgttttcctgctagatatctcatgcgcaattctaattggttatcctctcagggctggtccatattcatccaatcccagcaaatactggtagctgccacacaatttgttatcgacgtcaagaagtggatcccaacgaggacaaatatgccatacattgtagaaagcatgcagcgacttgacacatgggccagcgcgctattggctcggtcgagcttacccccttcagttgcccagtctggcaacagcagcggtatctcggagcgaattacagcgcagagtatccgtacaattgcacggataaaaatatccaggttcgtgcctgaaccgccgcaaacatactaagagtaaaagctgacactatcaccagcgcccaaatcaaaattcaccgttttagagcattttcagacataccgattttcctcaaaaggcattgtgatcttagcaaggcaaatgcttgtgacgacccggttccagaatgtgctgccgaaagcccagagcatccgaatgagatttcaagcgtcggctgctcctgtagcagtttggacaaattccaacagtcctcttcaagcgag

SEQ ID NO: 17063 - DNA, 1895 bp, Emericella nidulans
tggccctctccctcttcctgctgtcaggcagtcttgcccagtactccaacccgggcgcctgctccggcgactgctggggccatgacccgggcttctaccagcgcgtctcagacggccggtattaccgcttctcgaccggcggcggcatccagatccatgcgtccgataacctcgaggggccctgggaggctgtgggggaggctttgccggggggatcggttgtcgatcatgctgggagcaccaatttatgggtaggtgccactgctcgtttacgtctgcgactgtctgccagtgctcttggccgtgctttaccttggacaaacaggctcaatcgacatgtccctgcctagagtggttttgactttctctctttattcgtcctctctgttttctcttttctctctttcttcttcatcccctccattcatttggattttcttttttttttctcttttttttcctttttatttctttttttccttttttttttttttttttctctttttctctttttcttctttcttttcttctttctttcttttctcctttttgccctgtgaatgaccggcgggactgggccggcgattgttagtggcagtggtagccctaactcgataccccagcccgacctagccagcataccccggccccatgcattattgcatccccgcacgatcagaaagatcgacatcccacccttgctattgggaccatggatctcttggacgatatgctgatagtatgatgtaaacacaggccccagacatccactatgaagcctccacaaatctctactacatgtactattccgtctcaacgcttggctcccgcgacagtgtcattggcgtcgcaaccagcccaaacctgcagcctaactggaccgaccacggcgccctcttcagatcccaagctggcggaaactacaacgccatcgacgccaactgggcgtcgatcggcggctcgccaatcctcacattcggctcgtactggaacggcatccaccagctcccgctcgcaggcccgctgagccttgcggacggggcgaccccgacccagatcgcatataatagctcgggcaaccatgcgatcgaggcgggctttgtgttttatagacggggttggtactatttgaccttctcgagtgggcgggcaggcagctacgatacgaatccgccggcgacgggcgaggagtatcgtattgtcgtctgtcggagtgcgagtggcaccggtgattttgtatgtatctcctatccttttcttttctatcctttgttttcttctgaaacggagtcgctaatcgttctcgctgcgcaggtcgacaagagcggccgttcctgcctgaccgacaacggaggcacgacaatcctcgcttcgcacggcaacgtatacggacccggcggccagggcgtcttcgaagacaggacccgcggctgggtgctgtactaccactatgcgaatcccgacattggcctctcgacgggccagtaccagttcgggtggaacgtgctgcagtgggcggacgggtggccgagtgtctaacggccgttctttatcaccctattgaggtatatttggcttgagggggctggtatggttatgcaaatatctattttgtttctgcttatatccgggatggacagaactgcgtgagtgagtgaggttttgatacccgtacccacctacctatattgttcatactacaaacccgagtacatattgtacttatctgtactgctgttgatatttcgttgcattgcatcgcatcactcgtgtacatagttaagagccccctcaatgccgctgctctctgaagtaatggctaggccgtattccagggacgggcagtcgtccgtcaaatattggctttaatgaaccggctcagcgagttcggcacc

SEQ ID NO: 17064 - DNA, 1918 bp, Emericella nidulans
ttttcttgcggttcatcgaaagtcaggacttcaatacaaatatcgcaaaggcttacatcgaccatcattttgtgcttcaggtacgacatttggttttccttcagcctaacaccactgaccgtctttagttgctagagttgttcgattccgaagacccgcgggagcgcgatttcttgaagacaaccctacatcgtatttacggaaagttcttaaatttacgttcatatattcgccgatctatcaacaacgtctttttccaattcagctacgagaccgagcggttcaacggaattgcggagttctggaaatccttggatccattatcaacggctttgcccttccacttaaggaggaacacaagttgtttttgaccagggttctacttcctttgcacaaagtcaagagcctcagcatgtaccatccacaactggcatactgtattgttcagttcctcgaaaaggactcgacattaaccgaagacgtgagatttcccagaagtcttccttgctacatttgactctaactgcgttcaggttgtgcttggtttgcttcggtactggcccaaaaccaacagtaccaaggaagttatgttcctcaatgaagtcgaagatatcttcgaagtgatggatccagccgaattcgccaaagtccaagaaccactattccagcagctggccaagtcggtcgctagcccccattttcaggttcggttaatgcggcgctctgaagatgctagccgtactgatatgtcttatgctaggttgccgagcgtgcgctttacttctggaacaatgaatatttctgcaatctggttagtgacaacgttgaggtcattctaccaatcatgttccctcccctatttgagaactcaaagggccactggaataggtatatatttcacctttcatttctatcatcacgctaaccattattgcagaaccatccacagcatggtatacaatgcgatgaagatgtttatggagatcaatcctcagctctttgacgaatgctcgcacgagtataatgaaagacagaatagcgccgagatgcgcgagaaagctcgacagaatcgatgggaaaaggtcgcggaacgagctatgcagcggcagaatggcgtcaacctgccacgtaactcaaccacagccgaaatcccgctgcagctcgatgacgtcgatgctctcactcaggaaagccagaggcgactccagtctctgaaactagatgaggccggttcgaaagatcgacggcctagagagggatctatcacttcggtaagttatcagcatgtttgatcgcttgctagccttgacgattacatctgcaactcccaaatgtcataacttttatctctgtcttctgttctccgctaagcgtttgtcgtttcatgtacagaacgcgtgattctaacgttggaacgtcctctattccagagacgacgccgtggctcccttgaaggcggcggaaggcgacgcagcaacagtggtagtggcaccgagattcgggctcggcgtcgagccgttgggtctgcagcggtcactggtttggcgcgaagcaactcgacgaaatgacttgctacttggatactatactccacaaactcctcatgcttttctcccggcgccactgctttcgatgttcacaccaccatggccctgcaccctctcatcgccccctctctcccatctcattccattatttcgaatccttctttatgtacatggctttgatattcttccgttccgcatggctggtcagatcttaagtcagcggagattctagttggactattagaactgtgttcgggtctggaaaacgggtgctaatggcgtttctcctaatcggcattgatgtcgacgacctgttttgatgtttataagatgaaatattcaggcgtagcctgcaatccacgttcatacca

SEQ ID NO: 17065 - DNA, 1961 bp, Emericella nidulans
tctcaacctcatccagttcttctcaccgacgtaagtagcaggaatagccttgtcacgggctttccctgtttgtcccacccagctctaggcttacccctcattttacccctccactgaacagcagcctgagcttccaagtcccaattctttctccatcaatcgtctccaacttcaccatctcaataatcaacaacagttttatattgcttctccgagaaacatcgttctaatcataccctcctttagtaacaccccacctcgcctatttacattatggtcaaggctggtatgtcgacaacaaccccctccccaccgttctcttcaaatgagcgcaggatctaacgtatatagctgttcttggggcctccggaggcattggtcaggcatgcatacctaccttctcaacatctgtcgatatttgatgcaattctgaccgacgtttccagcctctatcccttttgctcaaggcatccccctttattgacgagctcgccctttacgatgttgtcaacacccccggtgttgccgctgacctctcccacatttcttctgttgctgtacgtcacgcctacatagaagcagtaatctaatggactaactcaaagacagaaaatctcaggttacctgcccaaggaagatggcctgaaaaacgccttgactggcactgacattgtcgttatcccagctggaattcctcgtcagtacaatatgatttattggtctatatctccacaatattagtggcactaatgttgtctggtttttaggtaagcctggtatgactcgtgatgaccttttcaagatcaacgctggcattgtccgtgaccttgtcaagggcattgccgaatacagccccaaggctttcatcttgatcatttcaaaccccgtcaactccaccgtacccattgctgccgaaatcctcaaagccgctggcgtctttgacccggcgcgtctctttggcgttacaactttagatgttgtccgcgcagaaaccttcacccaggagttctccggccagaaggacccatccgcagtgactgtccctgttgttggtggtcactccggcgaaactattgtccccctcttcagcaaggtttctcctgccttccagattccggcagacaaatacgatgcgcttgtcaaccgtgggtattcctgtaaaagtctaagcaataatgttacgtcttactgatcttcgtataggcgtccagttcggtggcgacgaggtcgtcaaagccaaggacggcgccggctctgccaccctttccatggctttcgctggcttcaggtctggcatcctgtgtgttttgggccgccgcttttaatgctaactcctatacaggtttgcagagagcgtgatcaaagcctccaagggccagtctggcattgtcgagccaagctacgtctacctaccaggtgtgcctggtggcgcggatattgccaaggctaccggcgttaactttttctcgactcctgtcgaacttggagtgagtatttggaattgaggtccctaggtgtctgaattaatgctaacaacacaatagccgaatggtgttcaaaaggccataaacattctcgacggtattacagatgctgagaaaaagctccttgatacggctatcaagggtctcaagggcaacattgacaagggcgtcgaattcgctcagagtcccccaccaaagtaaacacgcccttccccgtcctcaattcaaggctcccattcatcggtcggtcatttatgcagctcgcattcctgctccgactgagacgtacctgtagcggtcctccgagacttgctgtccctgaagaagcttcgctaatcgctggtattcgaaaaagataggctttgaatcatttaaatgatatacggcgaacgttgaggagggccgtaaaaatgtttcggttagtctgcagctcgtatgataggaacaaaacagcagaatcaatgtcttcctaaaccg

SEQ ID NO: 17066 - DNA, 1995 bp, Emericella nidulans
attcaataacggggccagttttgttttcaacgattttaattcaacgattcaaatctaagaatgtacatctctatgaagccatgcgctccgcgcggctctgcagcgccttgaccataccgatgccgacttgggtagcctcgtccaggttctcctctggcaagcccagcagcttgttctgagccttgtcagagtggttgccggcatcttccgggaagaacgctcgcgcgtagagcagcttagcaaacccagccatgttgccagtcttgaccatcttcagaccgtctgcgtatcgctcgtggacatcctccttggtgatcgtccagttggcgtccgctgtaccagtcacgcgctttacactctcaaacatctcgttctggctgataacaaaactctggaggtagacgggtttgttgaaccagctcgagagtgtcaggctcttgtcgttttcgccgtctggaagcactttaaggctgagcacagtcgcaacagcgcgcccgacctgggctaaggtcgagaccgaagtcttggtgtttccatcgccgtagatcgtcaattctttcttgtcaaagtcgaacccgaaacgcgccggcctgcccgctaagctgtaatcgtaccagaacccacagcatacggtgatccacttcatgcccagcttgtcgatctcatctcgattggcctgggctacgggtccgagcatgacatcctggccgaacttaacatgctcaatgtcgccgccgtatccattgggcatgatgtacggcacccctgccttggcggctgcctggacaagcttgctgtcagtgtcgcggggtgcagtgggggcaacagtaataataaagaactgttggcccctgagggcatcgacaatggaggcctcatcgttgtagtcgatgggggcgacaacgacgccctcggggagtgtgttggtgctgtctttgcgcgtgagggcagtcacagtgtgttttccagttttcaggagcgcgccagcgatgacagagccaacagtacctccggcctagtagctgttagtctcatcctgtaacgtacttggggagggagggggaggtgtttacgtacaccgacaatggcgactctctcaatggcattggtgaagctggcgggttgatccttagcgaatgacattttgcttgagtgatgtgtgtgattgatctgggttggatgaaggaatcaagactcgaatgcagctggatcatgataaatttatattgattccggcttatgatctcgctgcagcggcggcactgcagcctgaaaccccgccatagccgtgctcaacatcgtaactccgcaatagcggctccatatccatccgagcggcgttaagttcttaaatgaaacaaacacacggagcatcttcccaccgattcctccagtgtcagacggtcgagtgggtctaatggtgactcgggtggacagatttgactcgagcacagcctcacgatcatacatactccgttctcaaaccctatccctaccttttctacgagtctacaggggctcgctcccaggcccgtgactgtcagtaaacatcaattcacagtgaaaatgccctctggcaaccatcataacctgctacccagctaacctgaagcctcgagtgaaggtgagtaaagatgagtgaagatcgtgaattcgtgaattcgtgaattgcgtgaattgcgtgaaaactgtaggccgtcagtacagtgaagatgattccaacgtcgaacgtcccaagtccctcccagcgaaagccagcaaggtcctcgttgtcgtcagtatctgctcctcgcagtttcttactcaagccggtcttgtctcagcatcgtccctcaacacatcattagacgctcctttgacatcaacaaccagcctgacaggctgagctgattccccctagatactctcactgtgggcgccttcatcctcatcggtagccgcttcgacgacgtctttgagcacaaactgttcttcgtaggcggctatgtctggtgc

SEQ ID NO: 17067 - DNA, 2006 bp, Emericella nidulans
ccgatccggactcaatcctttagccatctctgcctcatctcgtacaattttgcctttttgcatcacctttatatgcggggccggtcactacaatgtttctacctaaggccaatgttgagcgctccaaatcatcttattgaacttcagcgtttgcgctcaacgacggactcgagtttaacatggacgttcttcccgaagactcgatgagccagcagatacaaagtgacggcggactgtcgacctcagaagactccagcacccgcagaaatccgcggagcaatgcggcaacaggcgcttcagccgctggtgtgcgtgctcttagtgcgcaacttgtcgctttttatttcagaatccctgtaaaggcgttctttcgcacacgggttgagtaggtacccaactgcttctcttccggcatttgctgtaggctaatgcagccttctttttttttttttgttttcctcacagttacatggtacacatatcctgatccctttctcattcttattcggcattgcccccacgacgactaatgcaattatttttttgttaggcgtttgctcgagctgtttccccacgtctatctgaaggtggtcgctggtccctacacaccactactccgggtctactcattcatgctgttcgcgcttatggctggcggttcataccaaatcaggttgtaccccctttgctggctaatgctgggtaagtgtactgaaaatcccgggcgaagacgaaaagtgcagctgaatgtcgtaatagggttggagctgtgctgtatacttcgtatcttcaagttttaggtgctttgtacgagcctgtgtcgcaaggtgtgagacgtacatacccaccagctagcccgatcgatacttttgtagccggtttggtggctggctcaattcagtctgttgtagctgcccccctggatgctctgcaagtccgcctcagaaccagcgatattatcgaaggccgttatcagagcatgtggcactatggccagcgcaaactacaacaaatcggggtacgcggtattttcgccggctggagtctgtcatttttacgcgactctttcggcagtgccgtcttcttttctttcttcgagtacatcaaatcgcaggcatactactccttcgttactcgctattatgggtcctcaagccctcaaaaagtgggctatctgcagtcatctcagtccagcgaccgtggagtgccgctaatcaaaccgcattatgctctggagccatgtttcttattagctgcgggccttctcgcgtctgtcgcccagcagatcatccaacacccactgaatgcgatacaaaatattcacattgcacggttggaataccttgaccatcaggcagccttacgcccttcgagaaggcaaatgctgcgaatatactacttagcgtaccaggaaacttataagcggtgcataagaaaggctgctcgggctggaggctggaccagatggctttatcgagggttcttgggcaatacccttcgtcaagttcctagtacaagtgccggactcgtgattttcgagttagtgcgccgcaaacatgcaagcatggcagatgccacatatatacgaaaagatggctacgatattctgctgccataacgcttcttctcatctgtgaaattcacccattatgggttttgggactcaagttgaggacttatttggtgcggtcaaagttcttttggcatgtcccacactctatctgctaaattacagcccattgcagtctgcacagcaaatcccatgtggtgtcgcacgcttacgagttggtagaagggtgaagcgcttctcaacaaactgtcaaaagacttcacataatcgcgcttcgttggctgtataaagaagcgtcatcaacccttgggagccttactgctcggctgtatcttttagcggaccattaatgtataaactctttcgagtattatgtgggccgggttgtagatggactagacatagatacgatagtctttaatcaagttttggagca

SEQ ID NO: 17068 - DNA, 2031 bp, Emericella nidulans
ccaagagcggcccctatcccactgaatgatcctacgaatgtgaatccgcaaaggacaaattccactcctgccaatcctgatgtggccactgtgttcgcaaattctctttcaaaccggttcggtggcgaccaccttgaagaactgttgctcagcgaatgcaagcctacgatggaagaggtgaaaacgatatgtgaggctgccacaaccgttggtttgagaaggctgggcttagccaacaacggggtgacccgagaaggcctaaaacatgtcgttcggtatctagaatcgggcaaatgtgaaggcttggatttaggaggtaatccgataggggaagatttggacctcatcaccgatgctatcgaaagccaccttcctctctatgcgctaagcttggcagattgttccttgacaccttctaccatctacccgctgctccaagcgtttacgcaactgcctaacattcggtttattgatttctcacataatcctgcgctgttttcgacacagccagatgcattgtcgacccttagacgcttccttcctaagatgcccaatctgaggcgcatccatttggctgatgtcaacctttcttcagaccatacgatagctcttgccgagattctacccgaatgcccgagtctaagccacttgagtatactggaaaatcccgccatcgtcgcccttgcgtcggcgacagacccggaagcccaggaagaagcgtgtgctgtttatgcatctctcctcgctgcagtgcgggtgtcacggaccatcattgccattgatattgaagatccaagcgccgagaacaatgaagttgtcaaagccttagcatctcagattgtcgcatattgtcttcacaatcttgaaggcggtgctcttgaagcagagctttctgaaaacatcgactcatcgcagccacgaaacttggtaccgattcctgagatcctccagcatattgtcggccatggtactgcagaagaaggggctgaggatgacgatgaacttgctcctgatgaggactatgtcattggaggcacgggtgtagtcaaagctcttggggtttgtcttggtaacctcgaccagcatttgccaggcgatgtgtccggtccaccaagtggcacaacaacacctaggcatcgaaaatctaggtcatttgctgctaaacgtccccgcgatatgtccaaaaaccttttagattcggctcgcggtatacgcagcagaattgagtctgcacttgtgcgtgaggatcgtgcaggcaatgacgctaattacagtaagtttcaagtcgcctcgtttctgctggaatggtgctaacggggcgttttaataatagggcgtctccaatttcttgacagcacgctgcaaaaaatgatccagcgcttcgaggatgaatacccggagacacggattgtgccacagcctctacagcctcaccaggacacaagctctcagaattcaggagacgatagctatctcgccacgagtctaggcaaccttcaatcggctggggctgttgctgataatgagaatgccgtcgatgatgatgaaggcgaccagtatgctgtccggctatcacggactagttctataacatccctctactcccgcgcaatgacttccgaagaaggccacgttcaccgtctcggacagaacatccgtcgcgacttccttcctctggaccaggcggaggaggcagagtcttctgaaatcatggacgagtctcaattggcagcattgcgtgagaaattggatcgtctgcatgaagaacaaactcgctcgcactttgagagtgtgggtgccgacaaagctttccaggagctgggctctacggttgaagaattatgggcaatccagcggcaggactcggaagcctatgaaaggttcaggcaaagccaaattgctgctcaaatcaacagcggcaggagaacgccttctgtgtccgacactagtagggccagaggaagcaacatcggccgcgaacaaccatctgctccatgatttagcacttctttccgcggactatctctgtca

SEQ ID NO: 17069 - DNA, 2110 bp, Emericella nidulans
atcgagcagggccgcaagtggaacgttggatctcttaacgagttccgaaagttcttcggtttgaagaattacgagaccttcgaggagatcaactccgaccctgaggtcgccgagtcacttcgagctttgtacggtcaccctgactacgtcgagctgtacccaggtattgtctctgaggaggccaaggaacccatgatccccggcgtcggcatcgcccctacttataccatctcccgcgcggttctgtccgatgcggttgcgctcgtgcgcggtgacagacactacactgtaggttcctagcctctctgcggagaattgtgtttctaaactagacaggtcgactacaacccccgcaacctgaccaactggggttacaacgaggtccgctacgatcttaacatcaaccaaggctgtgtcttttacaagctcgccactcgcgcgttccccaactggttcaaacccgactctatctacgcccactaccctatgaccattcccagcgagaacaaggtcatcatgaagaatctcggccgagaggctgattactcctgggaccggccgcagtaccaggctcctcgcgctagcttgacctcctactctaatgtcaagctcattcttgaccagcagaaggacttccgtgtggtctggggcgactgcactccgctccactctggcaagggcggcgaagacttctggagcaagacgttaagtgaccctcagttcaagaagagcatcaaggagttctacgagaaaacgactctggagcttttcgcggacaagtcggtcaacctagccggaaggaagcaaattgacattgtcaaagagtaagttgtgccattcacaaatcagcgtgcccgctaattattcgatagcgttggcaacatcgtgcccgctcgatttgcgtcgaagcttctctctcttcctctgaggagcaaggagaactccaagggcgtcttcaccgaccacgagattttcatggctttggctgtgatttataatgccatctttttcgacgttgacaccacaaagtcattccctcttcgcaaagctgcagacgctgtttccaaggaactcggcaagcacgtcgagagccacgtcaagtccgtcagctctccaggcttcctttccagagtcattgacaacttccgtgatgaccacaacgctctcaaggatcttggtgaccagctcattaagcgcttggcagagggtggtctcagcgtctcggacatcacctacggccagatcctgccgacagctgtggaactggtccacggccaggctcagatgttcacccgagttgttgagtactatctcaacgagggcaagcagcacctacctgagcttagcctccttgccaagcaggactctgccgagacggatgcgaactgacccgctacgctctggaggctattcgcctgaatgccggctcgggagcttaccgcaaggccgagaccaacttctatttcaaggagggggacgcagatatcaacctcaaacctggggacgagatcttcatcagctcggtgagtttcctacacgccactacgaccactaatgaagctagagctaatacctgccagacccaagcaaaccgtgacccaacggccttccctgaccctgatgaagtgcgccttgaccgacccgatgagtcctacctcaactacggcatcggttctcaaatcggcctcggcaaggacgccacactgaccgcagtcactgccatggtacgcgccgccttcagcttggagggtctccgtccggctcctggtgtacagggagtcctgaagaaggttgtccgccctgaaggctacaccctctacatgcgggaggaccacggtgctttttcgcctttcccgacgagtaagttgtctggcactaggactcgaaggaatactgctaaccaggtcacagctttccgtgtgcacttcgacggagaagttgtcactcctaagaagcagattgattctgcttgatttactgtaatgactggatgacgaggtcatattctgtgactttttaggagacgtctcgttgttctctgatctaatgttgtatagttctgatacgtatatgccatgtaatgtctaggttggcttgttgcatttgcagc

SEQ ID NO: 17070 - DNA, 2223 bp, Emericella nidulans
tgcacattcgattactctttcgggaagtcgtgtaactatccactctagtttgatggtccggcagtagtggttatacctcggctgcttccttatcagtcgcctcttctactcaagaacggcccatgtggacgggtcatcacaagaagtcggcccagtcgtccaaatttcaagatctgagttcaacgcaaatgttggcttcttctgatggagaaaaaattttctcacggctcaggctgagacctgccttgatctgggtccggtggatatcgcatctgagatagcggtgagaaagaaaattcagttggctccatcctccagtcagatctcgaagtcgaatggcgtgcatgctcttcttgactttgtttccagcctcacattgatgaccccagatcctggaagattcagatgagacaagactttaatgaagtccaaggaaagcacctttcacgtgctatatcaaggcctaaaggcatatgtccgtacttcgctccaaacaatgtatttctcagcgcgaggggttggcgttgagtagcggtcaccttactgccaacgtccgttactccacactttataggataagttcatctcacggttcctgaaacacttccacgaacttatctatcgaacccatgtcataagtcttcagccggacgccttcatctcatatcgcatcttaaacattgtgtataaacatggccacgatgaacgcgaataatgcaataccggacaaaggagaaaaaccatggttagcggccattctctaatacgttgacagcagcccaggtcttccgtcatattaccggattgggtgaggaggatgatgtcgcgccacgatattctgccgcgtcttcccgcctacaaatgccccgggccgagccaaaaaagttcctccttcgtgctttcaatgcctatgggactcacactcacttgccttttgcttcaattgtaatagctgctcttgattgaagattgatttctctctcagacgtgctacggaatcggttcccccttggttctttcatctagtccccgaaaaagtcctctgttcgttatggcgccccctcgccagcgaactacagctgttcaggacgacttacggtccgaagcttccagcacagcgacgaatgacttgaaggcagcggcacctaatggcaagaaaggtgctaatgtccgcaatgccaccgacgtctcacgagaccttaaatccacatccaatgtgactagcgcgcccgctacacaaggagagcaaacggacaatctcccaagagtatgttgtcagacggagtggaaagcccattttcacagatttatcacccctaatcttttaaactcatctcaattcagtagcacttcttgcgcgtgaatactaatcatattctcacgtttagatcccttggtccgagatgcccctcgagtttctccactcctaccgacacgcctataaattgacctgcccaagtgcacactcgagcgaatatgcacataaccttctttcaaggggaattggcctcctatcgccaacagctattgctgcccgcgagcccaaaatcacggttcgcaaccatcggacgggtcgttaaaatcacaccataatcgcagccgccccaatggcacaagcggagacccccagaactccttctcgaagcgatccggcccacacaatggaaagggcacattgaaccatattatcagccaggaccgtgtagctaagagccagctcgctacggctgtccgcaaacatttcaacagcgcaggacttgtggagcaggaggccattgcacggttcctgtacaaagtccgtgaagaaggtcgaggccggcatttccgtctcaaattccagccatgacaagaatacccaatgtctgcgtgtatacttggtggctggtccagtctggtctggcgttcacggggctcctgtacaaaaataaataagaccctgcatcgcttgtacgggcttcttgcggttttttcttctcgggtctggccgcatatccttgtcccttatctttttatatgataccccttcttggttcttgggcgctttcgactactcctctgtctgtcttttcgccttgtttatgtttagtgttatggtcttgtttacatctcggcgttatatggaaagcctcagttatagctcaccgatctcgaatcatattcgagtttttattcagtcctaatttcgctactacctactgttactggcccttccgttgggctatt

SEQ ID NO: 17071 - DNA, 2257 bp, Emericella nidulans
ttcagacttgaaaggactttcagttctgtttccaagtactctcatctcccaccgtgtcatcggtggacaaccatccgtacaacaccacacctgcagtgcagataaatccccgcgataagcctcaagttcacaagagcagaccactctatcagtacgttcgccggcggtgaaattccctggtagatagtgaaccgataatcctgacatacgtctcgatcaaacgagaagaaagagacttgcaccatggctcagcagaaacctatcttcgttgcaacccatccccgggcttgctcgacggcttttgagcgggtatttctcctgtccaattttgaggatttttttcttttctttttttttttagattagccaggcgaaatactgatcttctgctaggtctttatgactcagagagatacaatcaagtgtatccatgagcccttcggcgatgcattctactacggccctgagaggctctcagatcggtacgaggctgacgagaaggggcggattgagagcggattcagcgagtctacgtacaaaactatcctcgagaggattgagcgcgaaggaagggaaaatgaggtattacatccctccacattgatctagaaatgagccagtactaacgttcgacgatagggcaagagaatattcattaaagacatcctgcattatctcttacctccgcacggcaaacccgccagtattgcgccttccctcaacagaatcaagcgcggcgtaggcacagagacagctactgctgaacacccgacggccgttggcagtgacggagattccaacgccaacggcaccacccggctgccaacgggctaccaatggcagcgcgaatggcagcgagataaaaaagggcaacagcacagcgccctacccatacgacactccctctgaaccaggaaacccgaccgtcatccccaaggagattttggaaacattccactttgccttccttatccgcgatccgcattacagcgtcccctcctactaccgctgtacaattcctcctctcgacgccaccacgggcttcacctactacgaccccgctgaagctgggtatgacgagatgcgccggttcttcgagtacctgcgggctgagggcctagtgggacctcatgttgcaactcacgaggcagacgccgacgagatccttgccagtgcccaggatggtcagcagaagcctacgcataaacctgtctccagcccggatgctggcatcggcgcggagatctgtgtcgtcgacgcggatgatatgctcgatagtccagcggcgatgatggaggcgttttgccgtagcgtcgggatcacgtatacggacgccatgctaaactgggataacgaggaggatcatgagtacgcgcgggaggcgtttgagaagtggaatggatttcacaacgatgcaatcgattcaagagggttgactgctaggaagcatgtaagttttccttttacttgtccttgctcttctcgtctcggctaggtagggtgcggacttagtaggtggagaaatccgtgagccttagcctgcatgcatattgcaccagcacaccacgcaggatcagctcgtgatagacgagagaatagtccagctgaccaatttgaccagccccgtgcccccagatccgaagaacagttcgacgccgagtggcgcgagaaatacggcgaggagggcgccgccctgatccgcaagacggtcaacgccaacatggccgactacctcttcctcaagcagttcgcgatgaaagtctaggtgccgtggtcaagccgtgcaggtcatacctatgcaggtaccgaccgagcaaatgagtacgtacactccataacaagttgattcgagatgagaaaaggaaggcatggccagcaaccagccgtgggggttgaagacgatgacaagaaagaaattgaatcagatcgacttgaaagttgagaggattatcctaggcgatggaatgggattaggatatatgtcgcgatgagagcctttgatcacgcaatctgcactatggaaatctatattggatgaatttgcctgttatgcacgatactcgaaacgctttgacttcagttttgcttttttcctaggtttgtttttcttgttctgtttgcaaattgtgtgtttctgaatgaagggagaatgtatccatcttgactggaactgttgtgagctaaagtctagctagctagcacgtcccagtacctagttcgaaggaagtaattgctcgttcaaccatttcaggataca

SEQ ID NO: 17072 - DNA, 2316 bp, Emericella nidulans
aacggaacaataactatcattcgacatcgctaagaaacatggttgctacttctgtgaaccgtactgccctgcaccctggtggtgtccagtatgtcattctacctcgctgtcgtggcttcagtcgtccatggtactgacctcactgtctagacccggcaagggccacaccgaactcgaagaagaacttcatgaacacgcccacatcgactacgaccgcgttgctattgtaagctgaacacctcgaccatgcctcattgtcgtttagactttagtactaactagactagattgccaacccttctgtcgctgccctctatgaagacgctcttgtctacgagactggtactgctatcacatcaagcggtgctctcacagcctactctggcgccaaaactggtcgctctccttcagataagcgaatcgtgaaggaggagtcttcagagaaggaggtctggtggggacccgtcaacaagcctatgaccccggatgtaagtcaagctttctgttttatcccttgcctagccctttcttcgtccatcatgcacaagctgccgtcgactttccctccgagtggttacatttgttgataaatgcctcatgctctattgggttgaggcattttgaaattgtgctacctgaccaactagcctggtttgggtttgtcgttgtcgtgggtcgtctgtcgatctgcatgcaggtgccttgcagggctagtgtgacgtcactatacataggtcccgttactgacagggtttctccaggtctggcgtatcaaccgtgagcgtgctgtcgactacctcaacacccgaaaccgtatctacgtgattgatggtttcgctggctgggatgagcgctaccgtatcagcgtccgtgtcgtctgcgcgcgcgcctaccatgctctcttcatgcgcaacatgcttatccgaccttctgccgaagaacttaagcacttccaccctgactacgtgatctacaacgctggttccttccctgccaaccgcttcactgagggtatgacatctgccacctccgtcgctatcaactttgccgagaaggagatggttatcctcggtactgagtacgccggagagatgaagaagggtgtcttcaccatcctcttctacgagatgcccgtcaagcacaatgtcctgaccttgcactcttctgccaacgagggccagaacggcgacgttactgtcttcttcggtctgtccggaactggcaaaaccaccctctccgccgaccccaagcgtgctttgatcggtgacgacgagcactgctggactgaccgtggtgtcttcaacatcgagggtggctgctacgccaagtgcattggcctctccgccgagaaggagcctgatatcttcaacgccatccgctttggttccgtcctcgagaacgtcgtcttcgaccccatcagccgcgttgttgactacgacgactccaccctcaccgaaaacacccgctgtgcctaccccatcgagtatattgagaacgccaaggttccctgcctctccgacagccacccctcaaacatcatcctcctcacatgcgatgctcgtggtgtactcccccctatctccaagcttaccaccgagcagaccatgttccacttcatctccggttacacctccaagatggccggtaccgaggacggtgtcacagagccccaggctaccttctcttcctgctttgcccagcccttccttgccctgcaccccatgcgctacgcccgcatgctcgcggacaagatctctcagcacaaggccaacgcctggcttctcaacaccggatgggttggcgctggcgccaccaccggcggcaagcgttgcccgctcaagtacactcgtgccatcctcgatgccatccacagcggcgagctcgccaaggctgagtacgagacttacgacgtcttcaaccttcacgtgcccaagagctgccccggtgtgcctgatgagcttctgaaccccaagaacagctggaccgctaccaccagcttctcggacgaggtcaacaagctcgctaagctgtttaacgagaatttccaaaagtacgctgaccaagccaccaaggaagtcatcgcggccggtcccgttgtccagtaatcggctggtgaagatagaatcgtttcctttgttattttcctctttattcccatgatgcccttttctgttgtctaaaatattgcatggcgtgctgcgtttatttgggtttgcttgctttctggggtccgggaaagatacaatccggctttgccttttggctcctgtgctaaatagtcagtagatgttagacaatccagtggctattcccaat

SEQ ID NO: 17073 - DNA, 2345 bp, Emericella nidulans
cacgttgcggctcgctttgaccatgaaaagtgcgcccgcattctgctcaagggtaacgatgttcagaaagcagacaccgaacttgctgaaagcacttactcttggaccccgcttttcatcgcctgcgttgatggctcattaagtgttgtcgaggccctaattgaagctggtgccgaccttgaaaggttggattcatctggctggactgcaaaggaacacgcggccctgcgtggacatcttgacgtggccagatgtcttgcgaaggtgactcctgaacctgagctttccgaagaacctgctttgactgttcccactgcctctggttctactacttcgggtcccttgtcgtcacagcctcaatcatcgctgatggagaaaaaatcgaacggagggagcgctgcagggagttctccctcccggaatcctgaacctgttaagtcatttggacatcggtatctcaccgacgaggccatgatcctagtcagtttgggcaccatggacactcgaaagcacgtccacgccgtgaaccttgaccgtattcctatggagcaccgtcacgctactcagctggacactgctctgtctatcgtcgtctctgcgaatggggcgcacggagaacccgaaatcatcgatcttactgtgcaagagaacatctcaactgaaccaattgtattccatgcagcagacccaactaaggttaggctgctattcgaccttgatcctacgtactcaggctcgaaggaccaaatagtggggcgaggtgttgccttgctgtccagcgtgaggccgagtgtgggatcgcaccgtactaaccttcaaggcgactctactgtacctatcgttgctgctaataccttggaagtgatcggttccattacattcaacttcctggtcattacacctttcaagcacccgaacatgtccatcaacagggagcagacctactggaggagtatgtcgtcaacaatggtcatcggacatcgcggcttgggcaagaattttgctactcgaaattcattgcaacttggcgagaataccatacagtccttcatcgcagctgcgaacctgggcgcttcatacgttgaatttgatattcagctcacaaaggatcacgttccagtcatttaccatgatttcctcgtcagcgaaacaggtattgacgctcctgttcacaccttgacgctcgaacagttcctccaactcggcgagcgaggcacgactcgaacacctgggtctcctggccagattgccatcggaggtactgaacgaagcaagacccctcccttgcctcctcgccatagatcaatgtctgtgggcggtacagagagcgatatttctgaactcaacgaaagaattaagcatacccgcgatttcaagaaaaaggggttcaaaggaaatagcagaggcaatcatattcaagccccttttgctactctggaagagctgttcaagaaactgcctcagaacgttgggttcaacatggagttgagtaagtctatccatttccaggtatatttatggttcggccgctaatcaaaggctgaagaatatcccatgctctacgagagtgaagaggaggagatggatacatatgctgttgagctgaattccttcgtcgacactgtcctcgagaaggtatatacgttgggccagggccggaacatgatcttctcgagcttcaaccctgatatttgcttgcttttgtccttcaagcagccgtcaattcccgtccttttcctgacagattccggatccagccctattggagatatccgagctagcagtttacaagaggcgatccgtttcgcctctcgatggaatttgctcggcgtggtgacgcaggcagaatgccttgtgctctgcccgcgtctcatccgcgttgttaaagagtccggtctcgtctgcgtatcctatggcacatccaacaacgatcctcacaaggtcaaggtaagcttctgagcacaccgtggcttctggacctctctaacatcattttagctccaagccgccgaaggaatcgatgcggtaatcgtcgactctgtcttagccatccggaaaggtctcaccgagcatgaaggcaaaaacagtttcacaccaggacctactccacacgctagtccacttagccaaccgactatcaatgccgctctcaaggatgctcacaggattccggttctgaataataatacagaggtaaaagacaactatctccaagtcaagtctgacgctcgttcgctctgaaagaagttctgcgttaatcttcaaagcgtcgcgtgttcagtgtgttcagttgaaatttagatatacatcgtgtcaccatgatctgtttagatacatcatcattc

SEQ ID NO: 17074 - DNA, 2391 bp, Emericella nidulans
ggaacctcccccacctcagcaacaggaaggctcgcccccccgctatttttatttctgatccaccctctcaatttttccctccttcactcttcaacgtcagactctcctcctcccaccatccctatcgagtccatcccatccctactagcacaccaaacacacagtcgagatggtgtccgcatccaaagccgcccgcctggcgaacgtcggcgatgctaaggccaagaaggccagcaagtcgaaggacgacacccccgtcgagtccggtgctgaggaccagcctgccaccaccgacgccaagatgaaggaggtcgagaagctcacagcacagatggacaagcacggcctgtctgatcgtgtcactaccggtgtgctctcgtctatgccgtcctcccgggatgctaagatcacgtccgcgtctctcgtgtttcacggaaaggtcctcattacggactctactctcgaactcaacttcggtcgtcgctacggtctgctcggtgagaacggttgcggaaagtcgactcttctcaaggccatcgatgcccgtgagtttcctattcccgagcacatcgacatctaccttctgaacgagggtgctcctcctagcgacctcggtgcgcttgagtgggtcgttactgaggcgcagaaccagcttgaccgtatggagaagcaggcggaggagatcctggagaaggaaggtcctgacagtcctattcttgaggacttgtacgacgtatgttatcctttatttgatgtttgaagactcgctaacgtgttttagcgcatggacaaaatggacccctccacattccatactcgtgcttccctaatcttgactggtcttggtttcaacaagacgactattcacaagaagaccaaggacatgtccggtggttggcgaatgcgtgtggccctcgccaaggccctgttcgtcaagccctctctgcttcttttggacgaccccaccgctcacttggatctcgaggcttgtgtgtggttggaagagtacctgaaaaagtgggagcgtactcttgtcctggtttctcactctatggatttcctcaacggtgtctgcactaacatgatcgacatgcgcatgaagcagcttctgtactacggtggtaactacgactcttaccacaagacccgtgccgaacaggagaccaaccagatgaaggcctaccacaagcagcaggaagaaattgctcacatcaagaagtttattgcctccgccggtacctatgccaacttggtgcgtcaggcaaagtctcgtcagaagatcctcgacaagatggaggcagatggtttcatccaacccgtcattcccgaccgtgtcttcagcttccgctttgccgatgttgagaagcttccccctcctgtcctgtctttcgatgacgtttccttctcatactccggtaactgggatgacactctctacgagcaccttgacttcggtgtcgacatggactcccgaactgcccttgtcggtcccaacggtgttggtaaatcgaccctgctgcgtctcatgactggcaagctctcccctatcggtggtcgtgtcagccgtcacacccacttgaagctcggcatgtacagccagcactccgctgagcagctcgatctgaccaagtctgccctggagttcgtccgtgataagttccctgagaagtctcaggatttccaatactggcgtcacgagctcggtcgctacggtctctccggtgaggcccagaccgctctgatgggtactctatccgaaggtcagaagagccgtattgtttttgctctgcttgccatcgagtctcccaacatgctcctgctcgacgagcctaccaacggccttgatatccccaccattgacagtttggctgatgctatcaacgccttcagcggtggtgttgtcgttgtgtctcacgatttccgactcctcgacaagattgccaaggacatcatggtctgcgagcacaagactgtccgccgctgggacggcaccattggtgaatacaagaaccacctccgcaagaagatgatttccgagggtaccgtctaaacggggccgttaccttttttctcttttaacgactggcatgctagatcacgatacaacgtgggaaaagaggaaaagttcttttgttgtgtattctctgtctctaccccgggagtgatgagccgtcctggaaggatggatggatgaatgatataggggacgtttatgtcccagtttttttgttgtttgcgtctgtgtctcgtgcttctggagatatctgttttccgattttctatagggtgctttttttctacttaactttagatggcctgtgctacttctcataccttcattcctccatcatctagactttggctcggagattgaattgatatctttgcctt

SEQ ID NO: 17075 - DNA, 2490 bp, Emericella nidulans
agctgcgcggcgagcttcaggctgaaattgaaagtctgaagcaatccaaggacgaggcggtccgcgctgccgaggaatctactagacagtccattgcggctttggaagataaaattacctcgctccagtctcaactgacagcggctgagtccgccactactcagggccaggaagagactgccgctcagcttgcagcaaaggagaatgaagtttctgaactaaggcaggctgttgacgccgcccgagcagagcttgaacaagcaggcgaaagggctgccaaagatcttgaagcaaaactgaaggccctcgaagctggtcatgaggatgcgattgccaagctcaaagcccagcacgatgaggctttggcctccgctgccagctcccatgcgtctgaacttgccaacgcaaaggcagctacggaatcatctagttccgctcatgcgcaagaactcgaggagcttcgagcatctctcgacaaggtcaaggaggatgcggtgagcgagctgcaggcgacccaccaggcggagttgcaatctctccagcagagacttgacgatgccgaacaatcccttcagacaacgcgacaggctctggaagagggcgccaacgccgcccagacccaggctctccaagagatcgaatcgctcaaggataaagtcaacacattggagtctcagctatccaccggacaagaagagatcaaggccctccaggctgagatccaggccaagcaggagcaagctgacacacttcaacagaacctcgttacattcgagaccaagctaaaggcgaaggacgcggagcaggaaggagagatcaaggctgctgaggagcgagctgcagcagcagagagagccctaaaggagcacgttcagaaggccgctgctcttgctgaggaacatgccaatactctagaggcgctgagggttgatcatgctgcggagctcgagagagtcaaggctgacgcctccgggtcgttgcagcaagcgcttgaggagcttcagtccaaatacaatgatttgctgtcgaagaacagtgacatggaggcgtcccacgccggcaagatcgaagcacttgaaagcgaactgaagctgaccatggagcgcgtcgctgctcaaagtgccgctcatgcgaaggaacttgccgaccttcaacaacagcacgaagaagcgaaaattaagctgcaatcagaattggaagccattcagctctctaaggctgccgaggcggactccgagcacagcaaagccatcgaggagctcctcaccgtccaggagtctaaattgtctagccttcgtgcggatctggaatcttcgcatgaagcaaagttggatgaactccggaagtcccacgacgctgctcttgcagagctcaccgctcaactcactgctgcccagactgccgcccaggatacctccgtacttgacaacttgaaggagacaattgccgatctagagaaaaagctcactgcggcggaacagtccgctgccgattccaagacgcaacatgccaatgagttctctcttattgagaaggaaaagagtgaattggagcagaagcagcaggcagcgaccgctcgtatcgaagagcttgaaaaactcttggctgcttccgaggcagccaagtcggacttggagacggcgtcgaagcaggcgattgcaacccaggacgagctgacgcagctccgggccaagtatgatgcaattgccaaagaactagacgagtcgaagtcgcacaacgccgcgactgaggaaaagctcgctcaaggcgagaaggacttgaatgcgcagattgacaaaaacatgacccttctcaatcagttgggtgaggttgagtcgtctatctccggcagccggaagcacatccgagagcttgaagcggacgtggcagcgctgaaggctgaaaaagacgcgttgaagccaaccaacgtcgggttggaaggcagccgatgggcaactgatgacgacacgccggccaccgagaataaccaggcagccacagtggaaggtgaggatatgggttcatcgatcgagggaacggtgggacctccccgtctatgatcgtcttaatctcccctcggagatctgttgtgtgcacaattactgatcctgaatttttttcccacatagatggccagcatccaggaacagcttaaacacattcgggctgccaatgacgactggtatgacgaacaccgccggtaggtgctttcttacacaatttcgaatgccgctgctgactgctgtagtctcgttggcgaactagcacaagtgtcacggcgggcgacgcccaatcctaatcagtctgggacaccgcagtccgaaaccgtgatcgaggttgcctcacagtgagagtatccgtatggaatagccaggttcggccgagctcgttgaattttcccttattctttctctttgtatctgccttgtataggaataggatgtatgtaataaagtgctcaggatacccgattgaagtaccgtcgccgtg

SEQ ID NO: 17076 - DNA, 2675 bp, Emericella nidulans
cgcatctcacccgggcacttctggaggccatcaatttcgtctgcatttaccatccattctcttgcttttatttctttgcttccccttatccagcaatcattatttttactatttaccacacttcagatcgcccgggtggaagaacgttgccagcttgtatatatattcctctgtataatcctctgtatgatcttctgtccgcatagtaggcgacctacgtggacggagagtcagccttgtctacaatacccttgacactcggcggtgcgccttcattgttgttgctcacaccgtcaaccttcctatagcttttcttttctacagccgtgccgcccacttttccttcctccatttctcttcttccctccatactattcaccttgtccggtcctggacgccgcagccatggatcaggaaatcccgcaaactaatgagaacttcgattttaatgtctcagtgttcggatatgatggtgccgttcatggtgacctggaagcttttattcctcgaattattggtccaggcacagactttacatccagcgttggattggcgaatggatattatgaacctccatcgatcttctaccgtccgaatgaaccagtacagacatatctgggccccagctcgggtcaattttggcctagtggagttcatgctcctgccgacaatgtctcgatagcccacagccctgaggtgggttatttcttaacgttatttgcagaagtttcctgatactgacaccgacacgagacacctttaactccaagaagtccttctcatgcgttggctggcgaaccacagctcaccaactcctcatacagccccgcacatccatctcttctcaacagccaggacgtttacagcaggccgcatcgacgcgccctgcctccgaacataccgccggcaacaactgctgtatcagtccgtgacctgagtagactgatacagatcgttcgcgttatttttgccacattaaatgataactcaacaccaaacatcatgcagttgcgtggtgtacaagaccggctccaagaggcattgtccctagtgaatgaattaatttcgccgcaccaagggcgggagcaaaacgcaaatgacgaagacaagaggttccggtgcattctctgcccacaaccgttgttctgcaagaacaaaggaacgttcacgcgtcatataacgacgacgcattaccccagtaaacgttacttctgtcacatttgcaaccaggattcgaaccctacatcgttcctaaggaaagataagcatctactgcatatgaggcagcatggccagccaagaatgagcagagaggcaatggaagaagtgactgagcacctccccccacccgaaaactgtgcaatcaccgagtgcgaacaacctatccgtacctgggaagacttcatcaattgtctttgccgacactgtgcgatacccgacgattgggaccactacaatggatcagatggagatgacggcgatgatgatgataacaatggggatggcggaaatggtgacggtaaccgctatttccctcagtccggcaacgggaattatgggaacacgtcaaacgggggcccatatggtcactataattacgaccagtttggtgacttgagcggacgaagcggtatcaatccacatcagtatcgtggcgtagccaacggcggatcttccaaacaggggggctctcaggtgctggatttgaaggacgtcccgacaggaccaggtcgagccggagtagcacaatcaaagtcaaccttcacagatctcaaggattcgcaaccacacaccaagaatccgtccgcattgttgttcggcaacgacagcctttgtcccgagaccttcagagtagaagtctctctccgccttggcgactctactcgtaaaacctgcagcgatctgggcatgaaagaaccccaggagaagtccagcttcggaaagcaagtagtgtcgatttcagtgaacaacgaagtctcccgggagcttcagaggttgaggtactttgagacctgcatccttgagaatcaaaaacaagggtctctcctgacctatgtccacgaaacgttcgttgtatcgcaacatgggtacttcgagcatgtcattgagtcctcaatgcagagtacgtatatgcgaggaagacacaaggctggccatccattgacacatttgctgacttggcgtcgaatccagggatcttacatcagacggtcgagttcggggtagcgggacagccaaaaattcccgccgattgtctattttatctggctagggaaaaggatcacagttcatctgaagcaaatcttgaagcaacaagacgggcttcgcctaaaaagcgggcgcatctgagagtccgcgttaaagcaattgcaggggtgcttgctttgcgcgcagcagtcactaaggcaccacttgcaacggataacgcagaagtggaggatggctgggagttaggaatcccttacccagcccaggacgacgtgttcaaggtcctggcttggttggtgcaggttctagtgttcttcctgaggatgccgccgaaccccagaatatacgtgatgttagcatgcggcactcttgaagcgcctagaccgcactgaactatccaggcacttggtttcaggttctttcggtctgaatttcggtttatgcaatagatcccgttatttctctca

SEQ ID NO: 17077 - DNA, 2825 bp, Emericella nidulans
tggctatttcagcatgtcagctgtgtcgtacatcatggtggtgccggcacgacagccgcaggtttagcacttggcaagcccacaatcgttattccattcttcggtgaccaggcattctggggctcaattgtttcgcgggccggggccggaccagacccgattccgtggaagagactcacagcggagaagctggcggaggcgattgagatggcgctcaaagacgagacgaaaaggaaggcagaagaaattggggagcagatgcggtccgagcagggtgctcgtaatgcggtttgtagcttctaccgtcatcttgacgcagagagcctacggtgttcgttatgtccaaatcggccggccgtgtggtgggtgaaacatttgcatatcaagctgagtgcgtttgcggcgacggtgctcgttgagacggggcttgtcaaaccacatgatcttgtcctgtgcgtcccttctccttcctttttctgttcataattaatctgggctaggtaccgctcaaaagaatacgatacaagccgcgatccaaaaggccccatcactgccggcgcagaggtgctctatggcgtcattacagacttcgtcgctgctatggccacgatgccagcggatatggcggagatgtttggcgcggaccaccggcatggtcggatacgaatgaaaaggcaccctaagcatggcaggaagcctccgtcgccggtgcggaagtggaagaaggagcattatgggcatcgcaacccggactcgggagtcggatcgaacagctccagtcagagcgatgggcgaatagacatttctgaaaccgaaacagagaagagctctacagttgctgatgacagtgacgagaatagtgaaactggctcgggtgattcctcatcgcgtaccgacattgcagatctggactctacgcttaacccagatgcgcataatgacagaaacaacaataacaacatcgggcttaccgcccatcagacactgagtctagaagacacactccgccggcagcagacacgcgacaaatcaatcgacacccatgaacttttcatggatgctcggtatcatctcgcccgagcgggaaagcacatcatcgactgggttctcctgatcccgacggatctgaccttgagcttttccaagggattccacaatgcgccgaaactttatcatgatccaatggttcaggagacgccaacggttcggggcgttaaaggagggttacgggctgctgggacggtaagtctaaccacgtattgggggcgaaagcattgctgattctgtatgggtatgtaggaatttacacaagagttataccaaggcataactgggattttgacgcagcccaaacatggacggaaagagtctgggacgaaagggatgctgaaaggcgtcggcaagggcgctgggggtgctgtcctcaagccaatggcaggtatgtttataaaatacccaatgtcccaactcatcgtattatactaacagcgtaggcctctggggcctcgccggatacccgctcgaaggactgcacaagacgctacggagcagtctatcaaagagcaaggtccgagacatattggcttcacgcatccagcaaggtctaggcgagatggttgccgccatgccggaagagcgggcggcggtaatcgaacgatggaacaaaatgcaagcggagaaatcgaatgaacgcgcatgataccccgtttttgtgtttgacatatttagagcgtgcttactgtttcttatgttcagtttccgaaactcgcttcctttccttcagtcatacttgcacggcaattgtcgcctcgcgccaattgaagatcctggtgttgatggtcgcttttacacgaacgattttaacgtgaactctgtctcatccgccgggtaatctgcactgccaggcccacttcacgagctatcatcgctcaggtcgcctcgcgccacaaccggtccgaaacgaataccaatcagcaacatataggcagtggcgtactctcgatacatactcaggactgttaaacatacgcaacgaaggaaggcacatagggcccgtctgcctaaatgttactaggtggttgatgggataaccttcgttgtcaatgtggtccagagggtcaaggttgtcgatttcgtgtacccccatcgtctttggctgttgtatgacggctgtcccgctaaccggtatcaaaactcttccatcgactagatacatagaagtgttctgtcgtcatcgtggagagcctgacgcgtccatcgcgccgcctgagtcaagcggcatgctgatggctcctggccggcgaccaagaataggtgactttgatggtgcagcatattacaacgtcaagacattgcattcattgctttgcgagcggttctccgagcaggataccaacattgcagtcacttttcttgtcgggaaacggagacggcagctacgagctgaatcatatccgagacccacagcgaggctcatcagctaaagtagtggggaactgatcgagacaaggcattctgatcctcgatgaagtccgaatagtcaagagtcagagaaccgcgcaacctggacgatccaaccgtctgaaattgttacaagaaccgcaccagccgtcaggggcagatgacgatctgcaaaatcgcagtttggcacgcgttctcgctttgcaactgtgataagaggatccaatagtcagggtggggtgctgaagctagaaagctagaaagctagaactggaaggatgaatgactttcttactgtcgttcctgaagttttatgaagcgagcgcagaggaagatatatatgggcaactacttataccattcat

SEQ ID NO: 17078 - DNA, 304 bp, Emericella nidulans
  unsure (1)..(304): unsure at all n locations
agagccgaaggtttgtcagctcagcttcattttccttggctcttttattattatttcatcctgcttggtaacttatgttttaaccgttgctgatcgntgcgtctactatagttacaatatccatctctgccttgggtccggtacatcacgcagtcgggggatattgctgtccgaatgccggatgtacaatgatgtaaaacttccttttctctttcctttattttaccttctacctacatcacttcacgcgttatacatacagtagttgagctggaattgaaatagatggaccataccttttaat

SEQ ID NO: 17079 - DNA, 850 bp, Emericella nidulans
tgatgatcgtccgtgcgttgtgttctgaatgctgatatcgagcattccaaggcttccatgtctctcgtacaacttgttattgacgcccggaatcctgcctccctttgggcgccagtaacacccgtcccccagtgcaactaaccaggcggtaaatttcctagagttgcacgttactggatgactcgacttcaagaacgattcaagtcaaaagacggcctctggactgagtaagttctcgtatctttcctttcttaaccgctcgcattctggtgttttggctatctgtggtcgagtcgctgagtagcaccacaacagaaagccaatacgtgtgctgatacccttttcttggaacgctgatcgctacatatgtctcagacggcgccactaccctagatgcgactggtgacgagagagtaagcaccgtcacaccatgcgtgctcccgggacatctgagtcccacttcaagtcaatattaatatcgccgaggaaccgtgcgaccacacctccggtttgatggtggcgccttcacgcgctagtcgtgctgacagtgcatacagattcagtcacctgctcggctagccgctttgggctttcacagctgggtctggactctgttggggatatcgcatttgggcccggtgcttcgctgaccacccccctggtcattgcctatatgaggagcttgcggccggccgggcatagagtcgtcccgcgatctttcgactgatcagtttgcgcacaaacccttgctgtccgcgcgtgtacaaggtacggaagaccaggggtgaagggttccggaagcctcgaccagagcgatcatcccttactcggctctttttccaattctgac

SEQ ID NO: 17080 - DNA, 545 bp, Emericella nidulans
agacagaatacgtaccggcgttgcgagggaggacaccggtcctcttgcacgactacctcctcaatcgggactcttcagtcgaatcgctcccactcctggccagtaggaaaaggagctcccgtcatgatctctacgcaggggggaatgctatcctttgcatccctcagactgtctgcagccggatacggccggtcgccggctgtcgtggtagccatgacgttaaacgtgactggcgtctcgggactggcagtctctgttgcagtagaactcaaggcaaatccgtccatggccgaggtatcgtactcgggggtggaaatagggctggtgattctctcagctgcgactcggtcgcaggcactgtagatcgaacatcgctctctctgtaacgaagcatgcctttgggcgtcagtcttgactagccatactgcatcggcgtatgatagagccattttgattttcgatattttttgacgtttttcagtgtatcaaaatcgaactttcgagtatgaccctgccttggcagcttcaaaaatatctgggaatcc

SEQ ID NO: 17081 - DNA, 323 bp, Emericella nidulans
tcgagagtcgagattctactgcgattaagcgtgtcactatcggtcgcaaactggagctgcgcctggactacaccgtgcctacgcctggtgaacatgagctgacgctatacttaatgtgtgacagctatgttggcgtggaccaggctcccacatttacggtcagggctgctgaaggtatggagtaggatgagagtgaggaagaggagtgatgaggatcaagcttttttttgtttggggatttactgcatcagattattgtaattatacggatgactagacctgcgatatacaggacaaacatggccttgtgttatctgtcgtgg

SEQ ID NO: 17082 - DNA, 500 bp, Emericella nidulans
aagtcctcgcccaggtcatgccgatcttgcgcgagcgcggctgggagaaccgcatcgagatcttcattgacggcggtatccgccgtgcaactgatattctcaaagctctctgcctaggcgccaagggcgttggtatcggccgtcctttcctgtttgccatgtctgcatacggccagcctggtgtcaaccgagccatgcagctcctgaaagacgaactcgagatgaacatgcgcttgatcggtgcccagaagatcgcagacctcaaccctagtatggttgacgtgcgcggtctggttggtggtcacagtgcgtctgtgccagccgatacgctgagcctgggtgcttacgaccctcttcaggctccgaggttcagtgagaaggccaagctgtaaagatttttttttctgtgcctctcgtgcagccgacgatgttatgggtagtcgattagatttgtatataataccccatttagagtaaacgtatttattattttacctcca

SEQ ID NO: 17083 - DNA, 253 bp, Emericella nidulans
  unsure (1)..(253): unsure at all n locations
gtggacgttaaaggatctcggggttgaggataagaggagacngtagactctaaaggttacaggtaagttatttgttttttcaattatggtctcaacgctgacctgtaatagaaccccctgcccgacagggcggtggcaaggtcgaggatgtcgatggcttgatttcgaagctcaaggagcttggtgctctgtgattcacgtaaattatagtatgttgctcttaagctagacggtatttgattttcttttgaag

SEQ ID NO: 17084 - DNA, 850 bp, Emericella nidulans
tccgtatgtactgccatcttccaacatcttttctagctgtgtctacccccttccaattccctcttcgagttttctgctgttacattcaaatcttagcttcattcctcgtatgtcttcaatctgatgcgcattgttcttgtgcttttctgtactccatgggaaggcagtctgcaaaaaaagtttgctctgagggtggcatgaaggtaataatcgaatttctctttcagtttcgtgatgctgaataatgctttctgttcctagattgcctgtacaccactgccttgttcgcatcgtctgttctatgttatgttgttcggggtcagtctggattgcctgctctcgctattgcacatggatcaatgcttgcgggtcttcactagcctgtaactgctgggtttgacggcactatttttgtctgtgcttgctttcggagttccggttgatcgcataccgtgtgctgacctgtcaatgctgttggacgtatgtcgagcacttactgagcaaagtgaccatatgagctacttctttttccatgtccacttgaggctttttgttacatcttcgaatatcggcaaccgtcttagtgcctgtgtctttcttacggatgattcccctgttcgatatgcagagagctcccttcgttgtttagcgccggcgccttcatttgtgttttaaaatcacgatagcgagaccggtatggcgtcacgcaccgggttgttctgggcgtattgatcttctacaagggtcaggtttttatctgtttctgtcttcccagtcgggatcacgttctgttcatagatagggttcgtccaacaccaagccacaatacaatgcgagactgcttcgccta

SEQ ID NO: 17085 - DNA, 850 bp, Emericella nidulans
cttcattgcaattttcgcagacattgcaactctggcaatagcttacgacaatgcaccgtactcgaagacgccggtgaagtggaatctcccaaagttatggggcctgtccgtcatactgggtattgttctagccgtggggacatggattgcactgaccactatgatgaacgcgggcgaacatgccgggatcgtacaaaattacgggaaacgcgacgaagttctcttccttgagatatctctcacggagaattggttaatatttatcactagagccaatggcccgttttggtcttctctgccgtcatggcagttggcggcggccatttttgttgttgatctcgttgcaagtttcttttgctacttcggctggttcgttggtggacagacttcgattgtcgccattgttcgtatctgggtattttctctcggcgtattctgcgttatgggaggtgtctacttcctgctgcagcgttcccagacttttgacgacattatgcacttcaactttctccagaaaagggactctgtatctcagcgtgttcttgatgatcttggtaagcttctccaaacagcccttctaagggtccgtgctaaatatgattctagtcgtggctttgcaacgacgatcagaacagcatgagcagagttcgagaacagccgagagggaggacataggattatggaagatggacaaactccgtaaagaacgcgcacagtgttgatgatagatgagtactatgtatggcgtattctattgttatgcatctcgtacatcgagacctcgaaacttgatgataggaacactggcatctgtaagtcagggtactaaaatatagaatatccgcactat

SEQ ID NO: 17086 - DNA, 850 bp, Emericella nidulans
tgcgggttctaactcgtgcacgaaaacagggagaagatcctcttggccgcccgtatcatcgccggcatcgacaaccctgccgacatctgtgtcatctctgctcgtccttacggtcagcgtgctgttctgaagtttgcctcccacaccggagccaccgccattgctggtcgtatcacccccggtgacttcaccaactacatcacccgctcttttaaggagccccgcctcatcgtcgtcaccgacccgcgcaccgatgcccaagccatcaaggaggccagctatgtcaacattcccgtcattgctctctgcgacactgactcccccaccgacttcgatgatgttgctattcctaccaacaacaaggtcgtcacgccatcgtctgatctgtggctacttgcccgtgaggtcctccgtctccgtgtaccctcgccaaccgtgaggttgactgggacgtcgttgttgacctttacttctaccgcgaccctgaggctgaggagaacaaggaggttgctgaggagaaggttgccagcgctgaggatgtcggtgccggtgccatcgagtctgcgttcgctgctgagagctgggatgctcagggtgctgctgcccctgctgctttcgcggctgccggtgctaccagctgggaggctgacggtggtgactgggctgccagctctgtcccgcccctggtggtgagaactgggctgaggctcagcctgccgagggtgccaagtggtaaaaagctgcttttcaacccggctatatcgggacagttgttgggagagtgtgaagagaaggaaaatcaaatatattcccctggcatgtcaatcctagcctctgttccgcaaatact

SEQ ID NO: 17087 - DNA, 760 bp, Emericella nidulans
cacagtatatggagaagcgggtattctgcgaactcaacggcaaccgcaaagtcattggcgttctacgaggctacgatgtacgtcggaccgaactctgtgtattttatctcagcttcaagaatttcgcgactcaggtcctgggctactcctagaagctatcgatacgcgatgacgggaataaaagctaacggagcacatcgatcataggttttcatgaacatcgtcttagatgaggcattcgaagagaagccaggcggagagaaggtagctatcggcatgattgtatgttggatgcgcttcctgaccttggactggagttgaactctatacgaatttgaactaatctgtatcacgtacattttctaggtcatccgcggcaattctgtcgtcatgctcgaggttagtcctattttatctcactctctctctctctctctctttatgtcttgcacattcgcccgactaaacaactgactcttctccactctacaggctctggaacggataagcgagaaatagacccaaaataagacaacagtggaggggggagacgttaggacatcgacgacttgcattttataccataccatatcctgcgatgtatgtgggttgcttcattaagagaaaaaggagttcacgattttggactgctcgcatggaatccatcgaaccaagcaagggcattacgtctgtttcatatttacttttattatgttcgtttacgagagggatattagctaagataagtctttcgatctgt

SEQ ID NO: 17088 - DNA, 850 bp, Emericella nidulans
gaaaacacaaacccagtaaatgtgattttgtcaacctcatacagcaatttcacgaaatactttaatgattacatggactcgagcaatatgcagataagggacgagccgtgggtctttgaaagcatagatgtttcgtaagtcgtacttgctgcctattctacaagcaccagggtcagaaggaattgctaatatacgtgtgcgacaatagtcgccgcatgtatggatatgaaactaccgatcccaatttcaatttatccatggttgagtccaccggggctgatacgccctaccgcgtcaccggatcatcctcgggtgaagacaattctctccaaggactccagacgaatatgagttcctgcagcaagatagaggattggtggggggtgacattctactcagggatcgtgatgccggcgctgcagctaacgtttgatgcgcacgcggcgagtttcatgctcgcgtctggtgctgtgatgaatacattgggtactagcaatagcgacgacgacatgccgcagctggctggtcggattgcggtggagtttctgggaaggatagacgaggcaaggtcagatgttttggtgtctccagggagtgagggagaacccaggtggcttcggacagtgggctttgggaacaactcggcgaatctggattacagtcttgagtctgcggcttcgaacccggtaacgactgggagtgctttaattggtgtgctgggagtggtgggatacctgcttttgtaggctgataaacatttcttgccaggttcatcgattagaccatctataacggcctctgtagggttagctcaactcagatctagctagcaattatgtcttcttcacat

SEQ ID NO: 17089 - DNA, 850 bp, Emericella nidulans
ttccacgctctccggttgttgagctgtcgggattgtgacatcacagccactctcggtcaatccgacatccctgcacttcgcgatacaaccagatctgcgcgtgaaggggcttcttaatagttcgccgatacgcatacctacacttcatctccactccttaaactttcgaggtttcatgatgtctgtttctacgcttgcgcgggatactgccttccaggcgcggtctctggtaagtgcatatgccgattaagcggctggtggaaactaagtgtaccgtacagtttcgctctctgcttcgtcagtcttctcagttctcaaactacaattttcgcgaatacgcccttcggagaaccaaggatgcttttcgggaacatcagcatgagagcgaggaacggaagatacaggagttaatccaggaaggcttgcaaagtttgagaatgatgaaggttagtcttgtatttctaactctaaagccctctgcattcggagccgtgacaagtggtctcgggctatcccagcatggcggacaatgctaacgttagatttagaggcaaaccgttataagccagttttaccaactggataaattggtcgtagagggtcagaagacggtaagggccttagatcttaagttctcccctcaagtttgagtctaacaatcctgataggggaaggaaactggacaagaaggcggcattgtccgtcagaaggacaccgggtaaggcctaatctaccgtgtctctgtcctagcagcagctaatcgtcatggcagttgggactgatttataaaaacatatacctgttcggattacacgaaagctacttttaaagccgtggacctacaccacag

SEQ ID NO: 17090 - DNA, 500 bp, Emericella nidulans
ctagctgtcggtctctggcgcaacttcgccgagctccgcgacatcaaccgtgccgggggtacagtcttccgcccgcagacgagtcaggacataagccgcgagcaattttccctctgggaaaaggcagtgagcatgtgtagagggtgggttggcgataaatcgcacgcaacggagcacagagacactgaggggaagcctactcagaaggtggatctgagtaacggtcataagggggttgttgacgcggcttctgccactgcccctagcaacattgtgtcaccattgttgtcggcgaaaatgaatggggatttggtgctatcaaagggcacgccgtggattaatatctcgggggatttggaggatgctgatgatcaggacttgtttctggagttgaggaagttagagattttacagaggctgaagaggttgggtaaggttaaggttacctacttttgagtttgggttcatacttagggttatttctcaaccttgaattcgta

SEQ ID NO: 17091 - DNA, 850 bp, Emericella nidulans
tatcccgcgcatatgaggatgatcagagaatgacaagttctttatcaggatacgccgccttccgcaaccaagaccggggcttctggctttttggccggctatactgggaccttgacccgtacacctacctagcactgcgagtcaaatccgatggccgtcgctatactgtgaacattcagaccgacaccatcgtcgagaccgatatccaccagcatcgattatacacccgccaccaccacgtgcggaactccgaatcctcatcctacgatcccctttcaccatacgcatcacccgaagctgcagagtcgcccgaactcgccgaagccaaatatcccaccggaatcccgcctgctctctccgacgttccaccgccatccactattatgtcgtctatgtccgcgacgacatctggttcgaccggatgggagacaattctgctaccattcaactcctttgtccggactaatcatgggcttgttgtagagcctcagacttcgatcatcagacagcgagtgaagagtgtgggcattggtttaaccgatcgggtcgaaggcccttatgatcttcgcatacatcgtatctgggctacaaacgggatgagtgaagccgagattgaggaggagcgtcgaatttgcggaacagctgccttacctgttgatgagggtgtccgaacggggtgggttgcatcggatgacgccaaacttgagaaacatgggaagcaagagcacaagccaaaggggctgaaggggctacgcgatgagtgggactaagcgactgaaaagtctcaggattgtacagtacacatataccattatattttccaatataagaacacaaattacgaaactca

SEQ ID NO: 17092 - DNA, 403 bp, Emericella nidulans
cgcatccgctcctcaagtcctattcacccccttctgcgactccagcccagcctgtgcaaccagccaagcaacgttgcgcttgacctccccagacgtcttgcttggacagggatgctgcagcaggtccttcccgtgctaaacagcggcgaaagcactagtactaccgtcggcgtcacgatcctctgccgaggtgagtacgaattcggcgccacagttgaggaactacgactgctacgtctcccatctgaaactgaggggaacaaaatcacctcggatgatgcgtctacacccataccgtacgaggaagggtttatcacggacacctttggcgcggacatggcgaagaaacgacggatctggcatgccagagatacgtgtgttatgactgctcatgattaacggc

SEQ ID NO: 17093 - DNA, 850 bp, Emericella nidulans
tgtcgggctctatgggccctcgccgctttcgcgtgataaatcaattgcaatgactcttcgggattgtacaatgtatatcaaggtgattacaccccttggaacctggaaatcactccaagcactccttagtcctacactggagaaggcatgcagcggtacaactgtctactaacggtttgtagatgcccagaagtgagaagggccgcgtcgaaatccgcctcggcgatcttgatctcaaaaccgccggcgggggcaaagcccagtactggctagaactagagcatcgtttgctcagcgagggctggtatatgggcgctaaaaaccatactcgttcatgcgactgcgctctgcagagtccacgaacgcagccacctccttctatgtgagaccatggctttttccttgctcttgaatcctatactctacgttcacggtgagcagaaatctaatggggactacagcttatgtgctggagttgcatatagtcttcatgccacgaaagttaaatgaccacgaggatatcaacgccatcgtctccaaagttttgtgattttctttctttcggcgcttttcgttatggatcacgtcccttaggccctcgagtccttcagacgtcatcgcgagtctggtttgattaggtgttcggatattgtgcagaataccctgagttcggttcctcttcacgctgcttttatcagtgttccgttttactagtaatctcatggttgggaggtattctgtttgatttgttcatacatactgatggcgagcaatttcggcacgggagcgatatttcggctgtctagggtagatcgagactttttttttaaataacagcaattggttacct

SEQ ID NO: 17094 - DNA, 500 bp, Emericella nidulans
gcgttctggttctggaggaaaaagagacgtggtacagatgggaagggcgggtatgcgcccggtcacgggacagggccagccacagaaggcgagtatgggtatcagcagccgacctcgccgtaccaaggtatgtttcctctctagttgcagttgacctgggtccccaggtcgaattcggcactggtactgatcgtctgttgtagactcgcacttctccagcccaggccaaaccaccattagcgcaggggttaagtacccctctggctcgacattcagcccgtcgctgtcgccgccaatgccctccgagggcgggcgcccgatctctgagatcagcgggagtgacgagcatttccgacaccagtcgggcccgaaccacgggcttggcgtatttgcgaagcccgacccgatcccggaactcgatagtgcggcgaagccgcccgaggtacatgaattggatggattcagccggtcataagtatcttgtcaggagctggaagagt

SEQ ID NO: 17095 - DNA, 156 bp, Emericella nidulans
acaaaaagcactcctagcgttgatggtcaaagaaaaatgctgctagatctgctctattcatcaggcaaaccctattcgcctcgcagactcgttgttgtacgcagtttgtctctttagaagtattgaagttgtgggatgaacccacagatattctcc

SEQ ID NO: 17096 - DNA, 643 bp, Emericella nidulans
ccttttccacgttggcggatggcattgaacaaggcgcacggaatgtactgacgtctgggtcgacggctgcctctacaatgattggtcatcgctacggagcggaggccggggcggtcgcctccaatctgacaggaggtatcaagaatgtggggttagtttatattgacgcctcgggagttagccgcaaggcggttctcaagtctgttgctaagggtatgatcgttggacgcatgaagaacggacagcaagtcgttgttggctcaggcgacggtggagatttgtccccccccgggccgggtctcagtccggtgggaagacgcccatctcccagcccaactccgccccctgcgtacggcgctccgggcacatactcggtcggcggagcaagcatgtcaggcgggaaacgttgaagctctaacgtcaacacataattgactttgttttcttcggttttacggttaattgttcacttattcctccgttacatagggcatactattctcgacgagttacggcaggctgtcttgtcttcaaattacttttgacgtatgcacgttcttgctggaatttgtgatacggtaacgataccacttctgggatgtgagagctgcagcagcactttaattgataaagaatataccta

SEQ ID NO: 17097 - DNA, 850 bp, Emericella nidulans
ttatcatcccaattaatccctccagcattaagaagttcttcgtcaaattcattcaagaactcttcaaagtcacgtctcccttgctttattgtattcactcgtacaagagcctttctctgtcggtcagggtcaccgaaggccttgtctagtaccgcggagaattctgcccatagcacaggagtctcagatttctggcgagccaagagccatggtagcacacgctggctggcttttcctctcaggcggctgtaggcatagtaaacttgttcctcctctgtagggtagcaggcggcgtcgattgcaaacttcgtacgaaggttcatctggaaaggagggtagtccttagggtcttctccagtaaagggttcgacatccgggtgacgaggacggggatagcttcgttcgtagggggtgggcgttgcagatgtaactgtagtagtaactggtggatggtttctcagctgcgagttccgtacggcctgtagttccgcccgtaagctgttattctcttcttggagctgttgtttctgagtccgcatctccgtacggagctcctggagctgctgtagcaacaatgtgacactttcttcttccattgtcatagtaaaaggtctcctcatactattattgagattagtgagcgattcctaatgttaagggacgtatttagatggatcttcctatctagacgtgccgtacgtacaagaaggaatcgctaaagaagaaaggagaaagaaggattgttgttgtgaggaagtcttgtaggtggctcaccgccttcaggacagcgcaggccttggccgagtcactaaggtctaaggtccttgtataggcaaaggacccataacac

SEQ ID NO: 17098 - DNA, 850 bp, Emericella nidulans
ctcgacacaagcaagcacgagcggttcgaagaacacgccgaggtcatgcagcaggaattatggaagcgaaatgccggacacatgcagcgccaggactcatcagataccagctccgagagcccacagtcgcccgtcatgccgtctcaattttcatatcccttttctgtgcgcacagtaccagagactccgacaacgatcagcccgaacacgacgctgcgaatagacgtcccgcaatcagcgacgaagagtgaaccgcagatgacatcgccaaactccatatacaccacagccgtgtccatgccgcgagtggtcgacccgtctgagctgcagagcgcccaaatagcaaacccgcagtggcccagccctggctttggaggctacgacgaaatggacctgatgtctgggcaatataatggtctgccatacgaagatgcgatctcctcgccaatgttcaatcgtccaatgccaatggggtgcctgataccagggtcatacgggaacttggataacaagaacgactttgaggatatcaaccaatttctgaacacacagttggagattacgtcgtaacgctccgcgccatggcaacttggctaagatgaatgtacgattatcactaaatgggttcggtctttcaggatgcagcttgggtttcggcaagtcttctttacggtgttttggtgctggtgttggcaaaatacacggagtttcttgacatttcgcggtatcttctttcctccattctctcctcctttgcttcgcttcgatcttgccttgctacgccatagagaacgagcaccactaccaccatctttaaactgaacgtattaatggaatttcgttgtacaac

SEQ ID NO: 17099 - DNA, 500 bp, Emericella nidulans
tttgagaaatatctatcaagatgaacaacttcgcacagttcggctcccacctctctgaccaacatcagggccagcagaccggcgccagcggcagcaggactgggtccgctagccagacagactatctcgacaaaggtatctggtcacaaactaatatcaaaggccgctggctaatgaacgcaaggctcaacgatgccgagcagaaatatggtggcaagtactaccatgcccaaaaggagaaaccctgccaacaagaagatcggctgcagggtcaagggcaaatttcatgacatgactgggtatgtcgatatgtttgaatgctgagaagcagtctgctaactcataccaggcataatctgcccggagctcattaaactgaaaatcttgaagtgatgtgatatgacctcttatatgatgtattccctggtgcatgactgcactagacatcttgtaattaatgcgtagtacggtctttctttatccaatacactacacagagc

SEQ ID NO: 17100 - DNA, 500 bp, Emericella nidulans
tgtgtccgtcgctagcgctgccactggcagctcaactggctcggactccgccacgaccactagctcgggtgtcgacgctgacagcactgatgactccgactcggatggtaagctctcttttggcaccgtgtctcttcccgccacaagtcctgacctatttttagattcgagcgccaccagcaccaacggcgacgagggcaaccgcgaccggctcggggcgacgagccctctggcactaacgctgccgccaggctcggtgtctctgctgctggtctggcaggtctcctcatggccgcttgggctctgtaagggccttgccgaagcaattcagtctggtatgaagtgcggtgctgattgcacgattcacgggccatgcaaggcattaatggtttggatggattggaacgttgtctgatggttatctacatagtctttacttctactctctattctactaatcactgatcgataccataataattgagttaattaaccctgta

SEQ ID NO: 17101 - DNA, 500 bp, Emericella nidulans
agatatatggcggtatcttacaatactctggagcgccgaagctcgcacaagccggacgcatacacaaatccggattctttgtgctgcgggagacatctgattagtgccctgggactcgtccagcagcgctccaatttctgaatatggagccttgagtttatcgagtccgagttcttcgtgcagtcagttacatctccgctctcctcccatttctttggttctggccgatgcgcacattcctattgtgttcaagttttgttgtgcgaggggtcagaaggtgaaccatggaacgggctcggatgggattttggacacaatctatacagcaagtgtagccggatcaaccgcccgctgcgttcgcgacgatccgatgagcgaataccggaccagcaagtcatggatcttgcttgatgcagtacaataatggctgcaatagataaccgggagtacctcggaatgagagcctgctgtttaaaactcagccacaagcgcactgttgt

SEQ ID NO: 17102 - DNA, 266 bp, Emericella nidulans
ggaggaaagatcaagaacttcgtcgtcgcactggtatagaaagcaatggtgcaggtcaaccgacacccgaaacacaactcaacaactctccaactgcattctagagtatgtatacagctttgctatctcgccaatcggacggggacaacacagtgatgaatttgggagaaaatcctgcgtatgccttgcgtcacatttactcctcgtcagggtagagttcctcgcgaagaggaacgccgagctcctggcggagaccctcaagtgcc

SEQ ID NO: 17103 - DNA, 839 bp, Emericella nidulans
caccgatgactggttccatgttggtggcgacgagattcagcccaactgctacaacttcagcacctacgtgactgaatggttccaagaggacccctcgcgcacttacaacgacctcatgcagcactgggtcgacaaggccgtgcctatcttccgcagcgtcagcgactcccgccgcctagttatgtgggaagacgtcgtcctcaataccgagcatgctgacgacgtcccgacagacatcgtcatgcaaagctggaacaacggcctcgaaaacatcaacaagctcaccgaacgcggctatgatgtgatcgtctcctccgcggacttcatgtacctcgactgcgaccgcgaaggttccgtcaccaacgacgacagatacaacgagcagaccaacccagaccctgacaccccgagtttcaactatggcggcattgacggctcctggtgcggcccgtacaagacatggcaacgcatctacaactacgattttaccctcaacctcacaaatgcccaagcaaagcacgtcatcggcgcaacagcaccgctctggtccgagcaggttgacgatgtcaacatctccaacctgttttggcctcgggctgcagctctcgctgaactcgtgtggtcaggcaaccgcgatgcaaaggggaacaaacgcaccactctcttcacccaacgaatcctcaacttccgcgagtatcttcttgccaacggcgttatggctgctactgtcgttccgaagtattgcctgcagcacccgcatgcttgtgatttaaattatgaccagacagtccttcactagtgtagtctctcgtatctttatactcatatcaaatgcattc

SEQ ID NO: 17104 - DNA, 850 bp, Emericella nidulans
gcttagcagagaacatatcggcaatcacaccgccagcattggtgagtggtgacgaaccgaacgcaccggcaaagaaacgaaggatgatgagggtccacgagttcttcgcgccggcgcatccacagttgaaagccgtaagagccatataagtaaaaaagtagacgatctgacgaccgaacatctcactcagcggtgcccagagcagaggcccaatcgcgaacccgagcacgaaaagcgagacaccgagcgttgcaacctcactgccgatgccgaactcgacctggatttccgcaacaccaccagtatacgccgacgagaccaaagcaacagccagagtcgcaatcgcagcaacgcccgtcaggaaccatttcatcatcgctgagaactccatcggatttcgagggtcgttggggatccagacgacaacatatgggtcctcctctgtacctgatccagcatatttgtgatcgacgacttcttgcgtgacgatgccctggtcgacgaccaggcgccagaacgggatctttcgcggggcgggcgcctcaatgggagacgtcccattgggcgctccatggtcgtaggccatggcgagagcttgcgagcttcgattgacgctcagcacttcagggcctaggggtgagccgaaaaaccggaacgggtgggtgcagctgtcaggccagcactatagagagctagttctattggtgaggtgagcgaggggttcgtggaggacagtccagagtaacacgggtgtattaagagattccggtgtagataagcttttatgtagatgaatgcgtaggtagagcacgaggcagatatttcaaacaaacaggtctatctttttagg

SEQ ID NO: 17105 - DNA, 850 bp, Emericella nidulans
acgtccggggttgtcatttctatcgtaatcccgatcgctaacatctttcgctttagctgaaagagcgaaatggtagcaggtatgttgtaatggccttctcaatcggcctagtgcgagccgctctctagcgacgcggtcacctcaccgtccccgaccatcactagcctgtcgcatttgatgctaacttcgaatttctatcacagccgccagtctatcaaaaaatatgtgctggcaaacaataagctggctcctgcttctcagaacgcctttgacagccagttcaacaaggcgatcaaggctggtgttgagaagggcgatttcatccagcccaaaggtaagccgtccctttgtcgcgcacccctcaaccatcactttatcaacgatctcaatccgagttactcgaaataagccctttttacgccagcatacgtgcgttgaatttgttatcgaacatagactaagtagtttcttaggcacctctggtcccgtgaagcttgccaagaagcaggctcctgctaagcccgctccaaaggtaatcatatcgccgtcgtgaattgtaggactgtgttgctgacgccatttagaagcctgccactaccactaagaccgctgcgcccaagaagacagccactaagaaggcggacaaggccgagaaggccgagaagccgaagacgaagaaaaccaatgctggcgtcaagaagccagccggcagaccgaaggcgaacaccgcgaagccccgtaaagcgagcacggccgtaagtctttattgatcatcgcctttgaggattgttgcactaactctgaagaaggcaccggctgttgttgacaagcccaaggtcgtcagcgtgac

SEQ ID NO: 17106 - DNA, 500 bp, Emericella nidulans
atccctaatcactgtgctttaccagtccaacgtgcagaacctgcaggtagaaactgctgccgggtatcaagatatcgaggccgacgatactggctacttgatcaactgcggcagttacatggcacatctcacaaacaactactataaagcgcccatccatcgggtgaaatgggttaatgcagagcgccagtccctgccattcttcgtcaacctgggatacgacagcgtgattgatccatttgatccccgagaacccaatggcaagtctgatcgggagccactctcctacggcgactatttgcaaaacgggctggtgagtttgatcaacaagaacggccagacctagaagcgaggggtgtggaactagcagatagcacctgtggacgggagttggatttagcattatccttttagggaattgagaactaagaagaagcgagttcgagaaaattagagaggcgctacaccattttagctagtttaattcttctacattttgt

SEQ ID NO: 17107 - DNA, 106 bp, Emericella nidulans
aatccaaaccagagtggcgtactgatttagcgaatatggcgttggcgggcgctggtccaccgataatattgcctttctactctattcaatctaattattaccttca

SEQ ID NO: 17108 - DNA, 500 bp, Emericella nidulans
cgcaacaatctccttctttctgctgtcacgggtcacatcaatagctggtctctatacagctgctactttccttgccgtgacaagtgcgtcagttgtgacaggattgaatgcgctcgggtcactggaagctagggaggaggagaggggcgttgttttgggacggctgaggagctggggacaggtcggacgcgcggcgggaccagtgctgttttgtactctgttttggtgggttggaagggaggttgcgtatttgactggcagtgtggttatggctggggtttgtatgggtgtgtttttagggttgagggcaccggctgttcctcctgctgctggtgaaggaaaaccggtacgatgactctattgcatataccaaggcttattgttctgtgagcctgggctaggtatgtacgatatatgtcctatgctgttgtatatggtatacatagtctctgattagagcaatgttactgctgctgctggacagtggctgttgtacgtga

SEQ ID NO: 17109 - DNA, 850 bp, Emericella nidulans
agagtcttgatattctaggacacgaagacgtggaagcgctcagccgttctgctttaattcgaatggctaaaggtctcggtgatctggtcagtcagatggtcgaagaactaaatgtcatccgcaaaattgaagccgacatagtaaaatctgaaaagtctcgggttagtgagatggcccaacaactggttgagatgccaccgatcgaggaactagcgatgccgagaactggactttggacacgacccgcgctcaaatcatgagagacagtccaaccaaccaatgctatccataatcccgctaccaccccccctctttcccgtggggtgtgcgatagccgtgtccttatcggttaaaaccaggggacagaacctgtttttactgttctttcggtccttcatgataccaccacgaaggtgcgccctcagttgcatttaaggcaggcgcgcggtctaccagagttctagtctaaaggattcaggctcaaaaaccggttttagaacatctaccattctgggtatttgccatgctcatccatcgtggtaggtggaagactaactgtcgaactgtacaactgcgcacgaggtgatggtctcaatgttcaaatataaaaccttgtaatgcactgctgatttgagtcgttctatctgcacctcgacctattcggttgaaaccttttgtgagtcaggagagacgcgggcctcacatgccactcagctatgtgaagctgtaaagattcgccagagacacactgttgtttggttaacatctcgattggacggtttataatggacttggtttattagctctgggactccgtatataggataatgatcataaatatgatcataaa

SEQ ID NO: 17110 - DNA, 500 bp, Emericella nidulans
gaatcatatactctctgaataaataaaaatataaacaggttagagccaggtggttaggcgtcttgtttgggtcaagaaattgttatgttcgaatcataataacctgaatataaaaagtataaattgaatatctattcaataaaggtgatatatatcatatataacttgagaaatcaaggctagtatataaagaaactattatggataattagctatatattaaagaaataaatgactagataaatctaggattctaagaaaaatcaagtaataaacgaagtgaattgaaatatcttagtaactttaggaaaagaaatcaaacgagattaatatttagtgtaaactaaatattaaaagcctaataacaaaacttgttaagtaaaatggattcaaatctgtttgaataaaggggaaccttcctctaaggctaaatataatatataagcgatagtgaaaagtaccgtgaggtaaaatttgaaatagtagttttataagcagct

SEQ ID NO: 17111 - DNA, 674 bp, Emericella nidulans; identical to SEQ ID NO: 84
  unsure (1)..(674): unsure at all n locations

SEQ ID NO: 17112 - DNA, 850 bp, Emericella nidulans
tcaattaactaatgtttggtcgcttcagtaggaagcattctatggacgtcctgttattgaagcagaccgggagctcgtagagaccggtagtgacgacatcctcgcaaatgcagacaaggtcgacgtagccttcctcgtggtcggagatccctttgggtacgctttaaatatcccggacatggttttcgatattaactcgatccgcgcatttagggcgacgacgcatacagacctcgtcctccgcgcgcgcgaattgggcatcgaatccaaggtcatcccgaatgcctctatcatgtccggcattgggtgcacaggtctccagctgtacaactttggtcaaacagtgagcatggtctttttcactgagacgtgaaagccatcctcgtattatgatcgagtgaaggagaacgtgcagattggtctccatactcttgtactgctcgacatcaaggtcaaggaacagtcgctcgagaacatggccaggggtcgcctgatttatgagcctccgaggtttatgactgtcgcacaatgcgccgcccaaatgttgaaaaccgaaaagaaacgacaggagggtgtttggggcccagacagccttgcagtgggagccgctcgtgtcggagctgaagaccagaagcttgttgcaggaactctacaggaactgactcaagtcgacatgggccggccactgcacagtttggtcctcttaggacgaagagcgcatgatctggagaaagactatattcgaagattcgccgtagatgaggcgacgttcgatgcagcttggcagaatggtaaatatggttccagctaattttgaccgaaaaacaagatgctataatatgaaataatg

SEQ ID NO: 17113 - DNA, 850 bp, Emericella nidulans
tcgatacctgcgctcgctaacttctattcccacctctttttcttcctgggcgagttgatggactggtatgcgaggagattcaagtgtcgactgctacagagtctccacgaagacatttactctgatttccgtaacctgatattaaccgtacagagtagcgcgaggggatttactcacgcattcgttgatgcacccagcctcaacgacagtggctgcgatgagactgatacagtgatgcagcatgctgacctgtatttgtgggaaaatgctaggctaagccaattaggtcgacgaaacatcgaaaggcgattcgcggctcagaatgccatgactcggttgctgatatgggagatccagcatagtgcagaccaacgggcacagttgagagacgaaagaggccagcttcttgtgcagatgttcgatatggcgagcaaacaattacgctcaaatggccaccagcacggcgctatggttcgcttgacgacagccgctgggcaagactcacgtgagttaagatgtatcacttgactgatgacatatactgattgatttctcaagttaacaacattacgttggccgaaaaacagaagcacaagtacacccgggtcgaactgcagctaggctcagcgcaccttcaagactactttgacattgacgatcagttggcgagctatgaacctacagatgtgatggtggaggaggatgtcctagatgcactaaaacaatggtcaactgaaacttatccacagatcctgactctgggaagcgtgccagagtccgcttgcgcaagcccagtcgctttggtatcagcttgttacaccaatctcgcgcgaaatgcaaactccccagt

SEQ ID NO: 17114 - DNA, 525 bp, Emericella nidulans
ttgacatatctactccaattctcgctgggtgggaattcgaagactctcatgtttgtcatggtcagcccattacaagcccatctctccgagactttgacgagtctaaaattcgccacgaaggtacacaacactcacattggaaccgcgaagaaacagacccgtgtccgtgatgtttagactccagtcacttatacctatatccacttttgattcctttgctttattgcgtcttggccgctatgaccctggccctttttgatgtttggtgtcttgggcgtatcgttctccttcccctcgttttctctgtcttttggagatgttgccctcatcacccttttatccttgcgggttacttcgtttatacacaagcgcgcagtacactacactactgtgctttgccgttgtgtatgggttgatctggtttggtttggtggatggattccggtttggatttagcttgatgatagttacctggttaaattagtagtgcctgctgaacagtcaatgagtacaaagctgctttgt

SEQ ID NO: 17115 - DNA, 171 bp, Emericella nidulans
cgggaactataagccatatgactgattagcccgggatcaaggtggaagaaaaggatttgtcatagacatgggatgggagaagtatagagatctttaatgctgtcatgtttgttttaacaagggctttcttcgcgatatcatgaatataccacgcaaccatgcatccacaac

SEQ ID NO: 17116 - DNA, 500 bp, Emericella nidulans
gtgcaatcgcccatccccccaacaatatctacaaccccgtcacagctgcaacgacaaatggcgcagtcaactctttcgtcgtcgggagtttcaggatcatcaccgggcgcagcgcaaccgcaaccgcagacgcaaacaattggcactgcgctccactccatactcccgaatttattccccagtcgccggacgcctgtcattgcgaaaccggtgctgcatggagcgcaggtgccgatgtccgcgcctgtggaggaggtggtcagggcggcggcttatggggatggttgggtttatatcgtgattcggatgatggggtgatccgcttcagattcattggttctcggctctcagaacttttttctctttcaaggttatactgccgtggtgctaggatagacaagagaagcacgccgataagcggggaccggtgtctcccatattctgtagattgatactgatagtagatatctattgaacacaaactgagaatcagtataagt

SEQ ID NO: 17117 - DNA, 500 bp, Emericella nidulans
ctcggcttaacacccgctttgtcatttctcagtatccctggtgacatggtggatgacacattcttcgacctgctttgccacatttgcattcctacgctggaggtgcttgaattcggatggccaagtgaagacccgacaatatactttggtatagagagcttgctcggagcgcttgagctcggccttccgaacctatatgccgtgggcttcgccgaggtgttcacagaaaatagcatgttggatgacgacgcggtcgacgactttctgctcaaccgtgcaaaaacgagaaaagcgcttgaaaactctaacaaacccactctgaacatccagccgggcgtctattatgtctaagacttatctggttgtttcgctaatgggtgcttcctgatcacttcttgccggagaagggcacgggttctgatgctctaacctggtgttagggttgatagggacgaccactgaaactttccgtatagcaatatactattaatgactgttca

SEQ ID NO: 17118 - DNA, 500 bp, Emericella nidulans
gccaataatgtctctggtcagacaaagcgagccattgccaacgccatgcaaatttccatcggtaatcttggagctgttatcggaacacagctataccggacggaaaccagtccccgatacttcctcgggcacggattttctttggggtacctcgtcgcgaatatcatcgtggtatatattctgtggcaggtcctcaatcgggagaacgccaagaaggctgagatcagggaacgcgacggcctcctgccattgatgggtgatattggtgacggtgagggtgacttccagggagacaaggatcctagatgggttttccagacttgaatcgaaacgtcttgagtcttgcttttgcttttgtaatggctgttcagaagacaaccctcaaaattccattggggctttgtgttgcggatttgactttcgcagcaaagctgaaaagctgtttgcagtagatacccttatttagctaggtccgttaattgaactctcgtaggtaatga

SEQ ID NO: 17119 - DNA, 850 bp, Emericella nidulans
gttcaagtcgatgctagacatcatggatgaactacatagtgacccagtcatccgcaacgcagtgcagctgacagatccgataaataaaatcagtgacgggctgctggccaaggtccgtgacaagctcattccgtatctcgctcagtactgcgtcagtcccacggaagaggagctggcacagcagacaacagatatggtgcacacctgcgcatacatggtgggtgcagcccagagccctggcaaagtcgaagcattggactttgtcatgttgcatacgctcaccctctccatcttctacacgactttcctggcgcaagactggatctcaccgtcgaataaagctcggctcctgcattttaaagtttggggcgatcttgtgacgtatgcaggctgtggatgtcctaccctctacgcagaccgcattaccgggtatacgcccaagcgaccagctgatggatggatggagctagcgcatcgcgcgtcgatctacggcgacgacggccatatttcgaaggtgacacgggctctcctccatgcccaaggcctccctgacccgcgtccggaatttccactgcggaaggaggattttatcaaagttgcgcatatgggtcttgattctgtagaaaggatgcttggaccggagcagtataaggttccggagagcattcggaagaaggtaggggaagagatgcgccaggacgaagagatcattcgcgtcatggtaagatgggtgcgttggtgcggcgtcgagggggcctgggatgagtttcctgataagcctgggatgggcaatgttgcagcaagattggtaaatatggattagagttaactgatacttttttcttacgga

SEQ ID NO: 17120 - DNA, 507 bp, Emericella nidulans
gcctcaaggagacgccaactgggattttgcctgccgaagcgaagcgtaagctggccattagaagctgtcttacatccatactggcggagcaacgatcttgggatattatctcatccgaatcgtttcacggcaccgaaggtgatatcgcaattattgaagaattcagatacctggatgcactgaagagcggcgaattgccgctaaatgatcctaaaccagccggtttcaggagaatattcgtgattcttaacagcaagaatcctacctctcgccatctggattcatcacgccttatccgtgtctcccagccgtgagttctcaacgcacttcgcgattattcatctaacaaagcccaggttcggttctagaaagttccgcaatgctgtcgtccgtgttgaccagctactgaaggaaccgccacccgaagtttcttccgaccaacatctccgcaagcctagccccgtgccggagcaggaaacgccgcggaagactccatctcctcctatg

SEQ ID NO: 17121 - DNA, 500 bp, Emericella nidulans
  unsure (1)..(500): unsure at all n locations
gttggacacagtctagactccgacattcagtatctcaagcttgcgaacgtccnacttcaggggcactctggaatctctcagttcgttgatcgtattgacgtagcagcatccttccagcttctccggggcgaaaaggagcaacgctcactgggcacagtcgtccgggagatgggaatgactgggtggaatctgcacaatgccggaaatgacgcccgctacaccttgcaggctctggtagccatgctgataaaccacggcgttggcgggctaacaggcggatcgaacgttggagaaacgcctcatatctgtgtcgaaatgggtgattaagtgcaccgttcatcattcagcacctgtgtactgtcagggattctaaggaataaggcggaatttgcaggtgtggctgttctatgctcggcaagagctcgagaataagggcagttgcctgttacgtacaatgatccatatctgatcttagcattaccaaacggataaattcaccg

SEQ ID NO: 17122 - DNA, 850 bp, Emericella nidulans
cttgacgaggaggatagtagcgaggatgaagccccagaaactgtggacaactctactcaactaaacaaaataaagcttgaagctaagaaacgtgatgaagcgcggaaaatgttcgtattcttgatccttttgacaaatgcccattcatcactaaccgcatgtcagcgaggaacaagcaaaacgagagaaaaggcggcaattggacgaagcgcgcaaacaacaagctaaagcctcagctaaacgaaaagaagtccatacgtctcaggtcatgccaggagctgggacccctgcagaagatatgctatctgagagctcagcaacgctgcaaggctcattcactcaggacactcggcgctcgacgcttcccgcccttctccccgacgacattctaaacgctgtgcctgacgtccgaccgccgacacctccacccgaattcgaggttttctcgcagaaaaaaccaaccaagctcaggttcttggagaagaaggagaaggcaccaaaagacgtgcgaatgggtgatgtcgccattcgtgtgttggatagtgagagttcgcggaagcagccgaacacagcactcgcgccgaaagcgtcaaaggcgagtcgaggtgcgagagaagcctggttgaaacaggcccgcagtactgggcatgttaatgggatgaggatggtcagtagcggcaagaggagtttcgtgcgcaagtaattctttaccgtacttggctacggagtactattccattgcattgggtatttcaactttcggattggggattattgggatttgcatgtcgtaattgttgggcgttttgaagctctggtaaatgcgatgatcataacggcaatctgtatg

SEQ ID NO: 17123 - DNA, 850 bp, Emericella nidulans
atacccatcagcagctggttctctgacgcccacgataacgagcttcttgaccttattcctgttctcgaagatcttgccggtacccaggtgagagacgttagcctggttctcgacatcacactatgacaattgtaacttcattgcgcgcgacatacctcaagcggctgactctcctcttgttcgcttcctacgtccggctactgctttactttgacaagctgcacggggctgaagacgttcctctaccttcttatccctgcctagatgcattgggagtttcagcactttggctttcgaacctgtcaaggcaagtggaagcgctgcctgtttatatatgctggcgtgctctttttatttattcccctaacagccggttatttcctgtactcgctcctagcgagctgataccttacccgttgtttctttatgtatctgtccccaaagaaagttacccctttttgggttgaattttccaaggcgtttgttttggctatcagctgaatttttgctgatctcatgtatacgctgttcgatttacattcccctgtgcttggctttttttccccccttataacagtcttttgtcccattttgtctaacccacgccccaagagggctcgacttgatcatctcatcgaattccttactacctctgtatctgtgatctctcactctcccgcaaccgaccgttgtcatcttattggccatgatttttatttcccctcgattttgattttggaggcttcacaagcgactagcatctgcatccatgtctcccatacccgtgtcacagttttgatacttttccatagtatcccatcaacgcagacttctcgatcatggtggcttg

SEQ ID NO: 17124 - DNA, 850 bp, Emericella nidulans
atatgactgcaccgtactcttatactacggtctgccactcaggtcaggttgcacccagcggccctgcagcgaggagttgggagctcaaccagcttgccactccttcaaccatgaatggacacccgaatcctggcaatttcaattacatgcctccgatgacttattctcagtctgattacccccagggacactagcgaaccgagctcgtgtctctgattgatcgcattagacggcgttatatcattttgcatattattctacacttttccgtcactcctttttgataccatggcgcgcttggttttaaatcacgttttaactacggggactttaccgtccggcatgcttctaatgatttttttttttgcaacgatttcacgtctctccttaactatctcatgtcttgatgccctggtttttgacttccacgttgacatgatgcattatagatgatctgttatccattcctttggtttttttgcattatatgcggggcattgagataccattccttacgaacttgtataattatgccgcatgggtggcgctgctgtccttccttatcacttcgcaggactgggataccattattggactggaaaagtgtggaacgcattcttgcttgcgatacctcgattgcgctgtttgttcgtcctgattttctgattttgcttcattggatgtttctgtttttacgtggactccgaagagaatgtgctcgaggctgggttctctgctgcatagctttggcgttgtttcactgctaaattggtttctgcccctgtggctgttttaatttaccaagtgaggagtactatagcacttatgcttatctcatcagtttaatagt

SEQ ID NO: 17125 - DNA, 850 bp, Emericella nidulans
gtcgtcaccgtttgtcaaagattattgagagacccaactgtttgtactaacacgggttcctgtaattgataggtctcatcgggattggctcccgatggtcgtcattttgtttcccgtgctcgcgatgaagcgtcctcatggcgtgggatttacaaaagtcctattcccgtttcggctctagcgaaccgtcttgggggctacgtgcaagcatacaccttgtactcaagcgttcgaccatttggtgttacttcaattgttgggggctgggactctgaggctgagcttgcagtcgatggtcaagtgggaagtggaccgcagtcaggttctggcgggaaagtcgaaggcgcgaaatcgggaggaccaggtttatatatgatcgaaccaagcggtctgtattgggtatgttatctcaaattgcattggatgttttacgcacgctgatatcgttccaggggtactatggggctgcaaccggtaaaggaaggcaggcggccaaagccgaacttgaaaagctagacctggcttcggagaaactcagcctgcaagatgctgtaaaggaggcggctaggattatctacgttgctcatgaagataacaaggacaaggaatttgagcttgaaatgagctggattagctcactgaatggtccaacaaaaggcagacacgaagaggtgccgaaagaactactcgaggaggcagaacgagcggctaagcgggcccttgaaggagacgacgaggaagaagaagatggttcgaaagcaaccggcaatgagggcgagaggatggaagagtgagccaacagtttcgggcaaggattcaaagaatcaaataaagtcaagaagttattttc

SEQ ID NO: 17126 - DNA, 850 bp, Emericella nidulans
ctcccccccatcaacgattgtgttcaacggaaaccccgtcgcggatggaaatgcagtgcaagagatcttcgtcagccagatgcctccgacgcactacgaggtccagtcgtttgactgtcaaattataaacaaacaatatcctacagccacaatcggtcggcaaatagacccacggaaagacatttcgatattggtggttgttagcggctacgtccggttcggagagtctcgcgaccttcctcagcgcgggttcagcgagacatttgttctcgtgccgaacccttctagcgaaggggggaaggggaaacgtagacgggactggctcattcagacccagaacttccgtctcgttgtttgagccgcggatgtctggcaacagtgttggaagaagtttggaggcaaacaaattatccagttggttcctagagatagcgatgggaatcatacaacgcgctttgaagatgacaggacatttactgaacgaccacttatttcgagtcgaaagacgattgccgatacgccattatatcattacgctatcggccctacacccttttaccacagatcactctgccgtctttggtgggttccggagatttgccctgattcgctcaaggagctcttcgcgtgtcgcctttcgatcaggcatcaagcctcgctgctattgttagagaacgtgcgcgccaagaactcggggggtggatcctacagcacggagccatcggcgcatctcttcgagtgtccagttcgcgggatctggctcagttagcttgggccctccgaacggatgcggacacgtgcctcctttgggatcatcttcagcaggaaacatctcgttgccccagattga

SEQ ID NO: 17127 - DNA, 495 bp, Emericella nidulans
ctgcaagaaataatcccatgctggatatgccgatcactcatacagtgagcgaactcaggtcatcaagggtgtatagcagaggcacggctcggatttcatgactcgccttggccttcccagtcacttgggctgtgactaccttcaccgctacataacgttgcagccaatatcttatgtttcctgctttttccatctcgtctttgagcatcttcagttctgggttggggcatttactttctacttcttactttccgcatcttatgcgcggcgttagaccagtggagttgagttgatttttggttatttctcggcataactgggtttctgggatctggtggtttattgacatcctggatagtcgatgtctgcctgatggcaagactcctaatggattggggtagaattcttgatctcaattacggactatcttcgtgtccattggcgtgtcacatagccagcgggtaataggtacataaactgcatactctcagccta

SEQ ID NO: 17128 - DNA, 500 bp, Emericella nidulans
gtgaagtcatgcctatttctttgattatttccataatatactaacttcattgataaggccgccaactaccttgacatcaagcctctccttgacatcggatgcaagactgtcgccaacatgatcaagggcaagtcccccgaggaaatccgcaagactttcaacatccagaacgacttcacccccgaggaagaggaccagatccgccgcgagaacgaatgggccgaggagtgagttttagatcccgcagttgcacatatatactaatatcctactttagccgctaaaaattctcattttgggattggtttcctctgctctttttgtggactgctaaccggccccaatgacaaagcatgatgagttagtttctgaacttcaatatcaaacaagggtcctctggctccacggcgttatgggatactacaactcagcggtttcgtcttgcttgttaatcttttgccctccatgatcacgttacccaatgtcattagtctgctttt

SEQ ID NO: 17129 - DNA, 850 bp, Emericella nidulans
cggacacacattgaaaaccccgacgctctacaatcaagggaatcgcaggcggatctcaatgagcttgactcgttgcgtcctgagaccccgtcgggcgcccggcggccttcggagttggaggctgtaaatgaatacacagatgtcagggtgcgagatgtgatcaccggacggctcgtacaaggtcacctcgtcgatgatgactatccgccatctggtcctacatctatggctgtatccggcgatgcaacccctgggcaactgcccagccaagagagtgaagccatcccagattcaatggtagactcagtcgtctcgaccacatcctcaaagcctggtgaccacgctttaggcggatcattcgatgctgccgactcttctgatgaagaagaaggaagcaccaaacgaaatgttgaacaagagaagactatcactctggttggagacgtccgagatagaactgtcttccttgtcgacgacatgatagacaaatctggatcatggatcgcggcggcagagaccgtggtgaagcgcggcggggccaagaaggtttactgcattgccacccacgggctttttggggactcatcccttgaacaattggaggcttgcgagtctattaactacattgtcgtcactaatactttccccatatcaccgcaagtggcgaggaaatccaggaaattgatcatcattgacatctcaagcctcctctcagagagcataagacgccatcattatggcgaaaggtccgtctctatttatctctatcaaaaaaggagcatcgcgaagctaacgattccgcagtgtttcggcgttgttcgatcttaatgactaatttatttcaagagct

SEQ ID NO: 17130 - DNA, 850 bp, Emericella nidulans
ctggagactgttagggcatctggacaagaaccggaagccgtgcattatgcgtcgctcattcatgctaagggctgtgtgatgcgggatatggaagctgcccacgacgtgttcaagtctgctgtttcaaaccccaaggttaacgtgcagccttgcctgtaccaggcccttctcgaatccatggttgctaaccgccaggtcgcgcagaccgaaactgttgttgaggacatggtcaaacgtagggtggagatgaccgcttacatcgccaacaccctcatccacggatgggccgccgaaggaaacatccaaaaggcccaggctatttataacagtgtcgggattgaaaaacgggaaccaagtacgtacgaggccatgactcgtgcgttcttggccgccgacgaccatgcgagcgcttctcgcacggtgcaggagatgctctcccgcgggtatcctacggccgtggctcacaagattgccgatcttgtgggcaatggtgcagtcacagccactctctaaagtggttgttcagttctttgacgataaaagttgcctcttttcttcatatccagacgcccaccactgggatcttatcgcatccacacagggctggacccggttttctctagctccccagcccgacattaactatggacattgggaggcacttgaatgccaggagctcttcgtatttatttggacatattgcattcagcgggtatggcgttcgtcgcatttttgtatctataccactgtttgggctatggttctgcttttttttcttttgttcatttctttccatttgtttgatagagactctcaactctcacgtcaatgatatacgacgttcgacgat

SEQ ID NO: 17131 - DNA, 500 bp, Emericella nidulans
ctggttctgagagccaactgttgtcttactgctgaacgtctgcttcttctggtacaggtatgagactggaatccgaatgcgggttggagcagatgcaacgtggtgctgcgatacatcccatcgggtatgggtatggatgcagatttgcaactgacaggttggcttggtcaggtaagaggtatttaagtcattagtctcagatctgcctgtggcagaccacgagcagggctaagacttcgagtctgtgactcaatcggtttcctattgatcaatatacctcttactgtgtgcccatcaactgtcagctgcctagtagggtcatctcctactgtccaggctgggtgattacctggatgctcgccatttatccctccgggtgagggtataggtgacgggaatcagatgctggagggctgtgcccacgatacattcttttctcatcgatttttatgcagcttcagcttgtatttagtttggagtctaattcaagatacataaag

SEQ ID NO: 17132 - DNA, 850 bp, Emericella nidulans
gtttcttccagcacacaggcccttgtactgctggggcgtggacgcctgatggaaaccttcttgcaactgtctccgaggacggtagcttctatgtttacgatgtgtttggtgctgctgcggccgctggcgtctcatactctgctggaacgagtgcggttgtcggattgacggccgaggatcagcggtttgctgttgagggtggtctctactctgttgcgattgcacccggtggtggctttgcagctgtcggtggggctgaggggcacatcaaaatcgtcggccttccgcgtctcggccaagctggtgctggtgccggcgccggtgcttcttccaaagcaaaaggcaggcctgctacacaaacctccgctgctacagcgggtactcttctcgcgtcgcttcagcctcagacggacagcgtcgagaccctctcattttccgctcctccgttaactctgcttgcggctggctctgttgatggctcgattgcgctcttcgacacagctcatcggttcgctgttcgtcgacatatcaaggaggcacacgagggtgccgtggtgaaggttgagttcttacaaagtcgcgcggcggtcgcaccatcagttcgcccgagtcctttggctgcggcgactgcgggtcaccggtcatatctcctaacatccgttggtatcgacggtgttgtcagaagatgggatgctcgtggtggcactaccgccgctgcccagggaatgttgactgaatggaaagggcatcttggcctcacagaaaacgacgagggcgaacaagcgggtggaatcatgggttttgttcagggatttgatggaaagagggtagttacggctggtgatgatgg

SEQ ID NO: 17133 - DNA, 850 bp, Emericella nidulans
tggaagactatctcagcaacattaccgaatggctgaggcagcacccctacgatgtagtcacaattctcatcgggaactacgattatgtcgaccctggaaatttcacaacgccgatggagaactcgggcctgatggatttcgtgtttacaccgcccatgattcctatgggtcttgatgactggccgacgctgggcagcattatcctgtctggtaaacgggcgattgtcttcatggactatcaggccaatcagacagcctacccctggttgatggatgagttctcgcagatgtgggagacacccttctctcctacggaccgcgacttcccttgcaccgtgcaacgcccgcctgatttggcagcggaagacgccaggaaacggatgtatatggccaaccataacctgaacattgatttcagcatcgccagccttaatctgctcataccaaacacggccttgctcaacgagaccaatgccgaccatggctacggcagtgtgggccggatggctgaaaactgtaccagtaagtagctattctcgaacttggtttgacaggtactaaccaaaccagcgctatggaatcgccctccgaactttttgctagtcgactattacaatgaaggcaattttaacgggtcggttttccaggttgcggccgacatgaacggcgtcagttacgatcgagactcgtgctgcggaactttatccgcagcctccagcttgggccccggggcgatgatgagcgctgtgctcttctttgttggactccaggttctcgcttggctttagagacataatcctgtactgtacatatgaccatagaatatttataatcacgagagatgaccacg

SEQ ID NO: 17134 - DNA, 535 bp, Emericella nidulans
acaactgaagtccggctcctaatgcatttagaaagcactataattgccttgcgtatgtggaatgcagttcataaaaacatggcatcaatacgccccgaagaaatcagtctcactgtccaggcatgattcgtccaccgacaccgttcacaccgggaatcgcgacgtgatcattgggattagccgctgcttcgtacagaaagctgacgggctctctgtttagggccatgaattggcccttgagtccaatgtacccgacttttgtcacttcttcctcgccacggctccagttgtcttcgaagaataaagtgactgaagtagtagcgttccagtgtgcacggttcaaaggcagctcgaaaacatcagttccagggatcggctgtggcacttcaattgtttgtgtcggcttgagctccgacgcggttgagaagtcgaggtcatcacgatttttgaaaagtttcagggtcctcggagcggatggtgtgggtgcagtgtatataaggatagaatgaacgttgacttggccagtgaatctata

SEQ ID NO: 17135 - DNA, 500 bp, Emericella nidulans
acccgccagagataaacagcctctcaggcagacatccggctcctcaggcatcacagcctgctcagatcagctccgccggatgatactgtcgaccggagatggcctctccttgctaatcaacatacagcacctcgctcgtccgctcatttgatacattacatcgcctatatgacaggtcacatctgactatacaacctgaactatctaccgatttcgagaacattcttttgaagcctttgaaaagacataaatagcctatacagatcgtagttaggagattaagaccttcaatgcaatcgctcattacagatataaaattacctgaccaaatcgacgtcagtaaccacctccagagccaacagataccaatcgaagctgtccagcggcgggccaccatgtatagacttccaaagtttatgagcttactagctcctcaagcattcgttctgttttgtctattcttcagtggtatactagcgaataagacgtgctccattata

SEQ ID NO: 17136 - DNA, 500 bp, Emericella nidulans
gtgttaacatcgagagcggcgaggttgtcaagcccgagaagccgaatggtatcaagctggaacagttcatcttcgatgttttccccatgcttccccttgagaagtttgccagcattgaggtacgtcgagaagacgagttctcacctctaaagaacgctcgaggcactggggaggacgacccagacaccagcaagcgagacatcatgaaccagggtcagcgatggattgagagtgctggtggggttgttgtcactgagggagatgccgtgggtgttgaagtatctcctttgatcagttatgtaagtttcttgggctttcaaatattaactcgcgtgtttctaacaaacgtctgttgtagggtggagagggactcgagttcctcaaaggccgcgaactcaaagcgcccgccgtaattgaaaaggaggagtaaattatacaaactatatctgttttcagctattcatacttttatcaaaacataaaacatatttaacggcaca

SEQ ID NO: 17137 - DNA, 500 bp, Emericella nidulans
atcgcatttatgaagaattaatagtattctcacgctcactgtttcgaggtaagctaccatcatctgtcaatcttctactacgagcattcatttaacgactccagcccaccaccacaacttgattgaacaacctcacctcaccttacaaacctttctacaaccaaggaacaagaatcaaaatgtctgctcagttctccggccgccaatctccaccccccgagagtcaaacaggcgcacaagagaactcccccccgggttccggccgcacagaccccaagttcgcccctccgccagagtacgcacccaagtcaagctctgagggcgagggtcaaagccagacggcgggcttgagcagtaacccgaagcatatcctggaggatattgaggcagcaaagtataagaaggggacaggaaattgacttaaggatcgtgttctgaggatgaatgcatgacttgactctaattatacatgaatatcaccacttaagatggaattgaga

SEQ ID NO: 17138 - DNA, 850 bp, Emericella nidulans
caaggccgagagttcttcctcaggcaattcccgacagctggtcctgtcggcgcagatctactcatgtccatgtgtaccttagatccaagacggcggaccactgcgcaccaagcccttcagcatagatggtggactacggagcccagaccgacaaataaacaggaccttccacaaaaacctggcggcaccaaaaaaatgggagatgatttgacaaggcgtggcggagagcttgatgaccaattcaaaaatgctgctcggcaactagatttcggtgccataaaagggtagcactttggaactccgaaacagccttgcactagaggattttgcggcgcgttcacacctgccattgacggttctttaacagaacagaagctgccctgcatttcacattgtggaggacggggtggagaatccaagagagtgcactatagttatcctctgggctgcagcgatttcccatgggtagcaaactacaacttgaagtctggcctgaggaactgatccaccgccagacaaagccttccgcgtatgagactatacaaaggaactccagcgtattccgtatattcactatggacctccacgtccttgattgtctcccaggcgagctctgagcctgttaacgctggccgaaattccgcaacggctacggtgttgtgattggtcccctttttcaccttgcgtctcaatatgtccgcgccaggagtgatatcgggggcttatcgaggcacgagtgtcctcctattggcccaagggcaaaggactttataatgagatcgacgaccccaagttcgatcaaataagaagaatagtattatcgatttatcaatgatcaagtctgtgctct

SEQ ID NO: 17139 - DNA, 850 bp, Emericella nidulans
aagcttcgacgctaacctcaatttcaagttcatatctgggaatatcagcggtatgaaggttaccatgcttctcttcacaatatctcgcgccacccaggattccctgccttcgacaagaaactcaagagtttgattaagagcaagaagacgtccttgatgcaggaattttcgttctggcctacaacgccgccgcgccgcctgggaggcctctttgaacttcgatcttacactcttcatcctggcaatcttcttgagtgggaaactcattggcgccgtggccttaaggctcgtcgcgaggtcatggaaggcgtgggcgcttggttcgtgcagattggagacctgaacacggtccaccatctgtggcagtttgcaaaccttgaagagcgcaagatccgccgggagcagtcttggggcatagaaggctgggctgagacggtgcataaaactgttccgctcatccaaaccatgcagagccgcatcttaatccccatgccctggagccctgtcggctaggcttcaggcctagtctggcgatggtccattcatttccccgaagtacgagctctgaataatggacaagttcgactaagttagtttgacgcggagggatagaaaggggtgatatgggttcgacggcagacagttaaatgtaacaggagtctgccagtctgcgtgcccgcgaggatgaagcgaatatatcggtgctctcggatcccgatctttttgggacgagtcatttcacttcgcggttctcttttgttgtatgctaaagaagagtatcattagcgctttcgcggacaacccattgcatgtatttagtgcgtcaatctcagggattttatgcatccga

SEQ ID NO: 17140 - DNA, 850 bp, Emericella nidulans
agaactcgcagcggcattagcatcctcgacatcttccgtgtgatggtctctttggcagtcgtctcctgcggtttatcatactatctcaccgaaactgtaacatgggggtataacccctggttcacaaactggtcacagctggtgcgatatgttgtacgtctttcccccgcatctaaccagatgaattcattacccgcttactcgacgttaacaaacttatagaaaggcccaatagccttaacgccatcagagctctccctctacgacggcacaaaccccgacaggcccatctacgttgccgtgaacgggaccattttcgacgtgtccgcgaacccacgcatgtacggtcccggtggtggctatcacttcttcgccgggcgcgacgcaacccgtgcgtttgtaacgggatgttttgctgaggatctcacggacgatcttaccggtgttgaggagatgtttatacctattgacgagccggaggaattggaaaagttgagtagtggggaaaagaaaaagaggcgcgaacaggatatgcggaacgcaaaaaagagggtcgagaagcaaattgcgcattgggtgggattttttggaaagcatcagaagtattttgaggttgggagggttgttaaagatgacacggagaaggatgaaatgaaggggaagagggaactttgcgaggcagcaaggaaacaaaggcccaagagggagaagagtaagagtgcctaatcttcgtcttgattgaggtagaatttagggtgtgtctggaaattgcttccgttactggcagcatatatgtttatgcgcattacgtacttagcaagtagtgaacagattgatcaggttgatttga

SEQ ID NO: 17141 - DNA, 736 bp, Emericella nidulans
ggtctatacggaggaagaagaccgattccttcttgtcatgttagacaagtatggcgttgaaggcgaaggctgtacgaaaagattcgcgaggaagtccgcgagtcccctctcttccgctttgattggttcttcctcagccggactcctgtggaaattggccgccgctgtacgacgctcctcaacacaatcgccaaagagttcgaaccggacggcaagaatggtgatggaaagggacgcggccgcgaccgagaggacgacgaacttgacaatgaagacgacgttccagctaagaagaagaccaagggcgccgtggtaagtgatgtttgtctaaagttgtttcgctcatgttcaactaataaacaaatagaacaagcaagtcaaagccgtcaagggcagcaaaggaaactccgcctccacgtctcgagcctcttcagccaaccctcccaagtcgcgcgggcgaaagaagtgaaatcccactccagcgtgagagcacagtgcgctaagcactcaatcaactaccttagcataacataacatctatcttgtactattgtatggtgattttggcgaaatttgtagaggcatgatgaaagaccaagagcctggagtgtttgttctggtcctgggtccgtcctggatggtggtttgcgttggcttgttattatgaatatcggttgcggcgttgactacggttagaaagtcactggctactttaatctacttattttcagttctt

SEQ ID NO: 17142 - DNA, 743 bp, Emericella nidulans
tggcccgccgagatcattgtgatcgcgcacattatcaaccagcatctcctgttctggcgcattcgcaatctgccaccgatttcgcatatcgcggttgtcgcaggcccatatgcctggacattgattacgctcttctggacaggagctgctgccgtcaggtctcataatttggcctcgaatatcgccgcgaacatcttcctctggattatctttttgatcggctccattcacatctttttggctgtcgatgatctcctggggtacagtctgagtctgttgaccttcggtatgtttcatgtgaagccctcgcgtagtcattcaccgtcccaaattagatgctgatttcatgtttgattgcaggcctggccgtggcccaaactagtcgcaagagccatcttcatctgcagtggatctttgcatgggtcatctttggagtcttcttgctggactcactctatgtgacctccgccaagtacgttggtcgtaatgtgttgttccggagcccgagagagccagagtcgagtgatgctgagcgcgcccccttgcttaatgacgctacggcacctgcatcgacctcttagattgccccagtggcttaaatggagcgacgagtgggttgatgagatggagtcagatgagagccagatgagagtcaattaagagatggtggagacaaggaataacgtacggcacgctaaacggggtcatggttttcgaggataggatatggttgtcgtgtaagc

SEQ ID NO: 17143 - DNA, 850 bp, Emericella nidulans
gatgttgccaaccgtctgaccggctggtctactggccctagcacctgcgaggacaatgtgatcgggtctctcgacaaggccgtcaccagcattttccggttcacctccagcttggttggcggttcagactctgactcgagcgattcggacgattcggattctggctcgaccgagtcttctacatctaccaccactgctgcgccaaccgctacagaggctccgacatctaccactgaagccccgacgacaacggaggctcctgctacgaccgaagcccccagcaccgtcaccagcacaagcactactacctcgaccagcacgagcactaacaccgtgacttacaccctcaatggcagccccactgacactccgcggcgacgagcagtgccagcactgtcccgccgcccccaccgcttcgtccggttcatcctctgcgccaatctacccgtacgccaactcctcctgcacgcagtactacaccgtcatggacggcgactactgcctgaaggtcgaggaggctattggcgtttccctcagccagctccgcgagttgaactccgggctgaaggaagactgcacgaatctctggctgggctaccagtactgcatcaaggcttagacagtcttgcatttgtttgcttgcagtattcaaaacttctcttcttgactccagcttgcttggaatgccgtcgcttcttttgacaggctgtgccatttcatttgatgatgattgtacatatcaaaagagcgatttttttctcttctttttcactctcgcttaacgatttccaccatttgacagtgtagctagtctgctgtctatgacgaattgatgccaggataagcaatg

SEQ ID NO: 17144 - DNA, 133 bp, Emericella nidulans
atccggaattcggctgggaacgatgttagtggtagattaatcgaccacactttgcatggaaggaaagttgcgctactggacgtgtcaagtacattgcgtgactcaatcaaatcaacctgatcaatctgttcac

SEQ ID NO: 17145 - DNA, 610 bp, Emericella nidulans
accagagaaaaaccccgctaagaagtacaggccgcagcgttttcgacaatatcatcccgacaacaacgggtgctgccaaggcgatcgcatcagtgctgcctgaactgacaggcaaggtaacgggagcctcgatccgcgtgccaacgtaagtcattcaatttgattcaaatctgatctggtctgatgtgaggggccgaatcgccgctgacttttgaattttcagccccaatgtctcgttgattgatttgaccgtcagcaccgagacgcccacctcgctagccgagatactagcggcgtttcggcgcgcggccaagaacgagctggctggcgtgctgagcgtaagcgacgaggtgctggtgagcagcgactatctgggcgactcgcatagtgcgatcgtagacgccgctgcgtgtagcgagctgaacccgacctttttcaagatcatggcctggtatgacaacgaatgggggtattccagccgacttttggatctgacgagacatattgcgcataatgagtaaacgaatcgatcgaatcgatagagtcgatagagtcgatagagtcgatagattacgatagaataatggtaatagagtagactaatagaccc

SEQ ID NO: 17146 - DNA, 500 bp, Emericella nidulans
agacagtaccgttgaataattcaaggaaaggaaagaatttgaccgtgagctttccaaatcagctgaagtctagccgtccactgtcctcgctggccggcggcttacatatgagatccacttagtgatcgaccgatccataccacctgcactcaacctgagctcaccatgattgtctgcgaaaaatgcattggcatggcacagacgaagccgacatatcagtactcgtggcaagtgcctggcggagggtgggagcggtgtgagattgacggatgctgggcgtatatgaggaagggagacggtgtagttattcccggttaattttcttaaggattttcggggcaactgagtgtggctatctgaactatgtctcaacgccatgggtggtattggggggtctctctgtaacctgaagaatgaaatcgtgcatcctgtataatctcatcaaggggagtgcaggtaagggactgtggtttatggttcttctcggcatgtaagtagtt

SEQ ID NO: 17147 - DNA, 850 bp, Emericella nidulans
attccttcagaagggtctttcgcgggtcgcaccagcttgaaggccaaggtttttcagattctcgccagcaatctgattgtatgcccttcgctccacgagtatcttatgtctgtgccagaacgctgaccggagttcctaggtgtctcctatccaaaatgtggtctatttgacctgcatggccatcatcgctggcgctcgtactctccaccaggtccgcgcaactatcaaggccggcttcttccctgtcatgaaggttagctggattacttcaccgctggcgttggccttcgcccagaaattcctccctgagcatacctgggtgccattcttcaacattgttgggttcttcatcggaacctacgtcaacactcacaccaagagaaagcgccttgaagcgctgcggaaggtaagcctttctgagcatctgtccttattctcctccgctgactcctcgcagcgttacgattcccgccgcggcggccccggcagcgagtacgagaagggccctggacccgactaccggtaaaggatgtaatttcctcccggacaaatgatgacagtcgagcacatatcgcgaaccgcatgatagaggcatataactctttcatcgatcgttcgacaccagattgtatactcctacctttccgatcatatttaccctctcgcttcctttgtcctctgttcaagtacggcggactggatcactctatactttataccgtctgttagacgaagatatgtttaagcttacgatgaatggttgttattatttttgtttcttacgcccaatctacatacttattacatagtttgaatttatgacgccgctcggtgcatctttatttcttta

SEQ ID NO: 17148 - DNA, 737 bp, Emericella nidulans
ctctgccgtcgaggagggcgatggcgccgtgaccgaaatctcagcgacccttgaagcgtctcacattgttccctcggtgctactcgtcgatgacaattcggtcaacctgcaactcctcgttgcggtcatgaaaaaggccaagttctcctactttacagcgtgcaacggcctcaaagcgctggaagtgtacaaggcgcatgcaaagaaaattcacgtgattctgatgggtacgtcaccgattctctttaagactcttacgtatatcaactaacaggtccctggtaacagatatctccatgccggtcatggacggcctcgaatccacgcgggagatccggctctttgaaaaaacgcagcgcgaaagtccagcgtttaagccagcgacaattatcgcactctcgggattgggcagcgcgtctgtgcgccaggaggcgtttaattcagggcttgacctgtttctttcgaaaccggtgcggtttcaggagcttaccacgcagttgggggagttgatgcgatgaccaaactcttatggatggttcgagtggggtgatgccatggggtttaaaaatttttttagggtatatattctttctaccttcctgatatattggattaggtgaggctggcgttcggggtagggtagctttggtctggtcttgtttgcatagtgataccgagggagatcatgggcatgcttctgcatgattctggaagataatataactatactccacatc

SEQ ID NO: 17149 - DNA, 850 bp, Emericella nidulans
gtggtcatccccatcccggagacgtcaacaacctcggctgccgctgttgcccgttatctcgacaagccttactgccagggcttcgtcaagaaccgttacgtcttccgcactttcattatgccggaacaaaagacccgtcagaagggtgttcgccgtaagctgaatgctatgcaaaccgaattcaaggaccgaaatgtccttctcgtcgacgatagtattgttcggggaacaacgagtcgggaaattgttacaatggctcgtgaagctggtgccaagaaggtttactttgccagctgctctccggaaatcacgtatgtccaatgtacctatcatgttattcctgggtcatctgctaatatttgacagtcacgctcacatctatggtatcgaccttgcatctcctaacgagctagttgcacataaccgtgacactgagaccatcgccaagcacatcggtgcggacagcgtcatctaccagacgcttgaagacctcaagggtgcctgcgctgagattgctcaagaaaacggcctggagcatccgcgtaatttcgaagttggcgtcttttgcggcaattatatcaccccagtttctgaaggctacttcgatcacctggaaaaaatccggggtgaggggcggaaggttaaggcggttgatcgtgccaaggaggctgttacccacggatttgccagtgaaaaggacttccagattgctgccaatggcgttaagatgtctagtaacggtgatcttgtgcctgcggagaaccccgcagagtccgaggtccctcaggttggcgtctacggctccaacaaaccagctcctctagagatggaagagcctcccaaggtcaag

SEQ ID NO: 17150 - DNA, 583 bp, Emericella nidulans
tcctgatctcgctttagacaccatccaacatttcaagatgaagtatctcgtcgccctcgttgccgccctcgggtaagcactccatgtctattcaagtctttttttttctcgttgcaacataggaccctgctaacctttcaatagtctctgtgtctctggttagttatgccagcctcgtttcatcttccttcgcagctgacatcccagataccatggccgtgtcctgcggcgcccaaggaagctccaagggcgtacgatgcgttgccatcaaccagccctgccccagcggtttccggcctgttttctatgatgatccagctccctgctataacaatcagcggtgctgtgtttgaggtcatggtcagggcggcgttcacttttgtacggaaactggagaatgcggtgggtaaattagttaagaggttcgtgcgtatcgtcacgatttggcctaggccacgaccgggtgtggttcgacgcgagattgcgatttctcttggggtgtaggtagaggtagtgcgaataggtcatgcctgttaagtcagcagtgcgtgctagcaaatgaatgatatctgtgttttcagaa

SEQ ID NO: 17151 - DNA, 500 bp, Emericella nidulans
cattgacctgctgtgctcaggtcagactcctcgtaacgagattgagcaggccgagtacgagcgcgtcttcgaggaggtgcctgcgccattcacacaggaggagcgcgaatcctggctcaagcagctgagcgaggttgcagtctcctcggacgctttcgtaagtccaccaacaatgtcttcatggtctcttactcactttccatcccccagttccccttcatcgacaacgttttccgcgccgcccgctctggtgtcaagtacattgctgctcccagcggtagccaaaatgacggtcctgtcttcgagaccgcggagaagcttggcattaccttcgtcgagcaaggaacccgtctcttccaccactaaactctgtgtccggtcaggtcacatttctagactgtagtagcaaggtagttcacgtacagaaaaggaatacccacggctttaaataccttgccttacctttataggacatgtttgtaacgattttattgtttcga

SEQ ID NO: 17152 - DNA, 850 bp, Emericella nidulans
gctcgtcaccaagaacttgactcctggcgaggccgtctatggtgagaagcgcattgcggttgagtctcctgcgggagaggatggtgccgttccaagaccgagtaccgtgtctggaacccttccgtagtaagctggctgccggtattctttgtggtgtgggatgaaatctacatgcccccttggtttcaaggtgctctaccttggttccgccagcggtacatccgtcagtcacgtcgctgatatcgttggaccgaccggaaacgtctacgctgtcgaattctcccaccgttctggccgtgacctgatcggcatggctactcaccgcaccaatgtcatccccattgttgaggacgcccgtcaccctctgcgctaccgtatgctcgtccccatggtcgacgttatcttcgccgacgttgcccagcctgaccaggcccgtattgtcggcctgaacgcccacatgttcctcaagtctggcggtggtgtcatcatctccgtcaaggccagctgtatcgacagcacagccaagcctgaggttgtgttcgcccgcgaggtccagaagatgagagatgagaagatcaagcccaaggagcagctgactttggagcccttcgagcgagaccactgtatcgtctccggtatctacaatcgttcgtcgtaaaagccaaaagcagggtcctttataacggtttttctttttccttctcatgtcttaatcttgtgctctgtcctggcgtcgagtgtgctacgatttttcttgatctgtttcgctttttgttcaatgtcaggaatttagatgtgtttctggacatgtaacgtgcatggagttaattcattttctctcttcaatttc

SEQ ID NO: 17153 - DNA, 850 bp, Emericella nidulans
aaggcgttcacctagcattaacatatgccagcaatctctccgcaataacctccttgacagagcaaattaaaacaacgtttccagatctgcgaatttccatccaccaagtcgacgtggcatccgcagaacaaatccaagacatgtttcttcaaatagataaagagcatggccagcgccccgatatccttgtctcaaatgctggatacggaaaacgcgtcccccaagtttgggacatcacattggaggaatttgactacactataaacgtcaaccttcgcgcctccttcatcctggtcaaaggcgatgatagaacatatgcgcaatcaacgctggggccgaatcatcttcatgtcttagatagctgcttctggtggggggataactggctgccgtatgtgctttgtttctcctgccttcaattttgaatcaacgactaagatcagtacgtgcagactacgcggcctccaaaggcggcatgacaggcatgatgaagaatctctccacacgtcttgcagagttcaatatcagcgtcaacgacgtcgcgcccgccatgatcggggacaccggtatgattcctaatgctcaggcgatcccagaagttgcggcaggtattcccataggaaggctgggtgtcccggaggaggtggctaatgtggtaactatgcttgctacaacggggtatatgacgggacaaagtttgttgttggctggagggttgaaatagctgtagctaagtctcttacttcggcgcttgggaccacccaggtgtattggtacccccctgagacaataagtactcagctgtcctcctagtatgatgtggcgataatgaatagacagtattgttgaa

SEQ ID NO: 17154 - DNA, 538 bp, Emericella nidulans
cgtttaccttcatttcaacgcgatgaattgacccagcccgggcgatgcaacacctcaactcgacaaagagactgctgggctcagcgattctgatcaatcagccacttttctttttcctaaatggattccactgtaatttctttttctctgctttgttggtttgcgatgctaacgatcgaaaaatttcccttcggaccgaggaacctgcatgggatattatctgaccacaaaacgagttaacatacaggtagacaagaccattgtgagcagattacgagtcttccgttctttcatcttttcgtttttccaattttcctctttgcatctacctcaatttatggaatggaggctctagaagtttgaactcaggaaagctggtcagcgcactctatgcagaaggaagcaataaagctgctcaacagcagtggaggatgcttggtccggatcaatcattgtaagggattggcatggtatcggtccagttggaaatgtctttcaaataatgaataatgaaataatggattattgacttacccct

SEQ ID NO: 17155 - DNA, 500 bp, Emericella nidulans
acgcgactctagggatgctcccgggcaaaattaaaggttttggcggcgcaatggacctcgtctccaacccttccgcaacaaaggttgtcgtgactatggagcataccgataagaagggcaaccccaagatcgtcaaacagtgcgaattccctctgacgggcaggacttgcgttagccgcatcatcactgaactctgcgtgttcgatgtcgactttgtcaacggattgactcttattgagttagcggatggtgtcacagttgatgaggtccgggctaagactgaggcgccgttcaaggttgctgatgatctgaagcctatgctgtgataggggtatcggcatgacatctttgttgttattttttttattctgcatccaatcagcggcgtacctttgtgatttcaagcgttgacagtgcttttggaccttgtttgtacatagtggttgacgacaggaataccttatcatgggatatctagtaaacatataaccatacatata

SEQ ID NO: 17156 - DNA, 297 bp, Emericella nidulans
actacgagatccacgaatctttattttctcttctctatatctattcagctttctacttttttatcctgtcatttctggcgtgcatggtgcatggtaaaaaaggaatggagcacagcacaaaacttgaattgatcgagccggttttggagttcttggatggattgaatttggattggtggacaaaatcattggactggttgcattcatattgcatttacatttgcattcaccgatcttgcctgtatctagcgttagcctacaaatagctatagcaattaccacatattacttgaacca

SEQ ID NO: 17157 - DNA, 500 bp, Emericella nidulans
gcgaatgatttcaaggtcagtgttctgtgacttctttttcgtctgggagaaggtgattaaatggtctgatacaggctcgtctggcttctaccactgcctggatcgctagtccggctgagacggtgcagttgttggatgagttggacacgatccagaaagttctagcgtgagagaacttacattttggcatgggttttattcggcgcctacttcggaagagattctgtaatcttcgcttgtgatctgactcggccatgtccgggttttggtttcggtttctttcagcgtcttgtcattcatttgatatggttaggtatttcttgttataatctgctgcggccgattcttccatttccactcgacgcagtttccttgtaatcaactgccgcggccgcttcctgccattaatggaattagctagagcctgttacggaccatgatctgtgcggtttagctcagatttaggtagaattgccaataggactcgattaacactataa

SEQ ID NO: 17158 - DNA, 605 bp, Emericella nidulans
accaaaccatatcaatatttaaatagatccactacaatccaacccaacccgaaaatgaagctctctgcccttctcctcctttcaacagccgccctggccctcgccaaaccaaccccgccccccaagtgtggagtgtgcaatcctatctccggggtcaacggctgcgacatcacaacctcgtgcatcaacacgggaacccgcttccactgtgcctgccgtgctggctacaaggcttctaagaagaacaatgacgtgaccaagcagttccgcctgccgatgccggattatgagttcttggtgtttacgcctgagtataccacctgtgatacactctgcgataacccgtatggaaatagcaaggatttgtgtaaggaggtaccggtatatgataagtgtgctgtttaaggttcttcgttaggtttgggaagtgcaagaaaggttgggcggagaaggtgattgtgacgagtggttgttgataagacttgaatgccttatatatgtgagatgatggaacgatttacggatcattcaaagcttgttaatattgattggtttagtggatagcttccccttgaaaatttcatgattgattcaacgggcaccac

SEQ ID NO: 17159 - DNA, 654 bp, Emericella nidulans
tttctagtccaagcgcttggcttctaggtgggatttgcatgattatgccaaggttaccacttgggcacctatccaatctgcctgactatatcccagcgataagcagagactgtacggacatccgcatgttaaatcacaaagctgatttgcccgtgttaagggtccagcggtcggagtccgtatcgtgaatgaccttcccttcggcttccaacttgcttagcacctgtacgaccccatttgcagcggggagatggaggttttcaggaacatctgtgtagatgatcttcactatctcgagaggagtccaccacgacttccgctccggagagcgctcgtgatcgccgacgtctagttttccgtaccgcagcacgcggatcacctcgtcctcccgctgctgtcggtgccgtatatactctgcgatctttgctgtagcattctcgacaactgctccatgaccggggtatcctcgacctgagacccgattttgcattcgcttcaggctatcgaggtaggtctttaggtcctcaaacactgctgttccatggcctagaacatctatatattaccgaatcagcgccttggatgtaagaatcatcaccaaggagtatgaccactcactatcacccgtgaaaatggcattctcttcctcaaata

SEQ ID NO: 17160 - DNA, 500 bp, Emericella nidulans
ctgtggttaagagaaaatcaagcagagcagatccctggctttaattaagatccagagaataacccctcttgtgctgaaggcaaagggcattctccacgaggacaagtccgacaagacgaacttttccttttcccttcacctggtccttgtgcttagaaaataattttacctcacaacttcccccatcctcgacctctcccgacttccaccctctcactcctggttatcctttcctcatcgtcagttttttttatgtcacaaccttcttgcccgccggttctctaactgtcacttgcacgtccccgttcctcagccgccagccgcgcgtttccagcgtctgaatcatcgctccaaccccgccggggcagaaattcctttttttttggccagtcggtcctaagcgtattgtttgtcgcggccggggtcttggtctcgtctgatctgagcaaagcacacccgagtcacccctcttttttcatttataatagactctgatcaca

SEQ ID NO: 17161 - DNA, 850 bp, Emericella nidulans
aaagcccggcaaagcattgttgaagattccgatgctcctaaacgtgtcaaagatgctgctcgcgacgacgctcagcaggcggacaaacgagaacgacgtgcgtcggccgctgggtctgcgcatcagaccggagcgcctcatgatgacctggaatctgtaagcagtggcagcgatgacgagccagactctgaagaaggacctggccccaacgtcgccgaaacattggcacgtattgccgcaggaactgctacgggaaccgccgccgatgagcgacgtaaagatctcagcccagggacatcgtcccgcgaacggagccctcgttcgcggcgagattcggatgacgacggcaccgaacgagtgccgccatccaagctccgcgaacgcgctggcctcgcgcttccgcaacaagcgctcgacctggacgacaccggtgaaacacctgcggaacgtcgacgtcgtcttgccgcccttggtgagtactcggactcagaagacgatgtggattcggatgctgttagtgagggtgaggacgaccacaacaaccggaaaggtcctggaaaaatctcattcgcagacgggacgaaccttgaagcgggcagcacttacgaccgtgagggcaacggcctgggttcgtcgcggatgcactcgcgccgcagcaggtcgaggatatcgtggggcggcgaaaaagggcgcgagtagtccaaaattaactgcaacaagagcagggtgtattctcttttaaaatatctgtttagtttccaacgtgggtgctattgcatcagtacatattctagacactgacaagttactgtctatagatacttatcattgctaatcatacgaacgtttc

SEQ ID NO: 17162 - DNA, 271 bp, Emericella nidulans
gcacgacgggtctttatagctctgggcgtcatccagtcggaactgctgctcttttctattccgatgtatattttcggcaagcgggctcgcatgtggactgtgcgcaagaaattgatggagagattctaatgattgcctttggataaggcgtaacggttgttcttggatgcataagatatgtttgggtgtacataattccatgtttcagcctctagagtctagattcatgataaatgctacgagacatgaaattcactagggaaaacagcta

SEQ ID NO: 17163 - DNA, 500 bp, Emericella nidulans
ggtattggaagcagtacgctctttacattgtgtatggcgatcaggaacgttgtctcgggctagaagaacggccgcttattctctttaagcagctagaaaaggaagggcgaaagccgatgtttatgctgcggaaacaacaacaggcgcctgaaagtaccactgcatatccacccagcgggggctcagcgccgaacagtgctggctttgagccgcgacaagcgcagatcaaccttcccggcggagttttataaaggcatgcgacttggatgaagcgacttcttttttttttcttgagatacccctccattcgaggccatttcgacccccttcttcacttcgacattcttccgattctccgtatttagctttcaagaccgtttaattcgaatttgcgcgggtgcctggcgttgggattggatagggaaaataatgaaacaaaccattagcgtagctgttattttagatccttacgatttcaaagacttttcttgagcagctgg

SEQ ID NO: 17164 - DNA, 500 bp, Emericella nidulans
atcccaattgaccaacttcacctccgcaactccccacgacatcgacaaatccgaccgaccagcctgagcctgcttcctacttttgaatcaatacttctcgctaccaatattgactttcatattcactccttcgttgcccttttctgtagcttctcggtagcgcttactgtatttgactcttatcgagagtcttgaagctctccttccccatggatcatgacgactttgatagcgtctcgtggcgccatggcccagacagcgatatttctcgacctacaacatctggaacagataccgcagaatcacctgaaactcgtcgcgaccccaatggcaagcggaggatgagctcggcgagtgagattccccaggcgggaccacatgccgacgccttggatctcgcaggcatcggagatggagttttagaatgtcgggtagacactccaataaaggagaatgatggtacaaaggatgcctacatatcgtacctggttacgacgcat

SEQ ID NO: 17165 - DNA, 850 bp, Emericella nidulans
ggacgaaacagcatctcaggactggttgaaaaagttggatgacatgcacaatgcccttcttgctgtcaacactctccttcagacgatgtctggctcccagacagaacgggacctttgtcctgaggacttgattgaagcgattccgaacctacttaatcaggtcttcgacaactgcataataccagccgttgaagcccggcccggaggaatggacgggaaatttttcgagctctgttctcttcaaaggcgtgccattggtggagtaattcagcaaagcaagaaggttctcagcctttttgctggatttctagcacggatcgatgtttccgaaggagcaattaccgcaaccgagttttttgctgccaaattgatattcgttgagaattcgcacacggaaaaggactcggcggttggtagtcaaaaatatgaatctgttcggcgcggggcaatggacattctcgcaaagatattttcgagatatccgtcccagcgcgcgttcatcctcgacgagatcttagtttccctagaaaagcttccagctactcggcaaagtgccaggcagttcaagcttgccgatggcaaaaatatccagttgctaaccgccctggtcatgcagctcgtgcagaccactgccttagacactccttctcacaggtcggcaaagactaagcgtaagattgtgaagtccgaaggcgaggacgatggtaccgatgacgccgacgaaactattgatgatggtgataatgatcagtccgatgtatcattagcgcgtttggctgcgaaggtcaatggcctgtacgataatgctctgcgaagcgctcagtatattatcaagttcattgtccagcga

SEQ ID NO: 17166 - DNA, 828 bp, Emericella nidulans
atggaccagctacctctttcccctcctgctgagtcggctcttccgccgacaccggccttgttccgctagactctcccatccgcacaaccgcaatccacgagctcctcccggacatccgcgttcccagctcacctcaccaaccacaccggtacaacccggtaacctgtgcaccgattgacgcagatgacaagcgcgtgagatccgagatcgaccaactgcggaaggactttccaacaccagatgctgcgctgcaggcccaggaacaggctgcgcgcgagttgagacagaaactagacgatgcggagaagaagcgcgaggaggtgcagagggctatggataagaagatcaaggagaggaatacggagttgaaggttttagagaagtttcaggatgggaaggggccagcgcttgctgctccttaatcggagttcttctcttgcttggaatatggcaaaaaatcgcttccaggggcgtccaatggcatcttacaggaagctgcgatactggcgagaccgcttatagtgcttgttatgggagaccatgtctgcatcttggcgatggcgatcctgttagcttccggcttgggatatcggagtgactcggctctcctggaaatcgatactcgcaggaacgcactgctggacgatgaagtgccgcgtaagagcaactcctttggacgatttcaatggtgcttcacaccaaggatactccggagatttcgattacgaaacgtcaatataggaaaagaccgtccgatgcataaaatcccccggttccttccgtactcagcggggagatagaccaatattatgccacaaaacatcgata

SEQ ID NO: 17167 - DNA, 850 bp, Emericella nidulans
cagccgcaaggccgtccgattgcttacagctgcctctcggcagtgcagatgattccaagcaacgctcgaagcttgctgcaaaccggtgttttcaatcacgggctgaccgccctcggaggtttcacacccgacgggaaggtgacatccgaagccgatcagtgacctcttgagccgggccagtcttcgaatgcgacttagactggtatccttcgatactttgctgtaggtctttatgaacactccagtgatcaagcgttacaagatccgatggcatgagtcacagcatgactcattccgcgagtttctgctagtatggactggtataaatgagcggactccaataatcgagtctccgcacactgtgaaactcaccatcatggcctccaaatctccgccaccaactgcgtccgctaaacagttttactcgacatcatcgccgttcgaggaacgaatcgggtattaccgagccgtccggcgcggccagcatatcttcgtctccggcaccacttcagtcgaccccgcatctcccgcccatgccccgcaaatccttttcccaaacgacgctcgccaacaaacgcgcgtggcgctccaggaaatcatcaaggcaatccaagctctcggcggcaagggcgcggaggacgttgtccgcgtgagaatgttcgtcagccaacctgaacactgcaccgccgtgggccagggtttcacggaaaccctcggtcgggaaagccgaccaggtgttggagcagcggcgacaatgctggtggtgcgggatggatttgtggacgaaagaatgctggtggagattgaagtggatgccatgttggatgatactgagagtgaaacgatacgc

SEQ ID NO: 17168 - DNA, 850 bp, Emericella nidulans
tctggcattactgatcactgaccgtccttccgtacatatataggctgcgacagcactgcaccgccagcaccagatccaggcgtcatttgagatttgcacgaacaaacatggcgagacaaccttctctagattccgaacgtcccatcatgacccagtcggtaagtccactttcactttcgagcgtctccattaacctgtaatctaacccagtactatagaaccgcgcctcgaaacggttctccaccgtcagcgggagcccttcgattgcctcagaacttaccaccggaagcctccctagcggcgaccccagatacacagaatacaacaacctacgcgaggggctgaaccgcctggaaaacaaaccgcttgcaaagcagcggttcgttcctagcgccgaaaagtccgagagcttgagcaagcttgctctaggcgccaaagtggagcgcgcgctcggacggaggatgacaagccaggatgcagtcatgcgggagaagcctgcgctgaacgagaaggctgaggagactacttcatgaacgttgacgtgcttcgcgatcattattacaaaccccggattttgagatactttttattttcctttgtcgtctcggctttcgcgatctggtgttcaatcccgtgcttactcccgtctgattttctatgtggtggttattatgggcggaagtcgatgtctgctttgacgagaagtttgtgctttaatgtctctcatacccccgttcttccagcttaatgtcgtattttgctcttcatgataattgtttttgatcagattattgtcgcggatatgggtcatctagtgtcatccaatttgcaaaacagatgaatattcttt

SEQ ID NO: 17169 - DNA, 850 bp, Emericella nidulans
aactcgtcttagacaacgttctccatattccaagtgctctctgtaatggcttttccatcaacacatatcacttcactcatggcgggacgaccaggtgcagcccttttttccaagggactgatagacaaggctccgccctttggtatggtcagcccttccgagggctcgagaagctggttctagcgggaaatcctcaaggagaatcctatcttgatgatggtccgaaattgctgagcatgaccctgggtaaaacagaactcgatgagattttgtcagcaggttagccacttccagccccatctactcctgaacgatttgttcttgcgctgactattagagttagattaatgaagcttctttccagcgttcaggggcggacgaggatgatcaagtcaccagagttgtggaaagtagcgtctacggtcagcttacgatcctccatgacgtccatagctgcaagtgcttctgccctatcatgacctccaattagtgtccttgcctgaggacgaatccctgattacctggtcaaatatctccagcatgtctccgtcttgtgcacgaatatctgcgttgtctactgctttgtgtgacgagctacgcccgaagtcttgattcgagcattgcccgaattgcgacgagctggtccactaggaaccaactgccgattgaatccctggtccgggataagccctgtacaggccagttctcgtatgatcgttgctgacttccggaatgacgaatcaaggttggcaccaacgtcggtccgtgacacttataggaagctcgacggtcactgtgttttaattctctagcgaattcttctagtctaatactacctgttagtatcaac

SEQ ID NO: 17170 - DNA, 850 bp, Emericella nidulans
ttcatctctccccgcagccgttaaagacgcctctatcgcctttatttgcgtcggcgatgactctgctctcgatcagatcataaataccatcacttcagatgactctcccgacctccagggtaaaatcatcgtcgactgctccactgtccacccagacacatcccgccgcgttcacgcgactctctcctcgaagggcacgtcattcatcgcctgccccgtcttcggtgctcccaacgccgcagatgcaggccagatggttgttgttcctgcaggttcccgggcggcaatcaaccgcatccaacccttccttgaaggcgtcacctccaaagctgttctggatgtaggtcccgaggcggagaaagatgttggccgcgcctcgctactcaaggtgttaggaaacacattcattttgaacaccgtggagacgctggcggagggccttgttgctgctgaaaagtcgggcctaggtattgacgtgtaccagcagtgggttactaccatgttccctggcccctttgcgaagtatgcagagcgcatggcgaccggggagtactttaagcgagaggagccgctgtttgcggttgacctagcgaggaaggacctgagacatgctgctgatcttgctaaagcagcggggatgactctgcctagtgtcaaggtgacggacgaccttttgaaggttgtcaaggaggaaaaaggggagaagggggatattgcgggtgtttatggtgccattagaaaggcgtctggattgccatatgacaaccagtgattctgtgtatgtggacagacattgagtgctttatatagttgactagttgttatcgttacattttcaattgcttggtta

SEQ ID NO: 17171 - DNA, 82 bp, Emericella nidulans
ttcccaagaacatattcagtcccaaccatttgaccctcatcgtcaggtttgggcgctggttcctcccgcgtactccacatgg

SEQ ID NO: 17172 - DNA, 500 bp, Emericella nidulans
agtcatatgcttgtctcaaagattaagccatgcatgtctaagtataagcaatctatactgtgaaactgcgaatggctcattaaatcagttatcgtttatttgatagtaccttactacatggatacctgtggtaattctagagctaatacatgctaaaaaccccgacttcgggaggggtgtatttattagataaaaaaccaatgcccctcggggctccttggtgattcataataacttaacgaatcgcatggccttgcgccggcgatggttcattcaaatttctgccctatcaactttcgatggtaggatagtggcctaccatggtggcaacgggtaacggggaattagggttcgattccggagagggagcctgagaaacggctaccacatccaaggaaggcagcaggcgcgcaaattacccaatcccgacacggggaggtagtgacaataaatactgatacggggctcttttgggtctcgtaattggaatgagaacaatt

SEQ ID NO: 17173 - DNA, 850 bp, Emericella nidulans
gtccgcgggccgctggcttcttagggggactatcggctcaagccgatggaagtgcgcggcaataacaggtctgtgatgcccttagatgttctgggccgcacgcgcgctacactgacagggccagcgagtacatcaccttggccgagaggcccgggtaatcttgttaaaccctgtcgtgctggggatagagcattgcaattattgctcttcaacgaggaatgcctagtaggcacgagtcatcagctcgtgccgattacgtccctgccctttgtacacaccgcccgtcgctactaccgattgaatggctcggtgaggcctccggactggctcaggagggttggcaacgacccccccgagccggaaagctggtcaaacccggtcatttagaggaagtaaaagtcgtaacaaggtttccgtaggtgaacctgcggaaggatcattaccgagtgcgggctgcctccgggcgcccaacctcccacccgtgactacctaacactgttgcttcggcggggagccccccaggggcgagccgccggggaccactgaacttcatgcctgagagtgatgcagtctgagcctgaatacaaatcagtcaaaactttcaacaatggatctcttggttccggcatcgatgaagaacgcagcgaactgcgataagtaatgtgaattgcagaattcagtgaatcatcgagtctttgaacgcacattgcgccccctggcattccggggggcatgcctgtccgagcgtcattgctgccctcaagcccggcttgtgtgttgggtcgtcgtcccccccgggggacgggcccgaaaggcagcggcggcaccgtgtccggtcctcgagcgtatg

SEQ ID NO: 17174 - DNA, 850 bp, Emericella nidulans
acatccggtccatgctattaattcacgacaagcgaatccttgggattctgctccaggaattgaatgacctagtcgtgaagcacaatgtcttgacttcccgacaggctgacctgctccggaaaggcgttgtcttcaccatcatccccggatcgaaggagctagatcagctcattgattcgtactataaaggcaaggtatccaagaaagactttattctgaaacctattcgatctggtcggggggaagggattctcctcggtggagatctgagtacagtcaagtgggaggcaatcctctccgacatgaagagcgccgcgttggcccctagtcgagcgcagtatatcatccagccgtttgtggaacagcttgaagcggatacgttcttagatgaggaagctggggttcagcggactcgccgtgttggcacgtatcacagtatgcatggacagtttgtgtcattgggggtgtggagagttgggatctcaaagagtcgaacgatcaatatgactacgggcggtgcttggaaattgggtagtatggtaagaaaaatgaactagataggttagttctgcaggagcgaggtatgcaatactgaaattccttctttgggtcagttttgataagcagcaaggacgatgttagctgcttgctttgtgactgacacagcatcagtacagagtgtgtgtgtatgtgtgtgtgtgtgtgtgtgtgtgtattcataccctggcccctcgcctaggcgatatgcaggataccactatctagtccttgtatgtgtctatgtacagtgaaccattactttccgacgaatttagggctctgtcatggcctgtggtggccaatgcctggt

SEQ ID NO: 17175 - DNA, 128 bp, Emericella nidulans
gcgtgtttgtattttcgcttgttgttttcgaaattcatataggacttggtgtgatagggcgggtctttcgttcttgatacccaggatagtgagactacccaaggattcactatttcttcttcttcgga

SEQ ID NO: 17176 - DNA, 850 bp, Emericella nidulans
aagatcagcaatccggagtacattaagtactactacgaggccgtcggagggacaccagtggatgatccaaatagccgttttcatgcaaaggtcccgatgcctggcatcatgattgctcagatggaatgcatcatgtacaccagagtcctccgtcctctctgcggtagagtgttgacggctctgaaagacctgatcacggagaataaacgcgagcattggttgacgatatacctaaccttgttcatcttgctacacagctgcgcgatgctaacaagacgggactgggagactgctcgcgaatttggcttgccggttagtccctgcgcctatggttgcaaaactggtccacggaactgactcgcgtacacccacagagcgtatatgccaaccgcctgagcattgaaggaatgcagaagggcatgcaaaccgcgctggctcactttcactacctgaacaaaggcgtcctcccattccatctgacttacgacgagaagtcgttacgcagcctggcaaccgccgcggacctagatagcgaggagctcgagtttgtcaaagagacctcccagcacatcaaccaccctgccagaggtaagtgcgctcctaatcactcctagtccgctgtgccgagcgccgctgatctgacttcgccgtagcggcgcgcatggctgagatccgggcaaatcgggaatatggagacgatctgtattggatttcacaattatatgatgttgagtgggcgcctggaccgactgtttagatcttgagaatagtacctagtataatagccgccatcccgtacaattaggaggttaccgtgattcgaatagatagaaagcgtaatgaatgccat

SEQ ID NO: 17177 - DNA, 850 bp, Emericella nidulans
gtaccgcagagatatgcgagcacctccttcaaaccccgccgcagtccctgaacgcgattgcatacaattatcttgttcccaacgtcaagggattagagggtctcatcaaggtcatggatgcaacaggggcctcggcaagcacaccgggaaccaaaacaactccgcgacaacgaccgagatttctctttttgctgcagccacagaagccttttccaaagcaaacaccaattgtaccatccaggaatctctggaccgcattcgccctatcgtagcattggcgaagaccaaagacattcgagttcgcgggtatgtctccgttgccctaggctgtccgtacgaaggtccagatgttccgccgtcaaaggtggctgatatcacggcaaccttgctcgagatgggagcagacgaagtatcagtagccgacactacgggcatgggtactgcaccgcgcacgatggagcttcttcaggctctgaaggcagccggcatcgccaatacagatctggctctccatttccacgacacttatggccaagcgttggtgaacactatcgtaggcttagagcatggggttcgcatttttgacagtagtgttggcgggcttggtggctgtccttattcaaaaggagcgacaggcaatgtctcgacagaagatctcgtccatacaattcatggtctcgggatgcatacaggtattgacctggaggagatgtcgaggattgggcaatggatcagtgatgagctaggtcggccgaatgaaagcagggctggcaaggcgactatagcaaggttgcaatcatagtctgtatactatgcaaggaaggcacagtcctgcaagatcggaaatacg

SEQ ID NO: 17178 - DNA, 500 bp, Emericella nidulans
caacgctatcggtaatgcctttcacacaaacaccgagttcgtcttcaaagccggctccgcagccgaggcgaaggaatgggtgaacatcctcagggacgccgcgaaagccccaatcgcaaccaccactgctgccgccgttagcccatcgaccgtcacctcgccaactagtcctggcgcagcgtccacagccacagccgctcctgttcagcctcccgcatacgagaaggaatccggtgcgggaactccaccagctgttagccgcaccaacaccactgcaacaacagccagcactgctgagaaagttccatctcctgttagtgagaagaccgaggctacggccgctgcaccatcgacagcagctgcggctgagaaggctcccctggagaagtcgtgattggatatacctacgtatttacgtttgatgatctatactcatatctatatcccttttgatatatatgtctatattatgattataatttggttatttggatatctta

SEQ ID NO: 17179 - DNA, 500 bp, Emericella nidulans
cgacgtgagaacggcccaaagacgcccttgttcggctgatcgggcgaatctgcaggcccagtttgtatgggacattttctgccaccgcctttgccccatacaaactgggcccccacgaacgactttcgcacggccaaacgtttgcatccatttccgtactccaactggggtcggtggatatatgtagggagcaagtagtctggcggccgaaaggcagccggacgaacctccgtctacatccttccatacttggcaggctacctgtccgagctgatggtcttgaacccccgcggttaggcttcagcaaggcccgtagccaagcacgtcgggatggaccctgggcctaaaccccccggagcgtcctccccccggcgtgtcaagccctggagccctagcgtgtgctgggccccaggcatggtctgggttcggtgtggattgctggccgctggccaaccttctctcccgtcccaatccatggggagcgccgcccttgagtagcc

SEQ ID NO: 17180 - DNA, 850 bp, Emericella nidulans
tggtggaatgggcgtcactgtttcgggtacgatctggtctaaccctaaaactaccgacacaactgcgtcgaacaaaacgggctgggaaagtattgtaacaggtcatcgtggagataaatatgccaggacctggttctggggcaaaaagaaagctggacgttgggtgtttgagactggcgatggaaccgatgttaaggtaagattgaccactggcattcaccaatcttaactgacccacatcctcaacagagtgttgctatttcccaatgtggtacgtttgcagtggttggatctgcaggtggtagcattcgcctcttcaatatgcaatcaggtcaataccggcggagctatccctgtcagaaaacaaaatacgacttgggtggtgaagtcagatactcgaacaagcaaattcatactcagcatacaaaatcagtcactggtctggcaattgacagtttgaatcggacagttctcagctgtgggttggatggaaaagttaaggtgggacctttcaaataaatatcactcttttccctattactgactgtgtactaccctgttacagttctgggatttccagtctggtttgttaatcaaggaacttgactggtatccaatgacagcaatcacggccctaaggtataatagtatgagtgagctagttgcattcagctgtgatgacctttccatacgtgtggttgacatggaaacaaagaaaatcgtgcgtgagctgtggggatgtgctggacaaataaatgatttcatcttctccagtgacgggcgttggataattgctgcttctatggactccattatccgagtgtgggacttgcccactggtcatctgatt

SEQ ID NO: 17181 - DNA, 850 bp, Emericella nidulans
catgataccatgtatacagtctatagtctccacaagctgactggacgagcaggcgctactgcggtctaatagctcatgagaagacggggcttccaaacatccttttgcgttctgctctgcttgatcttcacgagtcctttcgttcagatctatatacccatcctgttttctttactcatgtaagaactttgctttccggggattgtgatcttctgtcggtccagtcatctcatacctccgcttccacctttattatccaactctgacctcctctcgcactaccggtcacacatcccttccaattcctcgattttgcatattgtggtcactgggccgtgttcctgcggatatcgcggcctcttctgttctctcttgacctattccatagtatattatgtttggtgattccggcagttctacactcagtctcgggtgacagtacatggtgtttgggcgcattgaaacctcggcgaagggcatggaagggaccttaagaattttcatgaatttcgatgttcgattgaatctttgaaccctgttacggacaagtcagtcagagacatgagaccgagtctgcgcattgctttctttccttgagatatgattattgaagcaatatcattgtcatatctactgatgcgaactatctctgattgaacagctgtccttatctgtctcttgcttctctacttatacttgcttctatcttttgtctctatatcggtctccctattatacactcgctaggggcaacttcattgcattcgagtgctatctctattgtatcttgtatctaatcctgctggtcctttgctcgggttgggttctcgaatacatattcttggcttgg

SEQ ID NO: 17182 - DNA, 500 bp, Emericella nidulans
gctgggaactgacacatggcggccttgtcttcaaagctctcttttcttctctcttctacccgtcacttctctatctgttaatcctccgtcgcgtttccgttgtctgagcgagctgttgcgccgcgttgcagatttcagcgcccacaaaaaaaaaaccaaaatccccaaaaaggaaaaggcgtccgttgcccatttattttcaggagatttataggatttgtgtattttgtgccgactttctggattcactgcaggatttgaaatactcccacagccatgaaatttggacgcaatttgcccaggaacgtggtgccggaatggagctcctcttacatccggtataaggcgttgaagaaactcatcaaatccctggcggaccgtgtgagggcaggtcacgaggcagatcttgccggtgagccacctttgttgcgtcttctggaccgcccggcggccctcctaaccctcgcgctctaggcttcttctactccctcgaccggaat

SEQ ID NO: 17183 - DNA, 850 bp, Emericella nidulans
gggggcaacgatgtgaaccgagccgcgaaatatctcctctggaggtttaatcaggtcaacagggcgcacctgaacttataccctcagtaagtcttacgcgaatgacctttccccaattcctggataatctaataatctggaaaagcttgacacaagctaccgatacaacgaatatccgactagtatttgccgccgtaaaggagaccattctgcaaaatgctttgaaagactcggggatcctgtaaacgacaactgagtcgccttagcctcattgagcccgacatggctccatcataccgaacgaaaccacacacctgcgtccattccacatttcaccctgatggcttcatgctcacatttgattcctctcttttttccttgttctattccccttcctacgttttttggcggagagttttcggcgtaacggcattgatgtttttcaattacccatttctttggcgccgggttgggtcatgttcattcgtacttctagcatggtggttccctttcctctgcctgtctcctaattccccaccttaatcattctgagatcgggcgggtgcgtgattaaagctgtttgtctgcatcgtttagttattgacacgagctactgccttttgtctcttatgtcttgtggtacatgagcattatactgtgatctaaaaagttgcagaccgcggcactatactttgcatatatcatgcgtgagggcttctgaaatccagtctcttgtgccctgtgattgtttttcttgtgttctcttatccatacgttcgacctccaatggtcaatgtcttttgtatcatgtccttggataggggtttcttgaaatatacttctcgaattg

SEQ ID NO: 17184 - DNA, 552 bp, Emericella nidulans
gatgaagaacgcagcgaactgcgataagtaatgtgaattgcagaattcagtgaatcatcgagtctttgaacgcacattgcgccccctggcattccggggggcatgcctgtccgagcgtcattgctgccctcaagcccggcttgtgtgttgggtcgtcgtcccccccgggggacgggcccgaaaggcagcggcggcaccgtgtccggtcctcgagcgtatggggctttgtcacccgctcgattagggccggccgggcgccagccggcgtctccaaccttatttttctcaggttgacctcggatcaggtagggatacccgctgaacttaagcatatcaataagcggaggaaaagaaaccaaccgggattgcctcagtaacggcgagtgaagcggcaagagctcaaatttgaaagctggccccttcggggtccgcgttgtaatttgcagaggatgcttcgggtgcggcccctgtctaagtgccctggaacgggccgtcagagagggtgagaatcccgtcttgggcagggtgcccgtgcccgtgtgaagctccttc

SEQ ID NO: 17185 - DNA, 500 bp, Emericella nidulans
aggtagcgaggcgagcctatgtagcgagctcagtagtagggcttccgttgtttcggccaccgtatcgtgtgtgctgttacacgcgaggatgacagatctgcggtttccttgtcgtttttgtttgagataaacgttccttgcgttgagcttggcgtggcttaggctgagccgatggtgtgttggtgatacaagggtctgttgcagtgccacgacgtacgtacgtcgtaggaaagaacggccgaggcgtgtctacctactcttcgctctttactgtagctattcgaaccatgtctctctcttgccagagtgaatggctaccggctggccaagttcaaaagtgacgtcgcacattcattactggatacgtatatacataatgcatgccggacaaggccaattaccggtgcaacaaccaagttttcaagcacaatagacaacgcagtcgggtagtcgggtaatcagtgatcagatacgctgccgcggatacactcacggtcaac

SEQ ID NO: 17186 - DNA, 833 bp, Emericella nidulans
tttctctaacagtactgctctaaccagtccatcatatctccaactgtcgggcactctaggaaaagcgagctcttgacctccaaaccaagctcggcccggaatttctctgagagcacaagtgacatgagcgagtcaactcctagctgcacaaaagtggcatccggtgtcaactcattcacgctttgtcctgtctcgttagcgatcaattgcaggcattggccaactacgccggtcgcttctggttgagaggtcgttccgttcggaccttcggcatctgctttgccgggcttctcctcttcaggcgttttcacgccgttcattgcgggtttcgacggcgttacttgttgaggggtgttggcattgtgcgcttacactgtggacagccacaacggtgtcggttcagctggcgccgtgtccggtttggagaccgacatcatggcatgtttggttgcagttgtaggctcagacgacccaaaagccgccattgattgtgtgtaggctgcttcagccgaaaagaatcgatccatgagcaggcgtggtactcgtctgaacttgaaatgaccaaccatgccaatgatctgattatcctgcaaaatgtacaaatcgcctccgtacatgttggcctctggcagtgggaacatgcgcacatagctctgatacttgacgtcagggtccagttttgccagcaaacggaaactctcatagcctggtgtgacgaagaagtaatcgcgggtgttggaggcatcgctcccgttcatgataagaccagcaagatgggaaacactatcgatccagtgcggcggcgtatggaacatacctcggcgttctggcgt

SEQ ID NO: 17187 - DNA, 850 bp, Emericella nidulans
gagggtggggacctccagatctccaagtacgtctgggtgatggtggctgtggccgtgccgctgacggcatttgtggttctttggtggggggtgtgggtgcgatatgagtatacccagctcccttctgccggtctcaccaagcagcgactgaggaggctgctcaaaggcgcagtcccaaagcagaggaggctactgcgatcgcgtaagtcaccaacgtccgcctaagttcaagttgtggcctgggttaccccacgcagcctcgccatttcctgtttagggaaaactctggtcatgacccttgtcgatatccttgcatagctgcaacaccgcggcttttgcgacgaactgtcgatgactatgactgcgacatatttggcggcgggacttgttggggcagagcacaagggtggcttaggagaagggtcttttttcttattctcgttgacttattcttacttctcccatctctcccctaatacagtacgtaaggctctcattactcttggctcttaaaggtctttttctttttattttctgttttttctgcctttgcggccttttctgctcatttcgcagcacataggatgatgcactttaggtcttgaaaacaatccctcttcccagactcactataaccactgtgtgtcgctctttcagcctttctctgcatgcttattctcatttatttcgaaccggcactttgactcttatttagtgctctctatcttatctccgtcctgagtatcttcctgcgaatccttttctttctttgagtgtaattttgagccagcaccgatacatattatgaaatgaagcttcgcaaggccttgcagaggggccttttgccctt

SEQ ID NO: 17188 - DNA, 840 bp, Emericella nidulans
gagaaacacatcccagagcatctctatcacgttctctttaccacatcccatatccacaacaacccattcaatgttgttgaaaaagtgcgagtcccaggaacatacatctctctttcggcggccaaggcagccgcgcatagctgcctttttgatgccggttacgaacaggaatggtttgagacctacgagagcagagcaagtcagacggataaagaaactagcgtctcaagacttgcaagcgaagcgggtctgatggtttatgcgaaggctcccgatggaacaatcttccgagtccggatcagaaacacgcccaatgatgctggattgacgagtgacctcccagatggccgagtctctgtgccactgtactacgttatccaggccagcgtggagtacagcggtgatgaagggagtctgatgcgagatatcgatgttcagcatacctccacctcatacgaaaaggcaagggagcttgcgagtaaggtgttgctctctcctgcggatggaatcacaaaggaaagctttgcggagtatagcgaggcggggcccaacgagacagactgtgggtatggggaaaatgtcattgtacacgctgcatcagactatgggaccaattatctcgtgtctgtcgtcaaaacccaggagctgaaagctgtgagtatagctgaggccgcaatgcggattcgttaagaacccagccaatgcctgtatggggcttgtcgtgttcatattatcttctcgattgtactatgtactgtgtaattgtgttgttttagggccggttgagaaattcctgttctcagagtcgaacatgccgctggcatggatcatatttattgg

SEQ ID NO: 17189 - DNA, 500 bp, Emericella nidulans
aataacttaacgaatcgcatggccttgcgccggcgatggttcattcaaatttctgccctatcaactttcgatggtaggatagtggcctaccatggtggcaacgggtaacggggaattagggttcgattccggagagggagcctgagaaacggctaccacatccaaggaaggcagcaggcgcgcaaattacccaatcccgacacggggaggtagtgacaataaatactgatacggggctcttttgggtctcgtaattggaatgagaacaatttaaatcccttaacgaggaacaattggagggcaagtctggtgccagcagccgcggtaattccagctccaatagcgtatattaaagttgttgcagttaaaaagctcgtagttgaaccttgggtctggctggccggtccgcctcaccgcgagtactggtccggctggacctttccttctggggaaccccatggccttcactggctgtggggggaaccaggacttttactgtg

SEQ ID NO: 17190 - DNA, 757 bp, Emericella nidulans
gccggtaaggtcagctgtcttcttgagaaacggatagctatgcccattgcgctcacattcgctggtgaaattgaccaggccaaggtacgttgcatttctttatccattctctcttgggaaggccaatgctggcctcatcctcaccttttgcttcgtgaacagccactaacttaacatcaactatagcaatccgctaaggtcggtctcgctgtctcccttgagatcgctggcgaggaagtcatggagcagacagagaaggctgacccctcgacaatggtcacccctcccttctgattgaatcacccgttccaccaatctcgccgggagtaatcaggcccatctgagtcctaggtggaaggaacctttgctcttctgatctaccatggagctcctccctcttcgtccttttgttttagtagctattcctccgtccatgtgcatctttggaaaatggtgtaatccctgttcatgcagtttaataacgggttgttggtcagtgaaggcagtcgcttggcgccacggtaccaattttgtatagatccctcttctttctcctgattttctcgtttcgtgttattgtttatggcttcatctatgaccggcgacccgtttacttgttattcttattatcccttttgatgacactcttggttggtcaatggggtcttacccgggacgcatgggagcacttgcagaaaacttttctctttagttacgcatcatagatggaaaatgtaaaacacgtttattatcaagg

SEQ ID NO: 17191 - DNA, 850 bp, Emericella nidulans
gaggggttctctcggactaatagggctaggcaaaatgcaagtcaaccatcaactggtcacaacgggagtcgttctcgatcaaacacggcccattcgtaccatgaccgctttgaacccctgcacgaagaacatagcaatggtgttgaggcacgaccggccattaaatctaacacgcacagttttgccgagtcacctatcagaaaagcctacacgcaagagacttcacctcatcgacctgtcctgaaccgcacctcgacatttgagggctcttcaccattgcgacaggtccatgagcatccggttgccgcccaaattgcgacgcgaacgaatagcgaaaacctcattacgaggaggaacagcgtacaggctcgtccgattagcagggtggtaccggaaccaacggaggacgctggatatcacagtgggagcgtgtctgatcgttcagacaacagctggactgaatcccgccaaacgccatttggcagcaccgtttcaagaagaactagctccagcaccctgaacggattcccgcacaagaaagcccctccgccaccaccaccctcgcgcgcaaagaagcctgcacctccacctccaatgaagcgccccgtgctcagtgcagcccaggtatgaggagtttaataggaaatttatctaggagtacggcgggactgggagttatgtaggacggggatagggcttgtacagttgaactgcgttgtggctatcttttctccgcaatcacctcgcgggcgagcttttgaaggcggatcattgcgggctaccgacgaggttgcttgtgttttgatattacatactattgttaattgctgcttaattcagtgctgtcgtt

SEQ ID NO: 17192 - DNA, 500 bp, Emericella nidulans
ttctccgattccattggatgggccagcggtggtcgaactgggcggtatgcgatcatcattgatcatgggaaggtcacgtatgcggatatcgagactaagaagggtgccgttgaggtgcgtctttttttatttcggcttttggcgttcgatggctgaagctaactgtttgcgataggtctccggtgcggatgcggtgctggctcatctgtaaaggactggtgataaaggtgtttagcttggccgaatgaagatatattgagactgcaatgcaatgccgaggttctgcctattatcacatactggctgcgaccagcataagagctgtctgcttcggctcagacttaccctgtttttgagtgcgatgaggaatgcgtcgtcaagtcgggtcttgaagggagagaggtgatacttctggctagctagagtaacaactaccacaagccagccggaggtatgcctgttttctaatagattttcacatactctcgataagtgacaga

SEQ ID NO: 17193 - DNA, 500 bp, Emericella nidulans
ccccatttgtcgtctacttgaagaccctgaggatcctgccctccctcctcagactgtcgacaatcttgaagggcgccggcgaaagttcgatctcatcctctcacaccttgtcatgcaccacgtccccgacctcaagtcattcttgagtacattgcgagggtgtttgacgcctggcgggagggtcgctcttacggatttcgaggattttggccctgaagcgatcaaattccatccgccgacgaagctggagggcgttgagaggcatgggatccctgcgcggtggatggagaacctgatgaaagaggtcgggtttcaggacgtcaaggtttccgtgggatggacgttgacaaagaaggtcgaggcctgggaagggcacaacccgggggatacgctacaattccctttcctactatgtgaggggtcgagcccgtagtgccgctatatccgctgctcgtcatagtatatatagtggatatatgggggtcaaatttgcggcgtta

SEQ ID NO: 17194 - DNA, 252 bp, Emericella nidulans
cttagtaggctatgttggtgtagttgatgtagtttcctcctgccctttatcctctgagcatattctacaatattggttatgagcctgggctgctatgtctagcctaaccagcaggcttagtaccttgggggattatataaagcctaattactttgcccaatccagcaggagattgaaactgtacgcgatgtgttgatccttgatcttgtgaaggtggccaggcctgtacaacctgcctatctctccctgatt

SEQ ID NO: 17195 - DNA, 88 bp, Emericella nidulans
aggtgccgtgtcggggtctggattactggcgcatgtcggtataatggtctgatttccgagttgaaaatacaaaagcttctagccttca

SEQ ID NO: 17196 - DNA, 753 bp, Emericella nidulans
tctcagaaacacgggacagcactcgattacaaaaatacaatcccacatctccaataaacaatacctaacgatcccgaatttcgccaacatgtggaaggaattgtcaaagattccctattttcgcggagttgccactcttcgcaaaccccagcggactttcgctttcaattcattagcaaagacccaatcccaggcagctcgcaggactttcattaccacacctttacgtcaatcccagccacaagatgaggaagaccacttccatgaccgcagcaagctggaccctcaacgcagcgaagaaacacagtcagccacgacggatgaggttgctactcgtgacaccgcgtttgatccgtccgagacctcaccggaaagcgaactaaatgcgtcacaaaaagagacaaacaagaaaggggattcgcgtgatccactgactgtcagtcccgcagataagaatgttagcgggacacgggatccgatggaggggggtgcggcgaagaacgcggataaggaagatggtgcgcatagcagcggggggtcgccgaggaagaatagggagagaaagtgagctcatacggttagagtactcggagcgctcagaagtttgacacttgaatgtaactaagaattgttttgttgaagtggagcgcatagtagggatatacaattattactaagaagcactgagcaggcaatgagctgaagaaacatctcggagtgtaacccacaaacccatatacacattgtgcctct

SEQ ID NO: 17197 - DNA, 535 bp, Emericella nidulans
gcccgccatgtcgagcacattgccgtctacggtgagggtaacgaggagcgtctcactggtcgtcacgagactggtaacatcgacaagttctcatacggtgttgctgaccgtggtggctccatccgaattccccggcaagtcgccaaggatggtaagggttacttcgaagaccgccgccccgcttccaacgcggacccttaccagattactggtatcattgctgaaactgtaagtttttctaatcgatgattttttgaatcatgctaaccatttcagctctgcggtggtctgtaaatttgtctaaattttcgaaattagcgctcgtatacccgccgggtcagggtcgagaacaaaagagcagctaggccgtttcagttatagaattctcttgtccttctttctttccggtggagttggtttctgatgccacggcttgccttttgctttcttttaaccctgctggttatacatgcaaattctttcatttgttaatgggagttatgtgtcacgtatagcatacatccgacatggatcg

SEQ ID NO: 17198 - DNA, 850 bp, Emericella nidulans
tgtcactgattcaatgcttcgtacttgttgggtagcttgactgggacttgactgctgacatgtgcggaagggcataatcgctggagtacccttcttcgacgaagtcttttcccagctcggatgctcgtacgtcgcctccaacctattcctacctgaacagccggactaacgcagctcgaagagtcgaatggcatcatcatgaggggtcaagccttcctgccaaccaaaaaacccatgttgcaactgtccgcggcccaatccgcaagatcctgcttggcgagcgcgtcgccctaaacatcctcgcccgggtgctcggaattgcaacaaagacctcatccctcctacaaatacttcgcttcccaggaatgaaaaggaactctagctgggacacgaaagacaacgccggggttcagggttgttgagaagtacggcattcttgttggaggagcggacccgcatagacatgatttgagtagtatgacaatgctcaaggataaccatgtctgggcttgtgcgaataacgcttcctcatcgacggcaacgacggctgcaaacggggagcaggatattgccgctgcaatcccgaaggctgttcaggctgccaaggctgtcggggggttcgcgacaaaggtcgaggttgaggttaggagtttggatgaggcaaatgcggcgattgaggcaggtgccgatgtggttatgctggataacttcacgtcggaaggagtgcgtcagaatgctaagcagttgaaggaggagtggactgcaaagggtaagtcgaggggctcgttcctgattgaagtcagtggcggtctgaatgaggtaaacgcgttgcagtatgtctgtgatgatg

SEQ ID NO: 17199 - DNA, 500 bp, Emericella nidulans
aagcgactcttccagtttggttttccgcaccccaagagctagtgctttcaaaagaaatatcgacgagctgatcatggggataagactcgcattggaagacaccgcaggttagcaagagcaactacatgtgagaggattgtgcaagcaccatctattacttcttcgatgaactcatactcattcctactcatattgagttgtcgtgcatgagagacgaacgtcgtgtcaattattcctcgcgagggcgtgtccgacagcacgcgcgcaacgattccctggacaccgagagagttggcgaaaactcttaagtattggtattcaatgcgcagaatatcattgtagcgagagcctgtcataaattagcctacattcgcccaaacacctaggaaccccactctgaatgtcgtggatatcgtctttccatgctgcaagctgggccttccactgctctagtgatgcgaaattcatatgctggctgccagcactcttagccgcggtga

SEQ ID NO: 17200 - DNA, 105 bp, Emericella nidulans
gtagccaatttggctgatacagaggcttctaatgacaggcaatagtcacagggtacaatatctattcattcctgactagtgcaaatccattgtcaagcatttata

SEQ ID NO: 17201 - DNA, 500 bp, Emericella nidulans
aagtgtgaacttagacgaggacgaagaggaggaagaatacgccgaggcgccaagccaatctgtacgaggacgatgatgaagtggaaggtgaagcaggcggcgcggtcgatgaagacgacgacgatgaccaccatcatcaccaccaacaggtgtactcgagtcatatcccggataattctccaagccggaaacgcgatcgtaagcgcaaccactacggtaaagactcttttcctcgccaaacatgaggaactgacctattctcattcgagagacatgctaatacaacgggatacagatgacattgatagctggcgatggcgccgcagagtcgagcaggccttgaccaaaatgacggccgagatcgccgccgcccgcgagcagatggaagcacgcaccctggcagcccgtcgaagatcaggcgtctgggcttggcttcggtggctcgtatgggtcaccctccgacagattatctgggatctggccctcctcggcatgttatt

SEQ ID NO: 17202 - DNA, 405 bp, Emericella nidulans
tgggatatcaagggcctccctgatgcgtttgacggcaagggcagatacaagggttacaaagttacgaccagggacgagctcaccaagctgttcgctagcgaagagttctcctccgctccatgcttgcaggtgagtctttgtgacctcactcattacttatcagatgctaattttgagcagttggttgaggttcatatgcctcgtgaagacgctcccgcctccctcaaaatcacagctgaggccgctgcgtctagaaacaaataaggaccacaggacaggccggttctcttgttgtgatctgagaaattttcatggcattttcaaggatttgttaatcagtatagcatttcattagcatgaaactcctgattgtggggataattaaacttcagttattgtcattga

SEQ ID NO: 17203 - DNA, 500 bp, Emericella nidulans
atggtatgttcaccctcaatttacatctataccctgaatagcgaactaactggtatcagaaaaatgctatggatgctgttttggccagcatggacgttgatggcgacgatagcgacgccgaaatgaaggatgccaatgttgagaagaaagacaagaaggagaagaagaaggagaagaaggaaaagaaagacaagggcgagaaggaggagaagaagaagaagcgcaagtctgagggcggcgagtcggaaaagaagaagcgaaagcacgacaatgatgcagagccatccaagaaaaagaagaaggtttaaacacactatttcttgaaacgggagggcgtcttctcgcggcgttgtaaggttgcttcatttctctgctttggtgatttcgtttttgtttcattttgctccatgatctgacgggctttatttctgtaaattatgtggttgaggcactacgccatccaaaacttgggtatctagttacagaatatctctttttga

SEQ ID NO: 17204 - DNA, 641 bp, Emericella nidulans
agccacctcaataggcattatgacctgctgggactggattcccaacgagacatggtgttgatagcctgataccttaaaatggtgagtgggtttgaccgtgaacattgaacccaaacaaccgactggtcaatccacttgtgtgcatgcgaaagaagaacggcttacaagacgggaaaggaaagatcctcgtcgcaagcttatccaccagctcggacgtcacccattagaggaagtagacgatggttacactcgacctggtcttggcctccgctcttcggccgtgtggacgcggaaaatgtgactcaacttcgcagagagacagcgctttggctgtatgctttccatgtgcccagcttagttcagcccgctgttcatcctagcctggccttttccagtcaggcgctatatttagtcaagtcaggatcaatcgcttatggccaagcgcggataatcctttatctatgtgctttgccaggacctgaacggaacatagcggacaacagcttggtgcattacaccatgcagtggattatgctcctagcaaagtacgagttatgtgcctacacgcgaaaccgaatcatgatcaagaccaacatttacattagatgataattgacttcaatcttactgatctgcctttc

SEQ ID NO: 17205 - DNA, 850 bp, Emericella nidulans
tcagtatttcctccacaaactgcctccttcaatgcatctccgcctaatctcagcaccgtcggtgctgatcgcgtcgtcgacgagctgtatgtctcctttgaacatacgcaagagatcccctggatgctccccggcgttcctcccacgaaccgcaaagtcgagattgttctcgtcagcatcgtcagcatgcgcgcgaaacagctttactcggagcatatctactgggatcaggctagtgttctagtgcaggtgggcctgcttgacccgaagcttgtgccgaaggagacgcaggagaagggtgttgatcggttgcctgttattgggcgcgaggctgcgaggagaattttggatgaggacccggaggtagaggagccagagtttcataatcggttgatcagaaggtcgaggcagaggagggagagtggtagggttgccgagagctcggtgccgcagtcgcccattgtgcagtctgaggcggaggggtctgggccgaagaaggggaagagggccggtcctcaaaatggggagcaaaatggggagaagagtggcattcaggctggggatgatggtgaagggttgaaggatggtcaagaggatggggatgcccacaacagccatgttgaagagcgggacggagctgaaaacaagaaggaccaggagaaggacaagaacgagctcaactctgaatctaattagtgactgcataccccaaaacacttcctcaggattttatatacccttttaatgatgtctctgacacttttctgacatgagcttatgttgcctttagcctgacttactatccgcatcttagtatttgcaatgattcaattaattcattattcactga

SEQ ID NO: 17206 - DNA, 850 bp, Emericella nidulans
cggacaagctggaaaaattggaccaggttcttcagcgcaatattgacattggcggagaaatacagtcgtttctcgggcgcgctcagaggcactcaccctcgcgtctagcaccagcctttgaagaaacaacgtcgatcctgcaaacatcaatcctgcagcacagggttcacagaagcaggatccagtcgctaataagtcgggcaaggggatgtggtatgatcgtaggtgtcacaatatggtgtttggtggtgtttgggggtcaaaactgacggaattaggtccaaaatatattagacatccgggcgacagacaccgcggccaagatcaatgtcagaatgcgtgagctggcagagaaaaacgctcgtgaaaccagatcaatgtccattgtgtcactaatttcggccatcttcctcccggccatgtttcttgccgtaggtaccgacgccctatccgaggaagtcaggctgacaggacattagacactattcggtaccaacttctttgactatgtggagggagatctcacatcgcgtcaaacttttggatatatatagttatggcattggggatgtcggggtgcacggtactgctttgggtggcttatcagcagaggaggaaattgaaatcaaacacatgcagaaagacattgaagcctgtgctgaaaaggaacaccgaagctgtcatccccttgcgctctccagcagatcgcgtctattcctttcccactctttctggaaatcttccagctgctgttgaaacgacctagcgttctgttccgctaccaggcgtcagtaaccatgtatattagaacttgtatgccagacaaatctaccttcaggcccatcaaagg

SEQ ID NO: 17207 - DNA, 500 bp, Emericella nidulans
acgcctgtttcgtctgcgttccgaggcacaacccttctgtacccactggtgcttctcctgaacagaaccaccgcaattcaccctcgccgtccccctctaccaatggagtaaccgagttcactggtggtgctgggcgcgttgccaagatcgagggattgtgcggagtgctggtgggtgttttcacccttctggcatttgcgctgtaattgccgcgctgctttctgctgaggatggggaatgtgagatccttaaaggagattgacgctaggtcgtccgcttctcatctagttttatggtcataacgctcttttagttatgccctttttcgttttttaatgccaggattccttctgtgtatcctacagctagcctgcctgcgggttatattaatgaattttgttcttttgccgaagctaaaaccatgcatttgcctattatattatgttccagaggcccttacggtaggaatgctaagagctatgccatctcaggtaaggaga

SEQ ID NO: 17208 - DNA, 500 bp, Emericella nidulans
tacagcgaggcgtcccgttctggccccggggagtactacgcccctccacctcctgctccagcatacccgcctcaggattatggcgcgccggcctacccgcctcatgaccagggatatggcggagagtaccagaaggaagagaagaagagcgataccggaaagatcttagcagcaggtgcagcgggtctggcaattggagccgttgggggtgctattctggggcatgagcttggtatgtcttccctttttcttccctttggaatctaaggttgggtctacgcatggtgctaacaatttgtcacagctgagaacagcgacgaggagcactcgcaccattccgatgacgagccgcactactcagacgacggtgatgactgagggcaggtttagctacgcagatccacggcatttgaggactgaggttatagtatttttacatattctatctagaaatcctgtacccttcttttttgcaaggcaaaatccactggatctgaaaa

SEQ ID NO: 17209 - DNA, 850 bp, Emericella nidulans
gagatgcgagctacaagagcgccggctacgacgttctcacagagatgatgtctgaagccaccatccctgtcttcttctccgagtacggctgcaatgaagttcaaccccgtaagttcaccgaggttcaggccatctatggcgaagagatgacccagactttctccggtggtcttgtctacgagtacacccaggaggagaacgactacggtctcgtcaagattaacaacaacgacaccgtcaccctcctcgtcgactttgacaacctgcagactcagtacgctaagctcgacatggaccgcatttccgcctccaacgccagccagaccagcgtcaagcccatcaagtgcagcgccgacctcatcaagaacggtaccttcagctccaactttaccctccctgcaaaggccccctggtgtccaggacttgatcaactatggctactccaaggtcgacgccggtaagctcgttgatgtcgagtctgaggaggtttccacgaccatctacgaccacaacggcaaggaaattaccggcctcaagctgactgttcttgccgacggtgagtctaaccagcccggctccagctctattggctccagctccaattctggcagcgactcggactccggcgatgatgacaatgccgccggcattgtcgctattcctgtcggcctagctactattgccgctaccctttttggtttggtcatgctatagatagccagcatacctcaattcgtacataagacttcttcaggttcttctctgttcctctcatcacccctttgacctgtatctatttcattcttagataacgtctcgcttggcctatattatacttctcaaatgtttt

SEQ ID NO: 17210 - DNA, 850 bp, Emericella nidulans
atgtcccgttcctttacggaagcaaacatcaactcgccgtccccttcatcaaccagaccaccaacctccaatggcggcaaagaccatcacaaacgccgcggctcacttggcatcttcggttggatgaagggtgccagcgctgggttgggctcctcgctcaagaagtcggatgtatcaccgcaaatccaaacctcaacaacctccaacaaaccggagactcagattacggcacccccaacagtatcaacagcacctgcttccgcaagcatgactgtccgcgccacgtcgcgcctcgcgactcacgataatgtcactcttgctgcaaaagaacctcatagcaaacccactgaatcggcagccgaggagttggcaacctttgcaactcgaaccagacatccaacgcgctctgacgagcccactgatgagcatgggcggcgtccacgctacatggagcgacggtcgagacgaacttgatattttcagcacagacccttcacactcggtattccgttttacgtccatccaatagattcactatctatacataatttacgacccacatctcctttgagcgggacggtccgggcaaataccagcccaccaacctaaactacttcttcctgatcttatgtgtcacgatacccaatgagcactgcacgagtacgaatatgagcacctacgttccgcttctgatttattatccatttggcttgacgtcggatagttgcgttaggagcattcgtcatatggtgttgaggacgctatatctattatgtattttagtatgacccaagcattaaccaagtcagagtagcaaagcgacgatgctgaaataggccattggttccgt

SEQ ID NO: 17211 - DNA, 811 bp, Emericella nidulans
cgactcatcccctcaatatcgaaacacatatactcatcaacaagccaccatatttcctgctacagtcaaaatgaccgtctcaacctcacattctcaagatacacctctcttctccacgtccctaatctcccctgccgtctcctccgctctcccagagggatacaagattcgccccgtgcagcgctccgatttcagccgcgggtatctcgacgtactgcgcgttctgacgacagtcggcgacatcgatgaagcagcctggaacaagcggtatgactggatctcggcccgtaacgacgaatactacctccttgttatcgtggacggacaggacaagatcgtggctacggggagtctgattgtcgagcgcaagtttatacactcgttggggatggtaggacacattgaggatattgctgtagagaagggacaacaggggaagaaactgggattgagggtaattcaggcgttggatttcgttgcagaaaaggttgggtgttataaggttagtccttcctttcggaagcgtggtcggttagctactaactcgttcgtccgcttagactattcttgactgctccgaggcgaatgaagggttctacttgaaatgtggattcaagagggccggacttgaaatggctcactattattagggatatcgataatcaatgcgatggcgctaggttcatgctttttccatgttccaggaccgtgaccggacgtgtctgctggcgctcaaaggcttgtggatgtcaagacttactggcagtgttcgctgctaagggatagaaatacacatagatgaaaggcattc

SEQ ID NO: 17212 - DNA, 570 bp, Emericella nidulans
ggtcgagccccaggagaagaagaagctccccaagggtcgcgccatgaagcgtctcaagtacactcgtcgtttcgtcacggttaccatgactggtggcaagcgaaaggtacgccgattctgatactctgatactcggtgaaggaagagaagactctggaaacagcctcttggccagttcctctagatttttcattcttctttcctcgaacgacaccactgggaacaacaggcttacacatattttccgttagatgaaccccaaccccggtaactagacataccctagcggaggaacgaaactggtaatcgcggcgggttaaaatgacgatgacgaccacgaaagaagagaaaagcacaatcataaacggcctggacggttattatccgccctttacctagtcagaaaagagttcaatcaatcgacaaacgccgagcacgcgaagacgagagatttcgatccggaaaaggagtggtacggagacggtttgcggtttgcggttggttcttttcattgcatggctagttacttacgggtctcgtatcttcatcatcaaatgggaacttcaactt

SEQ ID NO: 17213 - DNA, 419 bp, Emericella nidulans
aacattgacaattcgcggccgcataatacgactcactatagggatctttgtttcattgcttaccattgtctcacttggattcttactaagtcccttgcatttccgggtttcttcctgcacctccacgaatgatgcccccattttaccatgcatcggttcttattttcctatgtcaccggcacttgctgcatctgcatcgccgcatatcggcattccattccaactgagacgtgtcagactgactcactctttcatttgatgttttctcctgtcatcaactggcgttttggatgtttcatgcctatttacctagttagcgaggagtttatggcgttgtttccaactatgcaaggagtaaacgagcgagccgccgcatgagactgaatatctaggtcatttgacacttttgttaccttgca

SEQ ID NO: 17214 - DNA, 840 bp, Emericella nidulans
tccagaatctcttgaaagtcgaaccatggtcgtgacgtcgaataacactctttgcggaccatggcggaaagcataacaacagatacctcgaacgactccgtatatgtacagagaacgcttcaacagccgaattcttcgcggctaggtccgatttatctctgctcagttcataatatattgtgatcgtggatgcaggcaaatccatagcagtggtacaagaaaccctatagccatcaccgtctgttgttgcaccatgtcaaaattgttgcagaagatgaaggacgtcatggcgagctgtaagctgagctcaggcggcgccagtaagtgtatctacgaatattgatctctgaagcatgagaattaattatcagttcgcggcccgaactctaagaactatacagacgagcatgatacttatattaccgacgactttggcgataaagcctactatgttccccctcgcattgatgattatggactgagatttgggagctatgagagcaatccccggcctggtacctacggttccggcagttatggccctagtaaccacgcgaagggctacggattctcaagtgctggagcacactgttattacgcggaaactccggcaggactagggttcagtgacgatgctgtcagtagccataatagaggatcaggatatcggaacggctggtcctacggacatgattataggggccaaaggggctccatgcctatagatcgtgagcagcggagcagttggtgagatgatgtattgtgtttgtctctattgtgattatgagcatttgaaatgcaggagcaaggtaacctgcacaataggaaagagttaaccaa

SEQ ID NO: 17215 - DNA, 850 bp, Emericella nidulans
gatttcagcgtctccgtggtgatttcagtctcctgacagcttctttaattggcacctttatgatggcattaattattggatctgtattcttcgatctccctgacgatgcgtccagtttttactaccggggtgctcttctcttctttgcagtgctgttgaatgccttctcgagtgccttagagattttgacactctattcgcaacggccaatagtggaagaacaatcaagatacgcattctatcatccttttgctgaagcagtcgcatcaatgatatgggatactccatacaaactggtcaattcattcacgttcaacgtccccttatacttgatgacatacctgcgtcgcgatgctgcggcctttttcacattctggatattttcggtggtcaccacatttacaatgtgcatgattttccgcactattgcttctacctcccgttcgctatcccaagccctcgtgcccgcagctatgctaattttaggaatggtaatctatactggttttactatccctactcaaaatatgcttggctggcctcgttggatgaactatatcaaccctatcgcctactcgttcgaaagctttatggtcaacgaattcgacggtcggcaattcgaatgttgtgtccattattcccagtggggatgagtacaacaatgtgtctatgcagtaccgcatctgctcaacagttggagcagagtcggggtcaagaattgtggacggcggacaatacctggaactaagctatcaatataccaaaagtcacctatggaggaatatggggattttgattggctttatggtattctttgctttcacctaccttcttggcactgaatatatct

SEQ ID NO: 17216 - DNA, 500 bp, Emericella nidulans
ggtccgctaaaatagcgaaactctccgaagaggactatctacctgcaccaaaaccggagttggaggctgctggggacctttctgacaccagggcccctgagcactctgatactgattgaactcttagctgatcgcaatggtagctgttggctttcggacggcttgcttatatgatgccctgcgtgatatcttatatcctgtcccctctcacttcctcgttcttttatgactagccatgaactttctcctcatacaatgtcgtggccctcttcattctgcgcctggccttgcgaattcgttatcttgactgacttttattgctgtacctgcgactgttgttctatttcctcgcaggtctcgggccgcttctgtgacggccagaatcgcttgttgtatgtcgtttctttagctaggaaaacctagccatagccttagaattcctgtatcatatttggcttcgatgatcaggatccatggcttagagcgagcggcattaccta

SEQ ID NO: 17217 - DNA, 620 bp, Emericella nidulans
gaactgcacagccaactcgtttcgctgaaagaccagatcctcatgcactcacggtgcgatgatgaggctatccacctgtacttggggcgtatggtcaagcaggcaacaaagcatgattccatctcgtcggcttcgagcgggacctcagcttccagcagagaacaggacgacgagggtgaccgctcgtttggccagcgtcacggttcagagtgtatctcgccgcgtcagactgtgaccagccttcatacccagggacccccctcaccatcacaatcttaaccattcccgtaccagtctcaacccagccggtatggacctgtcaaacgcgcaccagggacccatgcggatgggcgatggatctggattgccgtgcggcgtcgagaaaccgataatgaatcagatgttctcacagcatgatccgaataatttcgacctgcaaattagcatttcttagtcgtttatccattctctccggcttctctcacggattaccttctgtacgatctttatgagtatgcggcacacggttagcgggcggatgtctctgtgtgaaaagcgaacggctctacattatcacggccctaaccattctcccatgtcattatatagtgcgttttcag

SEQ ID NO: 17218 - DNA, 850 bp, Emericella nidulans
cttgagcggaaagcaaatacacttccgccccgcacaggagctattgcaatcaagaagggaatgaccgcgatcttcgacccagagacagggaagcgcatctcttgtacggttctgcagcttgaccgtgtccaggtcatcgcgcataagacagtggacgtacatggctactatgctgtgcaaatgggcgctggttggaagcatccgaacaatgtcacaaagtcgttattaggccatttctcggaacaaggggtttcaccgaagcgacatgtgtacgagttccgagtgaaggatgaggatggtttgctgcctgttggacaacttgtcaatgcggactggttccatgagggccagtacgtagatgcgaggtcgaatacgaagggcaaagggtttgctggtgtgatgaagaggcatgggtttggcggtcaggatcgcagtcacggtgttagtttaacgcatcgctcgcttggttcagctggtcccagtcagggtggtggctctagggtttatcctggaaagaagatggctggaaacatggggaatgagcagaacacagtgcaaaacctcaaggttcttaaggttgatgcggagaatggactggttctggtaaatggtatgcactgcctttcctgtcttattaccggcgccagactgatgactataggttccgtgagcggtccaaagggatgtgttgttaggatacaggatgccatcaagaagccttggccggtaaatccggagtcggcccaatcatcgaaataatctatgacgtggtttatacttgaaaatgtactactatactttttgtttctgagcggcgtctgtaaataatacataagatatctcaatttct

SEQ ID NO: 17219 - DNA, 850 bp, Emericella nidulans
tacccacttctggaacaccgtcaagcccagcaccatgggagcaaaccgtcctacctggatgacattcgatgacgagtgggttgatgaagttgcccgcggtctcaaagcgtgccgggtgttcctctggtatcccctgtactggcttgcctacaaccaaatgcttaccaatcttacctctcagaccgccacgatgcgacttggcgggggtccccaacgacatcatcaacaacttcaacccgctcgccctcatcattttcatccccatcttcgaccgcttgctataccctttcctccgtcgtattggaatcaaattcacgccgctcaagcgtattacagcaggattcttcgtggccgtttccggtatgatcgtggctaccgtcacccagcactatatctacaagaaaggcccatgcggtaaagaagccaacagttgtctggagcaaggcctgcacgcacccatctctgtctgggtgcaggctctcacctacattctcggtggtatttccgagattctggcgtcggttacatcccttgagtacgccttcaccaaggcgcccaagaacatgcgcagtttggtccaggccgtctcactcttcatgaacgctttctcttctgccatcggtcaggcctttgtcggtctttcagaagacccgcttcttgtctggaactacgctgtcgttgccatcttggcgttcgttggcggcattggcttctgggcaacaaactacaagctggataaacaggaagatgagctcaacacccttgctcagtcgaagtatgagggctctggattgaagcaggatgaggaggcgaaagcctaaatataacttaattgtcgtgatgttcatgt

SEQ ID NO: 17220 - DNA, 850 bp, Emericella nidulans
cagtattgcacgtggtgggcttatccatccctacccagctgagcgagaggctgagcgcgatgccaatgcaggcgccagccatagcggcacggaagaccgccgaggaactggacgaggatctggcggcggtcgccacaaccttccgcaggccgcccaggttgaagaggacgagcccttgttattcgccatgagtgactttggtgcatctcggcggagcttcgaggaaggccggcagggaaaccacggaccagactcaagtggtaataccgggagctccagacgaggtagtggaaagcgaggcacgctctctggcttccatctttggccttgactacgctaaagacaaatcaactccttacacaatttgctcttccctaacctcctcaaactagtaagactcaccgaccccacacttccaactaggattttggctactcatgttttctggctgttaactcatatacactctgatgttcttattttctgtttggccaccgtgctgcgtgatggaattttcttatagactgatctgctaccgattgcaaaggcaaatagagaatgatacgaaagaccttcaatggttcatttggcttcgacttgtttcccctgaacttcaaattgcttgctttccttgaacatgttttcccggttatttggtggccttcagcctaaaacggcaggtttgtctgtgtcttgtgttttgggtgttttggctgcgtttattatacctttctgacaatgtagtggtgtcaaactgctcgttggcttttcagggtttggaaccaatgccggcgtttgggcagtgttgttgctttctaatagatattggattacaacacaaaagtacgat

SEQ ID NO: 17221 - DNA, 646 bp, Emericella nidulans
acaacagcagctctgaacgcaacgttcctataccagattgagctcgatccaatctaaactctacatacaacacaatcctcaaggacagtctacaaacaacaagttgatcaagcatctcaggcacttcagaaactttaagactctgagcataccgattgcattcaaaatattcccaagaacccattgcgagcactcccagcccaaagattcaacaatgtcttccaccaacaagtcctctccaaagaccttcgacgacgcttcgtcgacctactctacagcctcgacttccaccgtcatgaaagagaaggaggaggccaagcacaagtggcagaacaagaacaagagcaacgccagcaacgccagcaacgccgactccaagaacaaggacgcagccctccattacgaggccatggctcattacctagctttccgataagtggccgccagccacttaaggcagcaatatacgtgcgcgcctattacgagcttgatcctagaacatggatcaagcaataacgcttatggatatgatgattaactccagttccatgtcgctatttttactttgattgttttcaacaagccgggattactggtcggtatcttatggagtctcggtgtctaatggatatttgtttattcagta

SEQ ID NO: 17222 - DNA, 850 bp, Emericella nidulans
gccagccagttcctgccgccccagctcctgatcagcccaaggtcaagataacgccgacctacctccctgacgtccttcgatccaacaaaaagggacaccctctcgactccgactgggctgcttaaatttgccgccatatcctaatcactaccatcatgggacggaagacatcgtccatgcgccgaggagactcctacaaaccgaagaaaactctccactaaggactgtacttatcactttggattacggcgtcgggggtgcaacattatagccactgcgtatatggcattatggtctgcttttaagcagcttcgtcagagaaaggatttgaagttgacaagtgacgcaaaggcccacgaagaaaagaagaaaagcaccagccaacgcacgaagaaaaaaagactctcgtattagattcatgtattctctcgaccctgttttgaaccctttcttctcccttcactgcacacatacttttgttccaaattggagtgctcctcctggtttcggccaattttaggaaacggagacttttttatttctgattttgtgtattctacatatttgtactgttagtccggacactgcgtcaagacttggagagtgtatgatcttgaattacgaataggcatttctgttttaattcttgggtcctttgtttttgtcttattctgtttcatatgcacgacttgcgaacctcctagggcagggtcacagatcggatgaagatcatggcgtaccttgcttctgtggggtttgctcaatcattctgccgcgggctgtctgactactgtctcataatttggaagggagccatccgtaaggaattcaggcccaaatcagctgtaac

SEQ ID NO: 17223 - DNA, 850 bp, Emericella nidulans
ccatgaatgcacgccagaccaccgaggctggtgttttccttatctcgaaaaagtcccacttgcggacgctattgctgtcagcttattacaattactacgggccgtctcattatttccgcttgttgtcccaaggtggaccgggcgaaggcgacaaggaaactttccttcaagctgcatctgcagttcaggagccattctatgctgtgagcgagagggtacaggcggttggccatccggcgccgaacggcctatccggctccgctatggcccagtcagacccaattgaagaccaagctctggttagtcaggggctccttcgggtgctcgatcctagtgtggctcaggccccacgggtttttttcatccatgccaattaccccaagtttaatccaggaggaaacgtctggggaacagaattcgagactgcaccgacagtccggcctgatgggtccgacggacgggcatggattgtcccggaggatgtcatccaacgatttggttatgatgccgagaaggcatactgggaagaactcaaattcatcagctgcgctccagacattgagttccagacctggacctccaaaggcaaaatatgccacaaggtcggacaatactgggacaatgtctttgcagagccgcatgacgatgattttcaatggggttgatgattccagcaacattggtttgcaaacttgatgattctacgcatttacgagcgacgactgctgacacagctgtactatatcgcgtaatctttttatcttgtatattacgacctagaatataatagaagccaatggtcaaaagggtcaaaattgagattgcaattcgattttcatcaatcatatcg

SEQ ID NO: 17224 - DNA, 850 bp, Emericella nidulans
cctgtcggagtcattgtcggtttgttccaggcgatctctcagaagttgccttcattctccgactgggacacatccaagcatcatcacttgctgcactcaaatcctgacgtctgcaacacaatgactgaagttcgccagcacgttgaaaaatttggtaagtttcccctttcctatatggaatttcatactgacgattcgcaaggaacctacctccgtggccgttcagcgtcaaaattcaacaggaacgactttgactgcctttccaaggaagtagtattgacacttgtgatgcgtgagaattagaacgactgaatctaagcacatatatatggctcggcaactaagcgatacgaaaagcacgacgagatatgcaagcatttatgattatgagactcgcattgaagctctttctctgtcacctacatttgattgtctcggtcattcctcaactgtcctacgtttttccttattttgttctgggaaccggtatttccctttcgtgtctcgcatgttcagcccgaagcatatgtttgtcatttatcaaaactacgctcttttcctcttcagtgatgtaccttctcgcacagtacttacagcagcgatgatgaggatcacgatgttacgatattatacggtcacgaaaacgttcgacagcgaatcatggtggcaactgagttgtcgagtcctgctggaggctagttctcgcttcatgacgctgattgtttgcatttgtgtacttaatccgtttctttccgacttcttgtgttaagtattgatgttgatggctttctaagtcgaaagcggaggacgtttaggttctacaataccaggaggagcaatctagctggat

SEQ ID NO: 17225 - DNA, 850 bp, Emericella nidulans
tcgtcatccgcacgctgtcaaagccgatagccgtacgttattgtgacccttgcctacccgcgagatctcctgcgaggacatactgaccccgctcagaaccaaataaaagcacaggctcgcgagcatgagcgatttcggcgaatttgcatctctatggcacagggcctgcatcggctcgacatgcggctccgtctcggcacaattcgcgacaacgctgcggcaacccgacgagccgctgctgaagcagaactccgaaagcataaacccacatcgcctactgtgaagactgaagctgagacgagggccgaagaagaggcaattgccagggcgaagctgccgcatcggaggccgaaaagccggcacccaaaccacatatacggccactgtccgaatcaaaagccattgaatcaggcgcaactttcatcagcgaaacgtttctgttccttgtagcaggcagtttgatcctctttgagtcgtggagatcacggagaaaggagaataaccgaagggatgacgttgcagcccggctcaacgagctcgaagagactgtaggaatttaccgggaagcatttattgctcttgaaaagaacggcgatctacctccagcctctcgacggatccttctgaaaatgatagaggatgtggaacctgaggaagtgcctgaaccagagccgcagggatggttcacgacaatcacctcatacttttcgttcggccagagtccagagaagcagcctgagaaggaaacggatgcaactcagcccgcgagcgtcgctgaaactcccaaagtcccttccagtacgccgcgctcaggaccagcagctagttcaacgacctcagttccagtttc

SEQ ID NO: 17226 - DNA, 850 bp, Emericella nidulans
tggattgatatcctctacctgcacacgtgggactataccacctctatcccggagctcatggattcactacatcatcttgtccagcgcggagatgtcctctacctgggaatttgcaatacgccagcttgggttgttagtgcagcaaacacttatgcccagcagcaggggaagacccagttctctgtctaccagggtcgttggaatccgctgcggcgtgagctcgagcgtgatattctacccatggcccggcactttggaatggccgtgacggtgtatgacgcccttggtagtggtaagtttcaatcacgggatatgctcgcacgccgcaaggatcagggggaggggctcagagctatatatggtgggcagcaaaccgcgctggaggaggcaatgagcaaggcgctgggagttgttgccgcgcagcatgggattgaatcagttacagctgttgccctggcgtacttgctggcaaaggccccatatgtctttccgattatcggcggacgcaagatccagcacttgcatgacaacatcgaggcgctctcactccggctcagccaggaggagatcgagtatttagaaagcgtgggagattttgacccgggttttccgtatgatatggctggggtcgatccagctgatactggaatagctactccgattgtggctcaggcagcgccgatggcgtttgtccagagatcgaaggctatagggtacgctgaatctagcaagggaagtcagatgttcggctgagttagtagcctgtagcggagtatcaatgttatggaaacacaattcaggaaccaacttagacagcttgcaatatggatgaatatgattcgtctccata

SEQ ID NO: 17227 - DNA, 500 bp, Emericella nidulans
gtcgttgctgggagcggttttgcaggcggcttatgtcactggtttctgccgcgcggtgattggtcggtgcaagggattttgctttccccgaagccgcaagttcgcaacgccaaattcaggttcacctctccagcatcagacaaagctcctatcggtcccttttgctgtccatctttccatttttctgctcaggtaatctctatcgtatgccttcatctatttgtcgactttttctaactcgggtgtaggcacttttcaccgcgcccttctaccgtcatcatgttccgttccgctgtcgtccgttcattgagggcctctgtgcctcgtgccgtcaagcctcaggctgctctccaaatccgtagctctcccgttgctcgtccagctcaattggctcctcgctttgccttgccggctgtccgcttctattccgcccctgccggtcttaagaaggaagaggttgagggccggatagtcaacctcttgaagaactttgacaaggt

SEQ ID NO: 17228 - DNA, 850 bp, Emericella nidulans
ctatattacgatcgacgagtcagaggtcgaagaagccccggagcatttgtcagacgcagaagcagccgccctacccctggcaggactgacaggatggagggccctagtggtaaaggcaggcgagagcaataccggcaaaggcgctgccgttctgatcacaggtatcggcggaggtgtggcgctaattagcttgctttttgctgttgcgcgaggtgccgacgtgtatgttaccagctctagcgaggagaaaatccgcaaatctatcgagctcggtgccaaggggggtgtgaactataaggaagatggctgggagaagaagttgctcggcctgcttcctaagggaaagaagaactttgacgccgttatcgacggagcgggtggtaactccgtcgagaagtctgtcaaactgctcaaggtctgaagcctcttaatgtctcttttgttatctgtgcgggctaacacatcacaggctggcggtgtcctctccatctatggaatgacagtctctcccgtgatgccattcttgatgcaggccgtgttaaagaatattgatgtccgcggctcgacaatgggttctcggaaagaattcaaggacatggtcgaatttgtcaagacgcacaaagtacgcccggtggtatcgcgcgtcgtgcaggccgaattgagcgatgttgccgccctggatggactgttccaggatatgaaagatagtaaacagtttgggaaactggtcatagagtttgggaagccttcgggaagtaagctctagagacgaagcttctgatggacattatctatctgtaatactcgcggagaatcaatcagcttggatctcaattctggaaagtaatct

SEQ ID NO: 17229 - DNA, 102 bp, Emericella nidulans
gcaagttttggacggccgccgagggacgttaaatagtacaatttctatataggtactgatttagtgtaggtacggcagactattcagaggcacagtcgtgcg

SEQ ID NO: 17230 - DNA, 798 bp, Emericella nidulans
actcctgccggtgccttctgctgtcgcttcgccagtgggaaataccattcgacctcgcatcaagaaggcttcgttggcttgcaccgagtgccggaaacgcaaatcaaaggcaatgctttcggttctttcactttcccgtctcgtctcattgactctttcatagtgcgttggtcttccacccccctgcgagcgctgccgtcgccagaaaatagagtgtatcctcgacgaagaaagtgatcgtcgccgccgtggcgtccttgagcgtcggctggatgtcttggagcaagatcgcacgctcctagtgaggttggtggacattattcgcgatggaagtcaggaagaggctagtagagttctgaactatatccggagcgacgcttcactagacgacattcggcgatttctggcccaaagcccgtcacccagcgaggccgagcatgttccacggcaggtaagaacgctactcacttaccgggctaggcattctacaaactatgacccagtgcttagttttagtagagattcagtcctctctaccatgtaccggcctggccatggacctcagtgacagacgatagcaactatatctcccatctcatctctatctacttttcttggaactcccccgtgctaaagtggattgaacgcgacttgtttatcagagacatgcagagcgggaacatagactcccccttttgttctcccttccttgtcaatgctatcctagcagttgcatgtgtacgtaatatatcctgctgaaccgattcctacagtgcgagaactattcaataattctgc

SEQ ID NO: 17231 - DNA, 850 bp, Emericella nidulans
gccgaagcgggatttgtacgcgatcggctcgttccgagcgacgccccagtcgatgttcatggagaagtgcttcaacgagcttagcctaccgcacactttgacctctatggaccgcgggcccgccggctcgctcgaacgggtattctcacagcccagtttcggcggcgcggcattacacccaccactgagcagcacgtcacatctccccgccatcagcgacgcagcccgcgcaatcggtctggtagacacgattgtggttacgagcccaggatccctggtcggcgaaaacgccacgtggaaaggcatccgcgcgaccctgacccgcgactacgtcccatcggcataccgcggccgagcggccattattctggccggctccgaaagcgaagcgtcagcgagcattttcgccctacgcagtctcggcgtgggcgccatctataccgtcggcttccgggcaacagggccgctggccgagggtctcgagccgtttacgtcgatccagtctgtgaagctagtagaacagccgtttgtgatagtttcggcactgccgcccgagaaatcgctccttgtgcaagccgctgctgcgtcactaccggagtacgggccgggcgtcgccgccgtccactagggggaaagtgtacctcgatcttaccaggggcgagcgcaccggcgatccagtgagcgtcgccgagcggtctggatggaccgcgtatgggattgaggatgtgaatgcgtggacgaccgtcgagatgctgcggctgctggtcggacagaatgtgccgtttgattttgtgcggatggcatcgtatagtctagtttagttccgtcttcaattagctcttcagctctt

SEQ ID NO: 17232 - DNA, 850 bp, Emericella nidulans
aacgccagattcaccgacgattctcacccggcttattaccttccccccggtcgtcctatccacgtctatgcatacggaccacccgcggcaatgtcaccattccttcgccgcgcaacacgcggactagtgaccactgtcgtaaatggtcaagacgtggtaccctgcctttctcttggtattctccatgatttgcatacaacagcactggagttcaaaggagatacctccgaagccaaatctaatgtccgtcttcgtgtctgggaaaatctgcggcaaagtatagtcaacaaattctacgtccacgaggcgccaatgctccttaatgccggtgatggtttaggcgaagatgcctgggcatggaaaactctgaaatctctcagagaatccatgtgtgcacctaaattagtacctccaggagaggttttcgtagttgaaaccatgcgggtgctgcagcggagtgcctttacctctgatgttggggaagatggttccttgcggctcggaaaaccagcaaccagagtgcaactaaagttcattcgtgacgttgaatctcggtttggagaattgcgattcggctccggcatgttcagtgaccacaacccagcaagatacgaagctagcctcgtggctctcacacggggcattttggatgactaacgcgccatgaccgccaatatgaatatctctccgtacacgccgatttctctagatctatggacttttctcaatgatttcctttttcaattatcgggtgaagattgagcagacctgtatatacccatgtggatctttgatttatactccaagataagagtagactagaatacaatatatccgatctggttgactg

SEQ ID NO: 17233 - DNA, 500 bp, Emericella nidulans
actattaccgacagcctggctgtcgcgtgtttcggcgagtgtcgcatctcgatcatgcgaccagctcattatgccgtgacccagagagcccattgtcgcgaagtcgggggttcttgaggaatatgaaatcaaaaattcgcatgccgtctctatccttgaaccatcaggacgtgtcgcaggagatcaagccaaggcgtagtaggatgttcgttttgttttcttctcgggcgctattgtttgcagagggtcgccgcgattattcctcgaggagatattgagtttatatgaggtgtgcttttggtggtgctcacaactaccaacacttcttatatcgctccagcgcttctggcttgcatcgaataatcaggttgcctctgacacgcattgttgctggatttgacatgcggcatcacaaactcgaaataacaacatcctctggcaaatcaatcagagatgtcgtaagctagaaataaaacctggagtatggtctcgccctgcgt

SEQ ID NO: 17234 - DNA, 831 bp, Emericella nidulans
ccgccaaccgcttcaacgagatgcagcttggggccttcggcaaccctctctgtttgggcgagcaatacccagagacacttctcaacaccctccccggcgcacagaagctcaccgaagcccagctcgactatatggccaacacaactgacatcttaggtattgacccctaacatgcaacatcgtctccgctccgcctggtggcatcgaaacctgcgcaaaacagaacatgagcaccaatagtctctacccctactgcgttacgcaggagacgacaaacatctatggctgggatatcggctatcgttcccaaagctacgtgtacatcacgccgaaatatctccgctcctatctttactacctctggaatactttccggactcccgtcttgatcggcgaattcgggttcccagtgtacgcagaatccgaacgtgaactacaagatcaagtctttgactctccacggagccaatactacctctcttacctatctgaaacactcaaagcaatctgggaagacggcgtgcacgtagcaggtgcctttgcgtggagcttcgccgataactgggagtttggggactatgcatcccaatttgggatccaagttgtcaaccgcactaccttagagcgggtctacaagaagagctttttcgatgtggtggatttcgtcggggcgcggaacggtttaggatattgatatacttatacgggtagttgcctgactgagagtctcttaaacgagatagaacctctgtaacatggagcccccttgtgcctcaaggttttgcacaatatatttcggcctgtatcattaggcctaattgaggtgctgct

SEQ ID NO: 17235 - DNA, 729 bp, Emericella nidulans
cagaacatatcgcggcggtctacatgctcttgcttatctggacattcttgctctttacatccacattctgtgcacatgatcattgcaggcatcgagcttgcagagaccgttggcaatgtcgcccaattgttattctccctgtgtctaatcttctgcggcgtgctctctactcccgatgccatgcctgggttttggattttcatgttttgtttatcacccttcacatacctagtttcggcaatgctttcaacaggcctgtcaggaacggatgttgagtgtgaacctgtcgagtatctcacctttgctccaccgaacaaccagacttgtggagactatatgcgggcctacattgatgaagttcaaagcggctatctcctggatccgagcgcaactgaccagtgctcgttttgctccatggacaagacggacacatttctcttgtcagttggcagtacgtttgatgaggcttggaggaactttggtctcatgtgggcttatattttgttcaatatcgtcggcgctgtgtttatctattggctcgctcgtgtgcccaagggcaagaagatggctgggacggcatgaggaaaagctttcgaccatctttccgggccctcaaaacaccattccatccttacaacattccctgctcctctttttttttttgagcttcttactgcggtttgcgctaatccgcgtcttctcgttctaatcctaccttatacacgccgt

SEQ ID NO: 17236 - DNA, 500 bp, Emericella nidulans
cggcacgacgtggaccaatgggggaaggcggaatcacagaggacgtacgagggaagaaactgcagtgagacagaccctgacctgacttcgcggtctcctgcgtagccaaactggatttgtgggcagagatggtgggcagaggtcaacttgttgtgatgcaccttacttgggccaagcattctttatccgccgtgcggccatcaggggccagagccaagccaatttacttttttgtgatctacagtacatagtagaacccagaacatcatctttaacttggagtactgaatactacggagtcctccgtaagatagcgttggatacggggtgtggaccgtgaaccgtggaccgtggagctgcaatacttaaagagtccctcgtctcgagcgcatcacgattgcttagccttgacatcatagcacccggcccagttattccggttcatccgtgctttattaaagcaaaagcgacctccagtgacaaagagatatcaactgata

SEQ ID NO: 17237 - DNA, 827 bp, Emericella nidulans
gtggagagatctctcaaatgtctatcggacgaagtggaatgtgaacaatgtacccactctggtccggtttgagaatgtcaatgggacggtaaatgaaacaggaaggctcgtggaaggtgatattcttgaccgcaagaaactgggagaatttgtcctcaaggagcctgggaacgccggggcatgattctaggtaaaagagatttgttaaatcaattttcttacgagggcttgaattgaccagtatcttctcttcgttgtagtatattgtgactctgggcttcagggtgttgggtttattgctggcttgcgcgctatgtggtcctgttgagcgacaatatgcgattagatcttcgctctgcgcatactccgctgtcagagttaacggccgtctaagacctgctctgcaaccattgctaccagttcggttagccgccctaggcctgatgtctcctctgtttctaccccctaggtttcagtcgcaggtccctctttgaccccgcgcatttcctgggaagacctccgttcccatcatcttatttcggtactcttcttgagattaagaaataattagctttgtttcaagcccgtgctttgcatcttaccagcttattgttatcttctggtcagaaaaaaaaagcatatcacgaccaccaccacatctacgaggaacatcagaatttaggatttgtggctgctcctttgttgcctctagaaaaaagagccgtcaacagatcactggagcgtacctgtacatagatgccctatggagcaagttgataggtttgctaggtacccctagaacagataatgaaactacacttcccgtt

SEQ ID NO: 17238 - DNA, 698 bp, Emericella nidulans
tggtacggtggtgataggtccgtcaggttcaagatggacaacagtaagttaaattttcagcatcctaccatgtcctcttcgggtcaatgctaacagtgtttccagaattcagacccatcccgggggcagggggattccagctctccacctcttccgctacggatctcacctgtcttaacgcttcactttccatcttcgatcaaacgtcaatttccgaattgcgccggaagtctgtgcaactgaccgcttaccttgaatacttgttgttgaaagacacaacagacgaaacccgcccattccgtattattaccccctctaaccccgaagaacgaggcgcgcagctaagtctcctcctcaagcccggtctgctgcaaagggtcgccgacaagctgcagtctgcatcgattgtttgcgacaagcgcgagcccggcgttgtccgtgttgcccctgctcctctgtacaacacctacagcgaggtgtggcaatttgtggaacagctgaaggctgcattccaggagtaaagttaatcgcgtccaatggcattattaggaagcgtgtacactgttcaaatctccgtatggctggaagcgctcttgatagagcgatacttgggcaaagcggaggaaccgggactgtttcaatctagacactcgtagatactcgtagagcagggaaaatgacctaccaactatgatcaa

SEQ ID NO: 17239 - DNA, 850 bp, Emericella nidulans
  unsure (1)..(850): unsure at all n locations
cattgccacctgctcttctacccggagtcccaaccaggctttgcagagtccgctgcctatncgacgtatgaccgcactagttcgcgattggcatgggccggatcgttgaactgtttgaaacgcggttttggatggcctagtggtggaggtgattggggggcgcctgatccggagctggtctgggaaggatattggaggaatatccacgagtctgccaaaaatccaccctttacttcgtcgcctgacatgcttggtctgatggtgggtggaggagcttggaaatcggcaattcgatgaccggacgtgtgtgaattgtgttccttctggcgtcggaggttgtccaccaattctgcttgacaatcatacgtaagctaatgagactagggtcgtcaccctccgaaatcacgacgttttactccacgaaattcgtcccttctggcccaccttcccagcgaatccgcctgctttctcgcacttcgggcgcggaccgcgtggttgacgagctgctgctcacctttgagcatacagaggaaataccctggatgctacctggggtaccgccgactggacgttctgttcgcatccccctcatcatgacagctggcttcctgggtgggaagatcgccaaccacaacatatactgggatcaagcaagcgtgctggtgcaggttggtctcttagacccaacccttatcccaaccagtttcaaagcaatcgggccaaaccgcgaaggaaaggacaccatcgagcgaatgcctgttgtaggcgaagaagctgcaagtagcgttctatattaattggagagataagccataattgataaagcagaattaagccacaatatttttga

SEQ ID NO: 17240 - DNA, 850 bp, Emericella nidulans
gaccctgcccccgccaccaccttcgctcacttggatgccaccactgtcttgtctcgtggtatttctgagttgggtatctaccctgctgtcgaccctcttgactctaagtctcgtatgctggacccccgtattgtcggtgaggaacactacaacaccgccactcgtgtccagcagatgcttcaggagtacaagtcccttcaggatatcattgccattcttggtatggacgaactttctgaggctgacaagcttactgtcgagcgtgctcgtaagcttgagcgtttcctctctcagcctttcaccgtcgcccaggtcttcactggtatcgagggtaagctcgtcgaccttaaggacaccatcgcctctttcaaggctatcatgaacggtgagggtgatgaccttcctgagggtaagtgtattcttttgtttctattcatcgactccatcactaacttccttatagctgccttctacatggttggtgacttggcctccgcccgtgctaagggtgagaagatcttggccgatctcgccaagaactaaatgtaatattgctttgaagcgccctttttcctttttgttagacatggacttccttttctcattgttccattttccgtcgatgcgtgtacagtactcgaattgagaagaaggaagttgaaaaaagaaaggtcaattcctctacttttaaagggaaaaggagcactcagtcccggcaacccccttgaagtctcggatgcagaacatctagactcgtgtgacaatatattgtgctcatgtaagtaaattaaatgaccacacccggccttataccctcgggcagggacaacatgtatcatttcttttgttg

SEQ ID NO: 17241 - DNA, 850 bp, Emericella nidulans
gacaatgccgccaagcgatcacctcatcagccggtctggcaggatccgttcatttcagcgatgtttcctgaacccaatggcccggcatatgatcccacgaaccgaatccgcagaggcatgcaaggatacatcaatccaccaacaagtagaggttcgcaggctcggaacgatcgaggagaggtaggtttcagtcccaatcttgcgtgatagggcaagctgatcacctgcagcttgttcaattggtccatccaacgctggtcgacgcgcgtgtttaccaagaatatgttcatcgattgatcgcagagcttgatcgtccatcccatacttgatacggtcctgggctttgagcctactgaggatcatccaaggactgcaggttgaagcaggtggttcgagcacatgccacaaattaggcatggttgaacgatgtcagcgtatcttcgcactctgttacatgcggaggtacaatgagaacgagacataaagacaacagaacggtcgagtagtttggctgcgttaaccatagccgtattcgttcgttactttttatcgtcccttttttaactcacatgtattctgttctccggatacgcctcaacgagtgcatcaaggtctcattcgatcatccgacggagacaggccctagatgttgaaagcaagcttttctgggcaatggatgtatatctactgtttggccgcctaatagcatatcagttccattgactgccatgagaataccagccggtacacttactgcaccccgtatcccacccagatagtattgtccttatctcttgccggctcaggaaccatccaaaaacgaaatcagtccgattcaatcgggtaaaac

SEQ ID NO: 17242 - DNA, 500 bp, Emericella nidulans
tcgtcagccgcttattccccaaattcctttcgacgaacagctacaacaaatacagtatgaatccaacccgcacaacagcgggacgctcaatgcgccttaggtcgacaaacagaggcatgtattcccagcacgaccccgaatttggtctgcatactatcgatacagaagtgggtgttgggcctgggctgaggtcggtcatgggggagaaaagaggccctggtgctattgaggttacgactgaggtgattcgagaagagagaacgtcgccgacagctccgtcttcgcttacggacatgttcgtcgaggcggcagtagtggagactcaagtcagaccaaattggtcctggagggacgatgaatcttgtcgagtttttattttacggttacggatgggttgttggatgatcactcgttacgcttagctttttatgtcctatttttcaatatacccatatcaatcgttcatcttagatatatataatttcactattgaacataca

SEQ ID NO: 17243 - DNA, 500 bp, Emericella nidulans
acttgcaggaccatcccactctattgaaggctctcagcgggctagttgaatacgacgaagccacacagaggctattgccaatccgcttgaatgatatctctgtcggtacaacacatgtcgcagctgttctcgacaaccaaacgcgtctaaatcgttccgcgtcttctctggagggggccgacgacgcaggtctcgatgtggtctggtggggcggaaatgagcacttccaacttgggactggcaagagaagcaatctttctaaaccagcgcatatcaatgtgtctccggaaaccgtatcccttgatgacaaagagctcgcgcgactccagattatgcctgcttatcgtggaatagttggtgaccggagtgttgacatgcgacagagcgttgagtgcgggagacatgtgtttgcaatttacactgcttgtgcgaagtagtagtttgtgctttctcgcgatgatgtacgatagtctgtatataccccaaatccttgcattttg

SEQ ID NO: 17244 - DNA, 850 bp, Emericella nidulans
caggtacagctgcgggagatgctggtggggccacagggctcgcagcattactgaatatggtgggtgcaacaccgggtggctcacaagtccaaagtgcctctggaggctttgggtcacagttggtaacgcaaggtggtcggagagcacgacctgactatgttgcatacgccagagtggccaagaaagttgacgtcggtcggctcaaaacagatatgtggaaaggaatgggtgagcggcttatatccgctatggattccggcccccaactcagcgctgcgaccagcccgtccaaagaacagcacgaaactgatgatgatggcccgtcaacacccaccccaattcataagcgcccaaggctctcttcggacctggaacctgctaaagaagggcacttgcgcttcactgaaataatgaactcgctaaaatcagtctaccctccagagatgctccgtgatatcagtacatcatacggcttcatttgcctactccatctggcgaatgaacaagggctcatcctccaaaacgacgatgatagcagcggccttggtttaggtaaattggaggagatctttgtgagaaaggatacaagcgctattcttgatgaaatggccgcgtgaggcaggtacaccacgccgaagctacagatgtacagtgactttccaatatttctactacataacttttgttttttgtcttattggttttaggttttagccctggccttgtgatgtttcggaccacgctcggatttagattatttgcgggagtttgtggctggtggacttaactgatcttctttattgggttatcatgtcttcaacttcaatatccaacgctgttgttcttctgt

SEQ ID NO: 17245 - DNA, 731 bp, Emericella nidulans
aagaagaagaagacgaggagaccaagacactacggacgaagagagccaaggttctggaagagaagttgaagcgtgacgtcgttcgcaaccgtgctctaatgggtgtgaccgcagccttcgctctcgcgtaagttttccggtcctttcgttgctgtggaagcgcagtcactgatatacatgtctagagcatctatcccttatttcttctagaaaacctgctctcgtgctgctagaagcctgagctacaactcatcaagattatggtcataaccccctctgattccctcgattttgatcattgcccatcctcgcttggatctgaattatctcctctttattccttataactccttcgctgtcacatgcctaagttgaaaccttggctggagctctccaaggcccttcgaaacgcggcaagaatgatgtactgtgtccatgtttatttatcacgttataatacctccccccctttggttgtcaggttcgcatctccattccgaagagcagcgattatctcgtcgtctcagcgatcgacgctcgtttttaacgtgcgcgttctcctacctcctacctcctggatactcgatactcggttcttaatcctttccttcgcaaggttcctgtttctttttcttctctgttacaacatttcgcagcaagagctagtgcctttccaggaagatgacggatcatcgctagggtatttaagaacaatacaaacgaataaaccc

SEQ ID NO: 17246 - DNA, 850 bp, Emericella nidulans
ccacggcctccaatccctactgactgaaccgtgggggttgcagctgaattccgaggacctggaatccataaccattttgaagagaacccggacgagtacgagatcgaccacgatcgctcccgcccattcaacgtgcgttctggtagaataattcttttgggagatggcagcacgttaattccaggaaaacagaatgacgaggaactctttgaccaaaccggggaggagaatcacccagaccaagtgcaacgccagaataccgacacagaaagaaatgaccgtgaagggacgcctgggcctcaatccgcggctcaccagacgaacacgtccgcttcggatggctcagagccttctaacacaccgcagaaacccgcctcttcgtagcttcgtcatgagatttacgcctgattcccttcattttggttcctgaaacgactcgtgatttcacgatccacacccgccgccccatctccacgcccggtgccgaagcctcacaattctgcccccatacggtcgctcattgattttctgtttctcacgatttgaaggcgcattggtgcttgtgaccgcgaagatgcgaaagagacggaccatatcatccccttctatctcttgttttaatcccatcttcttactttttacgagctcatccagatcaaatcaccttcgtgttactccaggatggatatctttgagaattcgccgaatgggtggaggcatcttctttccctgtcatctttcttctctatgtttgcacatgccgcaagcggcaggcctcacgagagtacgtttgtttcatgtctcgacataagataccgcaacaaccactattgacgaactttataacttc

SEQ ID NO: 17247 - DNA, 850 bp, Emericella nidulans
gcgcgatgggcgactctttattaacccaagtagccttgatttgagttaccagcagacaattacccaaacccaagcccgggaggccaagcttctcagtatcagacgtgagcttgaaacctggttatcgatggcccccaactgcgttacgatggcatatattggcgctgctgattttcgaaacaacggtatgctgagctgaactgatattacgattgaaagcttattccatagcgccgctcactctcgcctactacgcggtccaagccctcctcttccgcgcattgatgagtcctgcccggatgtccgccaagtccgacccaacttcgtctctgtgtcgttatttcgacctggcggcaagcgagtttcgcaaattcacgcttttcatgaacagcattacctcagcatgcttacatgctttttggggcggacgtaggtttcccttcgccatatcgaatgatgctgactggccagatgctcgatctcagcttaccctttgcggaaacttcttgatctacctgtttttattggcgcccagtccacatcaagtccactcagcattcgagctccttagcagcttccacgaatcgcttcaacggttacgagggtgggctgatgatgatgcctctcttgcgctgttacgaccagttgcgctgcgaattgactctttctttttgcacgccgcgcgaatcatgagaagtgggatgggcgggacgtaggaattaccggtacccaatatttttatatacacctttgtaatgttgtttgttcaatattcgccagctagtgagctctatatacctgcatgttataccgcgaaagcgtcaattacgctgcgcggctttctatattt

SEQ ID NO: 17248 - DNA, 500 bp, Emericella nidulans
tcgcatgtcttctgcacatctgtctaccttggggctttgcgcagtttccgggttcggtctgtaacttaaggcgcgtgtccgtttgcatgtctatgttcactgctcaaagacttgtcgcctcggctgccaaccgaacttcataaactttctttttcccccgatctgctggtctgatctattcaacctggcttcttaactgaaccacacattcgctttgagcaaacaattcattcgggctgtttctcaaacggagctgattcatcatcatcttcaaatagtcccatgtcgtctagagaatcacttcgatttcgctcctgttctatggttgccgtggttcttgttccttctttttcgttgttacgttatttcctttttcattcccccggtgggtttcttgcgcactaggagggcccaagcaagttacggatctgcggaagtatgggtgtttattgaaatggccggttcatagatcaacaacgaattgttcatattatcgtcta

SEQ ID NO: 17249 - DNA, 500 bp, Emericella nidulans
ctagccaagtctattgaaggtgtccaacagtggccgtacaaggccgtcgcggatgcaatggaaatcattccccgaacactggcgcagaacgctggtgcaagccctattcgtgtcctcacacgcatgagggctaagcacgtcgagggccacaccacatggggtctggacggcgacacaggcgctctagtcgatatgaaggagtatggcgtttgggagccagaagccgtcaagcttcagagcatcaagacagctgtcgaggtgaatatcctttctatcattgactcatgatcatcagctaacttaaacagtccgcatgcctgctgcttcgcgttgatgatatctgcagtggtaaaacagcccagcaggcggctgcgcccaccggcggcgatgattagacgttaggaccatggaataaaaaaatgcgtaataaatgccatgatctttgatatgtatgaacatcctagactaaatttcaatgggtatcttgttcatattgtaca

SEQ ID NO: 17250 - DNA, 850 bp, Emericella nidulans
ataaagagaaccaagcaggagaagagtctatctaccaccttccacccggtctgcaggatttaatccattcgttcgaagtaaccaaaaatcgtgcatcggcaaatccctcaagccagccaccttcagtgcagcgcctactcactgcatctgcagccaattgcccagaaccaggggactcagagaagcctcgtcactacaagccccagaacccgtacaatacgcctctttattacccccaggagccactggccatcttggacgatcccaggctgtacgagacagggcggatcgatacagatactttgttctacttgttttattaccgccaaggatcataccagcaatacttggcagcaaaggcgctcaagggccagagctggagatttcacaaacagtaccagacgtggttccaacggcatgaggagcctaagacgattactgaggagtttgaacaaggcacctatcgcttttttgactacgagagtacttggtaagttttccgttcgtgttcagctagctcgcttttctaacagcctacaggatgaatcgtcgcaaggcggacttcaagtttatttacaagtacttggaggacgaactgtgatctggcttttacgtttactttcctgggtttgaagggtcctgttttgctatcttcgatcgcgagtctgcgagtgagacggagtacaagcatttcttttgtttctgtatgggtcttgatgggtccaggaacaggtgttatcaatgggtctgcgggacaggagttcaaacgctgttctttagtggcggctgatggcatgcagccatctcttgagctgctgcttagttaaccaatgaatagacacctttagag

SEQ ID NO: 17251 - DNA, 850 bp, Emericella nidulans
caaggtagcagcaaaccctacctcacggccgtagtggccttggtgttatgatgcaaggctcgccgttaagcagtgtcgcctgcaaatgaagattagcgtgatgaatacctctgggagacagattctgctacctatacacgctgtgctctgaaaaagggtcccggctgttgcaagcatcttctagccgctgctctaactcctgatgttcagtcagctttcaacccttgcgtcggcaaatcaacgtttgggcagagcgcaagattgtatcaaatctcagtcacagtcggcctgttgattgcgccatcgagccgcgcgctccatcaggcgcgccagcggctgttggagcatggcattacactgcatctctcgcgcacccactgatcgtacaactgcgtaacgacaccccaggcataatcggtttccggcgtaatatgccgcacgcaggattcggaaagtatgaacgccacgacgtgccgctgcttgtagctgtcgcaaagccaggcccactgggttgtggtctcgttgtgtcccattaagatcgcgaatttgacaatctcgacagccatggtgaagatctcatcgtttgtagccgcggagctggggtcctgatgcgctgctgagttgctgagacgatgtatcaaccatgccttggagagcgtaatgcgcacgataacagccgtcaaccattggattgggatgtctaggttgaaggtttgcaggtatacagtctccacgtgagttgccaaacttgagaggagctcctctttcttggacgagaattgctgtcgtgtattatggtctaaagacttgccagcccagtgcaataggcataatctcgcattgaattata

SEQ ID NO: 17252 - DNA, 500 bp, Emericella nidulans
gtagcggtgcaaacattctcttcctcggcacaacacgcgacacgtttgatgaccgtcccgtcgcccgcctctcatatacatcatacccagccctcgcgctgaaatcattgcacaaaatctcctctgaagcggttgagaagttcgggctgaatggtgtctatatcgcgcatcggcttggtgaagttcccgttggggaggcgagtattgttgttgcggtgggggcggggcatagaggggaggcctggaggggcgcggagtgggtgcttgaggttgtgaaggagcgggttgaggtgtggaagagggaggagtttgtggatggagggatggagtggagggagaacagggagagggatgggtttggaaaattgaagaccaaaaaggaggattctagatgattggagagctatggtacaagacttgacaggatggatattataaatacacgaatggttgcttggacgaggaaaggcaacattctaatccctctttaagggctttcc

SEQ ID NO: 17253 - DNA, 850 bp, Emericella nidulans
ctcaaaggctggtacgatgcgcaaggtcggaatgagaattttgcttctcatgcttcatcagtcggaacgatgtccgccacgaaacgagatcaattgaaaaccatcgcccaagttcgcgaggagcagctgggcatgtcagaggagccttcctactttacactaagggcgaccgtcgtgtacataaaacaggacaacctgtgttaccccgcatgtctttcggagggttgtaataagaaggtcacagaggtcgaccccggtcagtggcgttgcgagcgttgcgacaagactcacccacgcgcagagtatcgctatataatgcttgtcaacgtcagtgatcacactggacagctttatcttaactgtttcgatgacgttggccggttgttgttgggtatgagtgcgaaccagctcatggaattgcctcagaacgacggtaaggcacttggcaacgttattcagaatgccacctgtcgcacctggactttcggatgcagagcaaagatagatcattatggggatcagcaacggtaagtctggatccggaatactatgatcctcaatgctaatcatgatctccagaattcgataccaagtatcgtatgccaaacccgtcaactactccgaagaggcatctcgtcttgcagatatcattgacagttacagtatctcctaattatgttctgatcttgtgggcggttgatggcttttgctttcctcaaagctattctatagcatttttgtcgttgtcgacccttttcctgccttgtttgtatcgacttgaggtatagaaatttgggaacgactcataataatgtggggttacttgagtgaatctaatctcatggaataa

SEQ ID NO: 17254 - DNA, 850 bp, Emericella nidulans
ctctgctaacacatctcagcctgtcacgattacactgcgacaagggcccgccggcaaccttagaactctcaaagtcctcacgcatgacgcacagggaggctccttcacatgggttcccgacgagtccctcgcccccggctcagactatgccttgcagattgaacaggatggcagcattaactactctggccttgtgactctcgttgaccaatctgggaaaaagccacaaccatcagcttccaaacacacacctgtttcctctccgctcggcggtgcgagaactagtgtccagaaaggtaacaatggctatattcctactctgaatagttcgtctgcccgggtcaacatgacgtcgggtaaaagcacagcacacaaaacatccaacgacggcgttaccttccgatacatttctgcagagatgatcctggcagccatggctgctgtcgtttattttgccgcttaagatcagggataacaaacacagaccctgtttctatatcccatatcagtccagtcatttcaaagacgtcggccagttaaggaggtgggaaagcattcggtactgtgcttgtgtatatatcaaagctgggcgctatctatacggagttgcggccagtctctgggttcaatcgttgacgaaaaacaattgtcatactgcttttcaggggtcatgtgcttatggctggcagtcattctattcattttgcttgcttgtttcgcaccttttgcttttcgctaggtaattatctgcttaagcatgttggtcaaaagcaaggagcggatcaaggtcgcgtgttatcctcgttagtattcagttttatcaaggaaatgaaattgagtattactcatt

SEQ ID NO: 17255 - DNA, 554 bp, Emericella nidulans
ccaaactatttatttttaccttctagttcaaaacccaattctcaatatgcaaaacgcacgcggtcagggcatttctcacgccaccggtggctccaaggttccccaaggagtccaagagagagttcctcaaggcctcgaggaatcgttgcctaattcggtacgtctagctgatttgcatctcaaagaagaatcaaaactaacaggcgaaggttcacgataccggctccagcggtagccacaagacccatgcccttaacgacggcgaggactcaatcgtccccaagggaattcagaaggctgtccccgaaaagcttgagcgcgctctgcctaacaagatccacaatactggtgatgaatagatgatcacgatgtgatgtttgcatgaatggatataaattgatatcttatctgtatattagtgaatttgaaacgataggcattatttgacgggcataacatacttatcttggaatgtgcaagtggctactattttcgattatgtagctaaaacattgctgttgctacgccttcccattaataccatcaatagatga

SEQ ID NO: 17256 - DNA, 99 bp, Emericella nidulans
tgaatttgtgaactcttagtttctttattattgataccctgtgattttcgttgagcacttttactcagtgaggttttatcaatagcttgcagtttgggc

SEQ ID NO: 17257 - DNA, 850 bp, Emericella nidulans
gttttagcgtatacagccgttttaccagtacatgacagccatgttctggcagatccacaccggcgcaaaggagaaactgtctaccacttgaacttttcagattctacccctcattatgggtctcaggcagatgaagacagcccggttcctgaaattcgcgttccactggtaaagcctcgtacgacgccgtaatggccaagaatctggcaccgaaaccggatcaaaactattactcgttttaccagtcgcaagttcacatactgacgagctgtcactcaccggttcgagcccaaccgacattatcagaggtgcacaattgtgtcaactgtaatgagatgtaagcacaaccctagcacagactccagaattgaacctgccggcggaatgtctcaaggatcgcggaacccaagagctcgggctctgcaggttgaggtagccttgatgccgatcgtgtacccgaccgcaacgcaacgacagacaattctggccctctgggtccctagaaatttatctgatcatctgattagacggcgatcaacccggctaatgtggaagaacagatacaattggataatagcgtgcaagccgctgacgaaaaaagccacttctgcagctaggcggaggaaaaagttttacaccccactcgctaaggtcgcagagcgcaatgtctattgaaaggattttggaagtaataattgtgaatcacgaacagctgggcgtgagagcttggagttttcacctagactagtaggcgttgggcattgtgagtggggaggataaatattacgtggtagatagccagcgtgtggtgtcaatccatagttacagtatgagaatcattacggctgat

SEQ ID NO: 17258 - DNA, 500 bp, Emericella nidulans
agctctacgaaactaacgtctgggggccggtcgccttgacccaggcttttgccccattactgatcgcagctcgcggcacaatcgcctttattacatcaatagcgggctacctcaatgttccctacatgggtacgtcgtcgcttatctatattgcttgaaaattattggaagggaccatgtctctcaccgtgggtaagggttggaagctgactctcgcatgatatcaggcacgtacgccggctccaaacgctccatcgaactcatcgctgaaaccctccgtctcgaactggcgcctttccacgttcgcgtcctatcggtcgtcaccggcgcggtcaagacaatgggacagacgtacttcggtgactttaagctccctgaggattcgctttacaaacctatcgaacagacaatcgctagccgtgcgcaaggaggcgatggaaacgctcgcgaggacctgatgacgtatagcaagaaggtcgttactgagatcacaaatggca

SEQ ID NO: 17259 - DNA, 500 bp, Emericella nidulans
  unsure (1)..(500): unsure at all n locations
acggagactctgcatgcgcagatgccacttggatttaaggtgggatgaagtcagggagcgttcaagcacaaagcggcctgccgcatgaggtccagctaagaacagttaagagaaagcaatataaatagcacgaaaaagcaaatccacaaaanaagcctaatcagatattccaagggaaaaaaaaagtcgaaaaacataaatcttgtgaaacgcccactttgcagtccccaacgctttattgttttcatcagcaggagactggaagcaatgagtggtcaggatacgaaagtcaatcttgaggttgccatccggtgtactgcaatgtacagtaccaggctgttcacgcaggactcacttcggaaatcgattcttgataccctagatagatagaagcttgcgatagatagtctgctcctatacctattttgctgctcaattcaatccagtcctttcttgtcactttatcatccatgaactcattcaagattcagatataaaca

SEQ ID NO: 17260 - DNA, 850 bp, Emericella nidulans
caggttcgccccgagcgtgtcgataccttgccgccacccgacgagctggtttctcgtatatctgaggcaaagactacggcgaagctcctgatacagttcgtgcagtcgaccccgccgagcgagatgctcacgaacgaccttattcaggaattctcggctcggtctcgaagagcgcagcgcgccatctcgaactatatccatgcgacgaaccccgcacccgatgaggacaccttactgacgctgattgaaacgaacgacgaactatctgtggcactgtccaagcaccagcgcgccatgcttcaagcgcgaaaagccctcggtcagcaaaccccgcccgcagagacagctacggccacacagtcgccagagcacagcgatcagtcaatcacaggcacgtccgcatcacgcccggtccctccgcctcctgtgccgctacgaagtcaaagtcctccgcttggtgagccggtatcgcccatctctcccgaagcaaccgcccaccgcagcgccacaacgagaaccgaacagtctgacatctcggtgttaagcggcaccgggccaactgctcgttttgagtaccggtcggaagattaccaggtgcagaacccgtttgcggacaactacagtattccatcgaccataccgacacacacttatgacgaacgagaaatcgagcgagatcgatggaataagacccagcagccgggccagcagcaccagcattattaaccgagtatccgattttgattactacagtattcttctgggcttgttttccgtgtttttgtatttataccctgtgatacctctttgcggagtatgaatgaatatcttggatacaattccgctttgc

SEQ ID NO: 17261 - DNA, 798 bp, Emericella nidulans
ttttacaaactcaagctcgacgacctaaaggcccaaaactaccgaattaacgaacaatgccctccaaacgcccttccgcaacaccctcgtcctccgcacccgcatcagcttcaacatcaggaacatcaacacccctaccaactctctcctccggccccaaaacgctatccgcaaactcatctgtctctgatattgctgtccatgtctggcaccagtacctcaccagtacgccgcagcgcacaatgctcctagacgccttcatggcctttctcgtgcttgttggtggtgtgcaactcgcttattgtgtgctggcagggaactatgtacactcccataccgctttctctaggtgacttgtcgctaatattgtttaatttgaacagcccttcaatgccttccttagcgggttctgtgctgcggtaggacagtttgttctcacggctagtttgcgtatgcagacgagctctgttgaggaaggtccggggtcgagtaaaggtaaaggatctgggggtaaggttgtcgagtatggtgaaggagttaatggtggtgtttcacatgaaaggtgaaaactcctttccttttgtcttgcattttcaataactgtatttggattgattggtggaaatggagatgcttgcaggtgccagtatgctaatgcatgtttgtgacatttagggctttcgcagattacgtcttcggcagtctgatcctgcatttcttctgtatcaactttatcaactgaggcttctaagctgttggtgcaggcgtagagtttagacagtaggtccggggagttca

SEQ ID NO: 17262 - DNA, 670 bp, Emericella nidulans
gcgaatttatggaggatctcgagatatatctattattcacaggttggaaataataggtctaccgccgagtatgctcgtggatcctgagtctttgaaggccaaaattcgccacaaacaataacatcattctcgccctgccgctgaaactcaaaagtgtgtgtgcatcttcatttccatgggtgcaaaattatgaacgacaatactaggctgctatcgattatcgtcgaaagaaactttcatgatttactcatactcagggcaaccgttgccagatctcagactacagacaaggtatgagtgccgtccgtctccgccgggttctggcgtgccgtcgaagcagatcgaaagttgcacattcaacggaaccagcatggctactaacaatctggcgctcttccccaagaacgatatcacccatttcgtcgagctcaagagctccgtctcacacgccaccggactcactgtactccggatagagtatagcatagtcaaattctcctaactccttacattgggcgctgtccgtattcactcgtatgccgtatacccacctacgccaactccgcatttctcatcccttattataagaatagcgaagtgatacaaaacggtgatgagacaatacaaaggtgcattaaagcgcggtgccacataaattccatttccagaa

SEQ ID NO: 17263 - DNA, 500 bp, Emericella nidulans
catggagttatacatcgccgtcccattttcgtcctcaaggtcctggagctcccccgctacacatgacgccgggccgacctacgtgctctgccggaaactataagtggtaacgttcgctgcatgataaaactcaagatttatctgcatctctcttctgcctcgtttgaaactcgagaaaatttgacccatgcattacacctcaaaatagcatgatccgatccagattcacaacgcctagtaagaatttcaacgacacaaaaagtagtaagacaacaaaaacaccaggaatagcggataagacaataatgcagagggccgataggatcaaccagtgatgtttcgtacccatgtttcaaggaagtcaattgggtcaatacccacagccacttttcacgaaagaagccaggtagtcgccatagtgtaccaatctagtgttgattggctttgattgccttgagggtgaccgtagtacaatgagcggcgatggtcatatttgtgtc

SEQ ID NO: 17264 - DNA, 850 bp, Emericella nidulans
actgtcacaaatccacgatgcgcaccgccgactaccgttgactatttctccactgagcacagctacaggacaccggtaatctgcctcggtcgacgctttggcttgtcaagagaagtcaaactttgttttaccagacctcgccagttgggagttaggtgaagtcacacagaacagaaacacggcgagtcaacccgccacctgcgaaaatgccgcctttcctccttcccgtttcagattccagacgaagataattgtcctccatgacataatggcgcttctcagatcctcatcttcgccagttgttgtccagagactgactgtggattctatgcaatgtaaccggagcttctagctgccgacagcgccccgaggccccttcaccggcagttgattctctttactggtcgtccacttgtcagaagctcggggaataggaaggcaaagctccgggggccaatgtgatgcccatttacggcgaggacgactgctttcgtgttacagtcaatcacaaaacatcaatgctacatggatcagactctacttcgcttgtcagttgacaggaccgttttgaggtcgagcctagccggagatcaagacttgcatatcgtctggacagccgagttgccagtcctggaggaaatgagtaagtggggtggggcgcttatcggactatttttgagtcctgaaggtggtatgtaaacggagagagctagactggctgttgagaagaccaaaaataccggtaggcttacttctgtctgcctacagaaatgctcttccaagtcccgagtatccgctgctcaggtggccattgtacatatgcatctgcgagtaatttgcatcaggacta

SEQ ID NO: 17265 - DNA, 836 bp, Emericella nidulans
aagcattcagatccacataattaagctactgacgtgaactatcaaattccatccaccaattgcccacgatggtcgagatctccatccccgcaaactacgggtacgtccgccacggtgttaccaaacattactagccagctagctcagtcttaccccggtcatgagaccaccccatgctaatcatataacgatctttattatagatatgccatcgccgtttcgctaggcgcaatccctgtcctgggattcatccatggtgtcctcgtcggctcttttcgcaaggccgctggcgtgccgtacccccacgcctatgccagcattgagcaatgtaaagctaacgtgcgtgagcccaagaaactaaatacctatagcaaaacagattgtgttccaagagagagtactaaatgacgtttgtgaacagcccaaagcctacaaattcaactgcgcacaacgcgcccacggcaacttcctcgagaacgcgccgcagacaatgctctctatcctggtggcaggcgtcaagtacccagaggcagcagcgggcttaggagcggcctgggttgttctccgcaccctctacatgctgggctatatttatagcgacaagccgaacggcaccggcaggtacaatggttcgctgtacttgcttgcgcaagcgggtctttggggattgagcgcatttggtgttgcaaaggatttgatgtaaatgtagtcgacatcttagcacagaggggagagttgataaaatgtggtctgtttgaatgatagtcgggttcgtgacctatattcgtgatagtggagataggtctgcgcctatcttatcgggccggagcaaaaag

SEQ ID NO: 17266 - DNA, 500 bp, Emericella nidulans
gtcagtggctgtgctatttttattcctcagacttccctagactgtgcttaagaggcttgtaattcccggttagatgttctattttgtatcccagagactgactgtttcgtaagtatgagtcacatagagatcccagactgaaggctcagagaccaaaagctattattagcgttatttgaaacaaaatacagtgcatgaggccataagactgctcgaatataaaagtttactttaatgacccgcaggcaaaaagatgttgaactcttggacgatgcgatactggtaggcgttatttccttaagacagacttcctctatttattcacctcgttgatcaccaatatgcgcgacgcttgtgctgcttcatcctaatatagaaccatcacttagtgcatactagtctaatggccttcgaggtcaagaagaatctggtactttctgtgcgagttttaaaacttggactggaaggaagagatgagaaaatgtccattaggagtcttg

SEQ ID NO: 17267 - DNA, 850 bp, Emericella nidulans
acctcccggacggttcctttacgggccagtcggaagttgtagcagccatgaatttcatcctcaggtatgtctggtctcctctccatcaaatatagtccagcaagtagtggttgagagttcagcctcgaggcgccctgtctagaccacgtccgcgccgcactaggcgccccctctgcgcaaagcgaaatgggccacggccatgccctaaccctaactgcttctgtctttcgcctttacagcgacacctcactcttaccagaggaggatgagctccttcatgtgtcgaagcagacattaagccgactgctagagctttctgtgcaggttaccacggccgaggagctcacgccgacccaggtgtgggcgttccttcaccaaagccctgcgtttgcagacccgaagacacgacaagagaagatcatgaatgttgcgcaggagttggcaaggtatatgaagtgtcatgggtaggattccatctgtgataatatgcacctttcttactaatgggaccaggtatggagcggttattccaagagatgtggttacgagggttgtctctcaggttatccctccacaagggtcatggcaggtgtgacttgggcaaagccatctaccttttcgaggcctttctagactcttattacatggtctcatgccgggagaaaggttctagaattgcaaaatcatccgacagcagtaccgcaaactgctgctgagcctggcttctgccctttcagatctccacgtataactcaaaaacattgataactttagccttgcaaataccatgctagcagatgcattcccttctgacaggcagtttgtgcaatgaaaggttatttatatggcg

SEQ ID NO: 17268 - DNA, 437 bp, Emericella nidulans
tcaaatataaaacgttataataacgttttttatataattgcgaacattactcctatatttagtattaatttataattataaatgtttttaacataaacgggcttaattatatctttatactaatatgataagtaaaaaatttttttttttcaaaaagtgtaaaaaaaaatataatcttgcactatatattataaaaaaacaacataaaatataagataaaaaagtatttatctatacaataaaggtatagagtaatatccccatttccctatactatgaaaaattttgagtttgatgatggctctgattgaacgctgtccaagtacttgacacatgctaatcgaacgactaattagttattaaactaagtagtagtggtgtacaggtgagtaaaagataatttggctaccttaaagtaaggggaaaaatcccttata

SEQ ID NO: 17269 - DNA, 500 bp, Emericella nidulans
taccacaacgtgcgccagagatatggcctcccgctggacagccgccatctttacacaaagacggactgggagttcttcgccgtcgctgtcgcgtcccagagcgtccgcactgagattctcgagtccgtggctaaatgggttaacgaaacatccaccgacctgccatttacggatctccatgatacggaggggagcgggggattccccgggcccaatttctatgcgagaccggttgttggtggacattttgcttttttggcgctgcagagggcttgtggagggaaagcagtagaagggttaaggttcttggatgatgatacttattctgagaaggttgatgatgcgtacgaggactttgttagagaggatttgtgaagaggatgatgaacgaataggagaaaaggtggagggcttgagtatatatattcctcgctttggaatccggttatttaagatatgagatagttatactgtttcataaatgatctctactcttttaa

SEQ ID NO: 17270 - DNA, 850 bp, Emericella nidulans
cgccccctctcagcaggtcaggcgagaatcgggcctatcgagcttctcgcagagagggcccatgacccccatggctccgggatcccaaccagcagactacatcaatgaagcctcgacaacgcaaacgacgtcggacaagaagtcgtcagagcagtcctctcacccgcatcactacacccagagccccgttgtcatccacggcacgcgacaagattacccggaccttaccttgtatcccgaccgtgtttcgcaggaggagcatctccctgatacccagcaaggcgacagcagtcagccgtctccgccccagctacgcgaatctcaggttgtgcgcgctgaagtccaatcacagcctaaatcgcagccgcctgtacctcttttcgacgccgcttccagacaaccaaccgctctgcaagcccttctcaatgaagaggacgagtcgccgaaattgatcattgaccacgagtacgtgcggaatttgcataaggagatggcgcagcgcacgagtggatgctctgtagagcagctcgagcagatcaattccgcgctgatggatgtgctctggcatacccgctgcgattggaaccgtagcaaagtggccgctgggattcagcacgcgttcaatgatgtcctcgaggacatgcaggccgtgcaggaaattgggccgatcagtcagaagacgcaggatcagctccactcgatgtattagactctgttcacctcacctgccgtacctgcagcactacgtacctactaccccctcctctaccttttttgcacgcatttggttttctattggcagcagcaagcatggactgtgtaatgagataaatggcggatattcagactt

SEQ ID NO: 17271 - DNA, 500 bp, Emericella nidulans
tcattatgcgctggtcgcgaatgctcctcaagttcctctgcggctatcttctgcgaagagcctcttgaacgtcatcaacaagaatttcggcactctgccttggtgccgtcgttaccttgaccgacttggccaggataaatatcttcttggcgtaagtattgttgtaccccaaatcgagcatctagctaatgccctcccagttgaacaacctggttcaatcaggaattgttcaagattacccgcctctttgtgacatcaagggctcatacaccgcccaattcgaacatgtatgtcccagattttgccttccggacatagagactaaccctggttacagacgatcgtgctccgacctaccgtgaaggaggttattagccgcggagacgactactagttagaaccttggtcatattatttggacgcacgagatgatacatagctcttaccaacaggtttgaagtaaagacgaacaaaatgaaggatttttttattttgcgtgg

SEQ ID NO: 17272 - DNA, 850 bp, Emericella nidulans
cagcaacagaacaacgaccacctggtccaatcggacgacccagagcacccggctaacctcatccctgagctctgccgtaaattctacaactggggctgggttacgggaactggcggtggtgtaagtgcctgtcgcatttcgaatgcgccccggcttcttttccaatacacctcactgactattttacccagacctccattcgccgcggagagcatatttttatcgccccttctggtgtacagaaggaattgatgcaaccacacaacatcttcgttttgcagtaccccacgcccaaataccccccctccgagcgcaagtacatccgtaagcctctcgatctgaaaccctccgcttgtaccccgctgttcctcgccgcatttgagcgcggcgctggctgctgcattcacacacattcccagtgggcggtcctggtgaccctcctggttgagcgcgagaagggacccgagggctgctttgagatcagcaacatcgagcagatcaagggtatacccaagggcccaggcaagggaatgctagggtactttgatacccttaggattccgatcattgacaacactgcttttgaggaggaccttacgggaagcctggagaaggccatggatgcctacccagatacctatgctgtgctcgtgagaagacatggaatgtgagttcctcccaaaccacattcgtgttaaatatgctaatgtgcttatagctacgtatggggtgacaatgtggcgaaggcgaagacccaatgtgagagtctggattatctgtttcagcttgctgtagagatgcataagcttggtattccatgggtcaaatagatggggaaggatctaccacc

SEQ ID NO: 17273 - DNA, 681 bp, Emericella nidulans
cggactgaagactttgtataatggttgaagatgctgctgctgtgcagaaatggaggggggatcattctatcccactagcgcaggtgctcgacggatggaagatattcactgctcagtaggtgctccaccatgatacaacctgtgcatattgcgaagatagagtcaagtattaactaaattctgcaatctgcctagacatggacctcaagggattcataatgaagccagcaatgccacagttgagaacgagttcggaacatccaacgataacgaagctatcgcgaaaattttggaccaaggcgagatccaggagaatatcgtttgtaatcccctctcgctttattatcgtgctttaggtagaatatggctaaccatgataataacgcagaacgctgagcgacagggcatcaggaatgagtcgcaaggcccacgggggattcgctaagagtttaaggtaaggaagcttggcaggatatgtgtggattgtcatacggctaataaggcagaaattctgacggatggttacttgactgccgcaaatttttctctctgttgtttgctatctgacatttcaacttttcttatatatttgaatggctgattatggtgttgacaatacttatgccattcgccaatgaaatatctttagctagcttcatttgtaccagcttatttgtgaac

SEQ ID NO: 17274 - DNA, 781 bp, Emericella nidulans
gcaagctggatacacatgacgtctctcgccaccgagcccgtccggactccgaaaatcccgttcgtgaggcgctttcgcagatccagcaacccgccctggttctgggaatcgagagcgatgggctcttcaccttcgaggaacagaaagaaatcgccgagggcatcccagactcgagactcaaacgcattgacagccccgaaggccacgatgccttcctacttcaattcgagcaggtcaatcagtacatcctggagttcttccgggaggttcttcccgacataatgtccaagacgcccacggatggtgccgccatcgacggtgttggcaagctaaccaagagcagcacttttcaggaagcggaggtggaagatattaccgcctggtaataaaccacacatagcatcactcgttggcgcagagattgcagccttgacacatcaatgctctacgaatgagcggttcccacgcctcctctcggtcaagagagtacacgtcggcgatcccagccattttcagagttttgtgggagtagcggtgcagccttgttattttcattcttaaccagtcagagagatgagcatccaactgcctctctcgcaaccaccatcacaggtcagactgtaaagaagcatccaactcctccccatcacacaaaccctcgaccatgtcggtctcatgcgatgcatttcgcgagggtgatgggccgtattccgaaaaccggacattattctatattacagcatagtttgcataggaacgcagtgtgttcaacgtttctttt

SEQ ID NO: 17275 - DNA, 850 bp, Emericella nidulans
ttctcgcaacaatgaatggataactcggggagaagaaaacgttcgacgaatcggatgtgagcataaaatgggacgccgaatattgccaaagcagggagctcaaccaggccaaggtgatccagatgtccacgcgttgtacttcatcaatgatcgggtccctggtcgctccggtctggagagatgcttggatatctgtgatcttgtctctggagtatgtcggacacgtggataagtgtggtgcttggagcagtggcccgtcgattcgcgtgaagagccggaccaagttgcaaaacccattgagaaacgctggatcagtgtcaccgtcatcaaccggaattggtaagtcgcctattgtttgtagcgtgattgggaggtcatgctgcatgcagaaagtactacgagacttagctcggtcgcacgaatgaagacaaagttcttaccgttctgtgactagcaagatccagtaaatgcgaagcctcaactgttgctggtcctgtgaatccttgaatagctctacattccccaggctgagaagatgggcgtgggtaatggcgtcacgtagagcgaacgtggcaagcgggatttgatctatgttggcgtagtacatatgcaggaacagcgacgtcagaagagaatccaaactggcactgctttgagcatcataatcggctcgaagccgaatgcactcgcggacaaagtcgcccgaggtgacgagaaacggttcctgcgcctgactatgaccgggcagacgcagctgggcgagcgttgccgcgcacagcgcggctgccagggcgtgggcttgtgtattcttaatatcgtttagtttcgccttcaatgcattggttgagac

SEQ ID NO: 17276 - DNA, 850 bp, Emericella nidulans
ctatcaaaccagtcctgcctcccctcagaacgcccagcaatatcaccttcccctccgagctccatacagactcgagcgctggctcagggaagaatgaggacagctcctccactccgattacgcctcctgccgcttatactgagttcctgaaagtcttcactcctatcttctccagcccaacgagcgctgagggcgtggacttttcaaagtacaagtttgaccgtcataatgtccattctgcacagtcacaaccttccagtgcagtcagcggcagcttcaatttcaacgagccagcacgatcggcaacaacattacctccgctgactcctcttgtgccctctcattctcgacgagagttgagtaacctgcgccggctgcgcatcccgccggcgcttaggtactcgcccacgtcggcggagccgcctcgaagcgctggacctcgcagtgcgggacctcgaagtgctacacttgatcgcactccttattctccaattgattggaggctacgctacctggatgctccccggagcgccaaccctcgaagctccaaccacaagatgagtgtgcgacatgtcatcacgcacacgatcacatataagacgacggagttggatgcaccaccgagaggaaagcgaaggaagcacagccatgatgatagtgaatcgaagtgaattattttcttcttgctgctgggtatctcggttttgttcaggcgtactactggtctggagtgcggcgttttggaatatggtatttcagcgcgggcactactcggtcctcttttcttttgtgaatatttcccacatgaataataatctagaagcatacttgggcgccgaggcgcaacaac

SEQ ID NO: 17277 - DNA, 484 bp, Emericella nidulans
gcagtaatgactgatctggctgaaaaatgtaacataggcctaaatttaggactcgactccgcttcctagtccgctaggctacctcgaaatatagccatgttcaattgtttaaaacagtgtaccaagatcttcgttcagcatccgagggctctgcgcagggtttagtgcaggtgctgcaggtgagaccgccagactagcttcctgttttacggcctggtctcggatacggcattcattttggcatcttctgggaggcctgtgtcgggcccagaagttccgctgcttgtcttactaggtcaataaactcccagaagcctttgctctggttttcagggacagcaaaggttccttggacgggaagaacgtggctagattcaggctgtacttcgcggattgcccttttggtagatttgcatggccgccgagcaggttgtcccaatttgcatcgaaacagatgcccccagaatgtacaaggagtttctga

SEQ ID NO: 17278 - DNA, 850 bp, Emericella nidulans
cctgtccaactttgcaaagactctagagaccatgacggaggacgagttcgagggccacatgcgcagcgtcatcaacaagcgactggaaaagctcaagaacctgagttctgagacatcacgattctggagccacattggttctgaagactatgacttccagcagaatgagaccgacgctgctcgtgtccgcgccttgaccaagtcagacattctcgacttttacaagcaaatgattgaccctgcctctcctacccgaggcaagctctcgatccacctgaaagctcaagctggtgcacacgccgttgagctcaaggaacaaaaagcacgcctgctctccttcgtcaccaagcagctcgaggcagctggttttgcagcagatagcgacagtctcggcatcgcactggagggtgtctcccccggcgacaaggagcaggtcctgtccgtcctcaaaacattcctcacttccacattgaacctctctgaacagcaggtcggccctgctcttgaaaccattgggcaaaacttcggtttgatgtcgaagcagcttggtgttgagtccaaacaaggctctgaggggtccagccttaccaaccgcactaaagccgcacgcccgacttatatcacaaacgtcgccgactttaaggcacgcctggctgttagtactgggcccaacgcccattacaaatctcaccgaatttgaggattttgaggccaaactttagattttcttggttagatatttggtattagggtatgcatcattcgctttggttcggtcagtgtggcatggtggtggctggcgggcttggtaacggattttacgagttgtagaaataaagtcttgcagtcc

SEQ ID NO: 17279 - DNA, 692 bp, Emericella nidulans
cggatagcagagcacaaaaccacgccgcaaagccgccgaggacgaagaggacgacgagagtgacgaggacgaggccgagaagcgcgccgctgcgccgcacggaaaaggactccgacctaaagcacgcggaggatctctttggcgacattgaccttaaccgcaaccggggcaagaacaagacaattgttgtgcatgacgcctcgggcgacccgacgcaggctgtagatctttccgcgatgcccctgttcaagccggcgaccaaggagcaatttaccacgttgtcgaacacgcttgtaccgcttttgaccgcgcagagcaagaagccgcagtatgcactctggctgccggagttcgccaagcagctggccaaggaattgcctagtggagatattaagaaggtggctagtgcgttgacgacgctgagcaatgagaagatgaaggaggagagggcagctgataagggaagcaagaagactaaggcggctaagacaaaggtgtcgctagttgcgtcgaggagtgacaaaattgagacgaccgcttatgatgatgatggtttggatgacgatgattttatgtgattttcttttcttgcctcgcatttctttgccctgcgcctacctacttcgctcagttgaaagtctaggttatacattgacaatcttcctgtctatttttgtatatcctcttccttt

SEQ ID NO: 17280 - DNA, 850 bp, Emericella nidulans
cttcgcgcgtctgagctcaccgatgaggactgggtcaaattcctggatgccgcctgggatgacaaaaactgggaggaagagatgcagaaacggttcggtgacaattactacgcagagaatgatgctggcagcgaggatgaaggggatggtaagaagaaaataccgaagaagcccacatgggatgacgacattgacatcaacgacctggtacccgactttgagaacgatgaaaagcctgcagttgagttgtccgacgttgagatggaagatgttgaagaaagtggaaccaagaagagcaaggctcaggaaaagcgagatcagaaacgcgaggcgcgcaaggacaagcttcgtattgaagaagcggtggaccgcaacctggaccttgacatttcactcctccccggcgcaacaaagagaagtgacggtggcttccgctaccgtgaaacatctcctcagtcgttcggcctgtccgccctagacattctgatggctgatgacgcgcagctcaatcagttcgctggattgaaaaaatatgcggccttccgtgaagaggagaagaaacaacgggatcgaaagagactgggcaaaaaagctcggttgaggcaatggcggaaggatacatttggcagtgaagaaggtccgagggagttcgtttttggcaacgagaagccttctgcgcccgagcaggacgatactgcagagaaggtcgatattcgagaaggggagcctcggaggaagaagagaaagaggtcaaagaagcattgaggtagattttatctagtttgatatccccagccgtttgtacttatggaattttaaagtacatctagtctactcaattcttacaatt

SEQ ID NO: 17281 - DNA, 500 bp, Emericella nidulans
gtccttttgtggttctgcctcttgccctactttgacctctatatacttacctccatcccccccagttatcgacctccatttttcaattgataatccatcctgcacttggtataagtctatccatacacgtatattctcaagggtcctcgcaaagggtctctccgcttacccatcattttgattttatcctcgcgctctcagtggtatcgggaactcagcacaagaaccctgaggatcggcatcccgatctatacgaacgactagtgagtcgccttgagaatcaagaacaccacaagtctctgttttgaaaccaattctgcgctcctcgacctgctgcacatatccatttatcgtctactgaggggcactactatccgcgttgtccccgaaagccagcggagtttgcgcacacttagccgatcgccaaacccacgacgtcagcggcgcccaaacgagcaaaagaaatcctgcgggacaacacaacgctcgagaaaaaagca

SEQ ID NO: 17282 - DNA, 850 bp, Emericella nidulans
ccaactatacatctgggcccgttttttaacaaacaagcagaatatcgctacaacaagatggtaattggcctactagcaataacggcaattcccacggtgacaggcattgcgctcgggtgtagcgaacagcgcaagcagaacgcacggcaagacgatgaaaagcgcatggcgaagttctatacggatgtggtatgtacggaagatgtcgaggaggcagatgagctagatgagaagagggttgtattgcggaacaacaaggtacataaattgcaatcattgccgcgtcttccgctccagaccgtcattaaccaagatactggaagataggtgtacatcgacgaccccaatccggctaaacgcaaagtcgagtcccatacagggcaagcattttatattgattacccggagcccgaccacatgaaggacctcaaacgcggactgggcctcgtatctacgatacaggataacccaccaatgctgaattggatatactgcgacaaagagacgcatgagctcaaatacgggaatcggacgcagagctgcgagcatgttcctgcgccatgggactggacggataatgagatgacaattatcttggagcggaactgggggttttatgcggtcaaagagaaggatgcggaggggcggtggagttgggctgtttatttagatagggatggggatgatttacagcgagttctgggggatgatgtagttgctgtgccggttaagttgaagaggacattggttggaacggttccggctgacagtaatcagacgggagggtcatagagtgcagggtgaaatctaaagagtgatagaaatatccatttgctgggtttgggaatct

SEQ ID NO: 17283 - DNA, 414 bp, Emericella nidulans
ctcctgaagctcccccaactggtgtctcccccgcacgcccagatttcaccgtccgccgataacgtccgccccgccgctggcctccttattggccttatgacaatcatggctctcctctagacaaccacaacagcaacagagtcgaatgacatttactctgttgccggggctatgacacatgccattattttgtctattttttttccccaaaaagagttaatatggagtttcggattttgtatcttgtgatgtctctgttccatttcctgtcctggttcgtttcttcatgaggatgcttgccggcctagttggtgcctgttcggatccatattgcaggcgttctagttctaggtgagggcagatgaggtcctatgctcttttaaaatagtaataataatagtactctagagttta

SEQ ID NO: 17284 - DNA, 850 bp, Emericella nidulans
ccttgggactattctagtcatctgcctgatccttctccttctttatcaactcttgcagagacgacgccgggaaattctacagcggcagcttgaagcaagcgcagtggatcaccaaccgtatgatctccgacctttcagggttccgcgagagtttctcgctaggcttccactatatgtctatccaggtctagacggttctgacagccagtacctcacacaaggagcactgacaactgcaataaaccgtggtagagcctgatgtggtaggaaagagccacgactgaacggatgaaagctgagaaagaggacgcagaaacgaaagcacatatgacgaaatacggcagctacgtcaaagccgaagagaccactgacgctgaacaaggtcccaaaacagccaacgcagaaagcggcaatactccactacaaccatgtccatacaggccattctctccgacaacagcttattctggtttttgttgcccgagacacataaagcgactgagccatccacaaacaatatgtgccatctgcctcgatgactttatccccgcttcatccaccgtacgcgagctgccgtgtggccacatctatcatcccgagtgtatcgatatgtctttgacacaaagtagcagtctctgcccgctctgcaagaaaagtgtgctcgaaccgggatgctttcccatatctattcctgacgctgtatacgagcgggttagcatgcggggtatgtagctgctttcacaggcttggtattgagttgtctcattgtgggcttcgtgataccctatcagcacatcgatatagaatactgccttcttatctagaatcgcaccaccgaagtaatcaatag

SEQ ID NO: 17285 - DNA, 850 bp, Emericella nidulans
ccctcaagcgacacaggcgccgcccttctccagctcttcaaagcaacaacacaacaaagcggacaccttggttctgcatggggtcgtacgaaggaggataagaacgttatcgtttgggcgatcggtcagtacagcatccctacaaatgcatcctccggcccaatccacaaaacaattatcaaccatatcaagaagatgaaacaatctcctaatgagtagcagactggtcggacgcccacagtgggattcaacaaacgaactccccgctcgatccctatattgaggaaaacacccaaataacaaccctcttcacaactctcacacccaccgactccgacgacaccccagcaacatccacgcttgtctcaaaccccgtgaccgagctcgcgcctctggccttcccaacttcgctctcgtcagccgaccgctcatctctcgtcgctcacctcaccacattccgcaagaccctttcagaagacgcggaggagaaggtgcgccccaaatcgtttctgcttgggcaggttgagaggccgggagagtttgcgcatgggaagagtgagtccggtcaggcgtttgttcatttcctggttcttggctgggagagttatgagcagcatcagcaggcgagggacacggaggggttcaagagtacgattacgcccatcagggagaagatggtttcgccgttagatcgattgggaatgaagcacgttaagttccagaaggtgtagatgagctgtactggagttgctaatggaaaggatggagccgagaatctgatggcatcggcatacaagtatatatgctattggaatagaggacattatatttatcgtcttaattatcgtgt

SEQ ID NO: 17286 - DNA, 500 bp, Emericella nidulans
ctattgtatctgagcctaagccaacaccataaagccaagttatgagacaggccggactacctatatatcataattgttatttaactcgggtgataaccgagtagccggtagactacacagcgtacacagcgtaattccttgatctactaatttgcctgatagtgttgaacgagcggtcaatatggaacccgataacatatctgccgcgagtctatccaacatgcctatccatcctgcagacaaatagatactcaatcccaaacacagcatcacgtcggaatcaactctttgtattttggtacaagtacacatgtactctctatctccgaagaaagaacccgtccgtcacttcgatccacccacacggtgtcttaagcataaagtaggcgaacgaatatgatataaacacaagcagaatcgtacagcatctctcacgatgtcgcagccaaggtacccgcctcttccaccttgctcaggccctcatctcgtcgtcgtcgctt

SEQ ID NO: 17287 - DNA, 850 bp, Emericella nidulans
ccagggcttacccctcctataatgccgtcaacagattcatcacctgatcaagaatgctcatgtctctcatatctttacctttgtcttagccatctttcatccctcaaacccttccctatatcccaacacacaatctgctctctatatatatccgccaaaaccgctcagtccgttattcgctgccagtcatgtccaaatagattcgacacgggtttacagaatgtcatgttcacaggcactcttctcaatgtcattgctgactcgtggctacgggtctctagagcagaggcttgcgagttggggaatcaggtcgctcccccggcgtatgccgcgaaaatgaacagatctccggacctgagaggagcttggaacgactacctccggcagttggtgcgcttcagcgttatacgcgggccgatggatatagacgctcaaactccttgcgctcaacaggcgccaagtgtgctcgacttggtcgaggagatggaagcgcgccagcgccgatggcatgaatctcctgattctcacccgttgccgccggatcaacgtctgaacatcccgtctgatcagaactgcctcaatcgcgacgagcaagatctgctttgcattagagtggcaaagagtgcgagaaatgtgatagcgaaatttggctttcaatcggatgagtaccctgagagtgtaccatcattgagtcccgacagtagcatttcgccctgatacgaccttatatatgaatttagtttaggcgttggtgttgtgggcacttgattgaaatttccaagcgatatatgtgcatttttgtcaataatttagaaagcgcttaattacgaatatatgctaccttgatgac

SEQ ID NO: 17288 - DNA, 500 bp, Emericella nidulans
ctcaacaacaaaagtaataatcatggtagaaacatacaacattgggtctcgcagcgaatgcgaacgtctcgtgaagagctggggcttcaaacatgtttttacctgggctgatgggaggtgagctaagtactccactcatatactggaagagactgtcactgacaggaacagcaacgcatactacccgcctcatacacatgggggcctcacaacgcaccttatccgccgggggacaatgacaatagcttatcccgacgataatgccaaatcgaccagtagggatatcaaggagacgttcggggttggggcaagggtggatgtgcccgctggcaagcgccatgaggtttggatcggagatgaaggttgtgaatatgtaattggggaataggtcgtcgcttcagtggtcctagttgcagggctattggtacttgtttattgcgctgcatgtcagttatggcagttgaagtacttggataatatataccatttatatttctgtg

SEQ ID NO: 17289 - DNA, 500 bp, Emericella nidulans
ttcaacgtcaagatctggcaggaggatgtcgaccgtcgcctcaagtggggtatcaaccacggtctcaagctcggtatcatcaacaagggcgacaacatcgtctgtgttcagggtggcgcggcggtatgggccacactaacactgtccgtgtggtccctgctgaggagaacctcggactttctgagtaaatccattcaaaagaatggccttcctcgacggaaggcacagcggtaccgacggcgatcaaacagtaggcgtcgctgtaggggcccggtccggtccgcttagatttgagcaacctgaggtctgctctgcaactgccacaacgtcatgatccgtgttggcccgtatccctgcgtctggcagtatgtcggcggcgagccgaaaggggctttttcattctcgttgggtataacaccccctgattagagagggcggacgaacatagcctgtaatttcgaattcctgacttggcgttagttagcaaaccattgttagtg

SEQ ID NO: 17290 - DNA, 850 bp, Emericella nidulans
gatctcgttttcagcaacgcgcccgtatccgatgatctgattcctgagaccctagagctggatcgccaaaggctcaatgcactacattctcaggccttcaagatagtagccacagcttctatactcttgaccgccaaaaacctactcaagcgtgatgcacgagcacaatggaaggccgaagctgatcggataatgtcactggatcttaatgacgtttcctccgaccgcatccagtcaatactcgagtctactcatccaatgcctcccacggccagtgcccagctggcagcaacaatcaggcgagtgcttccaccagtcgtgacagcatgtgcagcggcatcttcctcagcgggccagactttagttgaagtccatactgagatacctgcgcaaggtgcacagtcctcggctgctgcggccaatcctgcgacatctggtgtcgccggaagtggcgtttctagcttcgcggatccagttgcgcgtctaatactctcccgcctgcgtgcacatgtgctttcgcgcctcagcgcgttgagcgcaagcgagagagtgcgggcggcaagcacggctagtcaaagtctagccggggcaggaatgcccgagttcgtgagtcaagttggccaactgacagaggaactgaataaagtgcgtgaggtggattggctgtgtcatggcacggtctacgaacggattctcggcgagagcgggcccctgagccctacggcgtgaagggtcttcattatatgagtcatgtgcttcgtccattgtttcgttctagtgtatcgaggaatggttcttttccctatatgtagattcttccgtgagtctaatgacagcaattgcaagcagt

SEQ ID NO: 17291 - DNA, 561 bp, Emericella nidulans
tggatctcagtcattgaccctcgcatattgaacaggtgagaaataaatctactatatttgagctggctactttagcttacaaaattgacttgtagatatggcggcgaatcacccaatccatatccatcctgctcgacctttttaccgcttcgcggcgactgccctgggcgcgagcatgtggtttttcgtaagttgcagtgttattattaaacgccaccatcaatgccaatgctgatgtgtctctatcgtgtatagctgatgtatcgggctaagaaggacgggcctgctttgcttggttggaagcacccgtgggatcattgagcgcttggtaccaacattgattgcaccgccgattatcacaataccacagacgttaggtaatagaatggacatgtatcaatagcttgtcttatcttctatgtgaaaacagcgggtataatacagcggaaccagggtctatctactcatatcctcaagcagcgttttatattgacggcgctgtttttgatggcctggccgcataagtacctgtaagcgtccgataatacgagcaagttgagg

SEQ ID NO: 17292 - DNA, 850 bp, Emericella nidulans
cggagaacaatagcggtagcggaaataatagtaataatggcacttcaaacgcaaattctacggcggacagctccggctcctccgcggcttctggcagagcgggtccagaatcatggtcagtgccgtcgaagaatgttaatcgtatcgtatgataactaacacttcccaggtgggatggccattaccagtgggtgatcatggttattgtccttgctgtcggattcaccgtcatagccattgtcggggtctggctcaaacggcgccacgacaaaaagcatccgaacctttaccacgctactcaaagcgcaagcgacagccggatattccagaaccgcaacccggaggctctcgtgccgcgcgctcgctctgtcaacacagtctccttcgccagcagctcgcgcacaaacgttggcccgctgaatcggcaaggtccctcgccatcgcctttgcaaaattcgcaaggcgtagatagcggcgtggagatcagggaggcaccgcgatagccaactactagcttatcttctagttgtccgattcagtctggtttatcctcgctaccttcgttcaatgtcgacatgcgcttgttctaatagtgctgccgtttattgcatatacctggcgttccgcgtctatttccgttctctgttgaaatttcatcacggtatacgtgcatctaattcggattgagctgttccgttgttccattcgctggatggtctgtctttacgagctttattcctttccttgcttttaactcttttttggccctacacagcaacttcctttctatgccgtctatctgatggacgattgcatgagctagcatgaactaaccgagaaaaaattcgaa

SEQ ID NO: 17293 - DNA, 793 bp, Emericella nidulans
agctgcatatattgattgtgtgaacgtgcttccatttgctacagtagcagccattggaatccatgatggtttggatgcatcggtagccttctgtgcttttccagcttgtgcagattggacccgtgcttagacctgtgctaggcttattttgcagcagtgttatcttgatcttcattccatggggtactccagatgtgaatgtactcctaatgcgcagttctactgcgtaccctgtgcttgtatccgttcgtatgcaaccaagtagccaatgcaactgctgcttactcagtcctacgtcatgtcatggcaatcgatgaggtcagaccatgcttccgcggctccgaggtgtgtaccttgctatatctttgcacacactcttcccatctcaatcatcttccaaaacctgatagaatatagacaacctgttcgacatgctcggcggcggttctccatctccccgtagagcctcgcttcaacagaagcgccgtctgtcgacggagcattctcccaattcctggggcgcagcaacgacgggagtacgcatatgcccattatcccatgttgatgaaagtcctaactcgtgtagaacttgtatggcggtttatcaacggtgttcgagaaggataaagtcattttcgctgtcgccatccgtgatgcaacttacctggtggactttgcgcaagaggaactgcccttcagcgagagcgatgacttggatttaaagattggggaccacatgatgagacacttatataagtggtgcgatacacatcttgaaaagatgataggattg

SEQ ID NO: 17294 - DNA, 850 bp, Emericella nidulans
tggcagtgcggagaccagagagtcatggttcgaccactccttgaaccttgtacaagtccgcaaggtaggtccaaagcaagtatcttctacagtgtcaacactaatagctactaggccccatcagtgaaggatattgatgtgaatctccttggtacgctttacgtcactcgcgtggccagcgtctaccttcgtcacaaccgcggcccaggcgtggatcgctctatccttcttttctcctgcgccgcagtcatcagggagacccccgttgtgcctatttaccaggtcgccaaacacggtgtccaggatctcatgcgctccctccacgccaacctcaactctccttaccgacacagcatccgcatcaacacgatctgcccttggatggcccagactggtagcacattctccaagaccgctgaggagcgctggaccaaggaaggcctgccctttagtactgccgatgatgtcgcaaaggtgtccgttggcgtgatttgcgatgactccctccacggcgtctccatgtacgtggaaggttcgcgcgcttgggggattgaaagtgagcgcccggagtctcagtgcctaggtgaatggccatcccaatctctcgctcagggccagcgagtcctggaagaagtttttgctgcgtgatgaaggacggtctatcacacactccttcttgccgtccgattttccatgatacccactgtccctaaaattctctaacgtttccgttttgccataaatgcggctgaacagcctcgaagctagatattagttaagactagcagctagaggatacaggataaaagactgctgtcgctcaaacatccaatattgatacattggtgat

SEQ ID NO: 17295 - DNA, 414 bp, Emericella nidulans
tcaaaccgtgagcctgggcaataagtcggatggggtagtgctccaagttctcaggaagagattaagggccaagtggaccgccaaggaagagtatgggcttcttatcagacacgatctagataacgagtcagattcggagataaacggcgccgggcattgtattatttttattcagtagtcacagcaacagtggtgatagaaagaagtagtcacagaattgaataaagccctcccgggaatcgcaatctcatacatagtggtatcaaccgtcatccggtcatatcggaacattattacaacaagccacaacggacaaagaagggaaaacggatatcatgaaagccacccatcagataacacccgcgcatgttgagtcagtgtttggcagcactgtatctagctattacgcgagcg

SEQ ID NO: 17296 - DNA, 395 bp, Emericella nidulans
aatgcgccaaaacacctatcccatgcatgataaagtgcggccttcagccgagtcgagttcatggccacatcactaataaaacacataaatcaatcgtcgccaagggtaacagtcagtcgagggcgaaagggaggggtacattgtttgggtcatgaggaaacataaaaaactctgaaggttcgcaacagatgaagaaaagaaataaatggtgtgagaataccaacacctcgacagccatattggcgtgtccaggctggggacaaacaaacgcggataaagtaacaggtcggacatcgctccgatacttttatccaaattcagggacaggaagaaagcaacgggaaaacaacgagaaaacaaggcgagcttgctcaagtgagacgtcaaagcaacca

SEQ ID NO: 17297 - DNA, 420 bp, Emericella nidulans
tagcagaaggaatataaaaggtttcgatataagataataggatatgcatatctgacagcagcagttgtttgcggtcatgtaatgaggacagaaatctaagccggtaatagtacagaagttgatatcatgtcgtatcccaactcaacatccaagcaagtcaattcattgtataggcggtgaagattctctcaagatgcatttcaacagtcagtaatctagctcagaaataatctaaatcgttagtcgtatcgttgaaacaattatccgggaaccatcatcttaaagctggtcattatgcgctcgtgtcccaggtgcaggggcaattgtagcctcagggtataacggtcccgttcccgacgtgggcccggacaccggctgcgtctgagactgatatgccatcccaggctcatacgtcgggag

SEQ ID NO: 17298 - DNA, 433 bp, Emericella nidulans
acgcgtgtatctctatgcaaatatctcttaaattgtatatataaaaagaggtagtgagcattaaccgaaggatatgtctgtctcgctgaggaacttttcctcctccggcgttgtagttctccccagcactccatttcggtaaggataccgtccaaaccgtgcaatgatatcatggtgctccttctgaaacttgaagctttgcgccaggttggcctcgacggcttccctattgctcgccaggatcacccggcaagataattccttctcgcctaccccgtgcgctggttcatccaaaagccgacgaatatcatcagccatctcttggtaactccttagcacaagttcttggtggccaagatcctctgaatgcataaaagggaggtaaaaccaatgccttagcgcgaggcgataccgtatttcgggtctaacggcc

SEQ ID NO: 17299 - DNA, 441 bp, Emericella nidulans
ttgatggctttttaggcaatattgctctatgaatattttatttgttttctttttcatatttaaagaacaaggttcgggctggtatgcgccatacgtaggtactgtactacatccaggaccctgatcgtattcgtcattatcgtcatcggcgcagttatgcattcatgtaggaattctatcaacgaccgtgtctggtcttaaacaaataacaaaacaaggtatgggtattgttgaaaagcttcccatgtcattcatggccgaccctcgctccatctatcatgcaagggagcccgccacacgtcgccaactccgtctcacctcactccagagcagactctttacagcacccgtttaaacagacgacatcacgcgttctctccctccttcttctccgcgcccttgggctcccatccaggctgcgccatctcaaacccctcaaac

SEQ ID NO: 17300 - DNA, 477 bp, Emericella nidulans
cgtaagtctagacaacctttcaaatatctttcaaagacagctaggtatgaaacttcctgacgtctattccagagtatgatgcagcagaggagagaagagccaaagggagacaccaaactccggcgactgatatcaagtggcatatctttcgaaaaacaaaacgcagtgtcagtatcatgccatcattgtgggtgtgactggtcccgcatccatttatacaccacagaaaagtctttcccacggtgttcagcttccaccacgttatatacaacgcgagccacctcagccagcgccaaaggagtaccagactccttcgcagctgtgagggctagtcgtaagtccttattcatgagactaatgccaaacccgccctcgtaatcacgggaggctggcgcaccctccacaacgccgggaacgggattgttgacatccatcggccagcatctgccggtggacgcgctaaccaaatcttgcaga

SEQ ID NO: 17301 - DNA, 489 bp, Emericella nidulans
gcgaatcccagctgttgtatgttttttactcatgttgtttttttgactcaggctgcaaccaactagcctgatgctactgcctcacatgtccttacccatgcgctgttcatgtactaagtaatcattctacttggcctgtgagctgtagcgacacaagagcacacattagtcgtgaggctacagtaacagcagtggcactaactctagatgattcaaagccgtacctttgagacaatgacgtaagagtccttcagacgtcacctccaaaattcagctggctgatccctggaatattaccctagaatatacctcgacctctggtaacttcggtcgtacctccatatcgccatgttcctccccagaatacgtacctgagaaccatcttcctacctatcaccggctacaggctaaacaacgactattgttgcaatgagcagggtttgatcaaatgtatgaagtattattattcttgtgttctccaaagctatc

SEQ ID NO: 17302 - DNA, 495 bp, Emericella nidulans
tccagattcaagaaaagaaccaatattccattcgtagaatatgtatagatagataagggcatggagaggaataacaagatcctgacaaaacgagggttctcggacctctctcttgaagcgaatctctcctcttcagtagcggatttctcctaacttgacgctggatctgcaaaagtcacaggcgcactgtgctaccattgactttcgcttggctcctttttcatctggtttgacgaatggatagggaagcttgatcatggcgaaattgtgttgggaacgagactgatatgttctcaaacattgcatggcggtcgcaacgcaagctatctgcttggatgatggaggaggcgcatagattcgattgttcgataaattgacatttttgaagttgttgcatgattcagctcagcccttcttttgctggcggatccagtcaacgccgtcgcggacagtgtctcggacgctgaaccccccgaagagccagtagtttgagtg

SEQ ID NO: 17303 - DNA, 534 bp, Emericella nidulans
ataggcctgtcattgccaacttggtagattaaatactacttgacaaatttcattatcatctcaaactgcatcaaaacgaacaattgtgcaagtacgccatacgcctggaacaatcttgcttccgctatgcagccaaaacaaagcacacgctcaatcatgtcatgaaaaagagacgctcacttttatgctccagatctcgaaatgcagaagacagtcccgcccagaaccaaactcaaaacctaacatgaacaaacaaataataggacatgcaagaaaaataagggtataatctcgatctttgcgaacggaattagcgctattgcaggcttcattcatcgcttgaacatgtaatgtccatagagacccccgacgtcgccgacagcaacgggaatctttttcattccccaccatctagcgcccattttccaagaacgagagccatcgtcgattggtgtgtcgggcatcgaggcgggatcacgcacgtaccatccgcgacggcccagttcgcggactgtccagtcgggggaggtcttg

SEQ ID NO: 17304 - DNA, 366 bp, Emericella nidulans
tggcggcctttgtcgaagccattgaaaaagaagacggatacaaacgtgccattgagaagatcaaagaggtagatgggaagttcgaggcttccctttaactcttttaagttttctttccggcttactcgcttaatgtttgttgacgcagctgtatataccaggctaccactgctatatcatatactaccttgtacctaatacaagacactaccgccaatccatcaatactaaattctaacgggctcctttccttccggcgcgaccagatgtccttccctaactagcgaattgccacaatgcctgccctcaatccaatcctccatgttactcaacactgtccccgcaatctccgtcagcgcctccctc

SEQ ID NO: 17305 - DNA, 395 bp, Emericella nidulans
gatatcaagctcgggatatatgaggaatgagacaggacaaatgaaagaaaagagggtcgaacgtataggcaggatcatatacaactttcgaagagtaagagcaaggtataacgttggacctttaatgtgggagtataaatcaaaggagccttatttcaggccgcaagaaactgattgtcaaaagcatgatcttttcgccagtacgccgttccctataccagaacccgccaagaactatgacaaataaacgccggcagaattcttttaacgcatggtggcaggctttgagaccatccgcccgttggcccgcttataagccatctggtcggggccatcgagaagagaagatctttccataggacggcctgcgctgcattcctccaggataggattca

SEQ ID NO: 17306 - DNA, 402 bp, Emericella nidulans
gccataaaggagagaaggcaggcacacaatctggttataaggaaataaggaaagacatgattctaacagtatatacaaacttttctgttatcttccatcataagtcgttgccatagcccatacactgtggcagtccgtggtcattgcgcaggctcaccggcccggcgctagggtatctttctagtaatcgtccaaaacatgtccagtctatccagtatccattacgttaagttgttggcgtccgtaactcatcatagcaagcgaggcgaaccgcgttacagcattacagctgctcagcccagggggcagcaccaggctgcatctggttcagccacttgacgagctcgatgagttcagcccggcgctcgtcctctagctggtcggtatcgccgcaaaggacgg

SEQ ID NO: 17307 - DNA, 403 bp, Emericella nidulans
atgaagtcggattggtagtagaggccatgtacaattggatgctctttgaaacctgggagagaggcttgggtgtccattgtgtgggtgtgagactgctgagggtgagaatgaggggctaaaaaaatgttggcaagatgcggggagaaaagcacaggcacaatactgattatataagcattttttgtacctttattgatactgtattatttcctgaggacgacctatgcaagccaagatcagtgtgcctggatgtcataggctgaacgcggtatgagaatgctgcaaaacttcatttatggacactcgtgataccaggctaagccgcaatatctcccaggaaatccttcaggtaatccatcttgcccactggcactcccttggccctcaggatatcatacgctgt

SEQ ID NO: 17308 - DNA, 412 bp, Emericella nidulans
tgtcgatggcatcgcctaccttatccatttgagcagtacctagcctacgttcgcgaaagtgttattttcataggacaagggtagatttccaccgcatctattgaaatacacggctatttttgtatggaacattatcaaaatctcagtcaacagggtgtactggcgctgtgttttccaacacctggtaaagcaacgcagtaacagcgagccgctcattctcgctcacacaaccatggcatagtcctcttattttctgcatgcacagttcacagtccggaccaaaaaccagtattatttaaagctgccgaatgtaacacgtacgccacggaccgaaaaactggacgaaaaccgtgtgctgaggtaggtgaactggtccgagccgtccattatcctatcctttttctatccttat

SEQ ID NO: 17309 - DNA, 412 bp, Emericella nidulans
gctgacttttatatccgatgctcaggagattgagtcgatatgttaccagtccgtgtgctgcggaaagcagcttccctaatcgtctagcattattatgtccagcacatatagttcagattggcgtggagtagtatcatcattgaacaaatcagccataagcggtccgaaaaagcgagtaactccgaatatgcgtagcctctgtaaaaagattattgaaaggacaaatatgacgtaacggcggtattctggaaaatcaacaccataggagcatatgtggacgaacaagatgagtcaagtctcccccggttcagctggtttagccacgcttgggtaaggcaaggcctctaagtgatccacacatagaagaaaaggaagaagacgagagcaaagaacccagcccagaccttccacc

SEQ ID NO: 17310 - DNA, 423 bp, Emericella nidulans
tctgcgcctgagcacccaaacttgggcgatcccaaagcaatcaatctttttccacaggcatcctgccgcccactcgttatgttttaacattgcagtccagcttcttgagaaattctttactgtactcaagttggtttctactgtcgatgctccctgtttgggcatatcgtaggcatctcaaaactacatttgtcgctgaaatagtagataaaaggtgatggattgctaaacatattcaatgagaatccaagcaagcgccattctatgaaacctgcatagtagaataatagcgcaggaggataccggttgggacggatagacatagaaagatacattatcatttcctaaacgtagcggcaacatcctctttgcgccactcaagctcaagctgaccttcatatactgcacggatcacatgttgcg

SEQ ID NO: 17311 - DNA, 431 bp, Emericella nidulans
tggatgggccgattgttggtaatagagcatggaaactttagcctaaccgccatctgctctgcgagacacttccagatctatttaataccttgctatcatcgtccgatattattaatctcaagaagcctccattcctcaaaacgaccaaaataaaagcgaagcggaccagtaatacaatatctcaagcgtggactagagcacaccgaatcaaagaatgaggtacgcatcctccccctcactctcgacactgtcaccataagtagcagcttcaactccagcttccgttctgacatgcccgtccgaagcattccaggtataccaaaattcatagctcatgactgtgtgatccgcgtacataagcatgagtctgtaccggcgcgaggggttccagcctcgccagctctcctcgggctggtaggagcgggttgcgc

SEQ ID NO: 17312 - DNA, 433 bp, Emericella nidulans
ggcgagcaatgggggagtcaatactttcgatgccgccactgccttcactgacgatgtcagttgggtcgttgctgacggctttgcctagttgatgaattgatgtagattccatatatttgagaggtcctagccaacttatcgcggttgacggacgagcacatagtgttattgaagagcttgtgaaagttgtacatatcgaagttgacggtaaatattacatgattacgctaaaatctcactgaatgactaacatggatctcaatatatcgaggctctaagcactgcactccatgcttcaagcagcagcctgatatcccgttccagctggcactctttcgatgatgcggcggtccttagggcttccactcgtctgcgctgcaccacttgcattgccagccggctgcctgacaatgaaatcccgcttaccatgggc

SEQ ID NO: 17313 - DNA, 437 bp, Emericella nidulans
caaccccggtcagccaggagagcttcttatctaacgtgggcagacgccagcgatcggattacagaaacacgaacctcgggacttcacgatacttcaaatttacgcggccgccctggaaaagagggtcgacccagacgatgttcccaagttgcttctcaagaagattgccaacgaccgctaatccagctgggccggctccaacaaccacggcggcgcatctcggcggaggactcattgttctgtgcgtactgagaacgtactgagaacggaaagtgtaaactgaccgagtggtctcgatcagagggatatcacagaaaaacagggtttgagaaaaagcgaacaaattctacgtgaaagcacgcagagaaaaccagtgtcaagatgagagcccagaacccaaaaaataagccaaggaggggatggcgggcatttatggc

SEQ ID NO: 17314 - DNA, 451 bp, Emericella nidulans
gcacctaccgcccgggatttacgttatgactttcgcgcagaactctgtccaggtcatgtaatatcacgtgataagcaaggtacacgcaaaacgaggtacatttacgaatagtttcaacattggctttacgggaagagctgagattaataatgaacagcggatttgaagttcaggaatcataatccattgtagaatcaactacataacaagtctaattccatttctttcattcgtaaaggcttttttaaggaagtcataacggcataaatcgaatgtccgcttatttcttaccagccttctgggcggccttggtgaccttaccagcaccagcggtggacttctcgacgctcttgacgacaccgacagcaacggtctggcgcatgtcacggacggcgaaacgaccaaagggagggtagtcggtgaaagactcgacacacatgggcttggaagg

SEQ ID NO: 17315 - DNA, 453 bp, Emericella nidulans
gacggacatctaccacagaagaacgttacgacattatattttaaagcgcaggttggcgggcggggaagacggtagaatgcaatcaatccaagttgccatatcacacacaaagcgccatgccattgatttgtagaagaaatccttgttcatatttttttcattcctttcccctcgtttccatataccgtcttctcctccctctatccacttttcaccagagaaagaaagaagaaaagagttcttttccctgttcccgaacccagtcccagggtatcccggatgcaaatatcccaccgagtcgaacctggaatgtggaaacgagcgatgtggtcgatctgaaatgatatctcttgggctgatcgattccccagttcaaacatccgcaccgccaaatcccgtcaatgaaggaaagaaaatcaaagcgtttactcctgctcctcgccaacaagagcg

SEQ ID NO: 17316 - DNA, 455 bp, Emericella nidulans
gcaagacatagcggtacagcatgtgtatgaatcatgagtgtattatatgactgtcgaactaacccccgcgccattcaatgataacaatgtatgaatgtcccgatagctgcaatcaaaaccacgaaggagcatagtagaaaaggaataaggatgatgagcataaataatgcagagaggaggttgtaggagttgaagagaaaaatttccatgaacaccagtccaactactcaagaggagacagagtaagaaaagcagacgttggccccagatggagttctgaccgcgcgcgcaaacacacaaagtaaacaataccgcacgccgattctgccacaggaattgctacccgctcaacgcgccaatggaaagggctgtagggttaatacccaacagaggtaaatttatgtcagttgttcgtcgtcgctccgcccatttccaccagtccttgaaccccggca

SEQ ID NO: 17317 - DNA, 457 bp, Emericella nidulans
aatgaactccgacggcataataaggtatatacacatatgcatgaactcaacgtttctgagaaaataaaaagataaagacgccgtcaacttttcgacctgatcaaacagactcctgaaaaaatttgtttctggttcatgcttcattacttgcagttgtatcatatcaaagagaaatcaagagatgtaatgcacaatatttcggaaaatcccccacaaaaaccccacatgaggacgagaaaaaaaactctaggcaaccgtgtgggaaaacaggaagctcacggactcgccgttgtgagttcggcggcaagcctcggcgagcgtgggactgatatcaatggtctcaatcttgtcacagagctccttcttctccttatgagggacagtattggtcacgacaatgcgcttcaagcagctgttgttcacattgtcaatggctttgcccgaaaggataccatgg

SEQ ID NO: 17318 - DNA, 458 bp, Emericella nidulans
ttgatatcaaattagctaagaaaacttagaaagggaagagagaagaccaagtccaatatacctgtcaaattttccacatacgccccaagcttctataagaacctttcttacttgaacttactgcgctagctagtggaccatttcaatttccgttccgaggtgactttgggtctttgggtaggtattaactaagtttattaacatcgtaagctgggagatgttcagcgtgagtacatatacaggagaggagaaactagaaatacaattttaatacaagtttgtacataaggcaaatgtccaatcccagaccatccatctatgcgatatcataaaccaagtccataaaagggaatattcaagttcgccaaactccaaaaaataaaaagaaaatttaagcttgttcctcgccctgggcgaccgctgtaacttcaagcccatcgttattggcattgaatgcg

SEQ ID NO: 17319 - DNA, 463 bp, Emericella nidulans
atgctgtgaatctgcatttatacacaacaagtcgatcagcagaggatgaaacattttatttctatctctatccctgtagtttaaggtaatataggtaaataatcacaaaatcatttggcctgccaaattatcctgattgtgtggcatcgtggctcgtgtaaacattttcaaagaatcgtcgctgagaaagcacaacaagagctaggtcgggagtcggtctggcttgttccccacgcctggacgcttggtattcctcgaaggcccgtcgatgtatacgatgtcacgagcatcgccgactttccaaacatgtcccggtgacatggtcatacagagtcggtctcggtccgattgtatgctagtagaaaggtgggggccccgcctgagcctctctcgaccgtcgaaatccacatttacttcgcgaactcggcctcatagtccttgatagcctggaccttgggggcag

SEQ ID NO: 17320 - DNA, 468 bp, Emericella nidulans
cggcgactgtacaaaatcgtacccagtatactctcttgtcatgcacactttcaatcttcgagcagttccacaagcttatatgcaaatgcctgtatataatcggatcacggggcatagatgattgctagcaacccgagaaactaggcttgtagacatgggagccatccaaatccaagccaagaaaaaaaaacaaaagacaaagtcaggcgggggttatcgaactaagtagctaggtagacagaagaagcaacaccaaagaactgcgcgtgcaggtgtaggtgaaccagaccaagcatagatagatatgtagaactgaaacagttgctaaagcgggaacagagactgaaatggttcgaactgcaaggaaccgaaatggaaagagccggaagtaccgaacgctgatgcgagttaatagtaaggaaagacacaagatagtcatgcggggatgatgagtaaattccgacttca

SEQ ID NO: 17321 - DNA, 475 bp, Emericella nidulans
ggtcctcatcgacgaagccagtgacatttgttagagagtagcttaattaatattaatggaaaagctcactaccctgtgcttaatacaaatgaagaggttttataaaccttgcgcagacgggcagagccagatgtcagggtaactaagacaacttccacgaattaacagcctcatcaactagcgcgcggtattgcttttgctgatagcattgctctaagaagactttatacttaacctcaagcagggccttttcgttctcattgtccgtcggaacaatcctccttcctggcttgctcattcgatccatgatactccataagtcttccgtgttgccttcaggatccgcgctggcggccttcgccccaagcatggcagctccgattgcgacacgggcatggatatagcgcggtattagaaccggcatgccgcatgccgatgcaatgagtttgaccaggatgtcattttggcattggga

SEQ ID NO: 17322 - DNA, 478 bp, Emericella nidulans
gccggaccgggagatgttgatccattccgataaatctacagtcactatggtcacgtgtacatttaggacagagcaactgaaccagaatttattgactgtgacaagcaattgatcacattagtcgattattagtggcagttcatagagcttccgaagaaaaaaaaacattggtggatggatcataacgcataacagctagcatatacatcgtcatactggaacatcaaagatggtatttcgccaggtcctgtgcaagcctggagtttcctcgccctcctccacagcatcatgtgcctgtcgtgcctcatcattccatactttaacaagactcccaggagcatagacgttcttgaagactccactgcctggtgcgtcgatgcccacgcgggcgtcaatatctgggttaggggctggcgccaagcgggccagtaccgcacggacaaaagtgaatagatcctgagggctagcgatgcgtgcg

SEQ ID NO: 17323 - DNA, 482 bp, Emericella nidulans
gcggatataattgacacggcttgaggatggtatctgaccttggtgcaggagagaaagtactagttgtagaagtaaagtaacaactccgtgacattactacctactacgtacggacgcacttcacataccggccaggtaaagcagatctgactcgttagtttcaggcgtcaaatggttgaggcagggtaaactcactatactcgctttcagaggcccaaaagtccaccaccttcagtccagcgctcccacataggttctttcggtcatccgcatcatacttgtggctacgaacagcgagcagcttatgccctgccggaatatccactccgtccagggagacatcggcgcgggtgatatagtactggttatgcgccccgctctcctcatcccaagcaccagtgacattccacttgtccagatcgaaagcctcatgcccgagaatatgattcgcgcgcactaatccgttcttaacaaaccggtga

SEQ ID NO: 17324 - DNA, 484 bp, Emericella nidulans
gcaggactgctgggtggatgcaactccagaacatgaagcggaacaactatctggttgcagcatggatcattaagggacgatggagtacgtgatagattttggtatgtagggattagaattagatatactgcgtgagccagatatgaacatgcaaatgctctgtcaaacaattcccaacattttctaagtggattgcttaacccataacattttactcagccacatttaacccatcaacacccgagtgcggtgtctagaacaccattcccttcgtctggctcatgttcttgacattataattcttgaccatgaacatccagataaacattagcgccatcaggcccgtgccggcagccaacatcctggcttgcgcatacccgtaactctcctggatggcgatccgctctggcgagttcacagggtacgaaagctgaactctcagatcgccatatatggccaccgcattcgccttcgcactctcggg

SEQ ID NO: 17325 - DNA, 494 bp, Emericella nidulans
ggcgtcatgaccggatccagaagggaaatttattacataggaagttgttcggtgggaatggatggtgtggtttgtggttcaggtgtctagctctatatctttggttctagcagccctgctgaattgtccaacaaataagcaaaacatctctacccgtagaactgaaaatgacataatttttgtccaaattctaagctgtatcgtgccacgtaatataatgaaatgaagaataaaatcgtgatagcctgctagccgggagatcgtgtagcccgcacttcaatcaggacgaatggtatcagtagccaacctgggaaaaacaaaaaaaccatcaacaaaaagcactgtatgcttgtgcgtctaacataagaatgagatgagacatgagatgtcgaccaaacgccaaattgtttttcgccaatcctttaaggtatgattgttctccgtctattcaatagcggaggcgttgttgccgtcaggacagggttgccttgggg

SEQ ID NO: 17326 - DNA, 497 bp, Emericella nidulans
cttagatactgcctctctatcgccgccttgagcttagcatcacctgacgtcctggaaaagtcaaccagggctgaagatacctcaaactagggtacgtatgatctaagacaggagataaaacgatatatttggattggtactgaatcctattttataccaaccgggaaaaaaacaatgtatgaaatggagaagacactccaatccatccagtgggtgtggacaatcataccaaggagaagaaagtctggaatttgtcgaatttcgagtcttcaattccaaacacagtttgtaatgagaacagaaaggagagcaagagccctcggaattgcatcaccataccaagacaaaccaaatctgtttatattgatttgagtgggcaagaaagcaactttgcgtgttgctttgcgtaaagaaaagaaagtagaaaatctcaaaagctagacatgaaggaaaacagaaaatgacaatcatcccaataacagtaatgggtccgttac

SEQ ID NO: 17327 - DNA, 522 bp, Emericella nidulans
cggctaaggtcaaatccgatcccgatctggccgcgagcgcgctgctactcgaattctacgacatgaccaagaccgtctctgtgccccgggcagcgacggcatttgcatcgcgcggcacaacgcagaacggtatcatcacgctgcgctggtcggatgcgactaaggatctggagcaccgggcgtgggcgagggaggtgcaggagcggtggaaggacgtgctcgagaaagagacggacgccaatctcgatgcggctgggaaggccggtgtgccgcagtacatcaattatgcagagcgtgagtctgtcccttcgtctctaacataccgaccgacagtgctaaccaatcgatgctgactggcagctggcgacgcggtggtgggcaacatctacggagagaacctgccgcggttgaaagcgctcaaggcgaagtacgatcccacgaatgtgtttaggaagatgcatccgatcacgctggactaagatagcttgagtgggtatatcgtctattattggacatatctaa

SEQ ID NO: 17328 - DNA, 533 bp, Emericella nidulans
ccttccaaagcgctgggtgcgctcgctattaccgattctgtgcttgctggtcccctaggaatggctacgctcgatccttctgatctgaactatcgcccagactacaataacgcggaagactccaccgattttgcaacatcaaaaggcagaaactaccatcaaggtccggagtgggtttggctacgaggatactttctccgcgcactcttgtactttgatcttgcgcgacgcaagactgcggatgagcggacggaagcattccagcaggtaacaagaaggctagcgggttgcaagaaagctctgagggaaagcccttggaagggccttactgagctaacaaataggaacggcaatcattgtgcagactcggtaggtgacctttcctggagatgctcgttcaagttgggagaataatgggctgacattacttctttccgcagtcaccaactcaatcatggtcggcaggttgtctactcgatctttattatgacgcctcacggtatatttaactcttgccatttagaagaacagat

SEQ ID NO: 17329 - DNA, 538 bp, Emericella nidulans
gaatgctggaatagactagcctttgtccacaggaattgacggctttaccaaaacttctggtacacggggccatgaataaactccctttccttgcagtcgtcatagcttactccataacgtatgacgcgaaactcaattcagaatctgcagctcgggggctcaatgtcgttgacattcgtgaccgtaaaacggcagaatgactccgctggtccttctcaatcgatctgcggtgggataaatcctgaacgcgacgcctatgctgatctgtagcttcctcttttccgacgcaaaggataaactccatctcagatcacctccgctttgacaaagtagatgatcgcgtcaccgtgccctcgctcacagtcttctaattatcttggcttgtctaaaccagcttcgggtttcaagagaggtcgagactgatctgcgggcttctcaaaacccgtgtcgatcaaaatctttctgtcatcagccccactgagattctcgcctttccatttctggcggtccgatggggaaggctgggatgtctcgggca

SEQ ID NO: 17330 - DNA, 584 bp, Emericella nidulans
gggctgaggctcaggtccagaagcacaaggacatcctcaacgctgcccgtgccgaccacaccaacgctgttaagcagcgcatggagaatgtcaaggagctgtctggtgttgttgacctcaccaagcagctctttgaggtttccaaggtatttaaacagcaacagctctcttgagcggtccctgctcgaggtgaaagcgtggggagattacagctaacatttgataaaggaaaccgccaagctcgaggcccaggcctacgagctcgagcagcgcaccgctcttgctgccgaggccaagcaggttcttgactcgtgggtccgctacgagggccaggtcaagcagcgccagcagcgtgagcttgctgagaccgtcattggcaagatccaaaaggagctccagaaccccaagaccctccagcagatcctcaaccagagcgttgctgacgttgaacgtatgttacaaccccgatagaacgctcacctgagtccagctgacatcttttgacccaggcatcatgtcctccaaggctcagtaaatggagtttgcttggtagccctgctatcgactcatgtacaaattaagac

SEQ ID NO: 17331 - DNA, 349 bp, Emericella nidulans
agacgcagaaggagatggagattctggtgttggataacttgcggtcggcggtggaaaagggagaactcattacgcaagtcccagagcagaagaaataagatgttagaagttataccatagtaatagacataaattgaactattttgtcaattaaacattcttttcaagtagagttgtagcgagccgtgtctgcgggaagaaatactgccacggcggacggtgggcggtgaccagaaagagctagttagggctcgcttagggcacccatgccaagagcgaaagccgcaccacaacgagcgactctcgcgatctccaaagtttgacggccgacgacgcaaacgacaatctt

SEQ ID NO: 17332 - DNA, 372 bp, Emericella nidulans
ttactccagccgctgtttgttctagcagagttgacgtaacaatggactttctatctacctatttttgacagtactcaagccgcaaattttggcggctaacgtttccaagcacacatacaagcattaggagggcttgagaaaagcatacacggaccaagtcccctgcacggcaacttaccaacataaccgaaatagagctaatgaaatgagtgaacaagctcaggaaaacctagatgtagaacatcgtgtcccggacattaggatggataaggacatcgtcattagcgacttttactgttgaatcttcagcaccaataacactaccggagggtgtagagggttcaaaagcactgcttaaatagcaacgggcac

SEQ ID NO: 17333 - DNA, 408 bp, Emericella nidulans
ccactggaggtagtcctcacgctccttgccagcacggagaggaagaccctcacgaagagcgggctcgtcgacctggataaccttgacaccggccgcctcgaggtcaacaacttcgtcgcgcagagccagagccagctgctgagcctgcacagactggtggacatcgtcacgagggaaggaccagcggagacaggtgatgggtccagtaagcatacccttcatgggcttggatgaaatcgagacagcgtacttggactccttgacagtcatgggagctggacgagagatgtcaccgacgataatcgggggacgcacgcaacgggatccgtaactctgaacccaagcgtgggtagtgaaaacgtaaccggtaagacgctcaccgaagtactgaaccatgtcgttacgctc

SEQ ID NO: 17334 - DNA, 420 bp, Emericella nidulans
ccagaaccacagcgtaggatgcgctctgtcggtgcaggatcagctacagcaggataagccaaacatagacagcactagatagtatgagactaataaaccataacctcctgaaaatatcctgtgtatgataggagatataatctaccgtgaagtaacatatgagatgacgatagttaacactcagtttagcccatgctctagtagacgtcatcacgcagccttgctgattctcttcgctcccctcttactgctttttcacctgttgcgacttctttttcggtacacgaaccagccaataaaggaaaacagccgcaaatgcattgaagacgatgtagacgaacagaatcccaacattgcgccagttatcatcagggttgatactcagcgacgccaagaattgattcgttgaggagatactgc

SEQ ID NO: 17335 - DNA, 423 bp, Emericella nidulans
gttttggggtgaccactcagaaaatagtttcgagtttgaatctgaccaaacctcgcgtgcttgcttacgatcttctcacagaggagctaactatagaaggtatagctgaggtatatttacgaaaaatcaaagtgcaagaaacagtctatgtgtttcattcagtagataaaggatagaactatcataacaccgtcaaggtgacatgtgaggcaacaaagaaggtataaggcttgcccagattaaccgtgaagaataagaaacccatccaacgccgcgcaggttggctaacccgtagatgagccgtaagatcgaaatcaaagagagtcattaattgccgccgcggagacggaggaccaggtggagagtactctccttctggatattataatccgagagcgtacgtccatcctcgagctgcttacc

SEQ ID NO: 17336 - DNA, 438 bp, Emericella nidulans
tccaaatgatgtacaatagaaatgcagaacatatacttcaaaatgaatgtacaggaatcatgtcaaatcaagatgaacataaacgccacttgtcatatcatcataaccatgtattccggtgcccatcagcttaagccctatccctcgcagccttatatagccctctgatatcctccttccactgctccacatccgtcctctgcactcttcgatcatacgtgagtagcccgttgacttctccctcaacatcagtggtctgagtccagaccgctgcgctgcacgcaaactttgtaacctgctcagtcaactcagagagcagatagtgcgcgcggtagttccaagtatccaagtcctcgtcaatctcgtatgtttctgggatggtgttgattgccgcttgtacgttccacaggttctcgatcgagacattgtggccgatcc

SEQ ID NO: 17337 - DNA, 440 bp, Emericella nidulans
actcataatatatgctattttgggaacattaagatttctaccaagtgatatctgggtctagaaagtaaattatttctgtctaccccatctacagcttcagcagccgcaataagaaagtggcgttctgtacttcctgctcctcttgcatgatcataccctcctcgtctgcgctgggcaacttgccatcagctgaatcacgtttctcaagcggccgacgcaccgccttttcaatgaccgaagcctgagtgttgaaagcctctgcaatgccgatattgtctgggtccgagagaacgacgtattccatcttgacgtcatcagtagggaccaagccagcctttttacggagacgctgaagtcggttgacgatttctcgaccaagaccctggtgagctagttcggggtacaacttgacatcgagaatagtcaagacgtcggcatca

SEQ ID NO: 17338 - DNA, 442 bp, Emericella nidulans
cgtacccgggatatttgaagatagaatatagacgattgatcagactgcgacggcgccaggggcgagcaagacggtcgatttagggccagaaatcccgactggaacaaccgaggcaaccgtatttgagacggccgagacttacaagacagtcgagagaatccaaagcgccaaaggcatcaagatagacgatcctagtgggcagctgcatgcaaagttggcagctgaggaccctgatcgacggttgcagggagagccagtatctgggacattaggtatagaagaatcgacatccgggatgtcaggagaattagagattcctgcctaccaggcagtggcaccacggaagattgtcgcattcaaaatcgagaagctggaccggacgaatgtgagcagttggaaagttcaatacaagttgttcctgaggacacaaggttgctggagt

SEQ ID NO: 17339 - DNA, 442 bp, Emericella nidulans
ttcactgcatttgcatcctcttccgagatataggctgttaaatatgtgacagcaagtaagttgtggtcaatataatcctcatcttgcattgcctgatggagaagctcggtcttcccatcaattctcatctttctggtattctcgaccaccttccagcatttctgaagccttaagaggccctcaattttcttcttccataacctgatgttcgacgcgtccagtacatcatatttgacacccactggcttgattcgatcacccttatcaagggggggaagtctctctgattgccttgacatccccgatgtcagttcttctatacttagtatcctgtatactggctctccttgtagctgcttgctaggatcgtcgatctcgatgctattagcgctttggattctctccggtacagttctctcgactgtcttgtctgtctcggctg

SEQ ID NO: 17340 - DNA, 446 bp, Emericella nidulans
tcgactgcatttagcacgacgtcatctgcaagtgctgcccatgttatttacctggtcagcaatcaccgtgatgagcctcaagatcggaagcgtaaacgctagtcaatgccagtagagcgatatatgagcactagaaatttgtgcgcaataatacacgcttgaaactaagatcttccctcagttggtaatgaatgaccagcattcctttgttgcgaggtggctcgtgagcagtgaagtgccttgcaagcattcaagaagaacagagaaccaagtgaggttgctcaggccctacgaactttcaaatcatgaaccgtcctctttcaccacccaatagggtgacaggagttccaatctcgtcacgcatagttgggcttcgccagccacttgagctgcggagtcccttgcgtcttcagcaaatgtcgaaccgaaagagaatgccaagccac

SEQ ID NO: 17341 - DNA, 449 bp, Emericella nidulans
ggaaagcgatggataaaggatgcgtttactccgtatgaatacatttactgataaaatctagctgaggtatatatcagctcgtccaacaacagtaataaatgagaaaacagacaagcaaatcgaacgagcaaatgcgaaactggccaatcattcattccatcgtacagagagaaaaagcattacctgaaggaatctgccggtcaagaaacctgttcccgttcgtatgcaattcctcgaaacatcacagagaaataaagcgttatatttatacagcgctgtatcctcctctcgaacccgccccttgaaatgtgttgactacccggcgcagccagtcttggaagagataaggaatgtctcgaagcgtatcgccgtgcggaagcaggtcccacccacgggcaccatagcgattataattgagccacgagccgaagataagatatgctgcggcg

SEQ ID NO: 17342 - DNA, 455 bp, Emericella nidulans
atcggccagatttgttcttgtaaagagcaatgtgcatttcaatctacctcaacacctggtaggggtatccttgtccctcctactggctagattgtggcactgaaaaatgacttcgtcaggataataagtcacaattattcacgcgtgataaagaagtctggcttgctttgcgttcttgcgacagatcatatgttgcctcgtcagacccaactctaaagtatcccaaagcaccgtataagataagatccgtgccataaatattaaaaataaatggtcaaagtttcatgccgcggggtccgttctgtcgcaccggcttgccattgggaaggaaatagagtagaaacattaaacgcactccgtccacaggacacgctgttcagaccagttctcatgaaactccaaccagaagaaagcctcaagaactgtcaagtcttcaataataataatcgtaaaag

SEQ ID NO: 17343 - DNA, 457 bp, Emericella nidulans
gtcaaatttgcggcgttatttcgcgcgttatatatatacgtaaagaaaatatgtccgtcaatacccccttcaacttcctcttcggcaccgcggtacaaagctgcgggtatttgggtagatcagaatacaaccattgaacaccagatgaagaatcgcaagattcaaaagcactgaaagatcatgtgcttgccacctaattcggggagaaaaggcattgttgaatatgtcttcatagccgtaatggacttcacaaacataaatatccttcccttgcaccttaagtagatatcaatgcccgttttaaagtgcggatgaaccagcctgcatcttcccagccaccgtgatccccagctctttctaaatgggggatatcggagttagtatctgagacttggcttcttgtctcatcatcatcatccttgtcagataactcgcggggctcgtggttattttcgtg

SEQ ID NO: 17344 - DNA, 457 bp, Emericella nidulans
ctgacaccacagaaagataacgatatttacagtagttaaaaggaccaagcgcgagcacagaagttgcgtggtttaggtagattatccagaaagtcctccgtataccctcattatcgagggtaggcgggtcataagtatatagcatatggtatctgagtgcataactaaataagaaatgtataaaaacttggaaaaacaagttcctcgtcgaatatccgacggacctgagccagaacgaatcgctcgactttgcccacgtttttgaggacttgttttccatcctctttgcggccaatttcgctctcgactcggatttcttgtagaagactgaggcctttctgatgcgggcttggattgccgcctccactgctaccagtagatggacccggggtctcctgctggccggaatatgagccggagccaaccagcgcttcagcgtcttcgggggaaagaaaac

SEQ ID NO: 17345 - DNA, 460 bp, Emericella nidulans
tgattgctacgccgaatgtatatacatcttcaggctgaaattgaacattctcatgttttacttatagacaagtatcaattaactaaatccaccagctacggtgagcgaacacagagtctgcgcttcttgagcacagcggcaactttcaaagcagctccgttgcgaagaatatcgacaaagggaatcgggggagattgatcggaaatagtgggagagagagagagaggctcgcccggtatatggaggccgcgggctatctatgtaaaggcagcaaaagacgccctagaacgctacgttctagatgaaagaaaaaccgcccgacagcgggcgcgaagggtggggaatcaagctaggccgtcaaccggacggccttcaacgaaaagtgaaataagagaaagaaaaatgctcctccagaaagaaacaaaggcgtccagaaagtttgtggcagtggtgagtgaat

SEQ ID NO: 17346 - DNA, 465 bp, Emericella nidulans
cagatcaaggaattagcttggagatagcttactggtagtaacttcagaataagtattagttgtgtgagttcgaaatatttaaaggatatatgtgttttaatccgaactaagtactttccgcctacctgtgttgccggtcggcaacaaaattcttgatcagaatattattgaattgcctctgttatcgtgaatctaagaatgacatgaagatatcatgcctaacatcgtcttgcaaaaagaaagaggccccggattgccgtcaggacgatataaggcggctgggatgaggcggggctgggatgaggcggtataaggagctcatgcggcttggtgtacaatttttcgctaactccacgtcacgtattacgctgacatggtaacgcaatcagatgccgcgtaaactgcaactgaaacattctaggagaatggtgaggatatagcaagtataaaataagaatatagaga

SEQ ID NO: 17347 - DNA, 465 bp, Emericella nidulans
catagctcgggagcttaggttaacttaggtcgcttaatctgctgagtaagcggcaggggtgaggtagttaaccaccaccataggtagtaactacttactataagcaccccaattgctttggtgttgttactttattatccagagtgctaaaataatgtattgaccaaatgaatagtattatatgttatttatacgctacttaagatgcaaatcgagttcaagtgaattcgtaagtcatagtgtacggcccaaatgccagaactaaacatgagccctaagaactgacaatacacatttgttgcaatgcccatatcctaactcatgaagtttctttcatcctgccgcaatttgaacaagtccaccactctgtttccatgaaactaccgcaggaactgcataaccaccccagcggttttttctgagcatttttctcaagggtggaaagggattcaacagcgcttcttc

SEQ ID NO: 17348 - DNA, 467 bp, Emericella nidulans
gccatggacacatctggtactgttttgattgtgaatccaagtatttgaataaccatcgaagctttgattcgcataaggctatgtggaatcaccttagagatcgccatggcctcatgctggactttttgatgtgagctgaggggaaatcaacgcgtataagtcaaaacgaaagctcaaattgcgcggcattttaataaattttggcgatgacaagataaaacagacgatgtgggaaacagttcgaactggaacgataaggaaggaatgctgtcagatcgttgcagatatattcgacgacaaggtttgaaggggcagatagcgtggttgcggtatgcattggtaagaaccattgcaacatgggcattaggctgcaggaatcccataaacacactcaatctttgcaaatttttctgatttgaggacatggtcaagtaagtcttcgatgtggtcatactcatagccaagga

SEQ ID NO: 17349 - DNA, 468 bp, Emericella nidulans
caggtatcagagatctgcttcagcaaaatctagattatgactacctaacccgccagacgaccgtcaacgtacagcaaacacatattatgcacacgggtaaatgcaaccaaactggcaaaagttacttgtgatataagacagtatgcatgtgggggtatgagtattgacggggaggagatcaaaattaaaatatacatgtggccagcacagtgaagtacaaagagcatattacaacaaaatagacagagaagagcaatgtcaacgagatgaaacgaagcgaaacgaagcgagaaggtatgtgaagagcaagaatgataaaccaaatacaagaaaggttagggattaaagagagaaaaaagaaaatgatacagcccgtggctgaagaaataacccagccatgcgatgcgctctatgattttgtgtccaaccgagtgttgcgccccttctatagccctgaaatgaaatggg

SEQ ID NO: 17350 - DNA, 468 bp, Emericella nidulans
gccgaaacgaaaagtcaagacgcatcttagtaaacggaagtaacaaatgcgttctgacatgcaatatgcagagtagaaagtttctatgttctgggacaacagctgtataggcaagtgagcttgaaaataacagtgattataagtatggaagtgaaaagagggcaaaatcaggcgaaaataatgatgctagacggagaaatccgggcaaagggcgatctacgcaacctgacttgctctccgactggagctgatctttgaaccagcaattgaaccgccgcctgcaacactcccgctggccttgacggtgcgtctggaagcatgacttgatacctggctgacgctgtcactcggtctgacgggttcatcgaatttgctggaccgtttagagacatgcgacttatgagagtgatgagatcggtgtgaatacgaggagcgcctagatgagtcgccaacctggctaatcgagtc

SEQ ID NO: 17351 - DNA, 472 bp, Emericella nidulans
ggatgaaaggctggcaataatacatcctactatgattatagaatagatagatggcttgcaggacagatctataatgtatctcttattctctcgaatttcgctctatattctagtttttggccttcttggcattttctcaccagagccctgccggaaccgtgcaaacaacaggactgtaaaatgaaacacagacgtatggaacctcgagcaaaccagggtgcatatcagagcagagcaaacagaaagccgactgcatctctgtcggggatgttgcactcccagacataaacgtatgtacataaatgtatgtatccggttaagagacatggggccgtgacagtaaagatacgcaaacatcggcttgtaacggacgcagaacgcaagagacaacagcaactctccgaggttgcaagtagccatatccgaccaagacatacagacctacttacatcgttttgaacggaaaagaaca

SEQ ID NO: 17352 - DNA, 473 bp, Emericella nidulans
acggagtgcttggtacgttgactcttgacagctcctgggcggagctgtacgggctattttgtatagttcccctgcattgaccctttatttagcttgcgagctccaccaaagctctacagaatacataatgtttagaataaagtgggtatgcataatcaaaagtcctttctactgtgtctagtcagattgatcgtgatagtcatgacaaatattccacccaagaacgcctttcaaacccaaacgctctttgcggcaccaaacaccaacaaccctgatatcagaatgccgtccacataggaaagaaaaaaaaggattgaatgaaaaattgaaaagaatgaaaaaaaaaaaaagggaaaaaaaaaatgaaaagaatgatctgatcagattagaaaattcccgaccacctccggtaccaccttctccgcgtcacggacccttgttgggtaccttctcctgaactagactctcgttcg

SEQ ID NO: 17353 - DNA, 473 bp, Emericella nidulans
ttgcagctatcctctccctcgcacctctcgcctttgcaggcatctccaacgccagaatactcaacaacatggacaacaccaacattgtcatgactgagcccaacagcatgaaaaccaacgggatggaaaccatgaagcgtccttttatgatgcgtccagccacgaatgagactattgcaattgggcacgccatcgtcgcgaacctctgcgagcagccaatctacctctggtctgtcggccaagacataagtccacagtacatgatcaatccgggcgaggaatatgttgaggaatttcgccgcgacccgcagaccggaggaatcgcgatcaagattaccaccgtcaaagacggcctgtacaccagcgccccgcagactgtgtttgcgtataatcttgtcgaggacctggtttggtatgacctttctgacgtctttggtgaccccttccaggggcagattgtgagcatcgagcct

SEQ ID NO: 17354 - DNA, 474 bp, Emericella nidulans
catttaaccattgttcataatttaaggacttcattacagcaatctgactctttaggtggagttgaacagaagacttcttgagtttattattctactgtatcattttcattgggatttcagaaatgataacttggttagacagaaaagggaataaattttcgtttaatagggatgttcgtggtcgcatccaaactactggaggaaagccgtccgattctctcatattttttggatctcactccctttcgtgactgtgcaggtatatacagccgtgcagacgtttgcaaaacgactgaatcccagaaactccccgtccactccagtaagcatgaaataggaccataaacggagaatacacccaacaaaaccgttttaccggttgctcttagccacacgctcaagctcgtccttcttcttgatagcgtaggagttggagctgcccttggcggcgttgataagctcctcagcaaggca

SEQ ID NO: 17355 - DNA, 484 bp, Emericella nidulans
ccaaatcaactgaagcttacgacaaaatgaggaaaatactaggaatccatatattcaagcaagaagaaaacagcgattgaaggaccaaaaattgtacaatgcaaacgctgccacaccacgaccaaagaaattctgcccagaacctcgcagcaatgaaagccgagattgaagctggggtatcttcaagcgctgagacatacgacccgaacgagaacgccagatcatgcaggccaaagtcgaacacatgagaaaagtaaccgaacaaaatattcacatcgaaaggacacctcctgggaacccatcactatgcgttaatcatcagtcatcacaagtcatcaagagctgccgtaacgctgtgtatataatcaagcaacaataggcccggggtctagaacgccatgtacacagacaccgaaagggaacgaaagtgggggtgtaagtctggagaggggagcacgatgctgacaagcgttgcatcactgag

SEQ ID NO: 17356 - DNA, 485 bp, Emericella nidulans
gctacgggatcggatatcaaactgccgtattatctaggatgacatcagaagcacagtgtgcagaatacagtacttgcagggaattgcagatgttgaaaattcaggtatgtacgtatctacgtcaggccagagtaagggtaaagatcaagtaagtaagtatatttccaagtctattagtagatggtagtagtgggttaagcatcaaagagcgaatcaaccaccaaatctgagacaagcagatcgagatcgcagaatggtatcataaagcagagatgcagagcaaatgactcgactcaagcactaaactcctgtccatgtccatgagcatagcgtgcactccaaaagaagtaaaacagaaaagtaaaacagaatcccttcctaaatgctggatatcgcaaatgctaatggagggaaatcgaaccgaaccgaaacaaagctgtatgacaaaggaaaagacaaaggaaagacgttctttggatctctgg

SEQ ID NO: 17357 - DNA, 486 bp, Emericella nidulans
agtatgctacaatgacataattgctttgaaactataatgaaggcgatctctgttaacgtataatcgtactatgtcagatctagaacacagacatatgcagctcagcaatatcaatcaaacaactcatttgctccctttagcgactccttccaaaaatccaagtaaaaatgctttatttgcaggggacgcaactcggtcactattggagggttcgctgccagccggttgatggtgcggtgtcagtgggctgacaacggaaggggtagccgaatgtttcggcaaagaagtttgcaggttcaactccgcaggcgaatgtttgggagacggtccagatttgccgaagagggagagtagtgcttctctctgcgcaggtgtctggcttggccgtcgataagtatcagcctgcgagttcggaaccgccttggccccagaagcttcagcaagactaattggttgactgctatcttccatctccttcggtcgtat

SEQ ID NO: 17358 - DNA, 491 bp, Emericella nidulans
tagcttcaatcgcctaccgtaattgcaaatttgtaagccagcggcaatgcaatagagaatgcatatgcaaagaactataagcacatctggccatcgtggaagtggacattcttacggatcaagcttgccatcggcaatttgcagaagaataattgaccagactcagagaatcaatagctacctttttacaagagcaaacattaggaatatgatattttgttattttctccataacaaatattgattcctagttacaaaatagccaatacatattatttagtgtacacaaatacaattactcctcatattctggctcctcatcctcgagctgctcttgtccctgctggttgtacttggacgcactgcccttcccgctcgcgacgcccccagcgtggccgccgaccttgccgccctcatggccagcctggtgcgggtcgactttgccgtaggcgaactggtgctgctgcgtgcgcttgtctggctggttgtct

SEQ ID NO: 17359 - DNA, 498 bp, Emericella nidulans
ggcttcgtgactcctgacatgattaaggttagtttacctttctggtaacctgtcgcactcgctgatttgctattctaggaacgtctcccatctcccgccagcgacatcaagatcctcctctgtggtcctcctcctatggtcagcgccatgaagaaggccaccgaatctctcggctacaccaaggcccgtcccgtcagcaagctggaggaccaggtcttctgcttttaagctcacatcatcactatttatggcagtatatgctaaacatgcgtatccgattgcagaagccttgaaaatggtatagcattggaacggatagaggtacgataatcggcgccaacccaagacgcgatcatgtcatcacatataacgacactgttatgctagtacgggaaatgggaaatgtccaaagtgttttgattaagtatctcgcttgataattattagaactattgtatagagattgtcagaaaaaaaaagctaaataacaaattcgtt

SEQ ID NO: 17360 - DNA, 535 bp, Emericella nidulans
agaggccttagccagctgtttattacggcgctaataaataccttagtatgcaccgatccccatgactacaatcaaccggaagcaaatgaggacttattagcactgaatgcatctctcgactcttttcatgatgtgattttatcactttagaccccctattcgtgaggatgatactgtctgcccccaacagtgctaacctcgagcagtcattatgttgccgctgccaaatcatttcagtgggtgagctcaaaccgacttttgcaaccgaagagatgaataaacgcatccgggtccttatcctgcacctggttaccacactgtgcgcgggatgaccagtgtgtgtctgcgtgggacaacgtccagttgggcaatcgaaagtggcaggatcatggagacgggtgagttggctgagaaatagacaaacgacgccatttaagactgatggcttagaggagataaggtacaaagggcatatttcccctgcagtatgcatagaatgctcctcgcgccaatgaacaccgtgcaaaggcttaag

SEQ ID NO: 17361 - DNA, 541 bp, Emericella nidulans
tcggtgatctcaagctccttgacactgtcatgccgaacagcgggattgccgacagcgtggcgaggctgcaggaagatgtggcgaagcaggcagggaaggtgacaccttcgtgaatcctctcccgtcagtcaattgcttgggatgataggtctaccagtttggcaggggataggtaggtgagtgtttggctgacttgatcatcgttcattcttgggtgaggatttcattgctgatgggtacatgtatgatagtagggaagggactacataagagattagagcagagcaggtacgaacgaacatggaattgagtgatggtggcctatgtttcctactagttcagctgctatgtgttgtgctataggaatatgaaatttgagataggataacgggttcggattctggaaccattctggcatttacaatgatattttttcagtaccatcatgtcactattatgctacccaattcacacaatgaaacagcataactatacattcccataggcagagatgaattcaatcactgaaacattccctcca

SEQ ID NO: 17362 - DNA, 565 bp, Emericella nidulans; identical to SEQ ID NO: 16448

SEQ ID NO: 17363 - DNA, 615 bp, Emericella nidulans; identical to SEQ ID NO: 16455

SEQ ID NO: 17364 - DNA, 1003 bp, Emericella nidulans
  unsure (1)..(1003): unsure at all n locations
aatcgcttttcccattcagatatgtccaacgttcagaccggcaagaagcagcgnnttctatcgccgacgtggtgacccgcgagtacaccattaacctgcacaagagggtatgttaaactgcgaaactcgtcattatctctcctcccttctttcggcggttcgacgcacaatcgaccaccgagctgtgatgctacggaagacaaggatgaaacataccttctctttccgacaaccgtgaggcatggatggagaacaaggacatgaaacccgcgccaaccagcgataagacaagcgcacgatttcccttaactgaagaaaccttcacttgagaaaagaaaggtggaagccgcagccttgcgggggaagcaaagcaagtcgtcgcgcatgcaactacagactggaaccaggaatcatgcttcaccaatctgaaatccaagtaattgggtccagatcatgatgaacctgtgaactgagtgagaaggtcgtcaaacgcaaaaaaagaaaatgaattggttttatgaagtccacctcatggccgcaatcgcagcaagaaaaaatattcctcttttcaagatggcattcgggcggaagactgattcttctttttttgttactcaatagacgcacggtgtttccttcaagaagcgtgctcctcgcgctatcaaggagatccgcgctttcgctactcgcgccatggttagtcacttccgtcccacaagaaacccctgtgaaatttgagcatgctctaaccaccttttgtccggtgggcagggcaccaccgacgtccgcctcgacccccagctcaacaagaaggtctgggaagccggtatcaagggcgttcctttccgcctccgtgtccgcatctctcgcaagcgtaacgacgaggagggtgctaaggagaagctctactcctacgtccaggccgtcaacgttaaggagcccaagggtctccagaccaccgttgtcgatgaggagtaaacgggtgtttcgttcctaccggttc

SEQ ID NO: 17365 - DNA, 342 bp, Emericella nidulans
ccgtatacgaaaaagctggctactactggtaacagcagaaccccgattcaaaatccattacaaggtagtaatgtgacaagcaaagaatgtttcatgagcagaagcagaattatacaatactagttgctcgggttatctatcaaacagccaagcgaaacatgataacgattggtgggcacataagatacaattactgtacacatccacattacagtcgcaacagtgttgcgctgcagtgtaatgcgtaagtacggtagatcaagaataatcaatctacaagagaatcatagcagcgccggcaaaaatggcagtggtaacatacgcgccaacctggaagacacc

SEQ ID NO: 17366 - DNA, 352 bp, Emericella nidulans
cgtcagtccgcagaccgatcctacagtatcttaaaatagcatcgcctgactcggtgtgagggtctcaagtccatatctattgttatcgcttcgttgtacacattgacatcatctcttctaggtatcatcatcatgaactccatactaatgcaaggtttaaagccccttcggtttctgaccgagtccaccccaggttcagttttcagtcggctggcatccggcttcagagcattccctgagccacctgctcctggcgttcctgccacacattcttacccgagcacgagcataccgttttgtcgttgtcccagaccccagcgcttcgagcaatcaccccaaccaaggtattgga

SEQ ID NO: 17367 - DNA, 367 bp, Emericella nidulans
cccatccagaagccaagaccgtagttcgagtacataaggccaaacatggcgccaatcatgaaacccatgacaatctggttctttgttccccatttctcagcttcgtctaagtggacctcatactgcttcgcaagcttgtcttgggtgccaaacgctgtggcatttctgatggagctgatgacctcttccgcaacagtgccgcctgcaccgtagctgtcaagcgactttttgctgtacttgatgataaactgagaaccaccgcccatggtgagaacgagggccacaattgttgagctgcaaattagagccaacttccagtatttgacgtaggcgataatgaatgctgtcacgaatgtcgccagggcag

SEQ ID NO: 17368 - DNA, 371 bp, Emericella nidulans
gtggctgcggggcagttgatttcggatttccaatccagctacggttcaggatcgcggcgtgctgaagatagccataggttttgtgcttggccggacgaggataagtggacgctacgataaaagcaaatctaaaaaatcgtaaaatcgtatccggggttatctgatatgttttacatgagtcacatggttgctgcacaagaagcaatttgaaccagtgccgtagcacacaggatatatccaacttgtattcgcaatttcatcaaatcatacaattagctttaagcgaaaagagcatcacccaggcggtagtgcaccgtcttgatctgtgtgtagttctcaagagcgtaagagccaagctcacggccgagacc

SEQ ID NO: 17369 - DNA, 378 bp, Emericella nidulans
gcacataaagcaacaatcgtgaagcctttcgtatcctaatttcgctttatgttgaaccttcaagcgcacaccgccgatgagggttgggcttggtctaacgaggattccattacccgaacaagtacaaacgtccaatatatccctttcagggaatcaaaaacaacaagtagcagggacgatcagagcagctcgctcccatccaattctaagcctgatcgattcattccactaatacgtctaacaatcccgtgggcaaagacagtttactcctcatcaatagtggccttgtaagccttaaggtcgagcagcccatccacctcggaggcatcgctgacttcgatctcggcaatccatgcctcaccctccgggctctcgttg

SEQ ID NO: 17370 - DNA, 392 bp, Emericella nidulans
ttgagcagacggcgcgtgttgttaaggatgtccttggttgatctctatataccaagttggttttgcgcagctgttcttttgctttcatttataagtctaatggtaacgtatcgatgcttcttacatgataatatggacgacaagtttatctctctcgagagtgaagtgaacccgtcccaaagttctgtttattccacattgctaactcatacccatgtcctagttgactagcaacaaagacacagcagttttattcaactaactaccaatgatcatatccctccaacagccataatttcagccgaccaagcaccccacacgaacttacaccaaaagagtgagctgaggctctgaactcagttgccctcgcaatcaactgcaccaccacagca

SEQ ID NO: 17371 - DNA, 404 bp, Emericella nidulans
cctttatgctcgcttcctcgtgtcatgaatcataatccctcattgatatttcagttgtatgtatgatgctccatgcaaatgccgcggcgcagctgacagccatcgccaaacccaaaataatgcaaagtaaacgcaaagcaaaatgggagaaggatgaaggatgaaagttagtaatgcatgttcgttggaaaagtaatgtcgtatattcatatgttcatttcgtatccataatcagtgcgcggcgataacggccttcagcatgcccttgagcttggtcgctgcgctgggcggaggcgtaggttcacgtctgcgatggtgacggcgccgacgttcatgctcgtctcctcgggatcggggagcctcgtcttgacactcatcccggcgctcacgctcgtcacgacgcc

SEQ ID NO: 17372 - DNA, 404 bp, Emericella nidulans
tcccctgctgcattgcatggggctatcaggtttaggaaggctaatagccagtggttatatgttgcaaccctttgaagtgaggtggtaatattcccgaaaacagcgccgaaggtctttccatattttaagagcctacgttgagcttcagggaaagtttgataagatcaagtggagatgagcagaagagcaatatctatatacccaatggaagccagacaggccattatcggtacctaggtataataatgcttttcgggttaataatacacatgcacaacgcaagagtaaccgcctatcccaaaggaatctgcaaatcatgccattcgtcgccggccacgtttacctagctccaagaaatgcctcgtaatccttttgttgccctccttccctcccgtatataggcg

SEQ ID NO: 17373 - DNA, 411 bp, Emericella nidulans
ttaggcggacttgttcttacttattgagagctaatgcaggggtaccagtacgtgtttactgggacttggaacaaggaccctgttgctggctgccagggtccttactatagtaaaggcatatatgtagtcgggatttgcctctacatgcaattaagcactacgacacaaactcatctaaacggaaaagtggacgtcagaagaaaatcatacccaagttcatgcgagtctataatgtcggtaatgtcagtaaccaccccaagaacaactgtcctcatctgcagccgcaaagcgcgggtgctggccgcgtccctagatcccacaacacgaatagatcccacctaagagaaaggaaaggatggaaattatgtatagaaaccaaacgaatcaaccggtcgatggaatgccgaagga

SEQ ID NO: 17374 - DNA, 414 bp, Emericella nidulans
tgggccagccatcaagttcaaactgggtccattatcaatgcttttgattcggcctatcaagcgcttttttgatagaagtacatgtgactttgagtatgcttttactggtcgttcattaggccttatttacattatgtgcgattttcaggtaggcacatcatattacaaggacacataatattccgaggaggtcaagagaatctgtattgggctagcagctctttcaagctcacgtatgcataattcgtaacggcattagacaagccttagaaatgcaggctcgactattccttttagcagcgttctttccaatactgaacttaatagccagattccaatccccccgaatgatggacttttcgtctgtagagggacgcgcttagtcgaagagaccgaagcccatgtcctcatcgg

SEQ ID NO: 17375 - DNA, 415 bp, Emericella nidulans
tcgaccggcaaccgcttttccaagccgtcgtcgccgtataccccaagcaacccgtaccagctcgtatcggcgtcaagagcatcctccgcaactcgtacctggaatcgtccaaacgacgggccaactctgtcggcccgtccaacgggtcatcgggacgccgggtattcttcccaaccaaaaagcaggtcagctaccggtacccgctcgaagaagagatcaagaccatcaagtatacagccgcacactcggatctggtctctgactcggagtctgggtcctgtgaaacaagctctgacgacgactcggattactccacttcgagtctcgtctcgtccgatactacgccctcagatgaagagacgaatacgttggagaagaagaaaaagaagcgaaaataccgcagcaacgaacgcca

SEQ ID NO: 17376 - DNA, 417 bp, Emericella nidulans
ccgccgcgaagcaatgaactgctcaggccatatccacatcctatactactttgtatacgcacaacgacctctatgactttcggacggacgaataatgaatgatgcattaatttttcttgactttgctttcctacatctgggcgacatcttagattcatacagtcttgcaggaagtcgggcgaatattacattcccattgcatttcgagtatatacatcgaggcttgcttaagatgtacatacatacaatattgaaccgctatgcatgcaataaaaagcacactcatccctgcaaagaatacccaacgccctccccggttcccatggccactaaattcgctctcatcttctctgccctttccccgatgccgaacaccgcatcctccctctgcacccaggctccaacgccatgctgcaa

SEQ ID NO: 17377 - DNA, 427 bp, Emericella nidulans
gcgcggggtgaagccttcttcttaagttgcagtctactggggaagctgactaggcggacatgtatgaacgcggaatagaaagaggttatagattcttgtggtggatataaatatgaactgtgctgttggaacttcgaatccggtgtttattcagcaaatctagaaccaatgaacttgaatagtcattacattttatctcatcagttttttgtttgttgcgtctactccgcggcagctatctcctgaggagcacgtcgacgctcagacggtcccttgttattcttatctcccttctcaccctctgcagcagccgcagccgcagcagcagcagcttcccgtacaaatcgctcacgctcgctgcgaatgacaccaaggacgttctccaggcttcgtcgccacaccataagacgaccctggacttcggccc

SEQ ID NO: 17378 - DNA, 436 bp, Emericella nidulans
gcaccaaacacggaatattctcaaaattgctacaatatattgctatgcagcaaatctataattgaattgaaatgggataccgatggatgtctacttgcaaccacttgtcggtggccagccagtttccagtatagaatcttcatatgtgccatcgtcaacaatatactcacggctgacaaatgataataagtaagataggagaccccgtgtaaccgctaccaatgcaataaccagataacaggaaagcgccagttgaagaaggcgatgcttgttccggctaaaatccaaccagaaatagagataacaaccatgataataagacatgctgaacagacttgggaaagataaatcatgctagagaacggatgagaaacaataccgacgaaaaagtcacacgctggaagcagtttgtaggggtatcaagcatgaggaggtg

SEQ ID NO: 17379 - DNA, 440 bp, Emericella nidulans
tttttcgcggcgggttgttgaggcgatcgatcgacggaggccaggatggacctccagattagcctcgtggggcggtgggcagcgtcgaccttgatacagcgtagagctagaaccgagagcgtcacgtaactatggaaaggtccatggaattgtatgagaacgaacacttagaatgacatcgtgctgtctcggtacaagcgctaaggagctgagacgacgagagagaccaaggaccgatgtcaagtagtcacgtgctttggcctcaggccaataactctgcctgaccgtactataaaattgcacaacctacaaagagcttgggagaaaagacgcgtagaatgggtatccgatgtaaacacaaaagatcatagtatccgtacatataagatcttagaatagatctcgtatcactcgtgcaaattcgccttcattccccagca

SEQ ID NO: 17380 - DNA, 440 bp, Emericella nidulans
gtggggaggaatggggtgggtttggggatgattaattcattcaattagagccagtcattcgacttagatcatgtgtatgtgtctatgtatttatatcctttgttaaaagcagtcatttttgggacgtctctcgggttattgaaagataacactagacggcttaacaaacccagtaactgagatcaaaacgatgtatatgtatatatacgtctatgcgcgtcgtgtcttaggatgtaggatacacagtacacaatacacaatgaatccacgcctagcagctcggaaccgaaagccctaccgaagccaaaattgacgtcaaataagaatataacagttaaacctaacagaaccatgggaatacgtcaagtcaatcacaaaagacgttgtcaggttgggtatcatcacaaggaaagacagcggtagcggcgggcgaacatgta

SEQ ID NO: 17381 - DNA, 441 bp, Emericella nidulans
gggcaaccgctacgccatgtaaccttaagccgctcgtatgtggaagagacattgatctggagttgtaaccggcgaaccgctctaacaatttgggcgtctagtcaacattgagtaatcatatgtaagaattataagagatgatgtaagctcaagaacgccttcaacaaacccgtgccaaacgcgccgtagcaacacaaccataaacaatccactgctgtatcaatgactccgaaaattaaggtgaggaaaacaaagcaaaagcaacagagaagtgaaaagtaagaggtctatgaaaggtaaaatacggtactgggttcatcacgacatcaagaaaggcttaaactcgagtgttaaatgctgccgccgcctatcactccaccaggggctttaatgcctcaacgccaatctggaggatcaactggttccgcgtcttcttcagca

SEQ ID NO: 17382 - DNA, 442 bp, Emericella nidulans
cccccacacagaaaccggtgacagctcgtttgatttcttcaagaaagtcgtcaccttccatccgattcagcatactctggtggcgcaggaatggaatatctccagtaatggtggacagtttggcctcgcattgatcacgttcttggtatgctatctagctcgtcggtatatacagagccctgctaactgggatagtacgtcgacattctcgacgctacgggtacattatactcaatggccaagtttgctggcgccatggacgagcgcacccaggattttgaaggcagtgctatggcttatgtaggcctctcacaccctctcgtgaaaacatcgctaactatagtagatggtcgacgcaatctgcatttccatcggttctttgttcggttctccgcctgttacagcattcgtcgagagcggtgctggtatttcggaaggtgga

SEQ ID NO: 17383 - DNA, 443 bp, Emericella nidulans
cgagcggatgcgggaaatgatgtttatactcctgactccgatggcctaccacaagcagataaactgcgtgtatacccgccatgattgcgtctacattgccaaaggacgtgggcgggtgtgtacaagttcaggcgctgtaagatcaaataataagcaatggctcattaccaattagggtctgtttagataaataggattgtatgctctatttacgcactctaacaaaaataagcaacggtgtccgtagaaggcataccaccttcgtcagtcatctttactaagaaaagaaaacaaaatgatgcaaagaaagccgttatgccgttagttgagaaggaacctcgtatagaattaaatttagtagatcagaaaacgccccgtttttgtttacgcagtagcaaagctccttgatatcagtttgtttgccttggagggcaagaggcacg

SEQ ID NO: 17384 - DNA, 444 bp, Emericella nidulans
tggtccgatgcgccggtacttggtaaggataatatatgtgtctgtctgggtatctaatccacctcggcagccgaatttattgtaatggcgtccgcacctaatcattagggaatttgcgagcgggaacggcagtgtctgtgttgactagcttgtggagtgcagctggtgtagtcatagactgatggttaaggatacctctctaggtatattggtttaaacaatatcaataatagtagtactctgtacacttgcgcacaaactgccagtttcgagtaccatgtgggtacaagaagttgcagctgtcatacatcactcgccaaagactccgccatcttccactggtataaagccctgagcaccgctacaccccccgactgtgtttccaccgtccgccccctgccacgatcattgtattccggaccattatcctcaacgcccgctgcc

SEQ ID NO: 17385 - DNA, 444 bp, Emericella nidulans
tttttgagcaattcagaatgagttgcctactgtgactttcaatgataattgccactgaatcaccagaagcgcccaatctgaatggtgcgtaccaaagtaatatagggatactgtacattggtgctgtacgactaatcttattctagcaaagcatcatcattaggcgatacaaattcgtgagaaagattcaagacccgacatcggaaagaaatgcggccgtagcaaccccttgctcatatcaggaaagtatacggaacgtaacacagaagcccagaatcccgcgagcgaacaaaagaaagtgtcgaatctttcccaccgaaaaccaagaacagataaaacgatttgggaatcacaaactcgcagtctaatgcaatcactgcacctggctgacgatctcgctggcgcgcgagagactctcaaccatttgctggcattccttccgcc

SEQ ID NO: 17386 - DNA, 445 bp, Emericella nidulans
cgggcttgacgcgctttgacttcctctgggtttttgagagacttatagtactccccgttgttcagagcgacgagcttgttgtcgtaacagagcatctcgagcagctgggtgacgctttcttcgccaaggcggacgggcgtgataccactttgattgacggcggctgtgagcatggcgatcgtagggtatcccgtgtatcccgggggatacggtaggtattccttttgcgagccttccttcttaacggtcgttgcagcactgccatcggctgtttttaaacgcttgtgccgcgacttatctgacgcaggcacctcgtaccagctcttcttgctaacggagaactcgatgaacccggagaccacgccaataaagttctcgtcaagtacgccgtcagtgaaccatgcgccgcctgtgacgtcttcgctaggagctagcccggccagca

SEQ ID NO: 17387 - DNA, 447 bp, Emericella nidulans
ccctgccggtgactgagaccctcgctgtctgagctgacttgtgctctgccctttcacctaggagtgagagcgaaagtaatcccctcgcccattgtccaggtcaatgcctatccaccaaaacggaggtatcctggggtaaattgtctttcattctctttttctttataattttgtatattctatataaatttttttccggttcaaacaaggattcgatttacacctcctatcgttacacaaattgaagcgcctccttctgtcgcatttgatcctcatcaggtctctttcttttttatctttctttctctcttcagcgctcgtccataaggtccaggattccttctgagtggaacggcctggatcacctccctcactgcacccgctgacactgcaaaaccacagaaccggagtggcagaaatggaaaccctcaaggctcccagcacggg

SEQ ID NO: 17388 - DNA, 449 bp, Emericella nidulans
ggcccgagctatgcgagcctgtctcgagagccatcatgccactaaggaccagcagcggatgctcgcagcggccatcgctctgcatagcgtacagcttgctactaacgccaatggcctactattgctcacatggttcttggatacctgcactttccctcatcgccggactgtattggctccgagattggttccccatctcgtgcacctgtgcagcacaaggttgcgtacctgacagttctcaaagtcatcaaccaacggaacgagcctgaggcgcgcaatatcgtcttgaaagccctattctttagcccgggtgacgaggtgctggaaaaaatcctcagtgatcaaacgtcgggtgccaccctaatttttaaggttttgacaacgccctgcttcgatgaatcaatgcgaccagaagtggtaaaaaatgtatcgaaagtgctcaccaaact

SEQ ID NO: 17389 - DNA, 450 bp, Emericella nidulans
catgcactgctcccgaacaatcatgagactttttccagagagaaaattgaataggaagatggaagaaaaaagtctcgagataaatactggtgggggaaaaagatggaaaaggactgaccgccggccaacggttttcccgagataagcgctagttcgtttcaggagtagcggaactcggcgatcaaataatccggccagcaaagcgcctcacaggaagaaattcagaggcaggaccaggaggtggtggcagataaccgtcaggactgtcaggaaattcctggaagatatctgagatctggtgctcgacgcagtagccagctggctgaaggtgagtgctgcaatttatggttgttggaggttggaagacagaagatctgtcggcgccttcgacctcaccattttccctctcgctctgccttttctccctcttccctcccccttggaaagcca

SEQ ID NO: 17390 - DNA, 451 bp, Emericella nidulans
attgtttacattgtatacagtggattgcttacagaaattatttcactttgctttagtatctcaagtagagtctataaacagtacgttgcgcggttgggtagtatgtgcatctactttgttgccacgacaaatggaaggcttcataaagatagtcatcttgaattcagataatacatattaaaggcgggtatcgtgatattaaaccaaaaagcaaagccacaagatcaatcaaaccccaatcccaaatactactgttgttcatgccatcgtcaatctcgggtttaaatgtcctccaccacacggcgttaatcgcatgctgaacccatctcctccctggggcggcgcgtagcgctaggcccttcgccagcattctccgccgccgctagttgctgctgtacggtttggtttggcgccggaaggaagatgaccttgctgttggccgtcttagcca

SEQ ID NO: 17391 - DNA, 451 bp, Emericella nidulans
tttttgtcaaattcctcgactatcctccaacttctccgccaacgactcccatacccccctctattctactataaacggcgtgtaagcatcgcttcttaagtaaatattagagctgtaaaattgttccaaagtataaatatgcgcattctacgggaccatgaaggaaaaggtttaatacagaagggttcttcaatcagcaacacgctgcgatcccaggaaaacacaaagagatatcgtgaccgctagaaacccgtcaaatatcccgcgtcctcagaaatggcaagatcaaaactaagacggatggctcagcaggtattccaccgcaccttgtacgctgccccctgctcggcgaagagcttcgatgtttcgttcgaattcaaagaagcccatatcgttgagctgacgcagctggtccgcgtatctctcttctggaggcctgttgtcctgggga

SEQ ID NO: 17392 - DNA, 451 bp, Emericella nidulans
cggctcgcggggaacatagagccataatcttccagctaaggaggagaaatatcgcaaaaaggtatatcatgtcatcacattatgttctatttcaagatcgttgcaccacacgtgcttgtatgctgcttctttgatcccgtctcgaccagtgcgttctatgactatccgcctgcgccgtaaaatgcgtaattaagttgctccaaatcttgctttgatccttcaagtaagagattcctcgacttcgcggacgactttacgcacgccctcaatatcgtgtgcgaatcggcctaggaacatgccgtcgacggctttccccagacccccagggccccacagaccggggccagcactgcctccatacagaatgcgaacgtctcccgatctccggccgattaaagcgcgaagaccatccacaacagcagagatgtggtccacacttgcgggcttaggc

SEQ ID NO: 17393 - DNA, 451 bp, Emericella nidulans
tgaggtattatcagtctaggtaccatcctcaccaatcttagcatacgcattatttttcgtacttgtagcctatcgtacgccatgcctccttgcctaaagttgtacgagagcttcgatctaaaagtcatcatagcattctcattgaagggtcatgattagcaacgcgatagttattgcgtccgagacatacttccgtatcccttgcctcctttttgcgatttaccaggtacagaacgggcataaaatggacacaaaaacacgcaaaagtcatcataaaggatacagcaggccattaaactgctctttcgagtattctcttcctacaccacttaatacctcggctgctgtccgtacggaggctgttgaccgggataaccaggctgagatccgggccgttgtccatattgttgctggccatagctcccagacgcttggctgctcggtgggtaag

SEQ ID NO: 17394 - DNA, 452 bp, Emericella nidulans
tatcagcatgcaaccatggggttagacatctacaaacaaaagagaatgtcgaaactaacaccatcagcaggtcttcttagagaaagtccagttatgtcattattcacgtattcaataattctttactatatactttacacccgaaatgtaaccagacagggcatcccatctgccggatgcgcaccccctccccccttttctgcctgatatgcccgatgcccattgaactccttgacggcgtcatttggataaatgtgatcccacttatcatacgccggtgcaatatcaaactcgcggagcgtcatcgctagtgcaacccgcagctccaacattgccagcgtctgcccgatacaactccgcgggccgaactcgaaggccctccatgcgcctttggctgggtacagcggatggtcagatcccacgagccaccgttcggggataaatgactcggc

SEQ ID NO: 17395 - DNA, 452 bp, Emericella nidulans
tggcgtctcctgggtggagcctaacggatccttggcctgctcttgatctccagcgagtcgaattgcgacaggcttctctgtttcaggttgcataacggggccctggcccttgttgtcattttccgaaatgctagataacctctggcggctcctatcatacttctggtgctcaaagtgtgacccgacatcccctatatcgttcagatctgatgttgcattgttgttttcttccttagctgcctcagtctgtttcgctgcttgtgctctcctttgcatttgtgacttgcgtaactgaagcgctttcataagcctctccttttcgttagaagttgacgcagatagtgcgctcagcgacttggccccaggagaaagctgaggcctcgaaattgacattgtagacgggggcaccaatagagggggtaccggcggcaccttggcggatggggttgcaa

SEQ ID NO: 17396 - DNA, 453 bp, Emericella nidulans
tgatgccagcctctgaagacagcaaagaaaatctattgcaagagctttaaaatcttcaggtcgaacgcgtaccgtgctatacatactaacttttccaacgctcatgaaaaaaaaaaaaaaaattacaaagcaaaaagaaaaacaaaaaactgaagttgaagtcaagtgtcggtattaccacccacgcttagccagcttgtcctcatccttcatatgcgaaacgtttatgccaaccattgcctccccgaggccctggctgacctcagccagcaccttagggtccttgtagtgtgtaacagcctggacgatggccttagcgcgcttctttgcatctccagatttaaagatgccggagccaacaaagacaccatcacagccaagctgcatcataagcgcagcatcagcaggggtcgcgacaccaccggccgcgaagttcacgacaggaaggcggcc

SEQ ID NO: 17397 - DNA, 453 bp, Emericella nidulans
gcagccaatgggctgaaaaccagcttgcagatcatgctcacccagtacatgatatatcctaggctgccaataagagtatcgagaaccacgtccgcgaaaactgagactgccgtcatgggaacaccaaggacgaattgtatcgggtgtgctagaaggacaagcgcgattttccctgcaagatatggaagccagataccagcagccacggtgaaagagattaatagcgcacagaaaacgccattctgcaataagccgaaaataggaccctgcatgccgataagttccaggataccttcgagatcatcggcttcttcgaccgcatcaacatcgttctggtcaataccgggtagaatggcatcaacttctacattacgatcattttctgggtgctccaaatgctcttcgacagcagggtcatcaatcaaatcctcctcagcatcaggttggtgcccc

SEQ ID NO: 17398 - DNA, 453 bp, Emericella nidulans
gcatttggcgtaatgcccatcaacttgtttcgagttcatttattgtcattgagcgtctctactcttgtaccaatatagccttctcacatcttggaacataagacatattctgcagaagcccacgatctatacaccgtagaagagtagataccctgcatacgtgcctacatttttcagactgtgtatgaaaaaaatatccatattcattctgcgtcaatatccatacaggactattgtcggcggcctcgccaataaagaacaaacatctcgaattccagcaaaaaatccccaaggtctggaaaccaggctcaccccagatgcagaaacttgaaggtgagctacttaaagcttcccaacaagaaagtcagcagcatccggaacatcatcaatgtaactaagatgagccgcagtaatgacgagcgtgccctcgcaaaccagatcaccaaatgcaca

SEQ ID NO: 17399 - DNA, 454 bp, Emericella nidulans
ggctcgcaacctgggcaatcagattagacagctactgcatctacaatacgacaagaagcataagacaaacaatgtagatagctcgaaggaaattcgtctcatcatggtcataaataaagccggccgcaaacaagcataggcgtctagcgacagccgaaaagcggagaggcgacttcagaacgctgcacaagaaacagacccagaatacacatcctttttgcaagtcatcacgcaactttatggccagaatcccatgataaacctcaaccatgccaagaccaggcgtcccagtcatgtctaacttccatacggcgcgagtaagcgttgtagtcgagtcatcaagcctgatgctcaacaatgccagcgtgttctattagagaggaaaaaccacaatgcaccccgagaaaatactcaacccgtagcccaactcaaccaacccccgcttgctccttgc

SEQ ID NO: 17400 - DNA, 455 bp, Emericella nidulans
ggcatgcttgccaacactggctttcattcactgaaggaatctcaggatagtgtacaggactcgcgacaaaagtaccactcttgcttgacaaaggaaatctagtatcgatcaaaaagcaaaacgcacagctcagagctagaacgaaagggaaaaaaaaagaaaataggcggaagaaaatcggccgcgaggccacaatctaatctgtcttggtatcaacccgtgcatcccaaaatctcaaacccattcccgtctatcccaaacgcccgtacaaagaaaacggtaaatcccaaaatgtcaaattccagaaaaacatcgcaagactttttggtgtcaaaactgatcatggcctcaactggttcgtgtcggtaaggtattaaacggagtagaagtagtaaatgaataaagtatcggtcgaagagaagaacggcacgattgtgtcgatcgaggagggtcga

SEQ ID NO: 17401 - DNA, 455 bp, Emericella nidulans
gcgacacgggtttctggcaaaagaacataattgatttgggatcgaacagcccagtaacagtaaatagttccatgcattctctttaaccaagaataattaaggcaaaggaaaaaggcgaatagactttggcggggaatccgaaaggcacaggaatcttctatcagatcacgaaattccaacttgcttgatcaaaccctccagctcgaactgctgaagcgaagacaccgtcggtctacactatccctactaggtagtggtgcagacctgctgtcagtgaacagagcgtctctttgccggagggaatcgagctgcctcgggggcgctatggagaacggttcaagagaaaacgaaaagcccacaaggttatgacaacgcctccctagaaaaagaagtctgcaaaagaagaaagtcgaccaactgcacagccagataattccatgaagctcatgtgccca

SEQ ID NO: 17402 - DNA, 455 bp, Emericella nidulans
ctggtttcactcttgtaccgtgcactatatggctaggagagactttccagtctttctaacatagcaatgaacttaatccaaggtacatccgaatatactttgtaaccgaacatacttaagtagaaccataggactgctcaaagatacgcttagcagaattgtaaaactaaagacggatatatataaagcgaatgccgcaaagttggtacctcaacgccgtcccaccgtccaaagagtgttagcgtgactctaacccaagatatgaaagaaactacgccaccgcgccggctagatagaataactgaatatgacaagagggtgtagcagttgtaagacgactcattttaacaggacgatcaagataacaaggatgataatcaatccgatgatcgtcatcatgctccaattctctccagcactcctgcggatcttgtcgatgcgccgacgggcgttat

SEQ ID NO: 17403 - DNA, 456 bp, Emericella nidulans
gtccgacattccgcgacggtggaaacttcaacacccttacaaatgaggagtaatcttgcaggtggtaaacaagtgcatttgaatccttcaaagcaatttcccgcaccggtctgtctctgcctgacggtatctcttctcgggaattccgagtctactttccatcggccaagaccatctcgatgacctttgcatgttggagcaggacctcgtccttcaaccgcctgcctatcaactgaacgtggcatggtgcgccctcgatttcgtctggtttgtctgcggcttatcagcatctttgaatgcggctgcggtgcagaaacatacaatcagggctatattgcacgtcacgaataaactcggcgtcggcggctttattagcatgcccaaacgggatgaggcaggcaggatactatttggcttagtttattctttccatcagtagaatgagtttcttacgtc

SEQ ID NO: 17404 - DNA, 457 bp, Emericella nidulans
ttgcgtccgggtccaacgatgggcggcataatagagagatatagtacgaagagtgcaaccttaactccgcccactcaatgctgtccgccaacttggtgcaacgcccctggtcccgcaggtgcgcagcagcctccccaagaatatcgcggattcgttgcacgtacatgccaatctcttttggctgcaggtaggactgcttcgtcatcatcaaaacacgcagcgtctcaagcacaacgcccaggatgcgagaaagtgtttcgaaataagatcgatgaccgggcattgatttacggtgatatggaatatctggctggctgatcattgtgatcgaaggtcgatcataggccaaggagaaatgactattttgaaatgccatggcccacctgttcgagcaaaaggccatcgtcagtatctagtcgtccatggggacaagaaacctggtacgtaccacacccgc

SEQ ID NO: 17405 - DNA, 457 bp, Emericella nidulans
tgacgcttcttgcgtcgtggacctggttaaggatgacagagatgcggacggcttgtttgccgaggtggctaccacgtgacttatagtttattgcatcggagtataaaataatgataatctctagaaataaaatatctaccgtctataacctaacacagtgtaatggaaacgcactaatcctcaatagcctgctcgtccattgctgtaggttcatagtgctcccccctagcacgacggataacccgctcaataccatcaagacccatcttaagcacctccattttcgggccgtaacttaagcggacaaagtgatggcaaggactgtcgaacaggtcacgtcttttcgccgggttcaagtcgaagaagatccccggcacgacaatgaccttctcgctaagaagagcgttgaagaagttcagaccgtcagatatgttggcttctttgggaagcggcgggt

SEQ ID NO: 17406 - DNA, 457 bp, Emericella nidulans
gccagcttcgagcctggtcctcgtatgttttcttccatctgaattcctccccctcctcttcttcttctcttactacaggctacttgattacgaaaacataaattcattatcactaagcaagcgccaggtaagtacgcctctgaaatagatgggatataggtttgatactctcaccagcactctatgtttgttagtaatgacggcatgcatctttgttcttgcgcgagtgttaagcagtatgcgtgttatgcattataacttgatatggtgcccgtgtatgggagcttggatagactgatgaagagtctagccaatttcgcccgtccggtaacgggcccagatatgaaaaccgactttctcgtaaaatccttcaacactgacccaatccacaaaaacgccctcgatccctcgactcttcatatcttgtaacgcgtgtgccacgagtgcaattcccacg

SEQ ID NO: 17407 - DNA, 458 bp, Emericella nidulans
ggcgtgggagacgctatctggacaaaagtggcccataggaattgtatggtgcaagaccggaaagtactacgcggtgcggttcaagctcttttggggcatagatacggattgaaagatacaagcagaaacagacttcctccaaggaccaagtcaccccttatcaagggcaaagggtcgtaaaagaaaattaacgaggaaaacaaccgatttagaaacctatagacaattacgcctgtgtatgaggaatgctagggtgacctgataaataaagggatacatgacggtgaatcttgtttatcgtgaaatatcaaaccataagagaaaaggggtgaatatagaaattcgacgaaatagaaacagatgagccgtcgagaagccagttaagggaaatagaaaaccgaaacatcctggcgtggtatctaatatactgattccgcagaccccagatcacatctggg

SEQ ID NO: 17408 - DNA, 458 bp, Emericella nidulans
tatgaatggcttattcaccaggggataaggcaagtttataaatgaatacacaatatatctaggtaccgctgcagctaaacacagtctgaccgagcacaatcacaacaattattctgaatacaatcaacatccacagcaaacaacccgagcaggaagaaagcccatgaagagagaaatatagatcgtatcacccgaatgctcgctggaaaaaaaatgaacagacaccgagtcaaatgcctcttaacgccagtagcatgaaagcgcaatgtatatcaaagtaagaagagacaagcaattcagcgaacagaagaggacatgaaaaggtaagacagcccagcgaatggaaattagacgctcagaaaacagtgaagggaaaaagcatgggatggaaacattaaccttctacaagagtctgcttagggccgccgccgagaagctcgagacatcgccgtgccaac

SEQ ID NO: 17409 - DNA, 458 bp, Emericella nidulans
tttgtcctgaagtgctcttgatgggagtagatctctacatagtgagggaaatgaagcatagtctaattctgatgcaggctgtcatcccgctggtaatcaggctcgggaggagaatcaggccggcgggtgaacagaggcatgggtcatggagaccccgatgtccagacgggatctcgctgcagttgcggggctcttgtctcctcaaccacgctgatcagcaaagtatacgatcggcgacggcaaaatcctatgtcactagtcgcatggcccaagcgtcgtagcaacctcgttgatcgtagactcaaagccgacaagggaaggttcaagaaaccatggccatcgcgagacaatggatgccgggtgggctgcaattcggtgtagatgaggatacgtcgtgtgacttgggcttcaagctagactccaagatcgacctggacaatccttcgtgttcctgttcg

SEQ ID NO: 17410 - DNA, 458 bp, Emericella nidulans
tctctacatgatacccatcgtccttagtatgatgttcgaatagccatgttttatgcttcgtgtcttatatgtcctttacctagatcgtatgttccgtcgcgcatgtttgatgtattgtcatgagtttagattgagaataaccaagtattgctagcgaaccttaatctatagtggccgtgtattctccaacgcccggacatagaagcctgcacacagaacgccggcatgtaaccaactccaccctcaagctccttagataaaagaaaacgccgcttatccgacaaacgaacaaaaatagattaatccaattgatcctcagactcctccccatccgcgtccccaaagccctccatccctccaacctcctgccaaaaccgcgtaaaatccaccccagcatcttcaaacagctgcttagcctgcagcattgctcttgcctgtctttccggggtgaatccgcc

SEQ ID NO: 17411 - DNA, 459 bp, Emericella nidulans
aacccccttgtagaaatgcaagtatatgttgagcatggaaactctttattgaacctgagtttacggacatttgcttgtgcaggattaacgttagggacacacatatgttaaggcatttctataaagacgcatgattccagcaatgttataactcaaagaagctgattagatattaatatcgtggaattaacaagtaaaaaaaaaaaacgaactctcagaaagcctcccaatattgatctaacaaggaaaaacgataaaacagcagtttttaatcaaaaggtaggaaaatgaagcgacgagaacccgcccacgcttttgtaatttacacagaaaacatataaataaatttgcgcaacaaagaataggactgccatatgtgcaagtcaagccgagcgtggaaaagctgttctagcggttctcacgacagcaagcacgaatgatacatcggccggggcgatg

SEQ ID NO: 17412 - DNA, 460 bp, Emericella nidulans
cacgttcgccgcctgcaaaccagcagttagcactaacttgagagcgagtttcaatatgagggtcctcacggttctctcctagtagactcttgaagggatcaagaccgttcccaccattggctctggaaatgggcacaaaaacgccgacaaggaacaaaattatgagtatggcaatgaatgatagtgtatatttagaagcaccccaaaaccgctgtccggatgattgctcccctgtttgagctgccacttcatcgtattcctcgtaccaaaagtagacaaatggaacaacaagaagacaaagaagaatgtccaaagaatacaagatgtaatatacaagggtaagagagaacgttattctatccactacttctggagtcgcccagtccttccgttgtcccacagaggacgacacggtggacgaaactagagcgacatcgaccggtagcagaaggatagttgc

SEQ ID NO: 17413 - DNA, 461 bp, Emericella nidulans
cgtcggcgagagggatgagcctgaaaggtccaagggaactggagtcggcaacagttggacacggcttaagagggatcatcagatcgacgggggcttcattggctggcgcccatcgccataaaaaaaaaaaaaacaagagcgagaaacgacggtgaaaatggcggacactgaacaataaagatgataataataataaattaggggctgtggatccaaggcaactcgccatttagaatggcaggtttttgacttctatcggactggaattgtcttcctgttaacccagcctctcgcgtagcaggtcgggtcgaggttatttggacaaaagattcgttcgcacgtaaataactgagacaagtaccatgggtgatgactacctcagtaatggcacggtctcccatcatcatacaccagattgcaaaaggcgttctttgtacgtagggctggtcagtagtggggcg

SEQ ID NO: 17414 - DNA, 462 bp, Emericella nidulans
gctgacggcgaggatcaaggtaatgatttgactagtgtacagcatgcgtagcagttttcgcttgatctggggttgaagtcatatataaaacagcatacatatgcctcgcgaatgatatattaaggtattggcattgtcatagtaattgatatgctctgtattagcaggagttatgctattccctagcaatatattatggcaaggggtaggcatgtctgctttatgtctaaatctatcatatatcgtaaagtccgtacattatgtccaggtcaaaccgctaatgatgcaacaaagaaaagaagaggaaagctcaaccgaatggcaagttatctaatcaactcagcaccagccccgtcttatgcggaccatgcattctttcctccctctgcaagcgatccttcttcttccgctcataaactgcccgaacaacccgcttaacctgctgctcgccctgcgcaaagt

SEQ ID NO: 17415 - DNA, 463 bp, Emericella nidulans
ccaagccaggcagataactctacaagtaggagagtgtcgatttgttaaagcactagctagatatagaggttgtaagaagtttgcatgcagactgtagaggtattttccacaactccggccatattgatcaaccttgcctattcctaaaggctggagagaagcttcctgatagaggaaggcaaatagcatgctctggctccatatcacatagatacaatgcagataggtagttatgccgtgattgaatctgtattttggcaggtagtaccctccctgatggtttcagcgggaagacagacggatacgttcgaagacaaaaccaaagaggcagaactcgactggcaggccctcaggaaatcgctaaacttggagatatcaaaacccttccttgttttctcattcacagcttgaaggttttgtcaattgcatctggctcagcaaagatgcaatgaccagagcgcgc

SEQ ID NO: 17416 - DNA, 464 bp, Emericella nidulans
gcctccgttgccgcctagtcttctgaatgttagacggggaggccgatgttttagatagcgagaatattgttctggacggtagacgcttgtcatcgggaaaaaaacaaagttctctatgatcgatttaagtcttttattcataacttaatacagggcagccaacataggaaaatatgatgaggtcaatgctacacggatattgctagcatggctagactagaggttacaagattgtcggtatatgatggggggaaactgtttagaagtggatggccttggagtaggtggccatggcagcctccttgaaggcttcggcgagggtagggtgggcgtggcatgtccgggcgatatcttcgcaggaagcgccgtactcaacggcgagggtggcctcagcaatcatctcaccggcgttggggccaatgatgtgcacaccgaggatgcggtcagtctcggcatcggcgatg

SEQ ID NO: 17417 - DNA, 464 bp, Emericella nidulans
tggaggaaagcagcggagccagttgtaagttagctcttgctttgtaatcgactaccttttgtgaggagtacgggaagatttacttagacttggacatccgtaggcatagatttctatcttcaggcatgcagtgatgaccaggagaaaggatccctcatgcagctaaacaaaatgacagtattgacaaccaacacaaaaaagcaggagccaaacaagaagttgaagagcattaagcaacctggcaggcagtcggcggacagtatccgtgatcacaagcaaagctgcatagccccaggtacgagttatagttctccagccacggcagcggcacaccccggacacccgtcgtcggcggcgtcggcacgggcgctccataggccgtacaggtgcatggtcctggagggcagtaaccgaagttgcagcagaaactgcatagaccgacatagttgcccggtcctgtgccg

SEQ ID NO: 17418 - DNA, 465 bp, Emericella nidulans
gggcggcgtttctggcgatattggggttcccactacggtgcaatcggctttactactaatcgacaagaaaatatatctagcaaatcggattcgaaactgggtcgtaggctataccttgtataatatttttttaaattcgtggaaatgcaaggtcgtacaacattatacgcgatgctgcagtgacatcgaagccccgtagatatattgtccgtaacgaaacccgccaatactcctattttagataatttactcctcgtcctcctcgccctcgtcatcaccgccaccggcagcagcagcagccttcttgcgctggacacgaccagggcgaccaccaccgaagggagaggtaagagcgaagtcgatgtgcttctgagagtcgagacggaccatgtaggagggaacgttgacaatctgcttgccgacacggatgtgacgctgcttgatcaggacacgggcgtggtggat

SEQ ID NO: 17419 - DNA, 466 bp, Emericella nidulans
catgaagaggcaaatacaggatagttggcttataatgcaatgttcactcaatgctacgggtatggaatggttgcccgtatccaatttcagttctgctttctgagatgaccctctaatttcttcatatcacgaaagttcggattaaaaatccgtggtgcctcagtagtcatagaatccttttcctgatttcttgcccaaccagcccgcattgaccatattcttcaacaacccagaaggcctgtacttgctgtctccggattcctgatgcaggacattcatgatggccaggcacgtgtccaacccaataaaatcggccaacgtcaagggccccatgggcacattagtcccattcttcataatgctgtcgatgtcctcacgcgaaccaataccagtctcaaggcagatgatcgcctcattgatgtacggcatgaggatgcggttcgaagaaaaccaggcgaatccgcgg

SEQ ID NO: 17420 - DNA, 468 bp, Emericella nidulans
gccattcctgtccgcgcagtaaggagctcaggaaaaggtcgtgcattataaaatcacgggactcggaaagctccagaatctcatcgaatcgcaaacgagatatcaaatggaatacaactatcttgtagtaaggagcagctcagaaagttgcggggaaattccccctatgatgagaccacggtcaagaatcaaaatagaaacacaggacttgcttgattagctacctggtagaactaagaatacgaagacacgaaatccccctcaagaacccttctatattggtaggtacttcgatacgaataactctcccatatcgcccgttcacgatatcacggatgagttgacaagtgcatcgcttcgacacggggcccaagtccagcacgccgaacgaaggaagtccaacaccatcatcttcgcagttaggctaatgcaacgaatatgtgggtaacgatagacgacccgtcgcgg

SEQ ID NO: 17421 - DNA, 468 bp, Emericella nidulans
gaaatgtcgataaatggagggctattatacatgtcgagctaacataaaagttgataagaaaaatcaggcctctccagctagaacaatactttagtttgtgcaacaagcatgaggtacgagtatagacaagcataccctaaatggtcgctgcgaaagcttagtaaaccggccagacaattaataatacggccatgagttccggaaactcactctaggcagactaatctcgccagcaagattagttatacctgcagcactttctcttctcctcaatgcattatatatgtagaccccaccccaacacccatttgcatgagatgcaacgccataaccacgccagcagatcgtattcaaaagatccaccccagcaccaaccaaaggaaaatccctgcgcagatgacgatgccggcaaccttcagaacagcaaccgtgtcaccctgtctcgccatccttgtaagccggctcgcg

SEQ ID NO: 17422 - DNA, 468 bp, Emericella nidulans
agacgaggcgccagcagacctccttagcgctctctggtcggagcatctccttgaggcaattggtactgaggctgcagtcaatcgcaagtgcgctctcggctgtactaacaggcgagattagtttcaaaccaagctttgagcaatatagaatagtcccgaaagtgcaatcccagaggatgcgcatgtcattccagatgccagctgcttcgacgttgcgcggtgtctatatacatcatatcactattcacaggcagacttctatttccaaacccaaatccaactaaatgtcgtcactcatacacgtagccacccgtgtcggaagtgcaccaacacttagacgctcgtcctaggaggcgagttgtgccgtacagaaagctccgccataccgcttccccaaagtgccaaggagtgacgcttctcgaccagtttcagaacttcccaaaggaatctgcgttcgggaccaccatc

SEQ ID NO: 17423 - DNA, 469 bp, Emericella nidulans
agcgctgctgggaacgaacgggtaactatcgttttcttgattattgttgcctatatcgccccattcaaacgcgcaacgcatatcaagataagatcgattcaaaaatcaggcgcaggtcgatgccgcgggttgcggtgcggctcccttgaaacacaagcgttcgtttaaactacgttcgctgtggggtgaagcaaggagtaggtctggcccttctgagaggcttaaggtttgataagcgagggcatgcctccgccttgagcccccaagccttcgatgaaaacactggcctggctctcgttcctcgattgatgctctgtcgcagttgagctttgtaaagcctgagaggtgagaatgcagaactcgcaagctcaattccaaaaatagtagctcggaccggccagataaccctagaatatgaggggcacgagttgggcatgatccttcatatttaacgcagtcccgggcgttt

SEQ ID NO: 17424 - DNA, 469 bp, Emericella nidulans
tgtggcaaaaggaccccgagaatgctcaggagacagcaaccaacaatttgcgctgttccgtgcaaagaaacgctgggccgagcgtgtttcgtggataatagcaaagggcaggtgatatatggttagtacatcgatatttcatcacgaatacctgctgtttggttgagttggactattgtaagtgagatgtcccaaagcttatatacaaatctagaaacaatctcgacacgacaagggagcttcatgaatcaatcactaccacttcgcctccttgcgctcctggaaggacttcaaaatctcaaccctcttctctagagccgccacttcacgctcaagggcagccttgactttcccctcgtcgctgccaagcttcgcgtagaagtcctttcggtaaggagtcgccgacatggccgcggagaaaatgggcttgatcatgaaagaatgatgttgcttgagggttttgccatac

SEQ ID NO: 17425 - DNA, 470 bp, Emericella nidulans
aaatattgaaatctacagaattcaggcacttatggaagtggtttaagctagaagtgtgcttacagtcacgagcttggttcctggatgtgggccagttctaagcttctcgaccatagcggtgagactcgtagtgaaaggcaagaactccatttggcagcagtgtgctaaatcatatgaaaagatatccatccctcctgtaacccatacacccagataaacaatgtgcaataaacgccccgttcaaaagagcactttaaggattcgtgactgaaatcgcctgatgcacgccgagtcgccgacctccacccagacaactagaatgaaattagatgaaagcaatggtaatgatgatagcataaccggcctggtcgaaatctcggacaactcataattcacaaagttagctgaaagttttgggtctcctcatcttcttcgtacgtgggaaacagctcttcggccaattggtcgcc

SEQ ID NO: 17426 - DNA, 470 bp, Emericella nidulans
cgccaccatgtggtcccagagatgcgattggactggtggaaggagcaggcaggtgcgctgattgctatgcatacaataatcgattaattcatatcatttcaattcattaagatattaccactatgctaggctcattgcattgctgaaaggagcaacatagcactcccaatcattatccgaggaatcgcccaatgacggggtcagcacattatcacgaacttgccataccttcacaatcacagctctggtacgagctacacttaggacgttgtattctgacatggcagccagtgcgcggaggatcaacggccgcccgcacacttcatccccgttcgcatctttccagagctcatcgttgagcggatcaagttcaacggcagcaacgaaaacaggccatgccaggcctacataggttcccgcatcaagcatatccgagacaagcctcagtatctttcggacatactcaacca

SEQ ID NO: 17427 - DNA, 472 bp, Emericella nidulans
tctgggcgctggcatgaagacttcgtgattctgtaccgactacgctggtgaattgtccgagttgccctccaggaatcagcctgaatgacggttgcaccacggcgttgtgctgacgagatgtatatcaccccacacctttatacgctgcatacagcgcagaatccaagtctgcaagtttgagcaaaccaggtatatattttattgcatctccaaaacaataatgcctgctgctgatgcataacttttttttctgccagtttcacttctgagcggctccgaagaacatccaacatcaacttccatcgccatgaggctacgaattttaccaccccgagatttggctggctgactgcgattacgtttatcgtccggggtcgttctattgagccacgttttcacctcgatctcgcataatatataattccaatggaggggattgagtaatgctgatgcctgactgacagttgatcgc

SEQ ID NO: 17428 - DNA, 473 bp, Emericella nidulans
tacagccttgaataattcttactcgctggtatttgttagatcaattttccccatcattctgtattgttgctttgaatgttgcgatacttgctccttactcagaccattcttgttccaaggcggatggaggaatccgatttctcaatcccggtaaactctcacttcatataaccagttccattgccatgcaaaatcagtagatgacaggagtattagtattatcgctgaacccgaggtaaacatcatgaaataaactaaagcaaagcaggagatcccgtcagtagcagtgataactcatcaagaaataacacgctatagtatgccatgccagaaaagcatgcatgcatgcacgcaatcaatcgaacttctagagcaaaatcgtaaaaccagcgaagaatccacctagcacggcaaaaagcccatacacctgcctcaaatccgtcacaggccttacagcagcgccctcgtcatca

SEQ ID NO: 17429 - DNA, 473 bp, Emericella nidulans
gctcttgcacggacactcttgacctcagactatcgttgacggcttaaggcgtacagtagactcagctgagctatgcctagcctttagtctctgaaactctgatttggtttctaaaactctgagagccactcctgattctgaaacctcgtcttagcgggagaagaaacctcagtttactgaagaaatgagtttagatgaatgtaaaacctgttgaactatgaacgtttagttcttggcgtataattaaaggacaagatcagaaacagattaaatcaaaacctgtcaatactccgagggaccccagaaactccactgagtacgatgcaacgatcccttactccgtccatgatgagagtcaagaaacaccgcggaaggatgagatactccagtcgaagtaagatcaggctgcagacgcatgaaccaatccattccattccctcccaagcactccgatacgtatgatagagcagatc

SEQ ID NO: 17430 - DNA, 474 bp, Emericella nidulans
tgacagctgtcgacaggcattttttgttcattgagccttaagctctgcaaaatcgccggatactaactgcaataataccactccctacattgctagagtaggcccccttttatcttgtccaaacgttagtggcatccattcaagacagctttcccattagctcgcgcctccagaaggctcggtggtggtggcggcccaaacactggcttctctggctgctgaggcatggtgtgatctccgctggcgctctcgagctcatactcttcgtcactaataccctcctcatcctcttcgtcttcgtagtcctcctcatattcgctctctgttccttcatcatcgccatccaaatccacagctagaccctgaccacggccctgagcttgcatccgccgacatagcgcttcgagatggtggcttttcttccgccatttgtcgagttcttcgtgatttcttgtgcgttcctcagccatttcc

SEQ ID NO: 17431 - DNA, 475 bp, Emericella nidulans
ctttgtagcttctgtgcgcaccttgagttctttgatcaaacgagctactattggtgtctttgcgctcgaggctagatatcattctttaaaatggctctgcgttgcggtgggtgcccctggcccaagtgagtgaatcgccgtacagctgcctcgcaaatgctggatgtttctaatggcagtacatatcttcttcgtcccgtgtattccgtatcccattcagtaagtagcttcctcaatagagtgtttctcacttcaatgtattccctaaaatcatctcacaaagcgccaagaagatcaggtatcacggtcaactatagacaagaatggttgtagatacagcaacctgcgaattaaagaaaggatttcaccctatctaccttcatgctgatgcccaaaacaccgaaggaacctgcagaaaatatacggctaatatggaaagatgggttctaagcagcaacagacctcacagcagggc

SEQ ID NO: 17432 - DNA, 475 bp, Emericella nidulans
tggagtttgcgcccaacaacgtctgtcgaaagtacctccagcacttcagcagctagaattcagtagagtcgtttgtgctgtatgagagaatgcatttgcaagtcttgtttaatatatacatgcatatgtctgtagatattgaaccgatccaatcgtacagccgcctcatcatacaatcctcattttccagagtggagtgtgtcaagttctccagctttcttcagctctctagcaaaaaaaagaatcaagagaacctgcaagtctaaaaggtgtttgaaatcgaagcaactccgaaccatgcattcgcaacaaacgcccgttcatgaccagaaacacagaaaccaataatcccaaggctcacagcaacaaaagtctaggtaccaaagaaatgttgactcggtcgagtcgctgaccaagattccaagttcagtggtcgtccttatcgttggacttcttgggctccttcgacagctgc

SEQ ID NO: 17433 - DNA, 476 bp, Emericella nidulans
tgcgcgagcatctgactacgaaggaacaaaatatgaattcttcatttgtgatgggtgacgattggctacttttattgaaccgccattaagacatgtgcttgggcagagagtcagtcgaccgacagactacacttgctcatgaatacaaataatatcaactacttcggttcagatattgaagctatggcctctgattgtatggaaaacaacaaggaggaaaagggcaaggggtcaacggtggaaggcgataagtgagaaaacgtggactaacacattgtatcttgctggggtgggaataaaaaagagagaataaaagagagatagataacgtccacttcgcccctttcctccgctctccgaatgtcaaactccgctggccgacccagataattccgaacaagtggaagataagtgccggtccaaacctgtcacgcagctaaaaaagacctttgcaaaacacttccaggggtgtattc

SEQ ID NO: 17434 - DNA, 476 bp, Emericella nidulans
tcctccagacactgccagcgattaagtaggaagcctggaaaaatgcagttcagccactaatccaggctacatatggtacacaaggaaggccgtaaagtaagatagggttgagagcctagaaagtatatcttggaacatagatctgaggagaagagctgaaccgataaggacaagagtggatttggggtatatcaacaagaaaggaaattgcagggagcagtaggtagacatgtataaatagaagcaaatgatgtatgagggagaggcatcacgcagctgaataccaacggtactctagcagccagaagtggatggtaaccatgagaccctgaagggagacacggtgttgacaagatcttcgtattcgagggtctgttttccgtgtacctcacaggttaggcagccggaatgcatactcatactcagattgatcaagtgaggtcaaagctggaaaagaactggtcctagaggctttc

SEQ ID NO: 17435 - DNA, 476 bp, Emericella nidulans
gcgttgggcggcgtcaatacggtgcagagggtaggcctgcaacagtggcttcaaactgagctcctagccgtattttggttttgcaggccatacgtgagaggatgaactcgaagagaacgagttcatgtaattgtgaggcttgttgccagataactaaataccatggcgtgcctctcatctgaaattgatggtcgatagagctagtgcattcattattaccaccacattattacccatactcatatccagacccacatccatcaacatcgtatcgacatataacaggtaacatgatcaaggagatatcataaagcgtcaaaacgtcctggtatatagcaactgaagacaagacgagctagtcaaggagctggaataaggccaccaccaggctgaagaaatcaacggtataaggggtataatactctttccaaaataccaagctatttttattagttttttgggggcgttttggtttc

SEQ ID NO: 17436 - DNA, 477 bp, Emericella nidulans
tggtgcgtgaaacccggtacactcgtcaagacaacgatgtacagcataaaagcataacacagaaaggagagaagaaactggtttttgacggaaacaaagcaataagttgacaaagtatggaccgatcaagtgccagatatccggaactcccctcactgtgaagaaaacgctttttggtattgaacggtggatgtgacgtgtaggaacatttttctcattgtccatgagtgttgtaagggtttctcgcaaggggcgaggattccatcttctatctgaagtgctttctcaaaaaaatagtattaatccatcatcatcgaaaaacgccacgttgcaatcgtcgtcgctccaactccgttgtcgagacgtttactttcggcggaaagagcagccctcggtgagacgggccttgccaccggtgggctggcagaggacagtagagcagccggagcacacaacgacggtctgggcgtgggagaa

SEQ ID NO: 17437 - DNA, 477 bp, Emericella nidulans
aaaaagtgagcgcaagtcattgatttatatacaggtctctgggaatttgtgaataaaggtgatccaccagttgttggccttacgaagctcggcaatggtgtcacattggagagcttgaagcgagctcgaagaaacccacctctaggaacggacaaattgtctaaacccccgaagtccacgtcctcaagcccatcggcatcgcaatagacccgatatatcattcaaactattaactttccctggttcaagcatctacgcaccaatcccagagccaggcccatacccttgttctctcctagacttggcggcatcatgttcggtttcgtcctagtatcatgtatattaccattagcttcgcgcactcttgttttatcgccaactacgaagatgtcatataaaggagtttataggaaagggaatataccgaactctcgttggtatatccagttatgccagaggtgcgctctccaagctcga

SEQ ID NO: 17438 - DNA, 477 bp, Emericella nidulans
agggtgctgtatcgacaattgcatacttaatatcgatgcctcctcgcgtattctatgaaatctgctactgtgccgcaagttttattttccgatatgtgctaacttttatatgtattcgcatagtggcacagaaaatagtctttttactggtcacttcttatctttcatttcacccctctcccttactatattggctatgcattttccagcatccgtccctaaattctcaaacccactaataacaccgtctcggtcgccctgacccatctcttgactcatcttgaatttcccctgtaagcgatcaatggtaatctcaatcccgatgatgttcttcttcaggagctcaacataggaaacaggtgcatcagacacctgccatggagaagaatatttcatgatcgacgtttcagactgatgtgacagttcctcgatttgcttttgcaagaaggtcatcgtctcttcagatttggagtcgca

SEQ ID NO: 17439 - DNA, 478 bp, Emericella nidulans
cgacatttgagagctcgcgcctagagataccacttagtgcctaggtggcagacgaatatccactgtatgtactccgtatatttctcatagatgctatatgaaatgacaaactgatatatacacattacacttttagggtatcgaatcaaactctttgacgccgaccgaacgctgaggctggaaacataataaacgctgaagcgctcaacccgacgaacaagaaagaaggaagaaagagagaaagaaagaaatagacatggcgcgtatctctttgcatcatgaacgagagaaaaggaagtgccagtgggttgggggtaggcaggtaggtaagctaagcccacctccatcccgaacccatcgcctcctggctatgcatcaccgagaaaaggatactatttcttggctcagtcgattgtccagatccgatcagcccgggcgagggataaccatttgtactccggcccatatccagattctg

SEQ ID NO: 17440 - DNA, 479 bp, Emericella nidulans
cccgcaatcttcgagcaatcgttctccattgtagatagatggccatagtatacacaatcttactactctaaaagaccatcggtaatttagtatcgtctattctttgagctaaattggaagcaccatgctatgcaaatatacataaacgtaagaagaaataataaccattatacagcgggtatcatgcttgcaagctcgatctctttttgcttcagactgtctgttttcatgcggtctcccccaccatcctttggattcggctaagcaacaccttactctccctccccaaccttctcttcccattctgatccggtcgctttgctcgagccatcgcctctctatccttggctctaagctctcgcagctccctcttcttctcagccgcttgcctcctcttctctgcaatctccagttcttttgcgaacgcaccccgctttggtttttggattcttcgatctcctggtttcctatccgcctgc

SEQ ID NO: 17441 - DNA, 480 bp, Emericella nidulans
gttacggttagaagcctcaaggtgataggatgtgtttcgacaagggttgtgtctcccattccaaacctttatatgtgttttgtttggaaaatcgcgaccagtagaatcatatgtgtatatatttgctcacgagaaacactcaacgaacctcaatgcaaagtaaataatagtgtccaaaataaccgagcacccaagtatccaaaacgccgaatgccttatagcactaagagtttgggtgtaaaaaccgaaacgatcaggcatataatagatattcaatgacgaataatgaaaaaggagtggaaatgagggtgcggcgagaacacaattgcttagcggtctaattgtgctcaatgggatcctcaggcagaagaacccttcctctaccttctctaggaaggcaagccttcagcggtgggcggacgatatcgttgaacaagaatgttccataaacaagcagagcgaacccagctacctgcagcc

SEQ ID NO: 17442 - DNA, 481 bp, Emericella nidulans
aatatagtagattaactacacctgccattgagatccgtcaagcacatttaaaaccagttgtacataggggatagacacggtatgcgatatacgatcagttgaatatacggcctcgcgcggcagaaccacgggaaaaagaaaataacaagataataacaaaatagaaataaaaaaataataaaatgaaattgattggcccctatcatggctgcagacactagcagtcgatgaaaaggcatagcattcttgcatctaagggcatcgtctatcccatcctcaataagccttctgtactaaggtactagaagtacctaacccaccgtcagtcgcatacaagcaaaccaaccatagcctagtttaacaaaggtgtgttctcatcagccacagccccagagtccttgccaaccccatttgcagtatcacttgctcgtccggatccagcccgcttaatcttgacaaatgggaacctggtctgcttggg

SEQ ID NO: 17443 - DNA, 481 bp, Emericella nidulans
tccttcaacggcatccttctaccgaaagttgtttggaacgatataaactgtcgaaaatagtggacgtttagtcgtcaatatgctaggaaaaaatgtctcgatctttttctgacacattgctgatttcgaagcagaagaagcgttaatagtttctcggtgtaaaggaaatgacaagggcatgttgaattccattgtcgcagagcatgagtggaattgtagtcgattgaacatagctaagttttatggtagacggtagcttcaccggcgatacggacccctgtctacccgctctctatagttggggctgcgacttcgtcttctcgacggaatttccctcgaataatcgagcttgctcgtttggtgagatttgtcataataagagccacgcctgtcagaaatagcagtcccctgatccctatcgcggttccggtcgcttccgccgtaattgggaacgtaggaatcaacactcccttccgggccg

SEQ ID NO: 17444 - DNA, 482 bp, Emericella nidulans
taattggttttcgtctatccgtcacttgttcgagcttctactggggtgattcggagtgtgagatcatgcagtaagtcggactatttgaacttgacgtctgtactcaagtgagaatcaccccaatctgctacagcaatcagcgaggtgtaagatacatactgcttgatgataggagaaaaatatggttacataaatgtcctaaaagtacagtaaagatcgcaacagacggctggctacaaaagcaaaacacacaccctctttaatccgcgttcctcatcagaaaccccttcagaaagggtactcggtcaatgatctcaaatcccagactccgcccccacgcaacaggcccctggccgggcacgttataaagcttgtgcaggacatcgcaggtgccaccgatctttgcgttcgtggcgtaccgctcagccgtatatctctcgagcgtgaggatatcgcctatgtccatcccatgcgtcacagcg

SEQ ID NO: 17445 - DNA, 483 bp, Emericella nidulans
tctggccgaaaggcgaggaaagcatctctcttttcccgcatcagcaacggtataaatggttccagtaaggatgcattgcatgggggatgctaacatatagatacaacagtcttgaagcaagttttggtctggtttcttcctgctttggaaccagtgccaagttgataacctgatggatagatagatacaaacgagaagaaacagacaaggcaggagaggacagaagaccttccgaaaggagaagaaaactgagagaatgtagagctcgaacagcctggtcaagtcgatatgagatcaaaaaaaatggaatcctaagacggatatcgcgcccaaacacccgcttaagcctgaacaagacgaaacgacagtaaacagacaggaaagcatattttgacagaaatgtgcttggagcgggcgagaaaaatcaagttgagtcgtgagatgatagggcatcaagaaacgcgcaatgtaaggaagtaaagg

SEQ ID NO: 17446 - DNA, 483 bp, Emericella nidulans
aatacttcatccccggagatggtattagccgagaagtaattcaggccgacatctgccgttaccttggaaatgatgctttagtaagacctggaaaccacaatgtccgtctccctgatcctttgactgcgaccgcgtacaggcgccagagagattggcctcgatgaatgaaacaagcgaggtctcgttactgacatgcgaatagggtcgcgcgggattcttcattcgcgcttatcgaaacctcacatcagtatgctcctttccaaactctatgttttgggaaggcaaactaacatctgtgtcttcaggaaatgattgctgatctcaaggcggactccgccgctgggaagcagacgtcagaagtcgtgctgaccaaggttatccccggggcagctacatccaggactacagctactctcaacctagccgggctacaccaacctactcaacctctatgggaagttccatgcaccctgaaatgtccca

SEQ ID NO: 17447 - DNA, 484 bp, Emericella nidulans
tcccggggtatcgtcggtctaacctgattaggtgggtagtttacttcaggtccgccagccggaccctgaaattatcactggaattcagaaatacattgggctttgatacctcgaaatcatcccagatggatctggggttatatataagtatgctaggtacatgtacacagcggacattaaaaccggtctatcagaccaacataaacaaagcagatatggtcaattcctgcaatacatatgcgaccccgctccgagcaccaaagacccaaatgaatggaagaaacaatgtatggctaatctaagcagaatgatgaaagtatgtgcaggcgatggcacggatagcttacacttccttggtccgcacggtcgggaatttgggcgcctcgatctctgtctctaccatttctagcccagaaagactcggaaatcgccggctaaagttcttctcccagtcatcgcctgggcttgcggggattccttgtgc

SEQ ID NO: 17448 - DNA, 485 bp, Emericella nidulans
gaaacccaccgggggaatgaaaaaggaaataacgtaacaacgaaaaagaaggaacaagaaccacggcaaccatagaacaggagcgaaatcgaagtgattctctagacgacatgggactatttgaagatgatgatgaatcagctccgtttgagaaacagcccgaatgaattgtttgctcaaagcgaatgtgtggttcagttaagaagccaggttgaatagatcagaccagcagatcgggggaaaaagaaagtttatgaagttcggttggcagccgaggcgacaagtctttgagcagtgaacatagacatgcaaacggacacgcgccttaagttacagaccgaacccggaaactgcgcaaagccccaaggtagacagatgtgcagaagacatgcgagaaatgaacgcgtagggtcctgcctggatgtatttcgatgcaaggataaacaaattgatgaaagacacaactcgctcaaactgaaatcact

SEQ ID NO: 17449 - DNA, 487 bp, Emericella nidulans
gccttcgctgctggaggaggatctcaagattgtgtaaaattctactaaatgggagtgattgctgcatataatgcaagttatatattattactctagattgccaatgtttagattagcatgcaggacctagcctgcagacgagatgctgagctcaaaaaggctctcgtgttgaataatcgctcccaagcaacgccggtacatccctcccagtggtatcatgttgaatttatccgcgcaaccctgatccccgcagggaccatgcaaagaaatagtcagacagtaggaaaggaaacaaaatgtgctttttgttttgacatgtctatgctgcgctttgagttgttgaaacaaagcaggaatcattacaatcgtaaaaagagatgaggaagatatgtcataggggattcaagcctaagcgacgagcttagaacttaagggccttgggctgctcccaggagaacttctggttggtgaagtggccgttctgagc

SEQ ID NO: 17450 - DNA, 490 bp, Emericella nidulans
gacgggcaatcacgccgttccttgtccagaactggtcactcattttggaacggtgggaacccccaattatgagacccgcgcatgctgttacattgcagtatatcttctatggcacattctaggaaccatctaaatcctgcatgtccaatccatctcatcaacataaacaagcgaaagcgatcagaacgaaaacaaacattttttaaacagcggttgaagcacagaatcaagcagtctcccccctcatcttcctgaagaagtccatcactcccgtaaacacaacaagcaggataccaccacccggacccaaccgcagcaccttaggcatgaatcccttgtatagcgcgccaaaaccttcctccttcatcactgtccccacagccggccaagcccagttgtacttgggcgtctgccccgcgattttagggctattctggatacgcgacttgacaacgtccatgggcgtgttcaggatcgtaccggccgttcc

SEQ ID NO: 17451 - DNA, 491 bp, Emericella nidulans
ggattggttcatgctcgacttgttagtgcactataaggcagtgacgtaagtgacgtcaatttagatcacgtggctgatatcaggtggagacagcagcaaacaatggaatgtagcagccaaagtaaaatgagataatgcttatgacgattggatatctagtctatttttttgtcctatcaggatagccagctgcccgattgatgtctcccggttaatatcgggatacgcgccacctagcgaattggtaaggaaattttgtttagcttcttcttgatctcttccacaagatcctctcgtgagattaaagtgccgtctttttctgggtggccttcgggcagtccaagttcctttagcttgaccttgcccgctgctaactcgtcctccccaagaatgacagcaagcggaataccaccggcttcagccagcttgaattgttgcggcagctacggcttaacagtctgggcgaattcagccttgatgcctgccttcca

SEQ ID NO: 17452 - DNA, 491 bp, Emericella nidulans
gattgcttaatcagttcccgtaaaatgttctcaaatttctcgtcccggtagcctaacgaagtatatgcgcgtgcaatgatgtgtcgttgctactatgtcctattttcttagtcgctacgtcagtagtgccgtgaatgcacaagctacagaatgacagctggaatgagtagaggattgtccattaattcgctgtccaatacaacaatatataacgaatattcaagatgacgcaaaatcgccaggatgctcatgaccgatgatgtagcagtagaaatgaacacattcttttgatgaagcaatacaagtgtaagaaagaaaggaagagaaaaagggataaatgatatatcttcatatatgttcagaatccgggtgatgacagggatcgtcaccttgagttgccgttcagcccggcacggacggcctctagaatcagatcccttgccttgtcgaggttctctttactacccttgatttcgatcgcctcgcccttg

SEQ ID NO: 17453 - DNA, 492 bp, Emericella nidulans
agttctatccagtaaagctttcatgatttcgtatctaggcgcgagaaacaaggcactgcgtattcggcgagctacactggatcattccaagagtcgcattaggatggcaagggaacagtcgcaagggcaagtcgcaagggcaagtcgcaagggcaagtcgcatcgggcaaactgtccatttgtcaaactgattgtggacctaaatgtcagggaatccgcgccttcgccgtccatcgaaccctaaaaatcggagaagttggttggtcgacctcatgcctgtgtcttcttcaacaccaggaaagtggccttgtcgccagcaccccttcggtaatccataacttcggtactgaccaccctgaccagaccttctttttcgagtctttcagcctcggtcttgaagccccattctagccatatctcgtggaggactgtggcgactacgaagccgcccggcttgacaaggcggacaaactctctcagggcagggtccgg

SEQ ID NO: 17454 - DNA, 492 bp, Emericella nidulans
cgggtacggaatgattccaaacgaacacctgtgtacaagaaggcctagagtcattttggacttgataataggcttctacatcgtacattatacagtctgcacagtcacaactgtaaaaatagatccggcaagcgcgcctggcgttcaattcgtgccgttacctagcataccgctcatcttcccaaacgtaatatgtgcgcatattcgaatcagagcgcaggagccgtagagcgacatagtcgccctcaggctaaatggtggaacccaaatctcccaataaacaacgcacgatggttggcacgagagcccaggagaaatcagaaacacattacaacaaacctggaatgagaagataaaatgaaagccccaaaacataagtagagaggacatgcttgaaattgcattgatgaaccggacaaagtgcaaggatatgaccccaacaatggaacagaaatcagaaggaaaaaggaaataggcaggcgggaaatgggg

SEQ ID NO: 17455 - DNA, 493 bp, Emericella nidulans
ggcaattcatggttcggttgagagtcaaagcgaatattttgcgattattcatgttaatgcatgctcttactggtcagagaaaatatgctagttgttaagaagttttctgttatatctgatccttctccagccattttctttcagataacaagcagcatgcttttcaccacgccgtatcaaaactgcagaccgtaaccaaccaagtagatgtatcataatcaggacacggcatattgggaatcaagtgagagagtcgagacaggcgtgcgcaaaatatatgtacaagcgaaagataggcacctgccacaagaatagaacaaacgcagcagcgtggacgagacgagattaaacaaatatagcattaaatcagagagatcgcacattgggagagcaatagattcgttcaaagagtccaaataaggtcgtgagcggagataatcagagtagatcgctctgaagagagtggtagggagcagcggttagatctcgtcga

SEQ ID NO: 17456 - DNA, 493 bp, Emericella nidulans
cgagtgctcgcacgagaggctcgtagtcattcgcagccccttgaaggtcgggtacgaactgggcttgtgcaggctcattcactccgggcgcgtgagcaattagggcaccagtcatgttgatgcgagggctataggtaaagggtcgcagactagaggatgacgggcgctatgactcttggtctcagcttctcttatttcattaaatatttcatgaaagcagggattgtctgtcaactgatatattgctttttgctgccaaataggagctgaatgcgagttggtacgctcatcctggccagctgaacaatagcatctgcactacggccagtagatggctgcaccttcccagcactctgccttttgccagctgtacgattatatctgtttgatccagttggccacgagcgacatggcagtctgcattatcggggatagggtcggcttttgctttttttctatcttacttttgtttctttcggctccgccataactc

SEQ ID NO: 17457 - DNA, 493 bp, Emericella nidulans
atcataatgggtgtatcagggcataggtaacagatggagtcgattgtgtgttaggactacagatctaactgagtgtttcatttggaatatagcattcaatcaatcttgattatattgacttcataacccttctagagtgaataatgattaccaataaaggaaataggaggcccatcaagtaaaagaccgttaaaatttagataaacaccattcataaaacataagaggaagtaaagttcaaggaggtgaaaaccatctaaaaccctttgatgcatcatctatatgcctcggaaatttattcatttcttccccttcttcttcttttttcctccaccaggactcttttgtcctgcgctcccggcctggtcatcagcctctacaagcaccgcatcatcgtcactctccgtaacagtcggtgcggggggagccgcagctgaagcagatgccttcgacccaactgcaacctgcgtaccttcagcaacctcaggcgccg

SEQ ID NO: 17458 - DNA, 494 bp, Emericella nidulans
gaggctgtagcactgcagtgtttagggaatagaacggagggcaaattcaccacgaacaacccgatttcaagccactcttaggcgacaggatatacagggccgagtcgcatagccaatccacgcggtttcaacagttgcacttgaccgtcaattgactacacatagcctatatatgtatgtacaaagaaaagcaccaaatgcccttcgctctttgctccctactttccattttatttgacgcagtcctctattaaatagacagtgaggcacggtgatggatcacctgtagcctgcactgagatccataccatcactgcagggtgaagaacgtcagacccggcgaagcagaaaagcgttcagagccaagacccggccattgagatggtgcccttcgctgacgaacaagatgagctcaaacagagcaagattatcgttcaactctatgagcctccaagatcgctgaacatataccccaagcgccaacagaaaaagca

SEQ ID NO: 17459 - DNA, 494 bp, Emericella nidulans
cttatgataaatttcaattctttgtataaccggagatcttatattcctgtgataggagcttcgagagtgccaaatgtgttaagaaaggtagtaagaaatgcaaaaggtttcaacatggcctgggtgcagcaacatttgaattacggtatagctagataaaacttcaatcattcccgcgcaaaatatagtccaaattagagaagcgaaaccattctccaagcccagatattcgtagtacccgccagtcataagtcatcattcattccttcgtccaatgcgacatcgacatacccttccctcgtctgcttgtccatttcacttccagcacataatgcgacgactccaataaccaataatgaacgacgggaatcaaaaggagagtgacatgaccacttatttgtttagacatagacgtattcagagacgcgcagcaaatccagaactctgtaatcggaatgagcaacgtgacagaaatgtaatggaatcagtgaagg

SEQ ID NO: 17460 - DNA, 495 bp, Emericella nidulans
tacatgtttcctagtatcataaagaccaagagtagccgacagagcaaggatgtaactgttctcagttcaatcaaaaagatttacaacctctaatttaccacggcagcgagtacacaagtcattcatgcgttccctataactgagcctgacaagatgcgcaaggaatccaacctaagaaacatgaagagaatattgtaaagaggccagattagagtcgcaaacagagaacaaaaataatgaaagcaatgaggaacaaggtgtcggggtagggagcaagcagagaaataaggtgctgacccttaagtgttcctgtacaagacaacgagtaagagcccgactaagcatagcgagaaaagagatacactcccacgtagtcgtttccagctgattaaaaccgtcaacaccatccgtttgtaccgtgattagggatggacaaagacatcgagcttcgcagagaatatggaggtcccacggatgcttctgtgccctgtgcca

SEQ ID NO: 17461 - DNA, 495 bp, Emericella nidulans; identical to SEQ ID NO: 16712

SEQ ID NO: 17462 - DNA, 496 bp, Emericella nidulans
tggttgcccaaggtgcgtcaagtggtggtctgagctcaaggcagaatggattccgtgtgcgacaatgctgctgtggccatgctaggcttgctttgacgtcgatacccagacgattctgtttaagcgatgaagtgggtgctttctatgttggttctttcctcagaagagtcagtttttatggctgttttggtctatgcgaatgtctatttgtccgtctatcagaccaggtctctttaactcttaaatcatagtcccaaaaggtggtttaaggtattcccacgtatataatgctcgaatgcaaatgtcggtatggaattgcctaaggacattacaatttctccaagatggcattgtcctcttcccagagtctgtaattatgaatcgaaggccttcctaacagcatatcataagggctgttctcgatgaccagaaactgggtcttatattgatgctggcccttgtagagatgccatttgacttgaatggtcccaagcgg

SEQ ID NO: 17463 - DNA, 497 bp, Emericella nidulans
gcaccctggaccttgcatacggacatagctgagcaaatagttggagccgtagcctgactccttgtacacaagccatcgcctctacagtacgggattagagtaaagggagatactaaattgctatgcaggtgcgatcacgcttcaggtcccattgaatctaactacaaaagtctacataatagcgagaattgtgcccctatcctaaggatttgagcgggcgtactggctaacgaagaaacagagtttgagcatcatatgtagagtacaatatcaaaacaaaatgtgccaagaataactcctcggacccatgcaatacatacaattgcaaggcctcccgtgcttgactttccattaggcaaagcatgctcttaccgacgggcgaacagcagagaagacctgtctttccaaggaaccatgtggctccgataaagcgaataagagcgacaaccgcattagaccacaaaagggcttggaagaaacgtgaagtacgctcagta

SEQ ID NO: 17464 - DNA, 497 bp, Emericella nidulans
cattcttccctaacttattcgatgtctcgggcatggatatatccggcttggtctaaggttcagattggtttccaacaatatctggaggtggtcttgttatagatattgtgtcaagcccaggtcagcggtatggatagggttaagaaatcgaggaattctgcagcactatagttgtttgtctaggcctatgagactgtagggtattaaggtcccattgggcaaggtcttgtatgacgcagctgtataaaacgtgaaaaagacaccagataactaatcgtaagtttcatgaaaatcatatccaatcatcattccgtctgtgagctatcccaggcgaaaacagagcggcggtccatgatgaagagcggagatgcatgctcttcgctgtctgaattcgggtgtagagtaacaatcggcaccgcttctagcataaacatcgacgtcgaagatgcttgctccataagctgggcagagaatatcctgcatcgcgttatcgggcg

SEQ ID NO: 17465 - DNA, 497 bp, Emericella nidulans
acagtaacaagttgacaactggaagtcacatcgtcatctgacttcacttgaagtgctttggtgggcctggaattactactaatagtgggcccggaagcaaagcgtgtctccgaactgaggctgcagccacactgctcggtggtctaaccacatctggtatgaagaaggcgcccagattgtggctcaagtttcaacacgtatacaaggatcttggtcgtaatatgtaggatatttttgtgcgcccaatcaataactgacagggtgttccgtccagggaggaagactcgactattctcgaaaggcgcaaacagcagcgcccgtcgtgcgctgcattgctgctggttcatctcttactgtgcttttcgcagctgaccaggaatcgggacaagggggattcattcccgtttgccactgacagcagtagaccgatgtgcgcttatctcagttagtcacgatcgcgggtgtgggatgtgaacaatcatattaatgtcagctcg

SEQ ID NO: 17466 - DNA, 497 bp, Emericella nidulans
ctaaactaattttcattagcggcctttctggatacgtgctgcgagggtcagaggctatcagagtccgtataaaatgggtgcataaatcgcaaacataaatggcataatattcatactcgtcgtctggatatataaattcaagccaaaccaaaaacagacttggggcagggagagtttgtgtgctctgccctaccctaaaacagtccacgcatcaatctgaaagacgcgaggcaatactgacaagttgagagagccaatctcagcaactgaagggatatcagcgatggggaataatgtacaggtgaagggtaatgatggtttggggatctgatcatgacaccgcacaaacaagatacataggaaaacgtgaagaacaaaagaaactcattcacaagtgaaacataaaatagcatgcggattagacgattcacgcatttccacaattccacctccatcccactcacagacttcggcatttatgcagccgcttgttgggg

SEQ ID NO: 17467 - DNA, 498 bp, Emericella nidulans
cgtaaggggtctattgtggtaagagatgatatgaggcatgcacgttacgcggcgtctatggcgttattctacgggcatattttggacggacaaaatatcggtagataaacctcccagaggttctgagttcgttcctatcattataataatatacagcatgtatgctcaattcaaccctgaccatatacatattttgcgcatttcattactttgtattcccatctatcgctgccgcatttccctgcctcgccaatttcgtgttctccgcctgcaacgccttgataaggctaagccactgcttccgctcacccttcaatctctcgcactctttcttcaggtgctcaacctccctcttcaaaacttctgtctcgtcgcgcgatcgtgccttatcctccttctccgcttctttccgatgcctcgcctcaatcttagccgcctctttgatctggtgccgctcaatcttggaaaggcgacggacgagcttggcttcttcccgga

SEQ ID NO: 17468 - DNA, 498 bp, Emericella nidulans
tctctgcctaatggcaactaccctccaaatatcaagaacttcaaagtgatatgcactacacagcaaaacgtgccaactatttgttcactccaaataaagaaaaatcgctagcatattcaagtgcattctcagtgattatacctgtgtcctctattttatggtttgcgaatagtcatgactataagcgtaatgtgcatgcgcggcgtgaccatctgagccacagccgcaagtaggtccagtatccggcttcatcgtcaacactgagggcgagtattctataagggcattaagcactacagtctaggataccgctgtgcatagacgtctttacaagcggtgtctgcagggaagctccatattggtgaccttggcggcgcagttggacagccctgattccagcactttctgagagggatgtccaacgttcccaagactgtcaaaagtccatgcatgaggactaagactgccttcttgcaggtcttcctactgaccaggacc

SEQ ID NO: 17469 - DNA, 499 bp, Emericella nidulans
ggggtagtttgttgatgatggtgaggcaaagaagaggaataatatgataccataaagtggactgcatgatatgacgaacttcctgacttcagttacttgggaatattctctaaaaagtcatttgggctatataaatagatgtcgttgaacggcgaaccagaccgtaatgaattatgattggactcctgcatacttcatgataatacctacctagtcctaccaaatcaccaaagcgtaaataagccggcgaaagagagcaaagtcaaccattctacctagcgagaaaaagtaacaggagttatttcgatcacgtttgaatgttgtcatgtcaaacgaaatccaaaccctgtgttggcgatcgaagggacggtgagtagagagagggacaactcgaaaaggatttgaagctcaagcaaaatcatcttcctcgggcccttcgattccgttttttactcgcaacaagatggttgtcttccacttgtctagcttgctgagctgg

SEQ ID NO: 17470 - DNA, 499 bp, Emericella nidulans
gccgtcctgaaatgtttcacaagatgagaccctgacattatatagtatacttgtatatatatctttcgagataggaagagagaagaataaggtagataggtgcggcgatatgatgtataacacgaagacacatcggacgatgagggatataaatgtgcagatgggtaaatacataaatagatacgatactccgtccattctaaatgcagcaatatcaaccaaaccaaaatcagagccggggattggtagatagagaggaacagggatatagaggaagcgaagaaaagatataagacggaaccaaagatagagagagaagaagcagtggacaaagggaatttgaaagcaaaccgctcatgattgcaagatgcaagactagtagcgctgaaaactaagtgaaataaaccgcgtcactaaaggggttcttcgcagagatatggatggaggcatgcatcaagacaaaattgcagacacaaaggaaatgagtagtggcgcccgg

SEQ ID NO: 17471 - DNA, 499 bp, Emericella nidulans
actggttatatagtttgccgtcgccaacggtctatagtatagatcttgtgctcgtcgtgtagagtcacatcttatattttgccgaaagaaaaaagattttggttctggcgtcgctacatacacattcttcttattcatctgtctatcctagtagttaagagtagctctgctcatcatgtagtcccaaagaatatctatatatagtacattgcgttcatagcctcgaccgacatccagatgttctagacccaaaaacatattgttacatttataccacctccttccccatctcccaaaacttcgtgttcgcatacgtcagacataaatcctccgatggaatctcagcagagtcggaggtcgagctcgtgttcaggctagtgattgcccgaacaatcttcccaacaacaatagtatgatcgtatacatcgaccacgctctctgggagaagtcgacactcaaatatgaatgggaagaagctggattccagtctagaggatcc

SEQ ID NO: 17472 - DNA, 499 bp, Emericella nidulans
gaaaaagaaaggacatcagatgacgctcttcaaaccccctgcagtatggatgcggagagctcattgtcccaaacgaaccggaaagagcggcttagctggctctagctagaacgcattcatgactactgctttaaagtactctaatcgtttaccttttgcttccgacttccatttaaagtcattatacagtagaaatcaaacacggggtcgtgattcaagttcagtatgccacttcaaaaaatcacatacattcagatcccgccgtttcttggcatgctttttcttcgacatgtgttttgccctgttgcatttccccatcatcaatacatcgtcgtacgatcaagcttgtaaccttctgaaagcacaagcttgatgctcatagttacagcccatcagttcaccccggaatttttgttagcagctttctcggcctcgtcattgccactaatgccgctactgacactatcaatcttagttacaggagccccatcaatggtgg

SEQ ID NO: 17473 - DNA, 499 bp, Emericella nidulans
ggcccaggcattcagggaggcatgttaccagcatgcctcaggggcacaccggcatgcgacactggcgaagccatggattttgcgtgagaaatgcgcgcaagaatgaaagcagtcgacaccagcagacagcagcgcgtctagcacagcaaagggtccagaagagtacggctcggtagattgaaacgagcattccaagtccctctactcaaagtttgggcaaagggatgaccccttgccggacatacagccgacgcgtctgcaggatttccccagaataccaggtccaggaacaggttcaggtacgagaacacgtccagtcatgttacaggtcggttcaggctaatgtcattatcgtccatctaccaagataatcataaatactgctagaatgtatcccgtcatcgacattccttccccatcggacggggaagaaacttcctatcaaggagttattctccagagccgatcagtccgtagaccgaaggcaactcgtcgccgt

SEQ ID NO: 17474 - DNA, 500 bp, Emericella nidulans
cagcttgcagcagtattgaactcagtgaacattacatcggcctattgcttttcattatagactccgtcgttcatacgtcgcgcaaggataaagaacaaccacgatggctcacaagggaaacattgctcgagtttacccaagaggataaatatatcatcaaagtacctatcgctcctattgaacgagataagctcccgcccctaatcaccaacgatcgcagacgtttctacaacagaaaacccatgccaaaaaaggataaaaaaataaacggacacggcccgctttgcgcctgtacaacctcacagccgccatcgccatacaagctcctctccacgtcaaacagcgacaattccgcatcccgtcgttgccccatttcgttattctcaccaaatgcgcaaacaatagacctgatctgcagcttcgttcgttcgaccacagatatcaagtttgcagtcagtctcattactgcgacttggtagcggcatcagcctgggccctga

SEQ ID NO: 17475 - DNA, 500 bp, Emericella nidulans
gtagatgaaacgaggcgtcattgagacaaaacagacatgtgaatatgcttttatagaaatgttaggcagatctgctgcaggggatagcatcataatcattcattcattgagtaaagaaatcctgcagcccatcattatcatgaaaattcgccacacacccaaacgccaacaatgctgaaaataaaaactaggtatatgtaccggaccaaacagaaagcgaaggagatcatgacgaaaatctatccaataggcaattaaggaagaatatcccttagcacctccttcgcactcgaactcaacgtctttgggaattcaacgttaacccgcacaatgagatcgcctcgttcgctgggcttctttgagattgtcatgcccagaccagggaacttttcttcgtacccaggcggcgtgggaccgggctttgagactctgagcgacttgccgtcaatggtacgcacgatgcgagtccaacctgtaagggcttctttgagggataggtc

SEQ ID NO: 17476 - DNA, 500 bp, Emericella nidulans
atataataatttcaactcttaccgaacaacgaagctgttggactgaaaaaatagagtgacgtgattatgttagtctatcatttagcgaaaccttacagtttcctttgcttaaagaattgattagagaggggatgtatgtacagtgagattaaaagacggtctcaataagccaataaatgtttgccggtgcccttttcaaccgtaaataaaatacaggtttcccactttaactgtgttctcttggtatttacattatcaagggctctctaacgacataggccagcttcgttacacgccatcgacgtcctacactgacagcatcaggtaaaaagaggacgtaactcttgctcccagttgaggtcttcaaacaacgtcataaaatccatctctgtatctccaagtaagccaccttcaccttctctagtttcatcggttacttgttcagacgtgtcgcctgggcgaggtgaaaggacaaaatcgaggacctgtcgaatatatga

SEQ ID NO: 17477 - DNA, 500 bp, Emericella nidulans
tgagttagaatacgctgtgaatggtagatgttacgctggaataatcacacattgggtatctagactcgtatagtaaatgccatgccaatgccaatgcggtgtaaataacacacagaaaatgcgtatgtcagatatagaaacaatgcaatcagagctcgccatcagtaatatgaagactgaaggcgagtggtatgggttattgctcgccatgcatgatgcatgataaagaccagacagaccgtctttaaaagaacaaacgggaaaaaaccaacgccaggcagaatgcctccctttccatatggaccgttctatctattcttttgcaaaccgaatgctcgctcactcgctgagaataacgcctgataaaaatgctttcgtggaaaaatgccggtgcattatgccgtccattcgtgtcggtttagacatggcccgttcccggggccggaagaaaatcgtggtaggtaatcattgtacgaaatcggcttgtaacgttctataag

SEQ ID NO: 17478 - DNA, 500 bp, Emericella nidulans
tattctcagcttcattgattccaacattgtgttgtggctgtaagaagctagcgtctacattgtcaaagaacaagacacttcaagaacgtacgtagtagattcaatagcgtagaataaatagcaagcctagccatcgccttaaatagcccgcctacaaaccaccagacaccgtgctgtaaccgacgaaccgaatatgcagacaataggaagagaacgaaacatcagggatagggggaactgaggaaactgaaggaagaagaacaagacgggacgagacaaacgaggcagaacgaaaccaaatatgcgaaccactccgcagcagaaaaaccatgaccatgtacgcaatgaggaatgagggggaaatgacaaggtagaagggagatcaatgagatatagatgagatgagaaagtcccggaaccggtcgtctatctctgcttttacctgccttctcgccttgttcgccgttaaaatgactaaccgtgaccgatggatggaaaga

SEQ ID NO: 17479 - DNA, 500 bp, Emericella nidulans
taagtttcttggatcttgaattgactactgatgttaagattgcttgtacattgcgcgccatgcgtaaagaggtccatgggccgccttcaaccacgcaccatatccaacataagtgatttggcttgaccgtggcttcgacacccacaactcagaccgctgagcggtcgtaacgaactcttcgcagctgtacccgattccgtctgtatgtacagactaggctagaccaagtagccttgttgaatttggaggtcagggtatgctcgggacgtcaggataagcccctcacccaccgtgagacttctgccttagacacgtcgatcaatcccagtcatcatcatcatcctccacagtaacgcccttcctaatactagacttcgttttgaagttcgacggccgctcatcctccgagtcatcgtcagccttcttcttcagccggatgtcactctccttgagcgcaccaacttcaatcaacatattctccaggtctacaaactcaatta

SEQ ID NO: 17480 - DNA, 500 bp, Emericella nidulans
ttcaaggagaaattccataccagatactttccatacaccatcttaacaagaataatatggatttgactgattaacgaagtttcaaaatttactgacaggataggtctgattcgcattaatccttcttcaaggggtgatagacctcctctatcccatctgcagtaataaccagcatctgtaggccatctccaacctcaatatgtctctccaccgcgcttgtaaacgcatctcgcacaagttgttccaccgtctctcttgacatcggctcaggtttcctagcttctagagcgtgtccctctccacttccaggaatatactggttcttcaagttgacctggttgtccaggaacggcataattaagctagacgcggctccagcagacctgcactgttcccgttcatatgagcctaccgggtcgtaaccgtacagcgcccccttgccctcttcgtctaagccggccaggattgcctgcacgtagtatggaaagaacctcttctgg

SEQ ID NO: 17481 - DNA, 500 bp, Emericella nidulans
tgtcagcagtaccgccgttacccggaattattgcagatccggtattatactgactgtgcagaactacatgtatcagtaatacaatggaagcttatgccgtatgaacggacaaatttttttttacatttaattcatatatgggtgattctcccatgacatatatactatctaggctcgcttgagactgatttgttgactcatgactgcactgcgcccggcatctccggccgcgagtagtggcgaggttcttgctgacattacgagtcagtcgacaccgaattcgagatggtaaccctactgcggcgtatagatacgatcaaaaccggcctgccatttagtcgttggtgtacagtcccgggaaaggcagaaaatcattcccgtcgggcttgatcctgttcggtttatttacccttctgccatgcattggcacattgcattcctggctggcggaggctcccaagcacaactcggaatcagaattgtaggacggagaagttgaa

SEQ ID NO: 17482 - DNA, 500 bp, Emericella nidulans
caccgctaagaaggatgacttgaagtgtttcagggttcagattgctacctacggactgtatactcgtacgcggcacggtaccgctcacatcattccgctgacaatggtcagaaggggccctatatgccgcccggcctcattccaacattgggactgtcctataataccaccaacaggtcgtgtcgagcctccatccgatgcgtccgtctgcagtagagacagccacaatagcacccatcctttgccgtaaccacgcgggtattctttattctttcaatcaacgaagagccaaagccagaaccgaactccgagccgggagagatgtcaataatccgtcagtgatgttcgaagccgacaattaactgagcagaacgaggatgacgctgtcgcctcgtaggaacctagtaacgacgccatcagcacggtcttctcttaacaaggtggagtagtaagtacatcttgctgatgaatcgatccttgttcaccggtcgtcccttgcc

SEQ ID NO: 17483 - DNA, 501 bp, Emericella nidulans
ctcacggcatccgtcgaccagcaacatggtctggtcgagtttggatgcaagactgttttctttcaggggctgggccccgctgcaggggggaagcttccaatgcctgggcccgtggtatggctgcatgagcaatatgcgaaagcccttttggcgtctggtgtaagttatgtgtgtatgtgaattctactataagataggctcttattgaagtgcgtattcgagccagaacgttcgggtaggcatataccagatagcccacagtcaatcaaggcgatgaaggtgatgggtctgttgcatctttctgtcatcaagcgattcgccccagctgtagcggccctaactggaactcagctggacccttgtatgatgtcagtttgttggacgaactgcataacctgaccgatttcctggacgaggaaggcgcctggttaggactgacatgtggaaattgtgggctgctatttgcaaatagaatgtgagagcctgtacgttgtaggtaca

SEQ ID NO: 17484 - DNA, 505 bp, Emericella nidulans
ccccggcgtcccgatgttatcctcgccgctgattgtgtgtattttgagcctgcctttccactcttgatatcgacactgcgcgatcttttgggtcctgattccgtctgctatttctgtttcaagaaacgtagaagggcagaccttcggttcttaaagctagcaaagagagcatttcaggtcaccgagatcgatgatgaccctgaagccggaacatacaagcgcgaaaatatcaacctgtacacaatacgatcaaagcccggtacagggcatcattgtatcgacgggcgcgacactgcttaaatccaaatgacatgataaaatatttgtggatgagagaaaagtcagaagttgctgaatttctctaatgaacaaatatcagatatggtagaaatctagagttttatcgcatgggccccattcctatcaactgtcccaacaatcttactcccattaatgttcatcatgtcgccttctttcccaatcaatttgaccccggccttcttca

SEQ ID NO: 17485 - DNA, 513 bp, Emericella nidulans
taaaaggaggatatcattcagttacatctagccaataatcaataccacatgcatccatgatcccagcccagactctcttgctcgaagtgggcgggtagccaatcgtaagtatatgacaaaggaaagtacaaaagaaaggccacggtatcattacctcctgggaggtggacccaagccaccaccagaatagtagcgcttaactatcaataaaagtcgagttgaagccgcttgcgggttccgtatgatcagcctgctgtactcgtgatctccgaacccagtccgctgtcggcggggtgtccgtacagcaccattttcgacgtttcttcgtcgagtgcttcttgaggaacggccgcatgatcctcaggctcatctgctttagagctctgagcctcatcgtccttgtccggttcctcgtgttcgtctttcgccattgctcggtcttcctcttcttccgccacatccgcaacagactcaaggtttctagtactggcggtactaacctgccggttcgtg

SEQ ID NO: 17486 - DNA, 513 bp, Emericella nidulans
tttggccagggcaggagacattaagggagaacttgttatggtatgcatgtttcgagtttctttgatgatgaacgtatggctaacgggcatcctgcggacagattttcggcaagaatgacacgcatgttcccccagaaggacgggacttgattcgctcgacgctccatgagaaaggcgtgctgtttagcttttatgaggttgcttgggcgcagcgtaagttgtgactatctgtcatccgccggtgcactatctcagaccaagctgacaccaacaacagacgcgtttatccgcgacgagctcagcaaaggccgctacgaccctgccatcagcaaggtgtgtttcgaaatgctcctcgagctatttggacggacactgaagctggaccttggcgatcatgatgggaaggaggtcaaggttgacgatgtttgttagcatgtcagtaaatctcctagcctaggtatctaggtagaggcgtcaaaggccaatctcatcaggtcaggtcagctacggcca

SEQ ID NO: 17487 - DNA, 515 bp, Emericella nidulans
tcggccacaactctcccctcagtttccaaaccagcttccatctgtgctccaagcccgtctactttcaacagagaccaaagcagcaattgataaagctgttgcatcggctccggtggttcttttcatgaagggcactccggaaactccgcagtgcgggttctctcgcgcaagcatccagattttgggtttacaaggtgttgatcccaagaaattcgtagcgtttaacgtgctagaggatccggagctgcgtcaaggtatgtctgtcatcttgaatgttctgcataactttggcttagtcgtgcttttctacaggtatcaaggagtactcggactggcctacgattccacaattatacctgaacaaggagtttattggtgggtgtgatattctgatgtcaatgcatcagaatggcgaactttcgaagctcttagaagagaagggtgtcctagttgctgaatagattgaggttatgaaatgccctgtattttaagtttcgtgtgctgttaatgtatat

SEQ ID NO: 17488 - DNA, 521 bp, Emericella nidulans
tgtttataaaccaagaaactatgacaggctactatcttttattcaaaagaatatttactcttgttgagaaagtaacaggtcaacctgtggaatttaattctatctatagaaatagaatatctggaattattattaacatggacacaaaacaatatgctggtaggtcaattattaatcagccacttgggaattacttgataagtagttaacaactagctaggcctggcttgatatcttaaggagattaatccctactattgttccctattatggcaactacagagtattattattttctgccaggtttattttttctggactattactaaggttgttggtaataataataaaggaacaggcgtgtggagttgcatggcaagtctggttaattataaatcagaagaggattatgatcagttatgtaacttacttgcaggtaagtatttcataaatatttggtaggtacttattaataatttatcctagtatataaggacccaaaaattcagaattaggctctc

SEQ ID NO: 17489 - DNA, 522 bp, Emericella nidulans
taggccgcggagtccgtatggatctcagctaggcgttgtattcatctttcttgatctgtctataaacatgtctacaagatatagagttatctgcagtacccttagaagaaagcccagagtaagggtggagtcccgagccatgacatctctggctggcctgttgcatgctacggatcttatatccgcaaccgaatatcgccccatagggatctcaaaatcgccatcaggactcccattcaacaagctgtcaacgtcacgttcaggcggacataacttttctttatcctacctgttcatgtactcctctgttagccgcctgcctcctcaaaagaagtcacgcgcgttcgttgataacactcataccgtccatggtaatgactggtatgaacttttggcgagaaaacactgccagtcactcgaagttcggctgttattccgcgcgacgccttttgtggcatcgtcaacgtacacgttcccgtcgtaacagctgactttttgccgattctgctgccaccaggtgcg

SEQ ID NO: 17490 - DNA, 524 bp, Emericella nidulans
ggatggctattgatgaattgattgagccgtggttattctagattgctgcaggcgctcgaggtgaatagatcgtcttgtatttgatacacatacggtgtagtttgatgctgaagaaaaccaagtgcgcgcagctgtatgttagggtagatttacacatgcatgcatgcaatatgtacaggctcaactcgtggcctttgactcggctcgactgactttcaactacgccgctccagtgtagccaagactctccaattccttgcgcaccgagtcctcggtctggattttcttcatctgtgtatcctccaacttttcactccggccaaacgcatcttcaggtcctcgatcgcgcggattttcttcaagagtccgcgaattttcttatcctggacagtgggagcaccctcctcgacgggctccggagtcgcagctgcagctggagcagccttggtgccgtttggctgcttctgctgctgctgtccgttcttacgagctccctccttcttcttctccccaggcgggctagg

SEQ ID NO: 17491 - DNA, 526 bp, Emericella nidulans
acgggttgggctggcgctattctctgcatggcgcaggtctggtatatcgggccgctggcaaacttggttggagaatatggtgctgatgtaagttccccgttgtcctttgcgtcataaagttggatttagagatcgtctaacaaatattatccagatggggaactacgtgggtttttcgtgggctgctattgtctacccgcctcttcgctatctagaacgaaggcagtttggtcggtagatatatgtatctgcccgtctgtgctaaggagtcactttcaatacaccgattcagtatctagcccgcatggctgggcgctgtatattgatcggacagtatccctttaatataggacgaaagcacttggaggaaaggaacgggtacagcatttgaaggaagccactcaggtttcaaggttactagctgtcactgtccttttttattactacgcgtcaacagtcgtcctctcagtacctaaaaatatcacccgcgcagaaaattgcacatgatacaggatgtttagagctt

SEQ ID NO: 17492 - DNA, 528 bp, Emericella nidulans
gccgggtggacaagactcccaggtgactgttagggattctacaagccttcgagcgaacttccttctgcaaactgccgatgatcctcctgcattcattgtcgtcaagaccaatgggtggttgacaggcgcgaaagatgtgctggataagctcaatgaccctcaacttgcggatgggattaatgccaactcatataaataccgcgttaacctctccatggaaactggagatgaccgttataccttccttaacaacttgatgtgggttgccagtggctgccgcagaggccaagaaagtcagtcaccattcaattattcccgacgggcgaatctgaatatgctaaccagctcgttacagttattcttgatgcattccgcgtcaactaactactgctgccaccgccacgattgtatctgtttccgacctctctgattttctttccgtttcgagcgagcactggattgattgtttatggggcaaaaccaagtcttcggcctgttttatatcttgactaacctacagtcatctgt

SEQ ID NO: 17493 - DNA, 529 bp, Emericella nidulans
ggcactcattaccggcggagagtacgttctctgtacctgttctgtttcgcggttctattgctaacaagtctacggcgctgtacagctccggcattggccgctccgtcgcagccctgtacgccaaagaaggcgctgacataacaatcgtctacctccctgttgaagaagaagacgcgcaagagacaaaaagactcgttgaggccgaaggacgccaatgcctgctgctgagcggggacctccgcgaccgggggttctgcaagcaggccgtcgattcgcacgtacagaaatatggacacatcaacatcctagttaacaatgcctcgcagcaattcagctgtcccgacctggcgcagataaacctcgacaccgtcactgatgtctttcagacaaatatcatccagatgtttgcgatgacgaagttttccctcccgcatatgagcaaaggagatagtatcatcaataatacttcggtcacagcgttcagagggacaggtagcatggtggattatgcatcgaccaagggggcgat

SEQ ID NO: 17494 - DNA, 530 bp, Emericella nidulans
tcaccaagaagcggtcgtggctttggttatgaaataagttattgcaaagctacaagtttacatagtccacacatctgtacttagaagggcatcgacatacttagcattgaacacggctaaggcatgccaacaggcaaaatgccagtgaagtgattatacttgtgctgcacgttggttgaaggagcatcaacgtaattcactatccgaaagtagagctaacgcagtacagttctcctcgcatactatgatgacttgacgctcccaagtcattaagaagcgaatctctccaactaactttgttttccgttgagatagaactgattttaccctccgcgagaaacttagtttttccatctttgtttagcctgcacctcgctccgcggtcatggagacagtgacgaggagttgcacatcaaggcttatttccgccctactgtggtgcgtcgtagacatcatacttgtatctggcatcgctgctgcgcttttcaggggcgtcgtagctgtcatacttgtatctggcatcgctgctg

SEQ ID NO: 17495 - DNA, 531 bp, Emericella nidulans
tgtcacggccagcgaatttggtggacagatattattcttcctacgaagcaacctatgtatctcgaccggatgggaaattgacatacaataagcaaaatacgaatgaagaaaactgcacactccaccgtcttccagctcaatgatagagccagtgaagggcagatgttattgatattccactgcaaccatgttcacgataccggcaggcaacatgccagcagcaccctgaatgttgcgaaagcgccaacaggaggtattctgggtaaccaactaaaattaggacggaatggaacggtattagcgtgtgtggtgtccaggtaatggtaagagttataactcatatggaaggcatgcgacgtacatactccgtaaagatagtattatatgttatctctgaggggctaaaaataaaactgataggttttgcgaaacgcgtgggataattgataatgctagaaatcccagactcctgtcatatgcatttgaacgaattcgaatccctcaaagaatgataatgcccctgcggagcgg

SEQ ID NO: 17496 - DNA, 532 bp, Emericella nidulans
tgcgagatcctgaaaagaaaatatagaaggtgaacaatacgcgctgcaactcatgaggtatatacggatacgcaaggtattaaatcctctagtattagcgagcttataaacttttcgccgacagtctatccacatgcccgatctaatccgtccatctcgtcatcacgatgcgtggctgcagcttgatccagtacacagcatctcgtatgaaatgggttcatcaagaaacagataaaatgagtatcgttttactgccgtagcttcatggattggagaaaaaaggtataatagagtaacccgacaaaattgagtaattcatggcgattatcgtctcactgactgagaagggtggattattcgacgggccgcctactgcttgtcggcatccgcgttttcgggggcggcttcgccctggttaggagcgtccttcatttcagcgtcggggttctctgctttcttagcctcttcggcggccttcttggcctcctcctcggccttgcgcttagcctcttcctcagcacgcttcttcgca

SEQ ID NO: 17497 - DNA, 537 bp, Emericella nidulans
aaggctgacctaaatcagtcgattctctgctctgaattcgtatctgtgttatacacaaaccacaatgtccgccgatgagcaggtagcgaaggaggaggtgttccagaaaccgggagaccttgtcgaaagaaacgaagaaactggtgtcatgcaagtggagagcttgtgtatgaactgtcatgaaaatgtaggttctcccaagtataaaatcaagaataccctctaacagccctcagggaataactagacttttactcgtccgcgtccctttcttccgcgacattatcctcgagtcgtttgaatgcgaacactgtcacttcaaggacaactctgtcaagtccgccggacagattcaggagaagggctctgtatacactctcgatgtcgaaaacgaagaggatatgcagcgccaggttatccgaagcgatgtctccattttcaaggttgagtcgctgggtatcgagatgcccaagggtgagagtcagttgacgactgtggagggcgttattcaaaagatccacgagtcgctctccagcg

SEQ ID NO: 17498 - DNA, 542 bp, Emericella nidulans
gcccggccagccgttaactcagcagatctatatcccgaacgatatggttggcgctattatcggtaagggaggcgctaagattaacgaaattcgacaccttagtggcagtgtgatcaagatcaatgagccacaggaaaatagcaacgagcgtctggtaaccatcactggtactcaggaatgcaatcagatggcgctgtacatgctctactcaagacttggttagttccgcttctactctctttacttggcttccttgtttaaccagctgtattacagaaagtgaaaagcaccgcatttagaccgctagtagtttgtgtgcgtgttttcccatttgcgttgtctatgaagagcttgggctatctgtattccgacaaaaattcgtttgccatggtggtggtgatcttggtggtttcattagtggccttgcatattttctgttgtactattgaaaagcgctccctcgaagcttcagccgtatcgtgctcgatttgaacagactatatgtaacttgttgttgcgcataattatggatttgcttttct

SEQ ID NO: 17499 - DNA, 549 bp, Emericella nidulans
gaccggtcagcacggcttcggctacaagggctctcccttccaccgtgtcattccccagttcatgctccagggtggtgacttcacccgccagaacgtgagtcgcagtctctctgggaaccgcgagatgcagagattctaaattttggctttttagggcactggcggcaagtccatctacggtgagaagttcgaggacgagaacttcacactcaagcacgacaggccttacctcctctccatggccaacgccggccgcaacaccaacggctctcagttcttcatcacggtgagtcgcgccattgataccggcagaagaagatgctaatgcgatactttctagaccgtcaagacttcatggctcgacggtgcccacgtcgtcttcggcgaggttgttaagggccaggaggtcgtcgatgctgttgagaagctcggctcccagagcggtgccaccaagaagaaggtcgtcatctctaacagcggtaccctctaagcggatcgtggaggaactgaaatcatctgagaaatgaaatgagcttctgcgggccggta

SEQ ID NO: 17500 - DNA, 553 bp, Emericella nidulans
caccaaggcccccaagatccagcgtctggtgactccccagcgtctccagcgcaacgtcacaggattgctctcaagcgccgccgcctgaggctgcccgcgaactgcgtaagtaaactcgaccagctatcatcgtacgatttagctaacatatacagtaacgactacgccaagctcctcgccagccgcgtccacgaagagaaggccaagaaggacgagctccgcaagcgacgggcgtcttccatgaggaagtagagggtgttttggtttctattctttctttctccgaggggtttctaatggtcgggttacgtacgtctctctgttatggctagggaaaggaaaggaaatgcacaaaaaggattaagaaatctcaagacatcgacggtcatacctacctcctatgttcactgcatctttcttttcatattctagtaaaaagaaacatcagggtagcgtgtcgcatcgagtcggagcaagatactcttttggagggaagagtgtcttttttccggagctcagggagaagaaaggagcaaacgaacgaagcaagtcg

SEQ ID NO: 17501 - DNA, 555 bp, Emericella nidulans
cgccccacagatgccgaactcatccagcgatataatccggagctccgagagcgcagtatgcgggaaggtgaccggcgcgcacaagaattcgacgactatgtcacaaaattgaaggaatggtccaagtctgataagtcgagtgcgtctctgtttatcaacccatgagctgagttcgtatagctgacgttggtgggtatagtttggttcgcggcaaaagagatggaggagaagaggcttgccgagcagcaggctattcagaaccaaaccaaggagcaagctaggatacagagagaggagatgaggaaggagttgatgggcgaaaaataggagttctcgaaaggtgtcgtccgtccggtctaaagaaggttggactggaaaggcgtggacttaaagaagcgatgtatcttgcataaaatcagcagttgaaatgacggaatttgtacggcgctggcgcggttcaactggtaagtgggaaattatcttatatgtattcatagcttgagataatgtaaagagtcccagctcatttgtcaacatgtgctgtgttctacgtgg

SEQ ID NO: 17502 - DNA, 562 bp, Emericella nidulans
tgcgacgacagcagcggattgagcttgtcaagaaggagtttgataagagcccggagaacccgttcaaccaggtgcatgttgcgtttgatgcgtcgaaggaggagattgcggctgtgagggaggcagagaggaagaagactgaggcgagactcacgaggtagatgatttgtttacataatgattgtgttttatacccaggttttagctgaggattggaaggactggaaagaagaggtggatcttttatatagataggttaactgggtaaccaacgtgctgccactatcttggcccgaagagtaaacatgcaaattgatagccagaaaatagcgaggaaaaatgaaggtatcatatgccatgcaatctaaatatccaatgaagagaggacccagttgtaggggaagggaaactgaacgccatctatcccatcaccgcacgcacatcccatacataaacgctctcatcccacccaacgcttgcgcaccacccctcgctcccaaaaagacaccaatccacgcccgtcacaaattctgtatgtcggttcatccttcccagctccgcg

SEQ ID NO: 17503 - DNA, 566 bp, Emericella nidulans; identical to SEQ ID NO: 16747

SEQ ID NO: 17504 - DNA, 570 bp, Emericella nidulans
tccagtgggagtctgacttccttgcttacctcaagagcaaccaccccgaggtccaggagaccattgagaaggagggccaggtcagcaaggagcttgaggctaagctgaaggacatcatccccagcttcaacaagtccttcaacgcataggtgagcaagcgacatacttgtcgattagcctaccatgtactgtttcaatttcctgactctgtgtgtatagacaagatagcttgtacaattgactccactgttttgttcttctcttcgcctaagcttcaggttggttttggacaccaagacctaatgtatctgtagctgtggagcaaacaaaccggtgggccgagagcagggccaaaaaatatgaaataatatcctgtacgtttagatgtttttgcgcgacagaggatggcatcagacagaacgactgagtgatggcaaatcccatggaacacggagttgcatactctttggttggtcttcggctgggattcctttgtctacatatatgcactcgaatatgatttcctttgtttctatacctatatctcaatgaaagcattgtctgcctttc

SEQ ID NO: 17505 - DNA, 572 bp, Emericella nidulans
tagttagaaggagaaggggtgtgtcgcaaggagaatttgcggaagaattttgattgggatgatgacggttggctgactatgcctctctcaattttataggagtccactctccacctcgtcctccgtcttcgtggtggtatcatcgagccgtcgctcaaggccctcgcttccaagtacaactgcgagaagaacatctgccgcaagtgctacgtacgtctaccggattaccactcgactcagttccatcttcgacgaaggatttgagaactaatactagaataggctcgtctccctccccgtgctaccaactgccgtaagaggaagtgcggtcactccaaccagttgcgccccaagaagaagctcaaataaacgactcgttcatgcttacgtttttttctgcgttgctggtgcggaagggtgtgattgtgatgagccggattgtaacgctaaaaaggttcatttttttacaagcggcgttgaaatgctgaagaaacatcagaagagctggagtcgatacattttacatggctactctcggaaccagttgcagtcaatgaaacaattgtaaaatc

SEQ ID NO: 17506 - DNA, 574 bp, Emericella nidulans
tgaacatctgaatatcaaggtcaccgacaacaacaacgaggtttttttcaagattaagcgaacaactaccctgaaaaagctcatggatgcattctgtgaccgtcaagggaaacagccgtcaacagttcgtttccttttcgatggaacgcgcgtacgcccagaagatacaccagacacggtacgtcttgtattgatcttccgtatactcatttccttggactcaaatcaaaatttactatttggttaattctgctaacatgcttgtctacaccctagctcgacatggccgatggtgatacccttgaagttcaccaggagcaaatcggcggtggtctctaatccaccagagtccggtttccctcctgtccttcccgcgaaatctttgtcggtgtcctttttctggcgcatgggtgattgagttggcaataaacctgactgggcaggctttctatgttgcgaggagtgtcacgaatgggttgagataaatggcaggtggcagcttgtctgcatattatattgctgccgcttctgccatcttccttgttaggaggtatcatatgttagtcccttttgt

SEQ ID NO: 17507 - DNA, 583 bp, Emericella nidulans
gcaatgcccacctcgtcgatcgggtaccctcaatcctcgagagatataccgatgccgcgcatgtatgcggccgtatccagctcacgccgattgcgcgagaaatgaggcgagagatctgtcatgtccacgggacaagcgatcactcggtgcatgttactctgtctccagctgactgtacgcaggcgccaggcgcccctttatccccacattacttatccccggcacttatgatgaagttcggatgaactgatgaaggcaggtaaacgagtcatcgacgctggctggggccagagattcccgctcgccggctcaagcatcctcaggaatgtcaccttcgggaggctgggaatcctgcctaccgagtatttgttcatttatgcgcccagaaacgaaaaggagatcgaggtggtgttgaggattattaaggcgagtgtgcagtatgtgacgggagcccgcgatgtgcggtagttttgtattggcagtaaaaagaaagaggcactgtttgccgtctctcgactcagtgtacaagtagagcgaacggacatcttccctcatccgaatatagccgtgcaatgcctgaccg

SEQ ID NO: 17508 - DNA, 602 bp, Emericella nidulans
tagcaagcgagatcagagtgaatgcggtaaggaatatcgccaaaatgatctgcgcgagtccagcgacctagaacaatgacaccactagctaagtgagttctgcacgatgtgtggtcgagccaataatgccacccttactctgcctatgacgccaaacgcgtcaatacgtcactccgtggtcacctacaaaaacctgcccaagcgagatggtcttcaagatttttatatcatctcgtctagcctcaactaaggcttcatcaatccagtatcagcatctgctcataatagttaaccttgtcgaaacagtacgagatatcaagactgaacccgaacgatgaagctacaactagcctcctggctggtgtgtgctcttgcaaccgctgaggcgttggagcttccaactggttcagcaaagctggtgggcatctcgagactttccagtgcttaggctaaaccactaacactctccttagtctacaacaaatggcacgagactgagttggaacgctggcttgctgatcatggtactgacacatcctcctcattctattgcagaaagcttactgttgtctcagacattccatacccttcacccgctgacc

SEQ ID NO: 17509 - DNA, 611 bp, Emericella nidulans
accccttcgatgcccgctgttctgtctcaatcccatcaacagctcaatcaatcaagtcaaaagtcttctaatccatcaaacctcaaagaaccgtcttccagaccaacttctcaatcaaaatgcaattctccgccatcgtcctcagtgccgtcgctctcttcggctctatgacctttgccgctcccgctcctgctcctgacgcagagctcatggctcgctcttcgtgccagcttggtggtatctttggtgccggtgatgctgcctgcagcgcttctgtatgttcatatacctatctaccaatggcatcttcgaacaaaccgtttgctaaccgatacacagtgcatcagggctggaacctaccacggcggttactgcaacgacaagcagtaagatatcccccttatcctcactgtctgatgtatactgactgagacttttagggtctgcatctgcacccactagattgatgcatgcctgagtgcgaaaaatatggccatggatagggctcgcaactgaatatggtggaatcatggtggctaagggtcagaagtggtgtttttagtttctacctctatcattcgtttgcaataaacttcactttgtttcgctat

SEQ ID NO: 17510 - DNA, 612 bp, Emericella nidulans
aggtgcgggccaggttctgaatggccttgcttacttagtgtcgcaagacttgcgacacacttcgttgggctgctccgacattttgatgaacactaatggcgttgtcaaaatcggtatcagtcaaaaccctcaacggtatctcctgcagataaggatatgttctaattaaaaccaccaggatgcctagagaaatgtgttctaagggatcaaaatgaatcccataaagctgaactcgtttctgtcgggaatatcacaatggagctgttgcagaagtatgtcaaaaacgaaggcagagtcggtattgacaaactcgatcgctggtcttcggattccgtcgccgttagtttcctttcagccacaacttccgccaactctataaaaactctcatggaggtatgtttcccttaatttataggaaaatggtgcactcacatacgtttcgcttcaagcatcacctaataagcaaaatgcatttctgcaaggaggaactaatcggcctcgcgtggtttgcactccattcgacgagaacattttggtcttatgtcccaccggcaaaagagaaacggctagcttcgtgagctgctggattaaattgttacttcgtttgtctcg

SEQ ID NO: 17511 - DNA, 617 bp, Emericella nidulans
ccgccgaaacctctgctgaactaaatgtggcggatttcgctactccagtcgaagccagggacatttcccccgaagcgctgggtctcgtgaagcgcgccgtgcgtgctatattgtcaattctagctccggcactgtcaattgccgttctggccctggattcgactacggtgtcgtgggaagtgtcactgttggatatagctatccattcaattgctacaagtcgggtgactgctacgaggggaactggttagagccctcaagcttgttttttatcaatagtagtctttaggattgctgacaggaacttaattagcacctgggatcaggttcccttgtccggtggtggtgtttgctacgtcaatggctactatactgatagcaagtgtacagttggtaagacagataacttgttccggtgaaatcttctactgacatatcgctagctgctctcggaaaatgctgaatacctggtagccaatgtgttataggtggaatggaatgacacacactggggccgtttctgggagattattttaggggaagctgcgagaacgttgacatttcgatgtgcatgtctagtctaggatctagcagaactgaaataattcaacggtcat

SEQ ID NO: 17512 - DNA, 626 bp, Emericella nidulans
cgctgcaatgctgatgagggagccaaagagctacgaagcgaaagtgaaaggtttgctcttaaacgatacacctgccctacaagaagcattctgaccttttgcacagagtacgtggcgaaatatgccagtaaagacgccgttgacgacgccggggaggacacagagtcagaagacgagttgagctctgccggtagctatgagtcggacggagaagagcccgccgggaggttggacgacgtttgaagcgtccagcatttattggcatgcctgattttcgcgacatttccaggtctgttctatatactacttcatcatctcgttacggtcttatagttcttgctgggtttagtctttatggcgttattgacgggggagttttggcaatcagttcgggagccagagtctaatgggtatacgtcacgtcaacactggtgcacttggcgagttgaacctcatgttctatggggctccttcaaccctacatttgttttctatatcatttgctcctgcgatcattgtctttgtggggttcctgatgctttacgtctccaatcataacatcactcgcctatttaatggaatctgctgtttctacctagtctacttggaaggcccatacttaccat

SEQ ID NO: 17513 - DNA, 633 bp, Emericella nidulans
ccgtcggcagtctccgctttcctagcaggcgtcaaacgctcaacaggcctcacgtaaatcccccctccttcccttctcatccgcgcaaaaaagcaccaaaaccgtcccctctcgctttccgatgtttgttctatacaatttatagaagaaagaaaagctaacacctgcaccccgcgcgcaccccggccttctggcagggagcaatgcgtggggagtccaatcagccccagtctggactccgacaagatcaccgataacaaggacttcaagaagtggattgacaactacctgggtgtcggcgaatgggtgatggaccagtcaatcgcggtttttgggagcacgagctattttgagaggaagcggtgatacaacttccaactgttttcttggtcatctttgtggatgggaggatcatgtgtactgaagagacggcatgtcggtgaccacttgttggacccaggacggttccatccccgctacgctgatcatgttgatgttcctgtgctgcgacatgcaaattggcgttagggaatgctgttattcttatctttaccttataccatacattgagtgaacttggtgagatgaaacattcaaggatatagcttgcatatgagtcaccgtcacgggctg

SEQ ID NO: 17514 - DNA, 761 bp, Emericella nidulans
tggcctgggtgtttcgacctggggttcgtgaagacagacgttcgacactgcgtggacaaactggtaaaccatagtacctgtccctgcagcaactctgtcggcccaaaagcagctggtcagcagccttgttgttctcccggcctacgtaggagtcagtctcgcagacggtgcggcgtgccaattatccctatttttcacgtatgttctgtatccgaccttgcgttgggacgaaatggtacccctgtgctggcaccgaggaaaccgggcacggctatggtcgatagacgcaggagttttacagttaggatgtgtttacgggcttttccataatcagatgctcaggtagatactatctcttaaccaagttcgaataagacacagtcgtaatggcagtgacaaagatagcaatgaagacggcgaaaaagaaacatgctgatataaacgctgcatactcatgtatatcctaacagatatcgtcgtaaaggtcgtcataaaatcatctcaggtaatcaaagccaacaacgacgagccctacctccacccaaaactccagggagaatgattgtgaaagcaccaaaatgagcggatatagagaaaccccggtaaacgccagctctttaatcttaggaaccaatgggtaagtaggtattaggacatgtgcatggccaaatccaaagtgaacgcccgttgcgggaaaacaaagaataaacaaaactcaagacaccactgacatgaacaaagacattttcgtggacaactca

SEQ ID NO: 17515 - DNA, 511 bp, Emericella nidulans
aatgcaataaacggccatttgcagctgttgacagaaatcgcatttccaaacgattaagcccgatccgtttccctagattgctgtactataggtaaaagaagaacagatcaaatttttttcattggatatatccttcgcaaggggtaccgggacatgaaatcgtgaaacaatcccaacccctaacttccgttcgaacccattcgcgccgcttccctagattgcatttactctcgaggacaccgcctcatcgcatcgcagcatcatcgacgtcgactcgcttagaacttggagaaagccttgacggccttgccggtgcggggcaggacacggaggacgttgaagcggacctgatgatcagaaagtcagaattcgttcgttcgcatataagatggaatatattggattgagaagtatgaatgttagggtcctgcaggtatcacgtacagtcttgctgagggggcggcactggccgacggtgacccagtcaccttcctcaacacggaaagcggga

SEQ ID NO: 17516 - DNA, 689 bp, Emericella nidulans
tgcggcaaaaaataaaagacctttagctggtagctagcattgagatatgatcattgctcaccgcgaaagcctcagttagtacgtccgggtgcagtgtagccgttgtccggcagatacaggtgtcgttgcgctccattcttcgtcaagactaccatcctgatcacgccgcccgagctgccatcccacttgattgcctcccgcagtgcccctctgacaaactcaacaccctcttcttcagtcatgttctctttccagttcgcgtcacagtaaccgtagatgtaagtcgacccggacccgccgatggagtatgcctgcttgtgcagcgatccacccagcggtatcgaatacacttggccgccgtgccggggatcgtagcccgcgatgattattccggcacttgatgcgcaagttaatcaaacaatgcattctgagatggcacaagaatggcataccttagcatgtccttgttctcatagcatagctcctggaacagcgcggctgcaacctgtgtgctgggcggctcgttattgacgatggagtacatattcaggtggtaggagacaatgtccgccacggcctgtgtatctgcggcggagccagatcggcagcaccaaatggtatcatttacttgcgtcaatttatcggtgactcgattggcgatgtaagctccagtcgttgttcgactgtcc

SEQ ID NO: 17517 - DNA, 444 bp, Emericella nidulans
agacaggtagtacctacagaccaggtactgcagactcttacattcaggcggactggccacacgtggcgctttgctgcagattcaaacaccaatttccggctatgttcagaacattgaagagaactccagagctctaccgacgggaagcaggcggcttgatgatgatcgtccgtgcgttgtgttctgaatgctgatatcgagcattccaaggcttccatgtctctcgtacaacttgttattgacgcccggaatcctgcctccctttgggcgccagtaacacccgtcccccagtgcaactaaccaggcggtaaatttcctagagttgcacgttactggatgactcgacttcaagaacgattcaagtcaaaagacggcctctggactgagtaagttctcgtatctttcctttcttaaccgctcgcattctggtgttttggctatctg

SEQ ID NO: 17518 - DNA, 651 bp, Emericella nidulans
aatgtgcaaatggtcgagctcgccgagtggctcgcgtcgcagaaccgtccccgtacagacgtgcagatgctccgcattgaccagctcgctgagctaggatgctgctgcttctgctcgatcctgtacattgccaatgatgcttttattgccgcgaaccctgaaaaggttaagaagttcatgaacgccgttaagcgtgccactgactatgtccttgctgagccggcgaaggcgtacgaggagtacgttgacatgaagcccatcatgggaactcctgtcaacagaaagatctttgagcgctcgtttgcgtactttagccgcgacttgaagaacgttcagcgcgactggaacaaggttacgaactacggcaagcggttgggaatcttggatgccgagttcgtgccgaactacacgaacgagtacctttcttggactctggacaaggattcgactgatccgctcggtgatcagaagcggatggccaaattgcaggagcaggttgctgctgaaggcggttttcaccggctggaggtggcttctgcctagaagctttagtatgaaggctgcctaagtcgatcagccagcaagcagtgcatagtttgtcgtagtcactctttaagtcaataattatcatgattatgcttttgattcaaa

SEQ ID NO: 17519 - DNA, 233 bp, Emericella nidulans
tcaggacgtacagctgtataattcggcgcagcgcaatgagcaatctatgcgctagactcatgccaacgactcgacggcaaggcgctttacaaagtgtccattaccagtttacctactatatctatatgatacccactgtatttaatggttgcatcgccctacaaaggaggaggctcagaaggttttaccggctttcctgtatataagcacatacagtcaaacatattcgatcc

SEQ ID NO: 17520 - DNA, 167 bp, Emericella nidulans
ttggttgttgcgcctcggcgcccaagtatgcttctagattattattcatgtgggaaatattcacaaaagaaaagaggaccgagtagtgcccgcgctgaaataccatattccaaaacgccgcactccagaccagtagtacgcctgaacaaaaccgagatacccagcag

SEQ ID NO: 17521 - DNA, 283 bp, Emericella nidulans
gatatacatagataatttagcacagcatagcatactagatcagcatagatatgctttgctcgtacaccctcgaagatgaatcaaagaataaccatcagtttggaatcataatcatatctagcataacgaacataacacccaagattagaagaccataaagaaaccggtaacaaaaaaggatgaaattagagctttgaagcagtacccggagacgaaatctcgttgtacagcaggctggtcaagaagtcggcgtaatcttcaccggtaacctggccggcaaagt

SEQ ID NO: 17522 - DNA, 907 bp, Emericella nidulans
tttccgttgtgaagctttatcgatcgcggtgtatgaacgtaatcgaccacgatgaatgaccatgaataatgtgaacgatgtacataatatctagtggcgatgggtaactgtacatataattggtacgtccagtcataccaaaaaatcctgctaactcatctctagccacgtcttttcccggtgggagacgttgcggagtattcggcgcaatattctgtgtttctgtcataactgtaggaaaggcacgagtatcggcactatcaagcccatcgatggccacgccacgcctttattcgccgatgccgcttgagcctttgctatcatcgcatccatctccgtcacagaggggatacgacttgttaccctagcagcgaccattaaacttcattcgtagcattgcaggcataatcaaggatgacttactcgtccgcagcgtcagggctttcggtcgcagccatggcccgccttgacccgtatccaatgtcgttaccatctgcattcgcagctgccgaagcaatcgcaggcgcttccgagctaacggggtcagtcgtcggcaaagggccataatggatgggccctggtggaggctggtaatttccaatagcttctcctggaacaaaagcaagagagcccggtaaactgcgggtaagaacgctggggtgaaggccgcggagcaaagattcgaagctggatgcagagacgataatgcatgacagattcaagatgatgaggtagccggtggtcgataaatggaaaaccttgaacttcattgtggacgtgcaggcgatatctcggattgaccgtggtcctgtccgcgtcctagaacgccaatagtggaagagatgagtggtgaatgaatcgagcctttgaggcgcgacacaaagatatgagggactcatggtccaaa

SEQ ID NO: 17523 - DNA, 492 bp, Emericella nidulans
ctccaaactacgccttcttgcgcttcctctccctgaagtccaaccccagataccgcatccgagccaactacctgacaacaacggtacattcccgttatcataagagctctccggtggtacaatagcaggcattgtggttgggttgattgctgggatgctgatactgcttggggcttgcttttctactgtggcgtaggcggaaaggaaaggtactgaaaaacatccatcaggccaatctgcaaagaggtgaattgccgaaggcatctaacgtgaaagcggttgaatcaatctttgagatcggacctgggcggacaaggtccgagctcgacgcgggtgctggacgggtcaaggtagggcggcggaattggagtaacaatgacctatcttgatttcacatcggcaggaaaataggaatatttgccaaatgtactgaagagctagtagtaacaattgtatatatgtcacatatataccatcaatcttacctaggca

SEQ ID NO: 17524 - DNA, 286 bp, Emericella nidulans
accttctaaacggggcaaatgtttatacaaggctagtcaatctcacccctcccatctaagcatattactattataatcacaggaaataaacaataacgatggtcccgcgtagaaattcatagagttgacctaggaaaacagcggccgtagaaggaggagccgggtttagagaaaacgccgggaaaagtgagaggaatgaacgcacaatcgtagcttttaggagccatctgggtatcaatttgggaaatcattgttgggggttcttttggtcaggtgctccctcagg

SEQ ID NO: 17525 - DNA, 168 bp, Emericella nidulans
caggtgtagatataagtataattggcaaaataactacaaatataactgtatacaaaccgtgtagccatttcacaggacgccagcatgagcactgaaaacttgaccagagactggagagatgaaataaggtgtcgcaaagtcgatgcgaagtgtatgtatggaccagtc

SEQ ID NO: 17526 - DNA, 513 bp, Emericella nidulans
gctcttcctactataccgaagcagaattcggtaagcgttggattgttcacccactaatagggaacgtgagctgggtttagaccgtcgtgagacaggttagttttaccctactgatgaaggtcgccgcaacggtaattcaatttagtacgagaggaaccgttgattcagataattggtttttgcggctgtctgaccaggcagtgccgcgacgctaccatctgccggataatggctgaacgcctctaagtcagaatccgtgccggaacgcggcgatgttgccccgcacgtcgtagttggatacgaataggcctccgggccctgtacctcagcaggctggcgacggcccccggggagaagccctcgggagccggctggcggattgcaatgtcacctcgcgcggggatgaatcctctgcagacgactgatgtgaccaagcgggtcgtgtaagcggtcaagtagccttgttgctacgagtcgctgagcgtcagcccgaccttggctcgatttgtgata

SEQ ID NO: 17527 - DNA, 650 bp, Emericella nidulans
tggggtccactttacaaagccattcacaagatccatcatcaatattcagctccattcggcatggccgctgaatatgcgtcacctatagaggttatgattctgggatttggtactgttggatgcccaattgtatggtgcgctgcgactggggatctgcatatctttacgatgtatgtttggattgtgcttcggttgttccaggccattgatgcacacagtgggtatgagttcccatggagtctacaccactttcttcctttttgggctggagcagatcatcacgaccttcaccacgagaagttcgttggcaactactccagcagtttcaggtggtgggattatgttttggacacagagtacagtcccgaggcgatcaggcggaggcgggatcacaaggcggtcggcggtgcgaagaaaaccgaataacgctatcgtacttgaggtctcgtgggtaatttttatttctgcactgctgtgatacttagaatggcattaatatgagcattgtcactccccttgccaggagtacttccccagacatgctcatttgggaccggggcataccccgtcatatcgatagcccgacggctcatcgtataatacttggctgatgagatagattttaatgataaacaaggtgccaaacttca

SEQ ID NO: 17528 - DNA, 110 bp, Emericella nidulans
gcgaacggggtgaatggagctgagtaggagctttgattttgttttcgtgttgtgttcatatcagactgtacttaatacttactgcgcctaattgatcccttgcacgtttg

SEQ ID NO: 17529 - DNA, 198 bp, Emericella nidulans
agtgttatgggtcctttgcctatacaaggaccttagaccttagtgactcggccaaggcctgcgctgtcccgaaggcggtgagccacctacaagacttcctcacaacaacaatccttctttctcctttcttctttagcgattccttcttgtacgtacggcacgtctagataggaagatccatctaaacacgtcccttaa

SEQ ID NO: 17530 - DNA, 199 bp, Emericella nidulans
tagtgttataggtcctttgcctatacaaggaccttagaccttagtgactcggccaaggcctgcgctgtcctgaaggcggtgagccacctacaagacttcctcacaacaacaatccttctttctcatttcttctttagcgattccttcttgtacatacggcacgtctagataggaagatccatctaaatgcgtcccttaa

SEQ ID NO: 17531 - DNA, 735 bp, Emericella nidulans
aaagtgcaacaataaaatggattggtaataatcatattctggcacaacaattaagagagtggacagcactcaaacagaacaatctggtggaaagatgaaaagagaaaacatacaacagtaaggaggccacgagtcaatccctgtccgggagacggtcagaactgccagctaacggttgatcaagaacatagttgagtagagaaacagaagataattatcaagacgagtggacgaagagtaagaagacatcactgaagtcgcatgcacgattcagaagaaataagaaaacttttattatgccgagagcgtcatcgccaggtaaccaacacataggagactgactggtgctctcgaagacataggacgagaggctgctccgcccccgcccacgagtcgcatttcgactatgttgatccaaaacagtacgtgacagcaccagaataaaggcgcacgatcgtaaaaacaaataccgccacaacggaagagcttcttctaggcacctcgtgcacgtgcctgagcctgagatttccagaactccaccatctgtcgggtttcctcaagctcttttgagagttcagcgatacgacgctccatgtctccctgtcgctcaagcttacgggcacgagacttgcgagcagcctctgtatttcgcgcacgcttggctgcaacaggatcagattcgtcgtacttgatcggaggaagaggtttgcttcgccgggcgcttactccggcgac

SEQ ID NO: 17532 - DNA, 382 bp, Emericella nidulans
gtaccgcgaatgggtgtggaacgccttcaccaacatcaacaagtactgccgcactgcgaccggtttcgcggggctggagaacgtcaatgcagcgaacggcggaggccggatcgacaaccaggagagtttcatgttcgcagaggtgctgaagtattcgtttttgacttttgctcctggtacgtttccctagttctggttcacctgtggagaatattactgactgcagcagaggacgactggcaggtgcagaagggcagtggaaatacgtttgtctataacaccgaggcgcacccgtttaaggtgtatacgcctcagtagatagtacatattgtgctctagcgtactgcatgcataacctaaatggcatcacctacttactgac

SEQ ID NO: 17533 - DNA, 106 bp, Emericella nidulans; identical to SEQ ID NO: 17107

SEQ ID NO: 17534 - DNA, 449 bp, Emericella nidulans
attatcgtatttatttgatttgtcaatttgattattttatcttaacttctcttgtaagaatcatggctatgcacccagttctacagtctcaaagccaaagcaaggggtatactactccgtaaccaccctgatgcagtaaaaagctcccaaagacagtcatacactaaaagcggtagtaaaggtggtgaaggggataagagtaaaaatgaaagaataggtaagtatgttcaagaagagaaagcgaccgccgtgtaaatgcagacacaaagaccttcccaaagcgagtgtgtcgaaagggagatggtagagaaagacgtggacacgtaatgaccgcagtgtcggagggttcggtaagagtcatccaagtatatacaataagaggtggatgattttctctcaaccgtaggaaaggtgtctagacggaaaggacaagctgggagctctcaccg

SEQ ID NO: 17535 - DNA, 834 bp, Emericella nidulans
gcaccggagtccgcgataccaacctgcaggttattgtgagtatccgcagcatggaacttgacgagaagggctaagaccgaatcagcctttcagcaaaggtgtttttaagactgcagagggcttcgaaccagccttcgaggcgcaggttgtgggcaccggcaacgactacatccacgccgaccctgatggaaagcatatgcgcctgaacgctaatggcgttatcaagtatgtctccgcttgaacttgacgaagtcgctgataatacggtgtttaattctttaattcccttcgcagaacccaggatgacgccgtaagtcacccaccggatccagagaaactagtcaaatgaagacctgacgtgaactaactgccgtcctgccatcagctcatctacgtgaactacactggcgtcgttacacttgctgaagcagagcagaaagtcctctccggaacagcggaggagggaagcacgccatttgggaattcttgtgggtgcaccatgacttcctttaacaaggataatgctaatcatatgatccgtacagtcacgcaccttactgtcgaggtgagaaaatagtctacctttccaggaaagtatcaacggaccctaactaatgttccgcgatagaccggccacgaacgctacaaggacctcgagaaccgtgtctttgtcggcaagggccgcttcaatgtgcagaagggaaagccggttgtggtcgagtaccgggttgctcaagttgtgcatgcttaattgagtacttttgaggttgagctcgataggcactgtactgagcagggatacctgacaaagtaaagaatggcatgaaatgagct

SEQ ID NO: 17536 - DNA, 544 bp, Emericella nidulans
tatggagttgcaagactcatcattgatccctttttatagagtacaggaaatgcaataccagatagaatggcacgcctgattaaaaagtaacaggaaaccgaaccgaggaagtgaaatatcgcaaaggatctagagcaatccgccgcaaaacatcgcaaaacatcgcaaagcccaattcaaatcaaattcgtggacgacatcacatatcaggctggcgaccgagcaccagcagtcataagtcggtatcggaagtaatatcgtgaagaagcaaggagatcaaatagatcgacgcggtcaagcactaattcctgatcagtcagtcagcatatctacccaacgcgaaccaagcaagaagaccggtgtcagtcactcacaataatcccagcgtcaaatcaccatgaatcttcgccttcagctgcacctcaatatccagattcagatcgagccgcagccgcagctgctcatcactccctttacctcctccaccaccactctcttcttcctgctggccaccccctagtaaaccgccaacagccttaccggc

SEQ ID NO: 17537 - DNA, 509 bp, Emericella nidulans
gcacgcctatccccaccacactaagcatagttgcggttatggcctactgggtgtcgcaagaatggatcttggaagacattccgcttggcgttgctgcgcagggcaccacgctggagttccacccgattgttctgctccttgttctccacgggtgcctcatggtcagcaagaccctgcatattccgaagccatgaatagcataagcacatgacgagttctttcctcgaaacgctttccttagaaaagagatggatcatgagccacgcctatatacgggagggaaggagggcaacaaaaggattacgaggcatttcttggagctaggtaaacgtggccggcgacgaatggcatgatttgcagattcctttgggataggcggttactcttgcgttgtgcatgtgtattattaacccgaaaagcattattatacctaggtaccgataatggcctgtctggcttccattgggtatatagatattgctcttctgctcatctccacttgatcttat

SEQ ID NO: 17538 - DNA, 581 bp, Emericella nidulans
caagggcactatgacactaaacccattccacaccgaccgccaggtgctgagccgagtatcggctgctggcttgctcactgttctcgtgtcgttgatcgatgcgaacagttcatccttgctgagcaccattacctcctctacttcctcatcacagccatgtacccgcgcttccttgtcacgctcgacgaagacctccagccgcttccggtcaacgtccgcgtcggacaggctgttgatgttgttggacaggctggaaggccaaagacgatcactggttggcagacacagagcacccctgtgctgctttcctacggtgagcgagcagagctggaggatgagaaatatattcctctcagtagcacattggagggtttggttatcttgcgtaaggtaagtcatcgcagcttctctgtattgtgtacgaacatttctaacattctcacagaaccctaactgggaggaagaaagctccgcctgagcaacagtgtcctgaatggtatctagtgagatagaccaaacgcaatatctggcgttcctatacagcttaggccttaatgaattcacaaaagtccaaagcatag

SEQ ID NO: 17539 - DNA, 121 bp, Emericella nidulans
cgactggagtcgtcctcgtcatatacagttttcagcctgtgtacgccgagttcatgatattcgtatcttgtacattagtcccaattgcttaagattctcaaatgtacggtccaatgtttga

SEQ ID NO: 17540 - DNA, 447 bp, Emericella nidulans
ttcgccgacgttgcccagcctgaccaggcccgtattgtcggcctgaacgcccacatgttcctcaagtctggcggtggtgtcatcatctccgtcaaggccagctgtatcgacagcacagccaagcctgaggttgtgttcgcccgcgaggtccagaagatgagagatgagaagatcaagcccaaggagcagctgactttggagcccttcgagcgagaccactgtatcgtctccggtatctacaatcgttcgtcgtaaaagccaaaagcagggtcctttataacggtttttctttttccttctcatgtcttaatcttgtgctctgtcctggcgtcgagtgtgctacgatttttcttgatctgtttcgctttttgttcaatgtcaggaatttagatgtgtttctggacatgtaacgtgcatggagttaattcattttctctcttcaatttc

SEQ ID NO: 17541 - DNA, 402 bp, Emericella nidulans
gagcataccgataagaagggcaaccccaagatcgtcaaacagtgcgaattccctctgacgggcaggacttgcgttagccgcatcatcactgaactctgcgtgttcgatgtcgactttgtcaacggattgactcttattgagttagcggatggtgtcacagttgatgaggtccgggctaagactgaggcgccgttcaaggttgctgatgatctgaagcctatgctgtgataggggtatcggcatgacatctttgttgttattttttttattctgcatccaatcagcggcgtacctttgtgatttcaagcgttgacagtgcttttggaccttgtttgtacatagtggttgacgacaggaataccttatcatgggatatctagtaaacatataaccatacatata

SEQ ID NO: 17542 - DNA, 789 bp, Emericella nidulans
tctttcttcttttcccctctcttcccgaatccctccttatttcgacctcgccgccgccacttcatcaaaatattcaacttccatcaaatttcatcccttcaaaaactcctatacatcttttaatacctattcatcatgtctggacgtaagtatttctctatctcctaaatctgtctcccactggacgattgtcgtcgccgttggaccgtgtcccaaaacacgtgacgtcagtcctttcctccagatcaaccctactttactcatcctcaacctccgttattctttaccttctgctaacactcactctacaggcggaaaaggtggcaagggtctcggcaaaggtggcgccaagcgtcaccgcaagatcctacgtgacaacatccagggtatcaccaagcccgctatccgtcgtcttgcgcgccgtggtggtgtcaagcgtatctctgccatgatctacgaagagacccgtggtgttctaaagtcttttctcgaatccgttatccgtgacgccgtcacctacaccgaacacgctaagcgcaagaccgtcacctcgcttgggggggtctacgcccttaagcggcagggcctcaccctctacggcttgtgtggctagatctgcctgcctcctgatatacattatatgtttcgtctttgcgttttattttgcaacgcaatgggaatatgggtctcggtagggtgttattcgttcggtcgctcgggattttggttgggatgatgcctatcacatacagattatgaatcgaattgaatcttatatctagattattg

SEQ ID NO: 17543 - DNA, 263 bp, Emericella nidulans
agccgagagaacaggccgcgccagtggagaggatatgatgatagatacatgacaaatggaaaacacaaagaggtagacaaaataggtacaacacaactccagtgggatccttacaagccttataacgccaaccacgtatggaactcagtaagcgagatacacaagctatagacaatcatgaacgattccgacttcagctaggcattttggagtctccatcctcatccaggcctcgtaaagtgggatacatcacactgtcctcg

SEQ ID NO: 17544 - DNA, 218 bp, Emericella nidulans
gcgggaaaggaacgaatcattagtgcttgcctcgaatatattacaaactatgtgctttgctctctgttctaaaccgagcgcccctgtcagtctagatgaatgaacgtagtctagagtaagcccaaactgcaagctattgataaaacctcactgagtaaaagtgctcaacgaaaatcacagggtatcaataataaagaaactaagagttcacaaattca

SEQ ID NO: 17545 - DNA, 729 bp, Emericella nidulans
atcaaacttggtctcccatgtacgacatgattaacatctttgaagttttcctcccccagcttttacgctaccccaacccttcggacccgttaaatggggaagccgctgcaatgctgatgagggagccaaagagctacgaagcgaaagtgaaaggtttgctcttaaacgatacacctgccctacaagaagcattctgaccttttgcacagagtacgtggcgaaatatgccagtaaagacgccgttgacgacgccggggaggacacagagtcagaagacgagttgagctctgccggtagctatgagtcggacggagaagagcccgccgggaggttggacgacgtttgaagcgtccagcatttattggcatgcctgattttcgcgacatttccaggtctgttctatatactacttcatcatctcgttacggtcttatagttcttgctgggtttagtctttatggcgttattgacgggggagttttggcaatcagttcgggagccagagtctaatgggtatacgtcacgtcaacactggtgcacttggcgagttgaacctcatgttctatggggctccttcaaccctacatttgttttctatatcatttgctcctgcgatcattgtctttgtggggttcctgatgctttacgtctccaatcataacatcactcgcctatttaatggaatctgctgtttctacctagtctacttggaaggcccatacttaccat

SEQ ID NO: 17546 - DNA, 561 bp, Emericella nidulans; identical to SEQ ID NO: 17291

SEQ ID NO: 17547 - DNA, 322 bp, Emericella nidulans
tcatataccccgtcggcacataagtttgactgatcaaaaaatagccatagtgttcgggggactcgagaccccattcgcacagttcaaagggctactcgagacgaaaaacgtccagcgaccatgttgtatacacatctccgccaacccatccaaatcaaacatctcgccgataggtactccccaccccgcaagtagatgatgatgcagatcaaagtccgggttaagtggtgggtacacctcgaaactgaccgcgtctgacgcaaccgccgcaaagtggttgtcccaaaagaaccgtagcacacgctcactttgctcgatcccg

SEQ ID NO: 17548 - DNA, 349 bp, Emericella nidulans
aatatcaggaaccagcgctatgttcattcgtctatgatacgaaacagagatataggagaaacacatgcgagaaagactgattggatataagacggtatctacctaatgcacccaattccgtataggttttaccgcgcgaaaatcacatatccgccgctgtccgtcagaaaaatggtaaagacacgaaatgaaacgaaggtaagaggatccatcacgacaaaaactagtagtgaagtgatttgaaacgagttaagaatgtaagcactcgtaagcaagcctagggtgccacccgaccagccgatggatgcccttgccttggatttacgagtgaatgttgatgtggccgtga

SEQ ID NO: 17549 - DNA, 83 bp, Emericella nidulans
  unsure (1)..(83): unsure at all n locations
aatataacaacagctttattcatcttcactaatctacagagaccaaatgccangattcagcaacangatagggatacaaccac

SEQ ID NO: 17550 - DNA, 483 bp, Emericella nidulans
gatataagataataggatatgcatatctgacagcagcagttgtttgcggtcatgtaatgaggacagaaatctaagccggtaatagtacagaagttgatatcatgtcgtatcccaactcaacatccaagcaagtcaattcattgtataggcggtgaagattctctcaagatgcatttcaacagtcagtaatctagctcagaaataatctaaatcgttagtcgtatcgttgaaacaattatccgggaaccatcatcttaaagctggtcattatgcgctcgtgtcccaggtgcaggggcaattgtagcctcagggtataacggtcccgttcccgacgtgggcccggacaccggctgcgtctgagactgatatgccatcccaggctcatacgtcgggagctggccgcctagactgggattatgagttcgggtataaccctgctgcatctcataccaattcgtaacatcttcctcgctagatgaggac

SEQ ID NO: 17551 - DNA, 485 bp, Emericella nidulans
acagctcgctaggggcactcctaaggaagaagctgtctgtattatataaactccataccagtcccgttgagactacaccatgtcgacaaagaattgcaatcctctatgcgcattggaattgcgaatgtgatgaagtgcagtattagagatgaccctgattatgcacgtcaacgcgatatcacaaccaataatgaaagatatgaagactagtggtaatccgtatatgcagtggacaagagcgtgaaaggaaacatcttcgcattgagaaaacaggaaaagactatagcaaggaaagatgttctaaagcactaaaagcaactcagaggatccgctgacttaaggcgctttggctcgtctcatttagaaccactcgccacccaaccagcggttgaagaactcaagggatgcctcaggctggtccatgggaaccatgtggccgccaccatagaggcgcatgaaggtgaagttgccatgggtcttgatct

SEQ ID NO: 17552 - DNA, 699 bp, Emericella nidulans
gcttcgcgaaactgaacggctgcaatcgcgcgtccgccgctaccagtctcctgatgagtacccgttcttcccgtctgcgctggagaaacccatcctacaaccgctcgactaccctaagatcctccacgacaacgacgtcaatgtcaacgagaccatcaaaacgcggtacgtgcaggatattctacctgcgatttgcccgcaatttggcgggcgcgaggaccgtggggagacgcaggaaaattatggatcagcggcgacgtgtgacgtgagctgtttgcaggcgctatcacggcgcattcacttcggaaagtttgtggccgagtcgaagttccagaaggagacggaaaagtttgttgcgctgattaaggcaggggatcgcaaggaaattgatgaggcgattacggatgcgaaagttgagcaaaaggtgctggagcggttggcgctcaaggcaaagacttacgggacagatcctggctttcctgagcagtcggggccgaagattgatgttcaggctgtgcaggacatgtacaaggtaccttccctcttacctcaccctgccgttcatgatctaatcaagaacaggaatacgttatccctttgaccaaggttgtcgaagtagagtacctgatgcaacgccttaagggcactcaatgggagtagctgtgctctcgaacagttcgccatgccgtaacgacaata

SEQ ID NO: 17553 - DNA, 188 bp, Emericella nidulans
tgtttatatctgaatcttgaatgagttcatggatgataaagtgacaagaaaggactggattgaattgagcagcaaaataggtataggagcagactatctatcgcaagcttctatctatctagggtatcaagaatcgatttccgaagtgagtcctgcgtgaacagcctggtactgtacattgcagtaca

SEQ ID NO: 17554 - DNA, 305 bp, Emericella nidulans
aggttagaacatgtagcctcgctactccgtattcagtgaaacaaattgctttttaagacctaatcccaaacgtgcactaagagcattccggtatcctcttggaacaaacagaagagaagatataaactatacagtacaccccctctcttaagacatacatccaatgcagcaatcatgcccgtcccctagccgcagcccgcttactcttccccggacgctttgcgccgccgctcgcacccttcatcttcttcacagagaatccacgtagatcaccgctagaaatcgaatcaccgtttttgcatgcc

SEQ ID NO: 17555 - DNA, 484 bp, Emericella nidulans
ctggggcagctggactggagacggcattagcaggaaggaaaggaagcggcagaagcgcgttttgacaaaggttgagggagtgaagcccgaaaatcggaaggatgcgaaactttctcgtgttatcatcaacgaaaagcgtattaagaaggtaaaggcttttatcgatttcgcacccatcgacgtgaatactaatatctggcttcctgcagaacaacaagtaccttgcgacgcaactgcctcacccgttcgagtcgaagcagcagtacgagaggtcgcttcgtgtcccgattggtcccgagtggtctacaaaggagactttccagtcttctaccaagccccgtgttatgatcaaacagggcgtcatcaagccgatggagaagccgatggtttagatactggccgggccttgaccttgaagttcagaacactagtcttgaccgcggagtatatagggttagacaatatatacctggatacccattca

SEQ ID NO: 17556 - DNA, 502 bp, Emericella nidulans
tgtgctactgaatagagtttgttcatttccaaatgatgtacaatagaaatgcagaacatatacttcaaaatgaatgtacaggaatcatgtcaaatcaagatgaacataaacgccacttgtcatatcatcataaccatgtattccggtgcccatcagcttaagccctatccctcgcagccttatatagccctctgatatcctccttccactgctccacatccgtcctctgcactcttcgatcatacgtgagtagcccgttgacttctccctcaacatcagtggtctgagtccagaccgctgcgctgcacgcaaactttgtaacctgctcagtcaactcagagagcagatagtgcgcgcggtagttccaagtatccaagtcctcgtcaatctcgtatgtttctgggatggtgttgattgccgcttgtacgttccacaggttctcgatcgagacattgtggccgatcccgccgaattcgccctgcatgccgattctttgcgggtc

SEQ ID NO: 17557 - DNA, 927 bp, Emericella nidulans
gacaacgacgacaacaccacgaccctttctccagagtccggtcagatatcaaaaggaggctctgcaaaaatggccgtcacaaaccagggtatgtcttacggaaattccgtcggctcgttttgttttccacgcttctgatcgcctctgattgagttgggattgttcttcgaagacggcaatggcgattagaccacccttccacgccaacaaagctacgggatgaatgctgatgttttttcttcgaatagcaatctcctcctcgcgccggaagtcgcgcaaggcgcacttcaacgccccctccagcgtgcgccgtgttatcatgagcgcgcctctgtccaaggaactccgtgagaagcacaatgtacgatccgtcctttccatccatcaagtcattctacaacgatcttccccatgcgcatcttgggcggttgagaaaagggtggactgaagattgatttgaggaattgggaacaatggcaagaggaccagagctgacggatatcaacctaacaggtccgctccatccccatccgcaaggacgacgaggttaccatcgtccgcggcaccaacaagggccgtgagggcaagatcaccagcgtctaccgtctgaagtggtgcgtccacgtcgagcgtgttgtccgcgagaagtccaacggccagagcgttcccctccccatccacccttccaaggtcgtcatcaccaagctcaagctcgacaaggaccgtgagcagattctggagcgcatcagcaagggtcgtgaggccgtcaaggccaagtccgcgtaaggaactggaactgggacttgcattttgtgtttctatggatgaatggcgtgggagtacaatgagatcctgctgaatctgatcttatcttgattctcttaaatgagcaacatcaaaaaagaaatatacctgctacgaccagac

SEQ ID NO: 17558 - DNA, 315 bp, Emericella nidulans
atccagctagattgctcctcctggtattgtagaacctaaacgtcctccgctttcgacttagaaagccatcaacatcaatacttaacacaagaagtcggaaagaaacggattaagtacacaaatgcaaacaatcagcgtcatgaagcgagaactagcctccagcaggactcgacaactcagttgccaccatgattcgctgtcgaacgttttcgtgaccgtataatatcgtaacatcgtgatcctcatcatcgctgctgtaagtactgtgcgagaaggtacatcactgaagaggaaaagagcgtagttttgataaat

SEQ ID NO: 17559 - DNA, 507 bp, Emericella nidulans; identical to SEQ ID NO: 17120

SEQ ID NO: 17560 - DNA, 189 bp, Emericella nidulans
gatacccttgaagtgaagaacagaaacaagaaagacactttcttccatataccgagggtttgggtataagcgaagacgccaatcaaaacaagtgaaaaaagcccccttttgcaatacaatcgtgtcatcaacggcatcaagataaaaacacatgtagaatggatatatcattcacaaggcaataagtgg

SEQ ID NO: 17561 - DNA, 307 bp, Emericella nidulans
attccttgttcttacgtatgatgtctattagaggagttatttcaatctctcatttcttcacctgtaactagtgcaagtgagcttggctagagtattaagggctcataggtataccgaagttccatgcttgcagagatgtagcagcataatgatagacggtgaatccagccccaaccactatcgcaccatcgaagtggctattgtcacttgtagtcctcgacaattggttgaagtttgatttaaaatacctggtcgctgcacggagccccaaaagcccacatcggtaggctgaatgatggtactacgg

SEQ ID NO: 17562 - DNA, 853 bp, Emericella nidulans
cctcgaccgcgaaagtctgctaaaccggtccgtccgcacacggttctacttgggcgagccgacgccgctcctcgagaccgatgatgcaggcggcatcaagcataagctcctcgaagcgccgcaggttgataagctgttctttatcagtccaccaccctccccgccgcacggctgggtgatgcgccaggaggaccccccaaacaaggaggtccatgctagtgatcttgcgcaggcgctggcaaaattgaaaacgcagacggagggttctacctacgctacatctaccgtaccggcttctcagcagcagacggatccggatacaccgatgtctctttcgtccgacaagaggacggggagctggccgttgttgcagcagcgaagtaggagtagcacgcttatatataacccggaggagcacggcggcagccccaacctccccgctgtcatggtcgaagatacgagcgccgacccggatgatatggacgtggagatgagcccgattgatatgcctgtgaagcaaacgccgccgttcaagactgctcgaccgcctgttgagttgatggtttgattacttacgaccgggttcttgcttcatgtctggtccactgcaattgcattctaagcgtttgacttggagttggctgcttgttgatgtctgtattgttttttattttcgactattgtgattgcatcaggtttctctctttttctcaaacattcattgcgaggcgttcgggtgatagtttatcggcaatctattcatggcgatggcaataatgtgtgcatttacggttctaaaaaccagtactaggcatacgatgcttacttaaatataattctttagtatctgcaa

SEQ ID NO: 17563 - DNA, 581 bp, Emericella nidulans
ctcagtcaccgcggtttcccccagctcgtcggatctgtcgactttcaagtttatgtccggcgatagctggtgtgactggacggaaggagatgcaattatctcgatcaactagtcttacggagttcatggtggtctgacgcttgagtgctcgtcagattcgtcaagactctcctgcggattgtttttcgacaaccatctgcccacttccccttgtttgtgcatgtttatggcttccgcatttcttaatttccctccgcattgcaccgacatttgttatttgcattttcagactgtcattgtggcttattgacgtatgactggggacgaaggagacgaaggaacgactggcgaagaggggatgactagttaggggtgtggtggagtgtcgctttctcgcacgaatgctctcggtgatttgagccgagtagcagaatggacggtgagggcgatgtacgcgggagcacatctttggtattgggtgaatggcgaaggaaactggctagggtcgcttccggggtggtattacgtcaatctatgctgtttctcttagtttattaaacatccaactgtttgcgctcctt

SEQ ID NO: 17564 - DNA, 469 bp, Emericella nidulans
ggcatgattacaataagattcctaattcatttctatattaatacatgtccatcctgatcacttccagaaaactagacagagataagggcaaaagcagaacgttcgctgggcgaacaacaatgagttggtaggtatacagaggctagatatacgtgattcgtgtgctttaggcggcaacgaagttgcggacatctgagaacgttagtacgcgaaatgacatcaattaggttcgttcacttactctcgagccagcggacgtactccttctgctccttaacctggatgtagtcgggaatcatgttggcgagctcggcgttgatgccgcgctcctcaaggtatcgctcgaggtaggtctgcaagtcctcatccaggttctcaaatggagggccggcgtacaggctctgtctggcccaatccttctcagcggtagcagcgtgagccaagtcaggcttggagaagtaagaaactt

SEQ ID NO: 17565 - DNA, 360 bp, Emericella nidulans
gaggacgacaggtatggtgcataggcacgcgcatacgctcgggctctgccctccctgctttgtttttgcttgttttcgatggacgggatctataatatattcctccttccctgtttctgcatgtatgtccccaaaagcttttttctctttttgtgacaacttctagagcagaaggtgtcaccactcgccaaatcggatgtgatgtgagacggatggcgatatggagccttgctgtgctacgaagaggagcatggcatgccatgatgtcggagtattgtgtataggatgagtcctcagctagagggtatacggcaaaagatcgtatgaactggcttttcttgtcaggctcgctactatgat

SEQ ID NO: 17566 - DNA, 597 bp, Emericella nidulans
gggcttcagatcggcatggaggatattgcacttacgcatcaagctcaatcccaggaaaatttgctgggcgtacgctcgaattgcacgcaggtttaaacctacatctcggccaaacttcttcaacacctcccgcaggttcatgctgaggttttcgaagaccatgcacaaatgacccttgtgctcgaagctccgttcgaacttgatcatatgtttcttgtcctctggatcggcttctcggagcttttccaagatgccaatctccttcaacccagccttcttcattgtgtcattctgccggataattttgattgccacaacgttacccgtctttgaatctttcgctcgaacaactgacgagaacattcccttacccagattctgttgcacatggtaacgcccgtcgatcaactcaccaattcggaggttataatatccttcaggatcatcccaattatccatcatactaacgtcgagctcccgcgcttggggcacagcaatggcggatgcgtgcgccggcttcgacgtttcctcggtatcttcagcaaacatgtcatcgtcatcctcagcaaatatatcaaatgaatcctttgcctctgg

SEQ ID NO: 17567 - DNA, 898 bp, Emericella nidulans
aagaatttcgccagctcaacatcagcttccgcttcttccctcttctcaaacgtactagattgacttccctgtcttctatctcaattcctatcaaaatgacttctgagcagacgtaagtgcatgaatatatttttaccccttgcagcacagtttcccaacttttctcttctttgtttgctgttgctgcccctccttgaaccaaccaagctaacttctcaccgtagtttcattgccatcaagcccgatggtgtccaggtacggcattgagcaatcattgtcctatatccgacattatgagacgaatcatactgctgtctttgagcaaaaccatgaactgacgttctcaccagcgtggactcgttggccccatcatctctcgcttcgagaaccgtgggtgcgtataccttccaacattgctcagtcgcgatactggaccgttacaagcttcaagctcgctgctatgaagctcacctccccctctcgctctctccttgagcagcactacagtgaccttaaggagaagcctttcttccccggcctcgttacctgtgagtttccacgcctcaagtaattgacgcttgtgatcgcaatcttataccagaatagacatgctcagcggccctatcgtcgccatggtctgggagggtaaggacgtcgtcaagaccggccgcaccatcctcggtgccaccaacccccttgcctacgcccccggcaccatccgtggtgacttcgctatcgacgtcggccgcaacgtctgccacggctccgacagtgtcgagagcgccaagaaggagatcggtctctggttcacccccgaggagatccagaactacaagctgaacgctttcggctggatctatgagaaggaataaattccctcagagttcatctctaggaa

SEQ ID NO: 17568 - DNA, 161 bp, Emericella nidulans
ttcactgcctgtggtcattggaatgtacagacgctgccgcaaagttcttgtagctatcattttttggaagatctagctctgtgcaataggattagctgatatactacgcggatttgagacagcaaaacttacggttaaagcacgtatgcgagcttggaaga

SEQ ID NO: 17569 - DNA, 200 bp, Emericella nidulans
aggcttaggcttaggcttagttcgaatctctaacagaatctaacagagtctaacagagtcatgcatatgtggagtgcagaattcagaatcagcccgggtcttacagagtcggactgaagcaaggtccaaaattgatccttcgagaatccaaatgaatcaaaatcacgataaacagatccaaaacacgggacacaaagtct

SEQ ID NO: 17570 - DNA, 449 bp, Emericella nidulans
cgtagcaccattatgcagtcatccaactgatcttaaccgtgggttcaatatttcacttttcagcatgctgacaatgggcactctttgttcagttcatgggaagaaatgatgtgtccgacgtgatgctcaagttgcgaaacctcgcttgcggcgtatcgtaatcaaacctcagaccaagtcattcgtaactgggaccctggtcttgatggtcatttttaccaccacaattgttggcactaacctggcaattatcgcaactttgatcgcagttctttgagagagtagggataaagaaaatggactgtatcttacgcctcgtcgattctgctctctccacagcaaacatggatgctgtcgatgcactccgagccttcttcatcttcgcagcttgtacggtatgagctgcacggcatcgtcggcgattttcttctagaatggacgagaactaa

SEQ ID NO: 17571 - DNA, 449 bp, Emericella nidulans
tgaagcatagtctaattctgatgcaggctgtcatcccgctggtaatcaggctcgggaggagaatcaggccggcgggtgaacagaggcatgggtcatggagaccccgatgtccagacgggatctcgctgcagttgcggggctcttgtctcctcaaccacgctgatcagcaaagtatacgatcggcgacggcaaaatcctatgtcactagtcgcatggcccaagcgtcgtagcaacctcgttgatcgtagactcaaagccgacaagggaaggttcaagaaaccatggccatcgcgagacaatggatgccgggtgggctgcaattcggtgtagatgaggatacgtcgtgtgacttgggcttcaagctagactccaagatcgacctggacaatccttcgtgttcctgttcgtacagtacagtcgatattggtaatagatcagcaaacctgggt

SEQ ID NO: 17572 - DNA, 495 bp, Emericella nidulans
gtgcctctttccgtaatgtcggtgagatcaccgagctcgccggttgcgactacttgaccatctccgtacgttgccacccttcaactataatttttgagggcgtatcactgacgaaccacagcccggtctccttgaggagctctacaactccaaggacgccgttcccaagaagctcgacgctgcctccgccaccaccctcgacatcaccaagcgcagctacctcaacgacgaggccctgttccgcttcgacttcaacgaggaggctatggccgtcgagaaactccgtgagggtatctccaagttcgccgccgacgctgtcacccttaaggacatcctgaagcagaaggtccaggcgtagatgaatgaaccatgaatgaaaaggcaccggctgccgcgtgatgagaccaatttcgttatgtaaaaatttggcgacttgcaaaaacttgctttgttttagaagatacgagttacggaatatcacttcttatataagtt

SEQ ID NO: 17573 - DNA, 456 bp, Emericella nidulans
actgagaacctttgactacctacttggtagtaaaatattagtacataaatcgcatcaggtctcatgtatcatattcatagcaacatgacatgaacatcacgacaattaagttatatttaggctttcgcctcctcatcctgcttcaatccagagccctcatacttcgactgagcaagggtgttgagctcatcttcctgtttatccagcttgtagtttgttgcccagaagccaatgccgccaacgaacgccaagatggcaacgacagcgtagttccagacaagaagcgggtcttctgaaagaccgacaaaggcctgaccgatggcagaagagaaagcgttcatgaagagtgagacggcctggaccaaactgcgcatgttcttgggcgccttggtgaaggcgtactcaagggatgtaaccgacgccagaatctcggaaataccaccgagaatgtaggtg

SEQ ID NO: 17574 - DNA, 429 bp, Emericella nidulans
taggcgccaaagtggagcgcgcgctcggacggaggatgacaagccaggatgcagtcatgcgggagaagcctgcgctgaacgagaaggctgaggagactacttcatgaacgttgacgtgcttcgcgatcattattacaaaccccggattttgagatactttttattttcctttgtcgtctcggctttcgcgatctggtgttcaatcccgtgcttactcccgtctgattttctatgtggtggttattatgggcggaagtcgatgtctgctttgacgagaagtttgtgctttaatgtctctcatacccccgttcttccagcttaatgtcgtattttgctcttcatgataattgtttttgatcagattattgtcgcggatatgggtcatctagtgtcatccaatttgcaaaacagatgaatattctttcacga

SEQ ID NO: 17575 - DNA, 459 bp, Emericella nidulans
gcgtgtagtcgattgttcaattcgattcgcttgaccaacaactatggaatatctacttctcacacgctacggatacccacgatatgatacctcgacgaatacttggagtaaaggatacgagcgggtttatagctatgtcgtttttacttgggacacacaacaattgcagcttgagccggtgctgaataatgaattacggatgttttctttctctattgttaccctttcttgattttaggcgaatgggcggtggattgacgcgcaataaactggaggtctgtacaccatcgaagcttgacttatttggtttatgccatgttgcaggtggaacatattgtccgtcacctttggacttccttcggcgaacacgtacatgtgagtactggaaaaccgaacaacagaaaacaggcgctcgcgttcgttcacaccgcaactattgcggggagttacaagaatcgg

SEQ ID NO: 17576 - DNA, 322 bp, Emericella nidulans
tccggaagaagctatccagcagatctcgacgcagtcgactgcttataagcccaccatcgaacaggaccagacagtttcgatttcgtaaagaatacaatgacgacgtctggatccttaaaatctcttatcatggttctttgagaccgtgatcagccccgtggttctgggtatattgttatgaattatgacaggcgttgtacggtatgctgatgcattttattgtgcattggctttggtatatagtggtgacaataacggtttttagtattgttatggcgttttgagcaaatggaattatgcttaacgggtcttggttgattgt

SEQ ID NO: 17577 - DNA, 318 bp, Emericella nidulans
gctggtttaccgagaatcctttctttttgctttctgagtccatatgctagtggatttgaactatccaagagtccaaagaagcgaaggctaacatagtagccagggatgcagaccagaccagcccaaacggcaacgagacaagtattgctgcatgagcaaaagccgaacatacattctcaaacacagtagacatctcagaataagccgtaatcgctcatccgaaaagccagggcgaagatcacttggtacctagacaacccataacctgagcaaaatcacgatcagcgacgtcaagaacttttcaaccatctgcaacaa

SEQ ID NO: 17578 - DNA, 419 bp, Emericella nidulans
ataagacaaacaatgtagatagctcgaaggaaattcgtctcatcatggtcataaataaagccggccgcaaacaagcataggcgtctagcgacagccgaaaagcggagaggcgacttcagaacgctgcacaagaaacagacccagaatacacatcctttttgcaagtcatcacgcaactttatggccagaatcccatgataaacctcaaccatgccaagaccaggcgtcccagtcatgtctaacttccatacggcgcgagtaagcgttgtagtcgagtcatcaagcctgatgctcaacaatgccagcgtgttctattagagaggaaaaaccacaatgcaccccgagaaaatactcaacccgtagcccaactcaaccaacccccgcttgctccttgcccgccacacctttttttttctttg

SEQ ID NO: 17579 - DNA, 585 bp, Emericella nidulans
ggaccagaaatttggttccgacttcggctctgtttcctatatgagaatcttgccagctccggcttgtggtgacaggaggctccagtgagtattaaccactggacacgatatcaggctgcaggtttgaattgagacctcgagagaggtccaatagatacacaaaagctcatccaatcgagaagttcatttactcgtcagccccgtcagccttcttagccttcttcttcttgttcttgttcttcgaccctgtggatttggacaggggaagctccaggatcttgaggatttcttcatcctcgatcttcttgtcagacttgatcttctcgaagtcgggcgtagcgggagccgccagcttggtgataccgttcttggtgatcgctgccacggttgttagagactggttcaacaagtatgaatgccaacgacattgtgccgtattcgcagttagaactcaccaattgtggtcaggtaacgggaaaccgcagcgttgtcagcatcacccgcaggctcatattgcctcaagacaccgttgcgaacggattcaataacaccaaccttagctgccttctcgtcatcaagctggcg

SEQ ID NO: 17580 - DNA, 1351 bp, Emericella nidulans
tctgatctcacgccgttgactgacacgtctcaacccggctattacagtgtctcgttctcggatggtgctggatatgcattgcttagttaccagggtccttccattccctggcaatctatcatcagcaccgaaggtgaaaagacaacaacactcagaattatcgaggacaacacagatttgtcaaagttggtggctcaatacgctttaccaacagagaactaccagaacatcaccattgatggcttcacgctgcaagtcgtcgagcgacgtccaccccactttaacccagcgcgaaagtaccctgttctattccacctatacggaggcccagggtctcaaactgtggaccgccgtttcaatgtagatttccagtcatatgtcgcagcaagtcttggctacattgttgtcaccgttgacgggagaggcaccggcttcatcggtcgagcagcacgctgtatcatccgtggcaacatcgggcactacgaagccattgatcaaattgccacggccaaaaattgggcacaaaagccgtacgtcgacgagtcccgaatggcgatctggggctggagctacggcggctttatgacgttgaagactctcgaacaagacgccggcgagacatttcagtacggaatggctgttgcgcctgtcacagactggcggttctatggtaaggcgctcaaacccacccatttcctacttggaccatgtatagtcaactaacccaaagcccaatagattccgtctacacagaacgctacatgcacaccccgcagcacaacccaacaggctatgacaacaccagcatatcggacatggccgcccttcataacaatgtccgcttccttgtcatccacggtgcctcagacgacaacgtccatatccaaaacacgctcaccctaattgataagctggatctcgcgagcgtccagaactatgatgtgcatttctaccctgactccgaccatagcatcttctttcacaatgcccatactatggtttatgaacgtatgtcaccaattttctatccataacaacccctgcccttaacgggttcaagacttcagctaatggttgattgtaaactaggccttgcaagctggcttgtcaacgcgttcaatggcgagtggcatcggacagcaaaccccgttccagacgagtcgatgttgaggcggcttgcgaagagggtttggcctggttttgcgcattgatttgctaaatattggaataggatatctaaacgtgtatatgagtatgaagccggacaacctttaagctttgctttaacagtgatcgttttttacgaaggcgttctttaggaagcgtttcatgtttgttcttaatcttttca

SEQ ID NO: 17581 - DNA, 682 bp, Emericella nidulans
ggacggtatatatgcaagtatgatacaaattggtcatcaaccatggagaaagtccagaagacagcacaaaagaacccctataatgccaacaaaaacaccgatgcaataaacaaggctaaacccaactcaaacagacttgaggcctccgtggtaaggcgaccagataccacgaacactctcgttgatactcgtgacgggcttcttggtgcgcttcagcttctcgccgctagcctgcttcaataagttggctttctgggttatctgttccggctcgagattccgcacgcagatcgccttctctcgtccgttgatatagtgtcctttgatgatagggtgcttgtgaggtcgtggtgagactcggatctcaatctgggggttttctttcgcgaaagctggaagggcatgcttcaggaaagcgctatagttcataatattagagagagatggttgaacggtatttagatcggaagagcaacatacttcattccccgggaactgccagcccagtcacagtagtggaaatccaagcgcttgcattgcagaatgaaggcaccaacgccgttctagcaagtgttagctctcaatgctccggagagggttatttttatagtgtatgaaacatactctggcagtggatactgctcgaaccccttgtactggcattgttgcgtatctgttcgtt

SEQ ID NO: 17582 - DNA, 880 bp, Emericella nidulans
agaaaagcctaaatataggggaaaatgatattgcccaaaatctaatttacacgcaaataatacaacacagaacatatgcgccgcaaccaaccagttggtcatgtcccattgaaccgtgaaaaatgtccagacaagcgtcgagaatagtccaacccctgaggctggaagcccaagaagatgatactctcgaagttgttaaagcagtacacccatgaggtctgtttctcccgactcagaggtgaagcgcccatctcataattgaatggatatcgtcctgtcctctcctctcaaaaacacaaaacttgcattctatttcccttgacgctgcttatgtttcgggttcttcgagctacacgaaggttggctgttagcatcatatcacccaacacactagagccacgacaaccaaactcaccaaatgatataaacccggttctttctccgaacgggctatattccaagcagcgcccgttagcccatgaccttcggaacacatagcctcaatcttgacctcccacttcctgcgaacaacatttaggacaatatgcataccttgcacccttcacaaagccgcttaaccgacgaccttgtcttcatccctctcacttgctccacctgcctcacggcagaaacaccagcacctggcacaatagaccttgaccacccaaaaaaaaaccaattgttacttgtgagttgtgataattgtgaaaatggccgggcaaggactcggaagttgctgttgtgtcggggaaggaactggcggagggcggcggtcgggggaccaaggagggagcggagggagatcatcttgatgaatcgcggaggagtctccaatcgtaaatactgagaacaaggcgagacccttggaagttaaaatagt

SEQ ID NO: 17583 - DNA, 708 bp, Emericella nidulans; identical to SEQ ID NO: 3162

SEQ ID NO: 17584 - DNA, 1051 bp, Emericella nidulans
taaacagatatgaacttgtgatgtgagattaaaactataactatcgtggcttttttctatccccaagacaggatagagtaaggtcataaatcgatactcgtgacgctgcaaatgtatatcactgtggaaccgaagatactgtttatggaacagaagtcctgaagtctagacggatttatgctttggactgtgcaagtcttttggtcatgctgtagttcatcttgttagcaacacaaaactcgacaagcagggcggtagccacttacaagttgaagaaagagaattggctggggctgctgccgtattcgtacacgaagcggctcgcaaggtggctgccaaagatggcccgcaggtagttctcaggaacctgcagatttgtcagtctgcttgtcattcggcatccaaaagcacaacatctacttacccgctggagaatcgtgtcgagacctatcttgtccagaagcagcttgggcagagcgtcattgaggacagacctgcggagctcaacattatcccacaactccgtcttttgcagctcttcatcaagctgagtgatggcaacactgagcctatcactgaggacgctgcgagggattccggtctgctcatgctcgcgccatattgcttcgaactccaaggtggcgttctctttgatgacctcttgtacttgcttaacatattccctatagaattcaggaacgctgtcatcatctccaacgcacatgttctgcacaaaaccttggtcgtcaaaagatagtgaggccaagacttccaatgaggaagaggtaacgccacccttattggcggaggcatctttgaaaagaatacatccagctttctcaagtcggagcttgctgtcttgcgtaatgaacaaattggcaccctcgacgatgtacggaatggtggatttgccgttctcaataagcttgccaacatttgaaagatcaattgactcgggcgcccgccgcagggaacaaaagtgtcgtatgttagttccttgcgcagatggaacatgttgcggaataccattccgttatgaaccagctctccg

SEQ ID NO: 17585 - DNA, 644 bp, Emericella nidulans
caagaactcgtccgcgccgaggccgagtctctggtcgctgaagcccaactttcgaacattacccgtgagaagctcaaggctgcattccagtaccaattcgatgctcttcgagaacattgcgagaaggtcgccatcatcgccgggtatgggaaacaccttctcgacctcatcgatgacactccggtcactcctggtgagactcgccaggcgtatgacggatacgacgctagcaaggccatcattcaggactgcgaagacgccttggcaaactgggtctcgtccaaggctgccgtcaaatccagcttgtcccagcgttcacgtactctctctcagcgccgacaggataacatcaataagggccgtgaaaatggggtggacctgtcgtcccaggaccagcccttgaggggtgaccgggattcatgggttgccgcagagcagcaccctagctaccaccatgacgatgatgaagaggctgccagtgatggagacatccgcggccgcgaagaagaacgggagcctgtccctgtctaatcgagcactcactgaatgagcagggcgcaagaataccggcaaaacgatacattggttaatcactttgatgctcttggactccataattattgtacgaatgactgttttcccgc

SEQ ID NO: 17586 - DNA, 477 bp, Emericella nidulans
cgaaaatcggagagattcggccaggtcacgcacaagccacaattgtggctctgctactgtgtgtctttttgtgttccgaactctcggactctcgtatcaaactaattgcctgcgcctcattttataatagagtcatcagataattacacaatcgcgaaacaaaaggcatgttgagctcatacaatgtaatcactgttgtcattccttgggagcgtctctatgggcatcagcggagaatcgcctttccgaacatgtcccatgcgccttattcattccgttcccaactgcagccctaccaaaacaattacataattctagcggagctgggtagcgttatggatggaacaagaatatccctttgttcgtcagtaaacgcccagcaaagagtatctacgtagagccttagcaatctcgtgacttataattgacctactctgtcgcagtatggatgaattctgtcgtgctggagagccggct

SEQ ID NO: 17587 - DNA, 858 bp, Emericella nidulans
tagtatacgctttgcaactcttccatttttatgactgtttttaacgggtatcgaagtcgacccagcgttgctagatcttctgcaagcccatcgacaaccacaccgtcatgaacccagctaagggttgatgcgggcgccagttcatttcccctccttccagagtggaatatgaactattttaggcggcaatggtaacctcaacctcaacaccagcctcgatgttgatgatgatctgcttaacggtctcagtgggagcgaggaggctgtactttatgattagtattgtttccatcattcatttttctcatgaagctcgtggctccagagtaagggccggaggtacatactcgatgagacgcttgtggatgcgcatctcatacttgtcccaggtcttggaaccctcaccgttgggggtcttacgggtggagatgtgcagggtcttggtgggaagacggacggggcccttgacctgaagggacttggagcgggcacgctcgatcagagcagcgcacacagactcgagagaggcaaccttgcgggaggtgagggtgatacggattttgtggaccttctatatgcaggaagaccgattgttagcacaatagagtcgcagtcggcattgaccagcgcgaccacttagaggaattgacaacgtacagggccctcgccgaagtccttctcctgcttgtaagacatgttgacggtgagttggtgagtgagaccgggtttgagatgctgaggaccagttagcttgtggtagcgggtgaattggattgaggaatggacatactgcagatgaggctggatgccaatcaagacctgaacttcgaggctcggtaaggtgatgatggccgttaa

SEQ ID NO: 17588 - DNA, 1018 bp, Emericella nidulans
gcagcagacaatagaaatcatcttgcaatttctatatgtaacgggaaagtagctaaattaaatcaagccatcggatcgccgaataacaacatgctccaagatagaacatcatgtaaagcccacatcaagaactcctagcgcacgtagaagaaagcaaatattcattgagacatggaaattcaagtcggagcagggccatgatatgacacaagcatgaggatcacctgacccgataatggctcataatctggtatcagaaacttgcactcggtcatcaaacaaatctcagcagctcagaattcctcttgttcccggaaaaacattgaaaagctgatgattgttccataaatcagtagacctccgaggatggacatgatcatggcgggcacttgaattgcaccactgtgcgcaaggacggctgggagcgctgtaaagatgagcaaattagccccgttcaaatagcatagtataggaaaatcatatcagaatcgaaaaatggcaatttcctgaccgacaatgcctcatcattttgggtagatcaacttaccaacacccatgagtaccaggaacccggtcaagaaccggccaaagtcggcaacggcattgccagagctgtccataaagtcatcagggttcgcgcatcttgagcagatccagttggggagcggcgcaataacgtatgtcgcaacaacagtcagcggcaggaagttgtgccagagagccgaagagagtataacaaggagaaatccaatcgcaagtacctgtacgtgatcaaactatgagcggccggtttttaagcggaactgagcaacgtacgaaggagagagcgatgattgtttttagaccagccgtcatgactgcggagacgcaggtgcgtcaagctcaagcttcaggcagcgggcagcgggcaaaggaagttgttgtaggactgtcttgtgcggaaagcaagcgactgcatataactcctcagtaataggagataatggcaaagcctcgaccaatctactcaatcatcaga

SEQ ID NO: 17589 - DNA, 497 bp, Emericella nidulans
ccttaatcaggagctcatgcagctgtaccctgggccccgagtcaggatctctgcgcccgggaacacgtccgagcgcagattcagctcctggatcggtggaagcatcctcgctagtctgggcaccttccaccaaatgtggatttcaaagaaggagtttgacgagcacggcccgatcatcgttgagaagcgctgcaaataaattttgcacatgtcttttgcgcttcgttttctttccttatgtcctcttttctttcacttcacactaaatctgcttcgtttatttttttttccccctctcttccgtttgaaacaatgattgaagcttatggtagcctgtagggaacatgtggttatatctttggcgtttttctgcgctgttatggaaggctggaaagggacatgttggactttatttgcctagaatcgaactcagactatgctcgattttgagcattagaaaatttgtacgagtaatgtcattgggattgagtgctttt

SEQ ID NO: 17590 - DNA, 590 bp, Emericella nidulans
cttgttcaaagcgatgagttcattgagtacagaacctggccaccaccttggaagaagaacctgcctacatgtaggccatatttgacaacagaatagaccgtagtagccaagtaccagccagacccttatgtcccactgataggtgcgagggaaaacagcatatatagctaattttcgcagcaaacacggccagatttcggtatataaaatggagattcgtacacaagaaaatctgcaaagatggtcttaattagctcttaaataaggtagtatgcctcttctaggtccatgtcggtcacacctctagcaggaaattccttatctcggctaggtaaaaatgatgcttcagctgcgctgaccaatgcctatacgctcctcgcgagacctaactatcctcgctttgtcaccaggtagaggcttcagttcgtcgctagggtcaaagttgacacgggtgccattttgagcgggatcgtgaccactgtttcgtggttccagcttgcgcagtcgctcctcctcgaacattgtgagatcatcagaggttattgctatggcggtaggcttgcggcgtatcatgacgaaacccttgtcga

SEQ ID NO: 17591 - DNA, 460 bp, Emericella nidulans
ccaaataagagatataaaccaaccacatttactctcccaattctcgaaaaatgtccatccgctttctaaacccaactcgccctctcagacaactgtctatcactgctcccagatacattacacctctccagcaacggttcatctctcagtcgcccatcgctatgactcgcatcatcgacgcaatcaagcaagatcaccgcgagatcgaggactactacaacaagatcctctccgcaaccaccgaaaaggagaagatccaatggcagaaccagtttacctgggaacttgcgcgccactccattggcgaggagcttgtcgtctacccggtctttgagaagaacctccccgacggccgcgccatggccgacaaggaccgacacgagcacaacacggtacgtctcgttcatttcctaaagaaacaatactaacaaacgacaggtcaaagaaaagctcaagcagt

SEQ ID NO: 17592 - DNA, 252 bp, Emericella nidulans
tggaggtaaaataataaatacgtttactctaaatggggtattatatacaaatctaatcgactacccataacatcgtcggctgcacgagaggcacagaaaaaaaaatctttacagcttggccttctcactgaacctcggagcctgaagagggtcgtaagcacccaggctcagcgtatcggctggcacagacgcactgtgaccaccaaccagaccgcgcacgtcaaccatactagggttgaggtctgcgatctt

SEQ ID NO: 17593 - DNA, 341 bp, Emericella nidulans
tatcagaaatagtgaaatacacttgcggaaagaaaatctacccctcaaaaagacaaggcgagcttagaaaggacggaaccccgtggcctgcggcgttatcccattcgcttgtccgtagacaggaggtgctggcgctgctggaccctgcgtcagcatgagcctggatccgcctagaatcggcgtgttgtcctcgtccttcttttgcgtcacctctcgtgccttccgctcctcgttgtccttcttcagcatctctatcgtacgtgtttgctcgcagaggaagttgatcataaaaggcattgtgaagtcctggaggccgtggcgccatgacaactccaggatca

SEQ ID NO: 17594 - DNA, 810 bp, Emericella nidulans
acgttggaaaggtaatctcatcgatcctgccacaaagtggaatattcgccagccataaacatagaaaggaaattcattcatgtttgtccctttttgaactttatccatttcaaaggcccacgcgattgtagattttctgtcttccaaataccgtcatttatttgccctttctctctaaaataaaaagtgctctgacggcataagtgaagacccgtcccaactccaactccgcgggagtgcccctgcatatgagaaaccgtacttcagatgcgaggctcctttgccataccagccctctccagccccggggaacgaaaacgcaacatcggaattgatttagtggttctcaggaccacgggcgcccttgggagtgccaacctggaagccgttcttgaagcggcggtggacgtcccgcaggtgagcggtacggccggaaccggtggtcttgcgtcgcttggccttctcgctccagttgtctgttgtccacgcaatatcgtaagccagagttcccgtaatcatataccacctttcgctgattccataaccattcaacaggagaagaaagggatattcgtacacttgcgagtcttagcagcggggtaaccgcagtttgcgcaggtcgacttctggatgtggtaggaccggcggcctgtaatgatgcaaccattaagcgttacgccttctatactgttgattattccgaccgttcctggctattcccgtgtagaaaaccatgcccgtatacagtcggaaaaaacttcgaagagataagttactgaccacaacgccggcacagagtgtgagttttgt

SEQ ID NO: 17595 - DNA, 550 bp, Emericella nidulans
ctgttataaggaaactgtgtgatgaatattattctagcttttataccatgcatcatgagaaccactaacaatggtttgctaactaacgccaagtcaggaattcgaaattacaggctatgttcgtccgccctctctaatcagggggtgttatacccaacgagaatgaaaaagcccctttcggctcgccgccgacatactgccagacgcagggatacgggccaacacggatcatgacgttgtggcagttgcagagcagacctcaggttgctcaaatctaagcggaccggaccgggcccctacagcgacgcctactgtttgatcgccgtcggtaccgctgtgccttccgtcgaggaaggccattcttttgaatggatttactcagaaagtccgaggttctcctcagcagggaccacacggacagtgttagtgtggcccataccgccgcgccaccctgaacacagacgatgttgtcgcccttgttgatgataccgagcttgagaccgtggttgataccccacttgaggcgacggtcgacatcctcctgccagat

SEQ ID NO: 17596 - DNA, 684 bp, Emericella nidulans
gaagacaagaaggtgatatatttactacaggagcacaaagtatacgaagaaaaggagaatatggtcccaccgtgctaagtgcaacgacggacataacagggaaacacgaaagtctgcattcaagatgccgcgcaactagacgcccggattaccgacttaaaattggtcgatgcattcacagtgctgctcaacattgtatttgtcgctggtagcgaacttagacttccagccgtcatcggcgtaggagaagaaaacggaaacatcgccaaccttctcgacgagggacttgatggcagtggtttgctgggactgaccgggaatagccttgccgttagcactaccggcgttgggccagccgggctggaggctaatgacgtccttgccagtgcagacctgcttcagatccttgatctggttgctgacgagagtaccggcctcagcggcggtgaactcggggttgaagaaggggtgaaggttcgcacccaggatatcaacgacagggcagagagtagcaccgttactgagccagacgtcgataggctcagcggtggtaacctggccagtgtagccggcggcagagaaagcgctggcgccctcggagacgaagctggcgagctgggcagcggacgcgatgttgctagtgacgacttcgttaccgacaacaatgagagagacaagatccca

SEQ ID NO: 17597 - DNA, 747 bp, Emericella nidulans
gcagtgcacatttgtagtcgttaaggctgagctagacgcatacgtacatgcatttctatatcctatcctgtcctctcctatcctatccaagtctatccgtcctatccagggacactacaacaactgctacctaggactttccactatttcatcgtttacaaggctagtcatcgtacacttcctcatagatctcctcgtactcctccctggcctcttccagcgcctcctcctcactgctcgatgcatcggagtcttgtgccgccagctgcgcccgctcatattcctgtcgagcctccagaacctcctcacggtcgctggaggaaacggagtcaccgtccgccgtctcatctggggggagaccaacaggtggaggagcagtggcctctggcggcgccgatgctgctgctgccgccgcgcgggtttcatcgtccgagtcgtctgggcctgttagccattcaagcccctataaccagggcatagggataagatagtttggattctttgagcataccgagtgcattcgcaatcagcgcacctccgacagcgcccacagcaagaccgccagcacctgcaaggagcatagctttcttatcatccttgctcttatccttatccttgcccgacttctctccactatagtgttctcctccctgcgagtaaccatacccaggggcgtaccctccctgtggtccgtaccccgggtgataccctcgatcctgcccgggccctcctccatagtatgggtcc

SEQ ID NO: 17598 - DNA, 576 bp, Emericella nidulans
attcgaaagagttcgtgttggtcgttctatagcgctgctcagtagaaggtgaaaatgtgataggatcagggtgcttgaaaacaggccaggaaaaccgagccttgtgtgttgtacaggtgttgggataaataccccgggaatcattaataaggtatttctaagcaatcatccgaaagaacgccgcccgatgcactgaggacacagctcaagagagcagtggtcataatgtataaccaagggaaagtttcatatgaaacgctagaccatgaatgattcgccacagccacattcctcctctaaatcgtgcgttagcaaaaggaacaagcaagctccggttaaggaggacactcactgatattagggttgcgaaacacgaatctcgcgctcaatttatcttcttgccagtccatttcactgccaataatactgaaaagggccttgctgtcaatcagaacctttacgccgtcctgctcgacgacctcgtcaaaagtgcctggcttatcgacatattctaggtgataagcgagaccggagcagccacgattcttgacaccaactcggataagcctcggctca

SEQ ID NO: 17599 - DNA, 537 bp, Emericella nidulans
caatttgctttatgtatcttgaattagactccaaactaaatacaagctgaagctgcataaaaatcgatgagaaaagaatgtatcgtgggcacagccctccagcatctgattcccgtcacctataccctcacccggagggataaatggcgagcatccaggtaatcacccagcctggacagtaggagatgaccctactaggcagctgacagttgatgggcacacagtaagaggtatattgatcaataggaaaccgattgagtcacagactcgaagtcttagccctgctcgtggtctgccacaggcagatctgagactaatgacttaaatacctcttacctgaccaagccaacctgtcagttgcaaatctgcatccatacccatacccgatgggatgtatcgcagcaccacgttgcatctgctccaacccgcattcggattccagtctcatacctgtaccagaagaagcagacgttcagcagtaagacaacagttggctctcagaaccagtgctgtcaagcccgctgataatggacgaaa

SEQ ID NO: 17600 - DNA, 487 bp, Emericella nidulans
cagagtcgctgcatgatattattcgggcgaggcagcagcaggcaaatttccaacttattgtcattacccacgacgaggagtttttgaggtatatgcagtgtggggactttagtgattactactacagggtttcgcgcaacgagaggcaaaaatcaattatcgagaggcaatctattgctgaggtgtgttcttgattctctattgcattcatgttgacttataactgacactacctaatctaggttatgtgattaaccagccactgttcttattttcgagcgcgaggctgcaaggcgctcacgcggcattctattctcggctcattcggttctcacttcatgtagggctagtcatgacactcatggtgtagcataggttccggcgttaagggcgggtagtcatcaaaacagattcccattatatagtccagtctggcacgtaattgtccttagataccatggtttgaatcatattaaccctaattata

SEQ ID NO: 17601 - DNA, 516 bp, Emericella nidulans
cacgccgaacacaatcggcgacgcaattgaggccctcaaacttggacacgatataaatggctacatcggagaccctgtcacaaatggcggcgaccaaccactctctcctaccggcacaggcaaagggaaagggaaacagccagcatatggcagcatgcggagtgtcagcgggcagtctgtaagcagcagtagaggcaagggcaaagctgccacttctggcgggaagtcatccttgaagagcaagtctgtttctgccgcgaatggcaacgccgactcggactcttcccttgatgggcctttgatgggctcgggcgctcgaggtggtgtcaatagtgatggagatgatgatgatgacgataatgattatatcgtaaggacggatcatttggcaaagacggatgccgacggtgaggatgttgactaagttcagtggttgcactgaaacttccgttgtatatattactcttgttcacgtggatgtataggccgtgttctataatatgtctatatactgtg

SEQ ID NO: 17602 - DNA, 948 bp, Emericella nidulans
gagaacaaacaattagagagtttctagaaataatgatcaaatcctaccacgtctacttaatctccttccgcacggggttctttaatagctggcggggccagatcaccaccccttgggaaggcaagggtaaacaggcctcaacaacccaattgcagtcgcatataactgcctcgtcataaacgtgctcttcgccccatacccgtcccgaatgtgctctggaagcatctcgattgtaatagccctcagcacaggctttgtaagccctactcctcgcggtagatcccgcttctgcagctcggacgcgacatcatgtgccgccgcagagactacgagcttcgagagctcggcgtcccagtacttccagaactcggcgcgcgttgacggccaggatacttgcgacaggctctggtcgccggcagaggcggatggaagcacggtaggcgatagatagcgcaggacgagggcgaattcgtcatacgccgcctcggcagtgcggtagtcgaaggccccgtagatgcgctggtagaagtctgccgctgttgcgtagatggtcgcgacgagccagagttgtgatgtgggcgatgtgaccttcaagctcgactgcagaggaggttgtccgagccctaagcgagccagaagtgcttgtttttcgtccttgctgccgaggacgaggcaggcgatgtagcttagggctgcatggaggtacgatgtgaggtcgtcagtcagattggagcttgcactgctggcggtgttgaggccgggatgcgccgcttgcaggaggacagctgggccgcaggcaacgaagatgaccccttcttgtaggattttagggagcacttggaggttatcgaggccagagaggctgttgttggagttgtatgtggcggtttgtggtttcgttgagcttgcactcgagggaaccggcgtgattctgtcgatgtcgcgttt

SEQ ID NO: 17603 - DNA, 385 bp, Emericella nidulans
tgcaccacgcccgtatgtctgagcgcggactccttcagaaggatgtcgtcaatgagtctataagcctcgagctggacttcatcaacatcttcatccgtatggtgcagatcctggccatgagaaacaacaaccgaaggtaaattcgatctggaatttactaggatttctcccgcaattattataaacgccctacttgggtcggatatttgtactagttatttgctcgggaatatggcgcatttgttctttccatgttcatattttctctgattgaattctgctattagcgcatattgtccgtgcgcctttgagttgttggatagcatctccgctcaaaatagtaggggaaaaaagaatgaaaaaaatgagaaaatatattgtgata

SEQ ID NO: 17604 - DNA, 489 bp, Emericella nidulans
ctcccatccttacaaaattcaaatttttttttgcacaaagaacctggtgtttgtcaactcttatctcgcgtttcttttctctcatagaccatgccttttactatcaccaagcgctgttcgcttctgctctcctgtataatataatggcgcgaaatatcgaaaagtggttttgggaggcgatccttgtttgagattgacaccattttcctcttcatcaaggatatcgatatgttgacgtctttcgcctcacgcatgttcttttaattacagtatcaacatcacgagcggatgatgaatggacactgggaacgatgattttgcagtattatcaactctactcaaaggaaagaaatgttacgggaaaagcgtgtttttgattctacccagcaggagacagtcctggcctggcattggactggtttcgatgtaatctagttctactgggtagccacggaggatacctctataattcaaaagtgactcgtacag

SEQ ID NO: 17605 - DNA, 938 bp, Emericella nidulans
tacaaccaacattattgcgcagacgaggcgaggggaccctgaaaactgtgtaatgctcggaggtcacagtgacagcgtcgcggaaggacctggtatcaatgacgacggctctggcactctgacccttctggaagttgcgactcaacttagcaaatacgacgtaaacaactgtgtacgcttcgcttggtgggcggctgaggaggagggtctgttgggctccgactattatgtatctgttctcagcgaagaggagaacctgaagattcgtctcttcatggattatgacatgctggcttcgcccaatttcgcctatcaagtctacaatgctacgaatgaggttaaccctgttggatccgaagagctacgtgatctttacaccgagttctacacttctcatgggctcaacttcacatacattccgttcgatgggaggagtgattacgatggtttcattcgaaacggcattccaggcggcggtatcgctactggtgcggaaggtgtgaagaccgacgaggagcaggagatgtttgggggaattgcaggcaactggtatgatccatgctatcatcagttgtgcgatgacctcggaaacgtcaacgcaactgcttgggaggtcaatagcaaggtatattttgaaattctcggtgctggtacaaagctcacagttgactcttctcgcagctggtcgcccacactgttgccacctacgcagtgtcgtttgaaggattcccaaagcggacaactaccaatgttaagtccgtcgacctcgagaagcgcaagtatcacggccctaagctactcatgtaatataagcatgccgactgtcaaacagctggatgctgagataagtgatcatgacctttatttttctcttgaatatactctcatttcctgttcaaataacctgttccaagagagaaataacgctagtcactagt

SEQ ID NO: 17606 - DNA, 597 bp, Emericella nidulans
attgtttcaaattaaagttaatttacaggtcaggcagagaattatctcaggtatggatggtatcgtaattcatcataacatattcatgaagcgaaactgatcgtcctagcaatacctcaataggttttgacaggcaatcactatctagtgatcaccaaggccaacagcgttcttgaccttatcgccactgcacatactatcagcacagtgacgatcaaaaagtcgtcaaggttacttacatagactgaggggtactgccgtggccctccctgtcgctcacacgctggctcttgtcaaaggcctgctgggtggtgcttttctggtcatcgggctggacgccgcgggagatgcggtcggtggtatcggtgacggtctccttcaccctttcctgggtggacttgctggcgtcgggagtgatctcctccttagcctctgcatggctcatgagtatccaggtctctgtactatcataggagagtgaactcacttgtggagaaatccttgcgagcaaagtcagacatgttgataattgttgactggcttgttctgagtttcagaaattcgatgtgattttcagtggggggttcttgatgttcg

SEQ ID NO: 17607 - DNA, 476 bp, Emericella nidulans
cggtggcatgcctgatcttggatctttgatgaacaaccccatgtttgccagcatggctcaaaacatcatgagcaaccctgatatgctcagcaatctgatgaacaaccctcaactgcgacagatggcagagaattttggccaagggggtggcatgccggacatggcaagcttaatgagcgacccgaacatcgcaaatatgtaagtcttgtcgtgctagctttcttccggcccagagcactaatcatattatagggcgcgtaatctcatgggtggtgccggacgtggtggatcccaatagtctgtgcactcgttctattgtttaatacctgcgctgacgcccgacctttttttcttttcgatctgaaattgtctcggtacatgtgtttaaagtatgactatgatattgagaagcatatagatatggccattagccgccttctaatgattcaactctcaattccacttgattggaataa

SEQ ID NO: 17608 - DNA, 361 bp, Emericella nidulans
acggcacagattctttacgcctatgaggatgattcaggcgaagatgttgtggctagcttggatttctggaagcacaagccgctggcacagcattaggcttctgcacagaactggcgcctgcttttgatcgctttttagaccagattctatttctgctcattgaagaagcatttcgactccatctcttcccacttctttttcttctttactcatttgcttcctttttgagctgcctcaaagattttctaatacctcgacgtttatttggtccgtcccagatcgagcctgctttgctctcaaattatcttccgttggccatttacttccatcgtgctgtgtacaatgaagcgcaaataccatg

SEQ ID NO: 17609 - DNA, 415 bp, Emericella nidulans
gtgcgagttctaggagaatcgcactgaaggagacgcttacatcgagagagatcccagaaagacagttttagtaatgcgatacagggtatctaagggtgggatgcacgagtggacggcactttgcaggacgcgtatgtatgcaggtactgacaggaacgtgtgcgctgcttctatccggaaagcaagggatagtatcgcgaaagtcgacctggatttgcacctatcgacagggagaagggactctagctctcgtcgtcctgggcccctacagtgaactttttgcgcccagctccagtgagcttttggagcttgaccctgtccagctgctcccctaccttcttttcgattctttgaatctcctcttcggcatctatggccttcttgttcgcgaattccaataccaatcgcctgccga

SEQ ID NO: 17610 - DNA, 419 bp, Emericella nidulans
aaaagcagactaatgacattgggtaacgtgatcatggagggcaaaagattaacaagcaagacgaaaccgctgagttgtagtatcccataacgccgtggagccagaggacccttgtttgatattgaagttcagaaactaactcatcatgctttgtcattggggccggttagcagtccacaaaaagagcagaggaaaccaatcccaaaatgagaatttttagcggctaaagtaggatattagtatatatgtgcaactgcgggatctaaaactcactcctcggcccattcgttctcgcggcggatctggtcctcttcctcgggggtgaagtcgttctggatgttgaaagtcttgcggatttcctcgggggacttgcccttgatcatgttggcgacagtcttgcatccgatgtcaaggagagg

SEQ ID NO: 17611 - DNA, 402 bp, Emericella nidulans
agatggacattgacgacgcccaggatgacgaagacaagaagaagcgcaagcgacatgaaggcgagactcctgaagagcgtgctgagcgtaagcgcaagaagaaggagaagaaggagaagaaggagcgaaggaagtccaagcaggagaaggacgacagcgatgatagtgattagatcattttcaggaagtcgcttgccaacttgtggccgttggcgtctcctcgggcaagtttcctgtagtatatttgttgctttattggagtcttttgggtcgaaaagggaatgagttctaatttgttttgattttctacacgtttcattgtttgatgtcacgcagcttgttctgagacatgaaccatggtctattttaggacaaatatccaactaagcaaatttctgagat

SEQ ID NO: 17612 - DNA, 733 bp, Emericella nidulans
caagatgaagctcaccgctgctgttgtcaccggccttcttgccacgagcacctctgctgcgttcgacaagtgggctcgtaagttggaacctggccagatgctcgttcagccgtactaataccgatgcagcctggggcaagcgcgattactcctgcatcaatgcctactcagggcctaccggtttgtgccttgactttgcttgagatatactctcttactgacagtcttctagagaacagcacattgactacaggcaccccgcttgagatcaagttcaaccgcaacagcggccgctgcgattctttgaacgactaccctacgggcaactacagcctgtggctgcacaacaacccagtccgcaacatgggcttcgtgaactcggactaccaggtcaagatccaggacggaatctcttcggatgcaaccagcgtgaccttcactctgccggatgatctgcccgaggttgccgacgacactgtctggtaccttcgtctggacacttatcttcctactgcgccccaggttcgtcccctcctctgcaatgctcgagtagatgttgattgttttgactcagatgccttcacttttcaatgctctgggccctttccgaatcgtgcaataagtgcgactgctcgtcttttgtatggtagtctgagaatcgtttcttgctgcgcgttccttcagtttgacagatcgatagtgtatgtaataaaaagatcttattatcagcctt

SEQ ID NO: 17613 - DNA, 744 bp, Emericella nidulans
gctgtcgccgaattcgacggccaccgccctggtgaactcatggttgagcggtgtcgtcagccagaggaagtcatcgacccagacatattcgctttgagaatgcaaaatttagtcctcggcgtcaaatcacggacatttgcacttgggaacatcaagatcggcgatattcttagcgaagtgctatctatggtccggcgacaccacgtccgcttggaaggggactttgtcaacgtcgtcatctccattctcctcctcgaaggcattggccggagcatggatcctgatctcgatctctttaagaggttagcgccgatattccctgccttgctgctcgaaatcatcgagctgccacccgctcaaaaccccctcttttggtaatccgcagaactgactcacttttccagtgcccttcccatcttacggaaactcggttccaatgccactttcctaaagacaattcggtcgggcgacacctcaatgcttcgcgtctgggttggtcttgaagctcgtggcttacttagggcgagcattgagagtgtggagaattgtgtgaagtatgatttactgtcgcctaatgtctagatgcggcgggaataaagttcgagatacgctgcttatgtattatatatttattattctcctggtctcatttttgtggttatgtactataatgcctgtatatagctagagtcaaaagaccatgaatatgacgatatagattgataaactgataatacttgttcc

SEQ ID NO: 17614 - DNA, 462 bp, Emericella nidulans
tcggccggagacgtcatcgagattgtgcaaaggaccgataaccaaaacgagtggtggacaggccgtgttgacggacgagaagggcagtttccaggtaagcaatgcccagaggatgtctctggactatgctaatgtctcacagcgaactacgtccagttgaattagtgaggatcagtgatatcttagcggctttaattctattctctgcaaattatatgttcgcttggagtctcatcaggctttactcgcataaagaattgttactcgttcatcgctctgcactgctgtgtccaggtggcattaactgtcgccgtgtatatatataccttggggttcgagcaatgattcacgagctgctgtgctttgccagcggcgttgattcttgacctgatacctatcctcgaatgttcttgacgttgtgtacaaagatgaacaaatagcttggactcgtgccaagatatc

SEQ ID NO: 17615 - DNA, 167 bp, Emericella nidulans
cccatcctctcctagtccatttccgtcgtcaaattcacggacgactcgctccagctctttttgcaaactgcgccgtctctgctgctgggcctcggtacttgtaggcaatgcaagaatccacttctgcagtacagcccaaagactaggtccaggtcgccgcggctgga

SEQ ID NO: 17616 - DNA, 280 bp, Emericella nidulans
gatgaatgtaaaacctgttgaactatgaacgtttagttcttggcgtataattaaaggacaagatcagaaacagattaaatcaaaacctgtcaatactccgagggaccccagaaactccactgagtacgatgcaacgatcccttactccgtccatgatgagagtcaagaaacaccgcggaaggatgagatactccagtcgaagtaagatcaggctgcagacgcatgaaccaatccattccattccctcccaagcactccgatacgtatgatagagcagatc

SEQ ID NO: 17617 - DNA, 180 bp, Emericella nidulans
taacgccgcaaatttgacccccatatatccactatatatactatgacgagcagcggatatagcggcactacgggctcgacccctcacatagtaggaaagggaattgtagcgtatcccccgggttgtgcccttcccaggcctcgaccttctttgtcaacgtccatcccacggaaaccttga

SEQ ID NO: 17618 - DNA, 405 bp, Emericella nidulans
aggagacagaaatcgtacatatcacaacataggactagataataattccgcacctgataagacgggaaagtcacaacaaccgccctagcaatgtacacgagcagatacgcacggtaactggccatccgcagtcgcgtttaatccgacccctctgcagtatgctgctgcgataggcttcccacagcgcgggcaccaaaccatgtgatgaaaggatatgtgcagataggcatatatcactgccgccggttacttttgttccttggaccctgtggaggagcatccgtcataatctcatcactgtattggccagtcttttgggctccctggttctcgccttggtcacctccgtaaaagttcctcctacccctgttgcccctccgattgttaccacggccattgtatcta

SEQ ID NO: 17619 - DNA, 305 bp, Emericella nidulans
atttttcacttttcattatttttttctcttttgtgatcacacaggtatttattttaagaacctagccagcaaagttccagaccagaccaacgggacaactccgaccggacgccagcagcttagaaaggcatcttcatgtggaacattcatctcagacgatatatagacgatgtatagcgttttatttcttgtatttgttgtatgtatcgatgaccttctgcacctcgtcccgagagccgaggaaaacaccgctcttgtcgtggatagactccggctgaacagagagaaggcgctccatgcgtgag

SEQ ID NO: 17620 - DNA, 487 bp, Emericella nidulans
caagagtacattaacgtcaattaacgtctttctcacatgtggcctctcttgtccaagcttgactccgacgtaaccagactcgcaatcgatcaaaattatgtataagaaggaaagattatgaagcgtagctgcaacaggggctgaaggcggggatgcgttcgcaaaagtgctttttgtacagtggaagaaggtagaggaaaagttaaggaatgctgtatgccgcaacataaacaaagggcagggacaaggatgaatgtgggaaaactcgggatggaaataataggcataagaaaaaagtaaagttgcacccaaccgcccatatgtgtataccgaacgccttctatcggggaatcgacaaatggtgcgacaagcaaagaagcagaagactactcgtcaaacgaaaataagaaacagatcagaacgcagtggcaaaaaaaaaaaccgacatggagccgtcaaacatgatgggagtaaatggaggagttaa

SEQ ID NO: 17621 - DNA, 308 bp, Emericella nidulans
gaaatctcaaggcttaatacgactcgaacagaatagagataactcagacctagatataacgacaattgatttcccagcaccctagggacacagcaagcattcccaattcataacccatcgcaagacgccagcccaaccaagatagtgagtgaaacaaaaatccccagactcagagcgaaaggaatatcagcaagaaattacaagagaaccaaagagggagagcatcagggacttcccaaaaaataaccaagtcgaaacactaagaggacgctcaaacaatctccaagcgagcctgcctgtgaggccat

SEQ ID NO: 17622 - DNA, 369 bp, Emericella nidulans
aagctagctaggtatcaactacagtatttttataatcctagtcatctacatcaatccacatcctgacaaatcaaatcataacttcctgttatttatcttcatccattgatccgtcagacgttcatgacattttctaacgtagagtgtcgagcatcaaggtcattgaaggtccaaataacactcggagcacctccgcccggagcgtctgaggaataggcactgcctcatttgagctcaaactgcgcgagacaatcaagggatatcgaaaacaggcttgagcttcttgataagagcccattcatccatggagacatccgaccggtagaactccttgagggtgtcgatgcttgcacgagaaatctgggagta

SEQ ID NO: 17623 - DNA, 443 bp, Emericella nidulans
cttggttacgggtgctctcctggtatgttctataaactaaaacggtgaatacggctgactgtgccgtacaggtcgatgaggaaaagaaccccatgaactacacacagaccttccagcttatgcctgatggtgctggaagctacttcgtcctcaacgatgtcttccgtttgatctacaacgcttaaatgatatatgtacgagaaattggagggggaccgttatcctaataggagaagaatttatgaatattatgatttagagtatggaacaattaggtcggctttctcactagttgtctgctgatgctgaggcatcgctcctgtttccgcccgcttctatgagattccacttggtatactcttgaatgaatttactgagctgcacttctcaggattcttctgttggccttggatattttgagaggctgatcatcctgtattatt

SEQ ID NO: 17624 - DNA, 395 bp, Emericella nidulans
tagacaaaagcatttgtcaaatccaatttcacgagaaaagagataattaacagtacaactcgtacttgataagaactacctagctacctaggatggggtagtaaaaaaaaatcaaagacatgattgcgtgacacgtatgatacaaaagaatgtgggtgagaattcaatttggaggattaggtttgtcatgctacaaaagaacaataggaaacagaattcgtccttgtcaccgtcgcatttcaaagatctatgcggtttgagggttgaatccagttcctgagatttgggaaatgtcctgagccagtttgccatcagcaccattgcttaagagagaatcatagtgcttcgcatgaccgttggtcaccgcggtgctgccgttggttagggttggggca

SEQ ID NO: 17625 - DNA, 527 bp, Emericella nidulans
cccccgcaacaatgggcgaggcttacgaggataaggtgaagatgttcttcgccgagcatctgcacgaggacgaggaaatccggtatatccgtgacggagagggatattttgatgtgcgggggaaagaagacgagtgggtgcgcattcgacttgtcaaggatgatctgattatcctccccgcgggtatttatcaccgatttacgaccgataataaaaatgtaagttttttggccttattgagggtatcatgatgctgacgtttggtgtgcagtacatcaaggcgatgcgactgttccaggaggagcctaagtggacgccattgaaccgtgcaccggagcttgatgagaaccagcaccggaagtcttacctagagggactcactgctacctcaattgctgcgaactaggtgcttcttcatgttcgttcagtatctaagccgcctggtatcgaagtttcatggttgtttaatggtgtttcagttggtcaacaatacataaacgacatagtaacgaaactggcctatgttc

SEQ ID NO: 17626 - DNA, 445 bp, Emericella nidulans
tggataccggccagacccgagttacttgactatccgaacgcccagtttctgatggttggttcggcagctggagacctcgggaaagccgcgacagctgaggaaggcgacaagagaccggaagaagagcagcctgaggaagaactgtcaaagatggaggaggaaaatgaggagagggttgagtcgctaggtggtgagacaatcccgtgtcttttgcgggtgttatgtcttgattcgagtctgctaatccttaccaggtgagcacgcgatcttcatagatctgggatatcatgctcaggagaaatactctaagctggagaccacttggaagtaggcacagggtgccggtaaactactgactcgtgcgatcgctcgtgggagacagagctgccaattaagaatgcaacgtagttcaacgcagtgaaggaatggcatcttatctccatca

SEQ ID NO: 17627 - DNA, 431 bp, Emericella nidulans
  unsure (1)..(431): unsure at all n locations
attgataagattctatcatcatatcgagagtaatccataccgttcaacgccatgaatccagggataaggccatgctctttataaagtccattaccatgttcatgtccatgagtaatcaagtcgtgaccggcactgccgccgcaaccttcaaccccaaccgctgcgcatactgccgcccacgcattgtgataaatctcccgtggccctgtgatctgctctgcagctggctctgactctggctcctctcgagtctcctggctggcttggacaaatgctcgtggatgtggatatagacggggatctggctgcagctggcgttattggcggccatgtgagctagagccgactgcgcctctgacttggaggctgcctccggaggagacgcggtaggtggaggtgttgaaggggagggccccggngaaggagagaga

SEQ ID NO: 17628 - DNA, 364 bp, Emericella nidulans
cgagaaaagagataattaacagtacaactcgtacttgataagaactacctagctacctaggatggggtagtaaaaaaaaatcaaagacatgattgcgtgacacgtatgatacaaaagaatgtgggtgagaattcaatttggaggattaggtttgtcatgctacaaaagaacaataggaaacagaattcgtccttgtcaccgtcgcatttcaaagatctatgcggtttgagggttgaatccagttcctgagatttgggaaatgtcctgagccagtttgccatcagcaccattgcttaagagagaatcatagtgcttcgcatgaccgttggtcaccgcggtgctgccgttggttagggttggggca

SEQ ID NO: 17629 - DNA, 467 bp, Emericella nidulans
gggatctaccaaaccttttcgacttctctcgacatggtgcgtttgagctccggttttctctctaggacataaacgaactatttagactggatgctgacagcaggctacagaactctcaatcgcaccttcaatgaacagtcggcttgtcccaccgcattcacggcctgcgctcgaagctcgcggactatatatcgacgactttaagcctctgaagaaagaagaaatgatggcacaccttgactgagtcaacgtcatagtgctgatgaattacacgcccttcatagtgcatcagctcatgcacatattcgcgaagatttgatgccatgccgtgcaccttcatttccatgcatctggtggtttttgaactagcagaggtttatttacatctgtagacctaatccattggtgaggcatccgggagctggcttctctgtatcgggttcgaggaaagacaaaaaacgcattct

SEQ ID NO: 17630 - DNA, 413 bp, Emericella nidulans
agcgtcactagtcgcagaacatggaccggaccgggtcgatattcggatgtttcatacaccgaatttgactgggttgcggaagagatggattcctcgacggataaatgagggctgggggctgcagcatatgaagctatacggtttcgacgacgaaattattctctctgggtgagtgcttgctgttagaaaacaaagactcggtgactaacgaccgcacagggcaaacctctcaaatgactatttcacgaatcggttagatcgttatcatgtgttcaactcgaaggaattggctgattactatgcgcgcattcacgatgcagtctgcagcctcagctttaaagtccttcacgatcctcacaataaggccggatacgttctccagtggcctagtgctaatagtgctggatctactt

SEQ ID NO: 17631 - DNA, 309 bp, Emericella nidulans
tagaagaattataaatatattactaattactagaacgtacaacaaattgaccaaacctctatatacagctgtgatacttgttactcagccggtgtgatacttcggcatctgtaacgagcatcctcctgttcagatacttcctcgaatcacgcaagctgatattcctccggaatttcaggccattcgtcaatcccgtctagcaaagccaatgccatgcctccgctttggtgaatttgaatgtggcaatgcaacaggaacggcccagggttgacgacatggtacctaagggccaaccatgtcggaccagta

SEQ ID NO: 17632 - DNA, 483 bp, Emericella nidulans
atctgtagttattgagatgccggatacaagagggctattatcaagacatagacaaaccatcgctagcgactagcaagcaaattcagaaaacaggacaagctggatggggctgggtaagccgacatttgtggtgagcttgagtaaagaacactatccgcaaatatcacggagtgtcaaatgatgaacactgataggaagaaaaagaaaccgtcaaggggtagtcgagagtaaaaagatattagtagagatgaatgcacactcctgctttttctaccgtacgtaaaacggccactaccacctgctttcagtggtatagaatattgttcagcgacggccgtggctaccagtcaatgagccttgcacgctttccatctcactatcccaagcttagatgctgcgtcctagttagaccaacgatcctagacgcgacttatacgaaaatttctgggactttcactatcagggtagcctccagattcttgg

SEQ ID NO: 17633 - DNA, 378 bp, Emericella nidulans
atttctttatcattcattattgtactaatgtacacaaggtagggacagtgcagatattagagacttcagcacagtagagacagaaaggtaaaagttcgaacagcaaatccccatgaactatgctatcattgcaactcagtgaaagttggaaagttggattgttgaatgttcggaatagcctagacatccagatcgaaaggcgaaaaaaggtcggcgaaaaagtcggaaagtcgtaacgtcgtatcagacaatcgtgttgattgttcagctcaggacggcctgtggtcggctcgtgctgcattcaaaccaccttactgaatggtgatctttttagcagtcggaggcacagccttgggcaccacaagagaaagaataccg

SEQ ID NO: 17634 - DNA, 317 bp, Emericella nidulans
accgataaggacaagagtggatttggggtatatcaacaagaaaggaaattgcagggagcagtaggtagacatgtataaatagaagcaaatgatgtatgagggagaggcatcacgcagctgaataccaacggtactctagcagccagaagtggatggtaaccatgagaccctgaagggagacacggtgttgacaagatcttcgtattcgagggtctgttttccgtgtacctcacaggttaggcagccggaatgcatactcatactcagattgatcaagtgaggtcaaagctggaaaagaactggtcctagaggctttc

SEQ ID NO: 17635 - DNA, 350 bp, Emericella nidulans
tgaagaacaattgacttgatgttaactaatgctaaggctagctaccttccacatcgcaattggataaacaagctggacaccataacaacccacaagccgatccaagatagaagcattgctgcagacgccggtggcatgcaaaattctaggaatacatggaatagaagtagaacgctggtgaaaacggagacagaacaagccatccagcgcctaagcagttgagacacgttaaggaaaggtaaaatcgaacaataccaccataactcatagcgtatcgtgctaaagtagagatgtctcaagagatgcgctgcgtgtaagtctaacaactaacagcccttacccatagcttg

SEQ ID NO: 17636 - DNA, 439 bp, Emericella nidulans
ttggggtcaacactctattttagtgttatctagtggtatctgaaaagtaaagaagagacaacggtccagatcattattcatcgagccatgtccctttccgcgcttaattctatataccgcccatactccagggtggatgaagataatgatatttagaacatttggccccgatcatttccacggagcacccctacattctgcactgcagagtaggtcagtgcatattcccagttccctcaagcaccttgatggccggaatagctccaacttttgtcttccagggaccgccgccagcagggacgatagatccggtgctggctgtgtccattggcgagtcggggataactgatatgtggggaaccactatatccacgcctttggtgacactgccgctaccagagaagcagggtttatggcgaggaggcagaggacgatgagc

SEQ ID NO: 17637 - DNA, 608 bp, Emericella nidulans
ccaatggatacaaatcagcgaaagaatgtattgagaagcaatcattccagctgggcaaagcgtacgtcaactgcccggacaatgatgtggacgttaactaaccaagtgccaagaacccttctctgttgcacatggggacaagatggagctgcggctcttgaacctcgtgttgggagcgccgtacagagtccggcttacacgccgaagggctttcaagttgtggagtatgtctgccagcactacattgcctgctcgagtcgactcgctaacataatctcagtactattggggcaggagacacttttatagccgggatgttgtatggtttgactgttaagggagatacttgggatctttcgcagaagctaagcatagcgaaccgacttgcgggaacgaaggtagcccaggagggctttgataatcttggaagagttcttgaaccgctttctgaccattgaaagattttctgaccgcatattatgcgcaacggttatgaagaaagctgatgaaatgatgtatatttcttccaattgatagacactttttaggatttttaggatttgggattacgccctcatgcctaggaacataacagtgcacattttctc

SEQ ID NO: 17638 - DNA, 365 bp, Emericella nidulans
gaatcttcagtgatggcgcatgagacgtttgcatgcgctgaatggttttgaagctcgaattaagtgtacataaaatacaggaggttcggtagccaagcgtctatcttggtcaatcgcaaatatcaaacagagagtttatccaccaactccggactgagaactaaccgcgccaacgccttgctacacggtgaaatcgaagactaactaccctttcatagtagacaagaacgagtccaggttgtactcttcctggtactgtcggtcgtcccacagctcgccgagatcatcaagccaccccttcttgcccttctccttcaattcgccgtcaatgtcaaccatgtcgacttctttgccgcctatctctg

SEQ ID NO: 17639 - DNA, 338 bp, Emericella nidulans
cacaggtcgacattcaaggcttgacatgaaatttgtacaaccctagtaaggtgaatcaggtcgatgccatactcaacaggctacgctccatcggcaaaacagcgtttctaaggttcgcaagaaccgagaattcaaatccccagtcgcccgcacactgcgacatccgacagccatctttgaaatggatcgctagatggtcagcgcgcgtcgattcagctaggtaaagatgctgcacagaaaccacagcggctctgaatatcggtttgcgccgatcgctaggcttcaaggtttggcaccggatattgtgtacatccatgaaatttacgcagatgctgcca

SEQ ID NO: 17640 - DNA, 438 bp, Emericella nidulans
ctataattatttgtttcagattgtttcgaagtatatacattctaagacgctgacccacaatcaagtaacaagacggcatgggtagctccacctttcctttcccaagcaccctcacttcagggtgaggagccctggccgatatggcagaaggtcgtagccggggttgaggctgggatctcggccctgatagaggagctgcaggttgcaagggtcgatgctcattgtctgatccggggtactgcgcacaagaatcccatggctgatatcgtccgtccaggtggcaccgctgattgctttgccagcaaaaggtgcgctctcagtggccgcctgcggtgtccatgagccaccaaggctgtcggcagtgaatgaccggaaatagcgcccctgtgccccgatcgcttcgacaatcattaggtatgtgtctttgctttgacctga

SEQ ID NO: 17641 - DNA, 304 bp, Emericella nidulans
ggaagtccagctgagaccggtacacatatatatattttgctcagccatgtacgatgcagtagatctttagcgccctctccacgaccaacaattatatccacgttcagcacgaaagaggaaatgggcgagaatggccctttcactagagttccagtctgttgcaagccctactggcaaggatatttcaacaaggcaagaacgaccgaaagagggttattttaggggaagtaagttgtggtggaatgcgcggccgttccttcgtgcgtatacaattacagtgcgccttcccaatacctagacaatc

SEQ ID NO: 17642 - DNA, 327 bp, Emericella nidulans
taatctaacaatgttcctttaactcttgattcggtttggcgaaccgagaaactgggtatgaaaatcggctttctctgtacaatcgtcgaagcatagatgaaataagctaaagctatgacaaaagtgtcgattctgaggaatactgcttagagttcacggtcggcagccttgacaggcttttcactgtcttcctccttgtggtctgtaacttttctgcccttccagcctagagccttgagtctctcaggaaggatgggatgagagtagtggtagctggcgtacatccagtccgcatccatagtgctcaggttctggatctggagcttg

SEQ ID NO: 17643 - DNA, 351 bp, Emericella nidulans
ttgagcgggcggatttgctatggattttcaatttccatcctacggagagttttaccgattatagggtcggtgtagaacaagctgggacttatcgggttgtgcttgacactgatgaccaggcgtttgggggcttgggaaggatcgatcaggggactagattctttacaaccgatatggaatggaatgggaggaggaattacttgcaggtttatattccgactaggactgctctggtgagtctactcgttcttgaacccttcatgcctttttctcttcgtggttgtcatctgtatacgaaactcgatactaatcacttctgttggatgtaggccctagcattggaagagacgc

SEQ ID NO: 17644 - DNA, 315 bp, Emericella nidulans
caagaacttgatttccactacgtacttatcactaacaaaccactaacatttataggtagtgaatcgcagtcatagtaaaatgaacttttgcaataggctcaacaactccagcggtatcatgccaaccaagaaaagacaaaaaaaaaaccactgccaatgagaaagtaagatataaacaagaaatccatcatacacttagttccccggggttaaaccataaaactgcctaaattgaggaattgaatggtaggcacttgcgaagggccggtgagaggaagtgatgatgggcgagaggcaattgtttctccttccttg

SEQ ID NO: 17645 - DNA, 390 bp, Emericella nidulans
acaattaaatctgtagttattgagatgccggatacaagagggctattatcaagacatagacaaaccatcgctagcgactagcaagcaaattcagaaaacaggacaagctggatggggctgggtaagccgacatttgtggtgagcttgagtaaagaacactatccgcaaatatcacggagtgtcaaatgatgaacactgataggaagaaaaagaaaccgtcaaggggtagtcgagagtaaaaagatattagtagagatgaatgcacactcctgctttttctaccgtacgtaaaacggccactaccacctgctttcagtggtatagaatattgttcagcgacggccgtggctaccagtcaatgagccttgcacgctttccatctcactatcc

SEQ ID NO: 17646 - DNA, 394 bp, Emericella nidulans
gagttgatgtctatataaaattatcttttattgttgaactgaaatcaaggattatggcttaaatatgtaaattcacgcacaatatggtgagtctcgtcccaaaacccttacgacccgaccagaactgctggattcatattcgtctggctcacatcttggccctgccgcttcctcaagccccaatttcccattagttggagtaatacgcttgtgattcccccgccccttggccagggtatatatcaacattcgaggcactggcttgggaatcataatccccagccgactggtcaagccccgccgcccgcacaattaaccttgccatctgaatcccctcgtgaatgaacggatgccagtattccgttcccgtctcggccgttgtgcccccgtgggt

SEQ ID NO: 17647 - DNA, 394 bp, Emericella nidulans
tccagctagattgctcctcctggtattgtagaacctaaacgtcctccgctttcgacttagaaagccatcaacatcaatacttaacacaagaagtcggaaagaaacggattaagtacacaaatgcaaacaatcagcgtcatgaagcgagaactagcctccagcaggactcgacaactcagttgccaccatgattcgctgtcgaacgttttcgtgaccgtataatatcgtaacatcgtgatcctcatcatcgctgctgtaagtactgtgcgagaaggtacatcactgaagaggaaaagagcgtagttttgataaatgacaaacatatgcttcgggctgaacatgcgagacacgaaagggaaataccggttcccagaacaaaataaggaaaaacgta

SEQ ID NO: 17648 - DNA, 370 bp, Emericella nidulans
cactgcgttgagtaaatccattccttgggtatcagtgatctcacgtctatctcgtgccacgtcaaattaccagacgctgcccttctcctgcaggattagatagcaaatatcgctctcgtccttacacgatccatttccaaacagcgacattggaacaggagtagacccagtatatatcttctcatatcattgaaaggggactctttattgttccgacttcagtcaaacgttgtcttcctgccctgaccctcaacaatagcgccgctcagcttctgcacggtggactcgtcgtagcgggtataatccggctttgcgttcttggccttcttctgttgaggcttttcagccgcgacctcctcgaaatcaccgg

SEQ ID NO: 17649 - DNA, 338 bp, Emericella nidulans
gagtttagcgaaaatgaagtgatttttcttttccccgagtctagttattttatgggctatctcaatgttccgcagagggaagttgaaaaagtctgaggaccttccagagagcgagagattgtcgctttttcaacaccagccataatggagcagaaccggtttattttctgtgaagggatgccgaccagtgtgataatcttgaagctgcgattatgaggctgcggttggtggagcatgcatgcccatgggcacggcccttgagcaagaaaagagacaggacgcggcataaattgttgcttctctcacacagccgacgcacgatctagttacaggagtca

SEQ ID NO: 17650 - DNA, 311 bp, Emericella nidulans
agaagacaatattcagatccagttcagttctatgtacggagagccaagtaaaaaggtaatgcgcaagacgaagattctcaatgcaaaaagcattcacagaatgacagcaacataatcgctaagcgcgagcaaaaggactcaaaagtcaaacagttctcttcagcaaggcagtgcagtaaacaaaggataaaagctatgcacggctgacaatgtcaataaatggtaatgctgggtatagcgcctcgctcaaacgccgatggtagataagagagaaaaaaaaaaaaaaggcacttttcccaaataggaaatga

SEQ ID NO: 17651 - DNA, 485 bp, Emericella nidulans
aaatatcaccaaactgtttacttccttgtcactgtatccactgactcgccgcctgcacatgtctcaattgcaataccaagatttgatacgcagagctcaaagggaggttggtgacctgagcctgaaagcttactttccactgtaagcaagcccatacacccgagacatgtcacggtttcctgacgccacaggtatgtttgtattggacggaaacctcggcgttgacgggcagtggaacgatgccaagcttggtgttgccatacctcatgtagcgtgagaaccccatcccttattgagtgctccgtcctgctgactctcccataaagagcttcagggttcgtcaaccgggtcaagacgtcaacacaagtcagagtggatgcttcagctcaaaaggggtcagtaaaatgaacggcattgtatgcatggtccatcgttgtcgtccaaaggagaaagacagataacgcaatacatacaacatctctgtt

SEQ ID NO: 17652 - DNA, 373 bp, Emericella nidulans
ttaatgtagtcgggaataagagattcgctagtgtatagaagctaaatgtaagtaacaaaggagacactggaattcgtatcttatatatatctggccacaccgttccgtcagcgcatattcacgccctgctgcattcctgacctagcttgccgttcaaactacctccaggaagtgcttattgtctgcgtggtcctagcacatccctcgttcactttagcagaccgattcggattactctcccagacgatcgatccatcctgccgtttcttgaggaacttgaattcgaacgaggtccccacaggcagctcaatggccacagtccacagggggtccgtagcggtatactgggccgcggacagagcaactgcctcgg

SEQ ID NO: 17653 - DNA, 397 bp, Emericella nidulans
tatgaatggtataacatatgtgaatgcagtttatgatctatagttactgagcagtccactcacgcaagcaatacgccctgcccggtaactttctgttcacacatatgatatccaccagactcaacctactccttctcctcatgcacccacccgataatcctctttgccttgtccgttgtccagaacgccttattcccctctaagcccggcctgatctccgcgttcggatagtatttcttcgcaagctcagcagacggcgtgctctgcgttgtcgtcggcgctgcgatattcaacacctggcagcctttgagattctctgcgcgctcaacagaaagaagacaggccctcgcaacagcctcgggattcacccatccccagagctgcttcactgctgctt

SEQ ID NO: 17654 - DNA, 421 bp, Emericella nidulans
ataaacgacaacgaattcataaatgcatagaagagcgatggtatcaatgacagataatctcagaacgctactcaaatcacatcagcctccaaacatagtaaggggagaaatcaccgccgaattggaaaagagacctcactatcccccggcctagccaatgccttcccacagcgtctaacctgcttgtagaccagctccttggccaggtaatcctgcgtcgcatccacaatcgtctctatctcatccacggcgtcaagaccaatttccgcgaggccattcggcacatcgaaacggaatagccggccctcgtcatcaagctcgctgtgttcctggatgaacttgttcgtttcgacctcgggatcgactacaacttcagcgcttttcgcgaatccaaacactccgccgacgccgcttgtcttgc

SEQ ID NO: 17655 - DNA, 335 bp, Emericella nidulans
aattttggccaagggggtggcatgccggacatggcaagcttaatgagcgacccgaacatcgcaaatatgtaagtcttgtcgtgctagctttcttccggcccagagcactaatcatattatagggcgcgtaatctcatgggtggtgccggacgtggtggatcccaatagtctgtgcactcgttctattgtttaatacctgcgctgacgcccgacctttttttcttttcgatctgaaattgtctcggtacatgtgtttaaagtatgactatgatattgagaagcatatagatatggccattagccgccttctaatgattcaactctcaattccactt

SEQ ID NO: 17656 - DNA, 615 bp, Emericella nidulans
gtgtcgaggtccaagccggcgatactgtagaaaaggaccagccacttgtggtgattgagagcatgaaaatggaaacagtcatccgcagcccacaaagagggaaaattgccaaagtcgtccatcaaaaaggagtaagtcatgcgatctttcatcaccattttacccctgctcaatgctgttgcaattctttgcttccctttgttttctcttgcctttcacttcagctcccagtactcagatttttaccaatcgagggcccagagtccttcccagacatgcaggcttaggagcttcggactccaatcagggcctgactgagtaactggccaaggcggaccatatacaggcttgttgctaagcttcgttggttttctctgtcgagtttctatttggctgtttattaatttatcgcgcaaggctaatatttattccttacaggaccaatgcaaaagcgggacaccgcttgtggagtttgctggtgaagacgaagaggcgtcgaaatagatatggaaggattgaagctatgctgcaccaatagagaacaaatggtcaagcagatagttctttgttcatgtcatgacgagcatataatacctaggctcaatgcattgtgac

SEQ ID NO: 17657 - DNA, 345 bp, Emericella nidulans
aggtaaaaagccaaattgatggcttgaagagatatcaaagtacccaagatcaaagccctattcacatcgaagatgcacgccatcccaccaccgcaacgccgaagaatatgcgctccatcccggtctaaaacaaagaaacgctaccgacataccataaaagaaagaaagagaggaccacgaaggagcagctaatcactatcatcctttggccgacgaccgccacgctttcgttttggctgctcattctgatcgctgccgtcatcttcatgcttgcgccccgtcggttgatctggaaccttagcaataatatctgccaggaaatctaatacttcatccttcgcaacg

SEQ ID NO: 17658 - DNA, 455 bp, Emericella nidulans
gcgcttgatccatcgtttatgtgatacaggagctacatgactgcggtcttccgcaaaccgtgatctcgtatacaataaccaccgctgcatcaaatgccgtccgatatcatgccgtctcagctaacgctcgcataggaattccatcccttgattgccttctccacgagaaagcctcttttcgttaactgcaagctgttccactacctctccagcttagtcccgaagcgcgacaagctctgttaccggcgtctgtcgcgaaccgccattgctggcaactttcgtgaggtccctatcgcggttcaaagagaacatatcgcagttcgaccgctcgtgcgtctcgaagatagctagtgcgcttactacagtgggcgctcgagcctgcgggttcgcgaaaggtggaagacacaacttctgctcaaaccattgccgctgaacaaaagttgcacgccaaaata

SEQ ID NO: 17659 - DNA, 381 bp, Emericella nidulans
agggaccgtaggaggtgccgtggcaggcgcggtaggaatgaatgtcgcttccaagatgtaggcccagcttgctcctatctatgcgcaatatatactgatatagtgaccaggcacaagaagcacaagaagaagaagaagtacggccgcaagcgctcaggcagctccagttcgtcgagctcgtcgagttccagctctagcagctcttaagcgggtatacctatattttagaaggcaggtcctttcttattacagtttggccggaaggcgcgattacttcatcaaattcatgctgttttcggtcgcgacttgttggtagcgactctaatttgtgtccctaacgtgctgttatcgttaaatttcaatgaccttggaagctagaga

SEQ ID NO: 17660 - DNA, 390 bp, Emericella nidulans
cgggcattactactttaatttcttagtaaagcaataagctgtacagtggcagtactagcatccatactagcgctgcaaagactttggtgcctacgtacttctgttcttcaacacaacccacagcggtttcttgtcccacaggatccagatcccctgcaccgccatccagtccatattttccatgcgccgccggtccagttctacatcaaagtgccataagaggtggaccaggaacagccgcatctcggcaagagccaactggcgtccgatgcaattgcggtgaccaatgctaaatggctgcgaggcctcccgccgatcattgatgaactcaccttccttttcccaccgttcgggaataaactcgtctggacggtgaaagttggtggggga

SEQ ID NO: 17661 - DNA, 406 bp, Emericella nidulans
ccgcctccaagcttgctcgataaagcttgaccctcttgaccctctcatctttttacctcttcttcctccactcgtcttcctcttttccctctacgcataccactggtgccgccaagtacttcggcatctgcatccaatcagtgccttcaataaccaaaatccagtatcaagaatccagtattaagcgccatggccacctctgagcccgagccggtccacttcttcgacctctactcagacctcccaggcccggccaagtcatggtctcctaacaccctcggagtgcgagcggtgctcaacttcaaggggatcccatatactcagagctggatctcgtatccagatattaaaccgctcatcacgggcttggggctgccacccaaccgagaaggcattccatatacac

SEQ ID NO: 17662 - DNA, 410 bp, Emericella nidulans
atgagcaagagaagcaggctcagattaagaggcagaaagagggacaggggaagtggaaccagaaccttgctagtagcagcgaacgctcggtgcgtatacctttatttttaccatcgccctccgtccttggtcatgaatcaggagtcgtacgtcgagtggagtttaacttgctaacgaatgtaacaggtcaaagctgaccggggagaggtcgacaataaggatagcttcgttgacctccaagataagacgaagaacgagcctaatcagaaggcgtaaaatggctgggcctggtgcttagcattagagatttcttattattctggtttcactcttgtaccgtgcactatatggctaggagagactttccagtctttctaacatagcaatgaacttaatccaaggtacatccg

SEQ ID NO: 17663 - DNA, 542 bp, Emericella nidulans
agtagagataatgttcaatttatacaacattagattaacatcaacatgctattttacagtcacccatgatgctcaagtagtcagtagccaagaaaaaaaagccctctatttaatacaccaccacctgagaaaagaaaccacagaagcatcctgagcgcgcattaagaccagagaggagagaaagaagaaggcttctagcgagcaagatgtacacgtccctgctttcaaaaagatagcaatagagatgttataagctttcgtcaagaggcaaggttgatttactctttcttgccaccgccgaagaagccggtcaacgaacccttcatgctttccatctgctcctgtcggagtttctcctcctcggcagccatttcggccagccacttctctccgttctctcggatctccttctcaatcagctcgtagttcttctgaccacgctcacggatctggtcccagagcatcttgccctcctgcaaaccagcagagggtaactgttcgccatctagggtgcgtgcagacgacttcagaccaagcgctga

SEQ ID NO: 17664 - DNA, 403 bp, Emericella nidulans
cagtagagttgcacaaaagcttagtcaatcattacaagcagtaggatacagttcatgatacttggagtgaatcaccctaaccaacaagtagaaattcaaagctcgtcatgctcaggcttttcagcagagggctcagcgtcgctggcggtctcagtggcatcttcggcaacttcttcggcctcctcggcctgagcggcgaaagcatcgacaccgtatttgccgttctctttaacgaaatttgcgagatcctccacggtacgagaacccgaatattcaacaggtgcgtctttggcgcctgcagggaataatttgatggtcggaaaaccggtaatagagtcagggacatcgttggccgtcgcgtcgatctttgcaatagtgaccttagatgcgaaatctttgctct

SEQ ID NO: 17665 - DNA, 312 bp, Emericella nidulans
ttgtgcaggcttttcattacacacatgacggtaacaaatatgcagcaaagaagggaatcgctaggtagatacatgagagaacaaaatacattcatgtaaagcgccgtcatcagtaaatgtagtatattatggatgaagttttgcaacatgcatgacaccaggcactgaaagaaaatggcgtaaaaaaaggggaaccaaaagttactgctcatgaggtcgtgtcgtaaacgggtggtgcgcactaagtgtcaaactcgcgcacttattagtagtcatgctcctcgtcaacgtgttcagggctgtcgcggtaat

SEQ ID NO: 17666 - DNA, 318 bp, Emericella nidulans
cttgcggtacagcctgtcaaagtacatagttctagcatttagtgagatttgattgttgttagcccctttttattaaaaaaaaaaaaacctcaaggtacacgttctactagaatatgctataaagtcattttgcagtgcttggacgataatcgacataatgaggaatttagacctcgaaagacccatggtgcattacacagcagcatccctggagttagcctctggatgcgttccgggcacgttgcaatacccgagggactcagcaaagccgaagcttgtgaaaatgacgaccgtaggtgagagatacgggtcttgctc

SEQ ID NO: 17667 - DNA, 483 bp, Emericella nidulans
ctaaggaggctgctggagctgcggcagcttggggtagctcccttgttgggagtgccgtgcagacttatggagttgcggccctgattaatgcgactggcacccttagctataaaggagcagcctaccttggtagcttgattttcttcgccagctccgctcccagtgtatgttttccgctgccagtctacgcatgctatctaaccggatattttagttcgtcagccagatatttaccgagaagaggcctctagacactgttgccgttggtgccgtcgcaagagtcttcgagacagttggcctgagtttgtttctcacttggtggggaacacgcacgaacccatttgattaagtaggcttctgaacctatcttgtactctgtgctgtgatgtctgcctccaatcagactgaacttcgatgatgctatgtttgtgacctactgtggattgattcttgacaattatattacattaaacgttttctgcg

SEQ ID NO: 17668 - DNA, 418 bp, Emericella nidulans
acaaaagcttagtcaatcattacaagcagtaggatacagttcatgatacttggagtgaatcaccctaaccaacaagtagaaattcaaagctcgtcatgctcaggcttttcagcagagggctcagcgtcgctggcggtctcagtggcatcttcggcaacttcttcggcctcctcggcctgagcggcgaaagcatcgacaccgtatttgccgttctctttaacgaaatttgcgagatcctccacggtacgagaacccgaatattcaacaggtgcgtctttggcgcctgcagggaataatttgatggtcggaaaaccggtaatagagtcagggacatcgttggccgtcgcgtcgatctttgcaatagtgaccttagatgcgaaatctttgctcttggcatacaactcggccaattcatcat

SEQ ID NO: 17669 - DNA, 403 bp, Emericella nidulans
aaacaagccaaccccagaaagattaaagccagatctcgagggcacagagccctacaagacggcggcgtcagtgtcctcctttccatgcgatggccgaaagttcctaagcaattggatagttttgttgtcctctatttctaggagcgggaaaaagaatacacagcgtttcttgaaatagcaaatgcggcgtcatgcaaaaaagcccgaaaggtcagtgcagaaaccaaacaataccatgtacctattttatacagacgcgtgctcgaaagagagatgtctttgtagattctggcccgcagaaaacaaaatcaagtctggcgagcgcatgcacggcaggatcacaccaagatgcatagaatatcaacatgattaacgggtatcaaacgctcgatatcggttcgga

SEQ ID NO: 17670 - DNA, 304 bp, Emericella nidulans
aaaggcaggatgagtataattgcgtcaaggtacggaagagatatctaagagaactacaatttgcttcctgctgaattctacactttgcgacacaagagctgagctggaagttctgggactggaaggaaaactccgaaagtatctgcagctgcagattcaaatcagaatcttaccgccaactaaccccagatctggcttcaaatagaaattcaaatagaaagatcaataaaagtttgcagactgcgatgagcccctatacagcttgctccaggcttaagctgtacttgctcccccgtcgggatac

SEQ ID NO: 17671 - DNA, 466 bp, Emericella nidulans
gagcaaggtataacgttggacctttaatgtgggagtataaatcaaaggagccttatttcaggccgcaagaaactgattgtcaaaagcatgatcttttcgccagtacgccgttccctataccagaacccgccaagaactatgacaaataaacgccggcagaattcttttaacgcatggtggcaggctttgagaccatccgcccgttggcccgcttataagccatctggtcggggccatcgagaagagaagatctttcataggacggcctgcgctgcattcctccaggataggattcactatcaggctcgattccgttgtacaacggccggtcatcatgaccgaacgactcttcgtacgtccgcttcgacaacatcgagttggtctcccaaagtcggggaccaggttcattcgcagggctagacccaatagcgctcgacggttgggacgtggtcgatgggagctctga

SEQ ID NO: 17672 - DNA, 439 bp, Emericella nidulans
caataggatgcatgcatttctcacattctgtatacgatacctagttaatcaggcaaaacactccacgggataaattcatcaggtctagaaccctgacagacaggcagaggggcaaactggagcccacccaacctgcataagggccctaatacttccacacaacatacaaataatctccgccgcggcccttgttgatatcgcccgaggcaccgtcaaagcccagcgccctgaccaccgaggaatccgcctcatcgttgcggcgcagcagccgtacctcagtgattttgttgccgccgtcgcgctccaagcgcagatagcggtagtccccacccgcgcccttggctaggtccacgtaggctgagtccgggtctccttggatgataattcgaatgttggagaccgcgttggcggcattggagttgtagcgtggcacgagcca

SEQ ID NO: 17673 - DNA, 411 bp, Emericella nidulans
gacagagtgcacatataaatgtattatggtgtcaacacatgtgagaccgactgacctaggactagtatatttagtacacttgtacaattacccagactccgcgctgctttggtacacagatttggtcctagtaacagccgcgcaagtacacagtacacatcgataataacagaaaaggatatcaggatcatgatttgttgtggccccaagtggccagctcttgcatgaactccgcagtctgttctggggagaacccgaaaaatactggcccattgaacacgatgctggctgtcgaaagatttggaggattcttaacttcagtcgccttgtcttcgttcgtgctcgtggcgtcgggcgtcgtaataggctctttaggagccgtatctgtttctatggctgggtggtttggag

SEQ ID NO: 17674 - DNA, 332 bp, Emericella nidulans
tactttccaacataattaattaccctatatacgttgtacggatatatatatcaagcccctcaccatccgcgcggctccactattgcctatagcactgtaaatgcacagacggacactgggccgggacttgtccggcactccgcgcccgatagccgtttgaagataatgttctacccaataaataagacttcaaattagagggtagcggtaaaacgaacggctgccgttaggcatctatgaggagaaagcgctatcatcgaattgcaaaccgaaagacccgaataagtgtgtaacgagatcgagatagaaaagacggcgagcgccgagagagt

SEQ ID NO: 17675 - DNA, 742 bp, Emericella nidulans
tatgtccctgacgagcactagtctgaagccggcgcaatttttggcaagctgaccaaggccttgtcgtacgaaatgggaacacccgttaggtccgccatcaatcgatcatatcaagaaacgatgaataagcttcttgtgctggcattgttagccacgcttccgctggttccattgagtcttcgtatgtcgaactataagctggataaggtcagttctagtgttgagatggagcgacgcgcctaaagtacctgatttagatgagcgaatcctctgatcatgatgatgcttcaccaagacatggattggggccaggagaaagagcaaaacggccataggccgtgatgcgctccccggcttgccctttgaggccttgcgacggcggtatttgatgatccgctgaatacaattcttcggcatgataacgaatctatagtctcatgattcagtttgtgacttctcgaatatatttgctgtggcgaaacgcatcacagtaggaagcagcttatcagcttcggccaggaccgaggtgtgaaagcatgcacatacattttttgattatcagcgagtgttgacccgcattatgccatgaaaagcatttatcggcgtactggttcctttactttcatgatcttcaatcatcaccaattacgacaggcctgtctttttatgtgaccatctctatctacacagtatacatagaagaatttcccaatagagcaatacagcgtgggatgtgggttat

SEQ ID NO: 17676 - DNA, 422 bp, Emericella nidulans
aagtcatcataggtaacgtcaagtaagtgtaagaaataaaatctagatacccgcctatagaaggacagaaatgactcaaatcatcatataaatacccggttgaactttctcagcaaactctcgaccttctcggccagcggatcatctcctggttgaggaagaagacgaccatcgcggtcaaaccggtcaggaaggtcgattgtagcatcagaatcagattcaggggcgcttgtttgtttttgtatttgtgcagcgctgcggtctttcgccgacgacgcatagggatcggacgatgagtaacggcgccggtcagaacggtgacggcggtggtgacggcgacggcggcgccgacctgaactcattccatcaaccgttgaatcgctatcgtccgtctcgtatcccgttgttttctcgtttgtctg

SEQ ID NO: 17677 - DNA, 348 bp, Emericella nidulans
ttaagatggttcctaacacggcgcggatgaattccaggtgaagtaaatcccaactaacgcctaagcaaatcgccatgaagatcatgagtatcactgtagagtagatcaagagcaaaaaacaatgagcaaataacatcaaccagcattagacgcaacatctgtaacgcttatcgggaatcaggctcaacgacaaggtatcaacctccatcagatagaggcaaaggtcacggaatgtcaactccgggaaaacagcagaccaaagaagcaacgaggccaatgcaaggatgatcatgggaatagagtacaaagagctgaggcactgaccccaaagcaagcggatttcggttg

SEQ ID NO: 17678 - DNA, 304 bp, Emericella nidulans
ccttgttcttacgtatgatgtctattagaggagttatttcaatctctcatttcttcacctgtaactagtgcaagtgagcttggctagagtattaagggctcataggtataccgaagttccatgcttgcagagatgtagcagcataatgatagacggtgaatccagccccaaccactatcgcaccatcgaagtggctattgtcacttgtagtcctcgacaattggttgaagtttgatttaaaatacctggtcgctgcacggagccccaaaagcccacatcggtaggctgaatgatggtactacgg

SEQ ID NO: 17679 - DNA, 357 bp, Emericella nidulans
ccttttaactttgtatttagaaatgctagaactgtatctgcctgaataatatgccagcctttttgggcgctgacaccaaacaagatttgtgaagtaataggatcaacaactggggcgtatgttgctccttcaaattctgatttatcaagaagattccccctgattacctattgtgctttgtaacggatagagttgtcaggattaagcttctttttataaacccatcttcctggtatggcgcgtgcgccagcaggcatgtcagattttcagatcaaatcccaacattgcttctgtttcaaggtatttatctcttcttgcattgctgcatgccattgaactgattcagggcctttaata

SEQ ID NO: 17680 - DNA, 370 bp, Emericella nidulans
aaacagatattgtacaagctttcgcgcttcggctgggtatatatatctaggttctgggtatgacagatataatcccttcgatctacttatagcctattttagaggcctcaatatcagattgtcaatcaaccggactggaaccttgccatccccaagcccgcaatcctctcctacgttcgtcttctcaagtggcgccatcttgatggctccgctgaggatcgctccttttgaaggatcaacgacctcaagctcgtcgagcgtatccgagtcagcaagtgagacgtagtcaactttgaacagcgcgcgctcggtctcggacagagattgctgctccgttaacaactgttgggttatactgtttgcagtatcc

SEQ ID NO: 17681 - DNA, 212 bp, Emericella nidulans
taaccctaatcatcggcctcgaaaaaaccatcgccttcttttcccgccgccaaaaactcaaaggcaccgccgcattcactctcgggattcttctcatacttttccggtggccgctgactggctttttgattgagctctacggtctattcatcctcttcggtgatttcctcgtcacgattggccaattcgcggcaaatatacccgttgtcggg

SEQ ID NO: 17682 - DNA, 421 bp, Emericella nidulans
caaaatccgtcctgccaccgaatacatccgtgcagaaagatgccgtactggccattcagaaggctgcgacggtgtttgtttcttatctgtcttctcagtacgtgttatcacatctaaatccattttgccactcgcaatcctgaacaacaccgctaatatgttttgtcgtgcacagcgccaacgaagcaacactaaaacgaacagtctcgcccgcggacgtcctcaacgcactctcagagcttgaattcgaggggttcagaccgcgactagagaaggagttggataagtttacagaccttaaggctgcaaagaggaagccgaggaagagtggtgatggagatacaaaggccaatgttgatgctggtgccgagagtaagaatggggtgcaggcggcaaaggatggtactggtgatgcggagat

SEQ ID NO: 17683 - DNA, 484 bp, Emericella nidulans
ggaaaacgctagtgattgctaacgttggagactcacgtgcagtgatgtcaaagaacggtgttgcttctcaactctctgttgatcatgaaccaagcaaggaacaaaaggaaatagaaagccgtggtggctttgtatcaaatattccaggtaagttttgtagatggagacacttacttgctcatcacatataaaacatgagaagaggaatttatagacgattcttgaatggtttcaggggatgttccaagagttgatggacaactagcggttgctagggcgtttggagataagagcttaaagatacatctgagctcagatccagacataagagacgagaatatcgatcatgagactgagtttatccttttcgcaagtgatggagtttggaaggtatttgagatctcgtcccatgttatcatcagagtgatgaaatctttaacaatgtcttgacgagtgttgcattaattatcaggtgatgtcgggg

SEQ ID NO: 17684 - DNA, 676 bp, Emericella nidulans
ggatctgattgacttcgaggaggcggagagaaaggctaaggaggaagcggaacgtattgagaagttgggctacgaccccgaagctgaagaggcagaggccgccaagacgaagacttctggcacaggtgctactgctatcgcttcaccgaccccgctcagccctaacaaggtcggttttggtgccactaagactactcacgagcggaactcgagcgatgtggagcgtctaggaatgggtatcggaaggcttggcttcggccaaaccgttggctcgaagcctactgctcccgcgccgaagaaactcggctttggagccgttggtgctgcgcggtccgctgaagatggtacgccctgttacctttattatcagcgcatagctaatatttctacagaggaagaacttcagcggacaaagaacaagtttggtgctcaaaagggtatatcatcggacgagttcttcggtcgcgatagattcgacccagtagcgcagtcagaggccaaggagcgtctccgccaattcgacggtgctcaggctatttctagcaactcgtactttggccgacctgaagatgactatcccccagtagatgacacctacggcgatctcgaggctgcagccaaagattttgtccgacgattcggtatcactgcaggggacgacctggagaacttgacg

SEQ ID NO: 17685 - DNA, 1282 bp, Emericella nidulans
cctagtggtctgtactgttactcgctccctgcgggaccatcaccgtgtcggcagctatatacagccatggccgaaaacttccaacaccccttccagtgcatacagttcatcaagaaaagaaacggtgaacatagagacgtgttcgtagcatcagcgggcgcaaagctcttctcctacgcggcggactctgggcggcgcctctctgtctggccgcaagacggtgcggacaataatattcatggaaccaactgtgctggatctaacccagagactgaaggccctccggagaagaagaggaaggttgagccatcttcagaaaaggagggtgatgctggtactgcagcttcgaaaaaatcctgtacgtggaccaacattcccatcttgacgtccacgccagacggggaatatctggttgcgcttacaggagaggacaaatgtatccgtgtcttccagattgaagaggacggttcatttgtgcacctgagtgagaggtaagtttgtttctctctgaggtgacggagtagaagctaaccagtaccagtgccaatgcccaagcggccatgcgccatcacattcatggaggacaacgacatcctgactggcgacaagtttggggatgtctactccatgcccctaataccaagcgctgagccgcgctctaccatgaagactctggcccaacggtccacgccgatcgcagccacaaacttaaccgtgcacacgcaacgcaatctcaaatcgttagagatgcaaaagaacatgcagaacaagcagaagaaagaagtagacaagcccgtcttcgaccacgacctgttgctcggacatgtctctcttctcacagacgtggtctttgcctctttaccgtctccggacccctcgtctactaagagaagaacctacatccttagcgcagataaagacgagcatattcgggtctcgcgcgggccaccgcaggcacacgtcatcgagaaccactgcttcggacatacagcattcgtttctaagctttgcatccctgaatgggctccagagtacctagtctctggcggcggggacccgcatcttatcgtgtggaactggacagccggccaagtactgcatactgtgcccctcgtggaacagccagctgaaggcgaagccaagaaagtcgccgtccacggtatctgggcggctactcttggtgcagactcacggcgagtcattctggttgcgctggaagggtaagcacctccttccctcctgctctcaactctctactgcaatatttcactgggacggatcc

SEQ ID NO: 17686 - DNA, 343 bp, Emericella nidulans
ccgtcgcctctggcgtctttattggggtttcattcgtactgaaaaaagttggtcttctgcgggcgaatgtcaaatacaatgaggaagctggcgaaggatatggctacctcaagaatctgtggtggtggtcgggcatgacgctcatgatcattggcgagatctgcaattttgtggcatatgcttttgttgacgccatcctggtgacgcctctaggcgctctctcggtagtgatcacaacaattttgtccgccatctttctcaaggagcgcctgagtttcgtggggaaagtgggctgtttttcctgtattctgggctcagtagtcattgcgttgaatgcgcctga

SEQ ID NO: 17687 - DNA, 402 bp, Emericella nidulans
ccgctagcgcagccatcctcacccgctttgccctgcgactcctgataagcgaggagtggtatgatcggcagttcctaaaatggctgagcccctggtctctgatcggacttttgtttacgattctggtcctgttcgcatcgcagggcaagcaggtggtgcattcgattgtatccgtggtgaggagtcgtgcgccgctgatcgtctactttgccgtgatcttcctggtgacgcttgcggtaacacggcggtttggctttggatataagctgtcttgcacgcagagcttcacagccgcaagcaacaactttgagctggcgattgcggtagcgattgcggcctttggtgtagatagcgaccaggctctggccgcgacggtcggcccgctcatcgaggtccccgtgc

SEQ ID NO: 17688 - DNA, 414 bp, Emericella nidulans
cgttgcgcgaactgggcttcaacgtcattcagaccaacctgctctcaattccctatatcatcggatcgagtattacaatgctcttgatcgctgcactcagtgaactgatcaacaatcgaagcttcgtatcgatggcagaagacgcctggttgctgccctgctttgtggccttgatcgcgctcccggacccgataggcccatgggtatactttgccatcgccacggtcttattgtcttttccctacacccaccccatccaagttgcctggacaagcaggaatgcgggctctgtgcagaacagaacagtctcagcttctctgtacaacatgtgggtgcaagtcagtggaatgattggcgcaaatatctatcaatcaagcgactcgcctcgatacttcaagccgacccagggactgc

SEQ ID NO: 17689 - DNA, 417 bp, Emericella nidulans
ttcggcaagatggacgcagatatcgtctatgggaagggagttttcattggccaccgctactatgaaatgctgaaccatccaccacgtttctatttcggtcatggtctgtcctacaccaccttcgaatatagcaacctggaggttcctccggtctacgagtcagatcccaagcatattatgaccatttctgtcagtctgaagaatactggccaatgcccaggcgcagagatagtccaggtctatgtgaaagacgtcagcagctctgtgcagagaccgaggaaggagctgaaatcgttcaagaaggttcatcttgcacctggtgagaacatgaaaatcgaagtcacgtcttgacaagtatgctctgcctttctggtgtcagcggacttcaagattagaggctgaggcgggtgaattcaa

SEQ ID NO: 17690 - DNA, 444 bp, Emericella nidulans
tgggaataccctgttgctgacgatcgaagcggccgccctgcggactatctattactttcctaggttcattgccaaccttaagaaagcactgaagggttcaggaggacgagatggtctcagtatcaccctgccagcgtcgtactggtatcttcagcatttcgatatcatcaatttacaagatcatgtggactttttcaatattatgtcctatgatttgcatggcgcctgggaccaaaacaataagtggctcgaaccgcagttgaattctcacacaaacctcactgagattacgaacgcattggacctgctatggcggaataatatcaagcctggcaaggtagtcctgggcatggcattttacgcccgtgttttcgcagctgcgagtcccagctgcatggaaccaggttgtttattccaatctggcggaaatgcagggccctgcag

SEQ ID NO: 17691 - DNA, 514 bp, Emericella nidulans
agtggcgcagccgcactgagggcctcgtcgaccatgtttttaagcatttcttcccaaccaagtacaccaccgcgattggcccgggcacgatcttctccgacgtggcctgcgagccgctgcagacgtgcgataggaatatgctgaatttcaaagggtggagctcgatgtggttggccatggctgccattatggtgcctgagctccgtgagaagatcacgccgaagctgcaagggtccgcgctggcgatcgggcgctcctgtgacggatcatcggaagggaagagcaacctctgtggctcacgctggtaccaggaaacatgggacgggatccaggggctggaggtgcagcaggcggcgctgggcgggatcaccgcgaacctcatgctgttgactgacgtggtggccaagactatcgatacgaaccccggtgcgaaggagcagtttttggacacatataacgatgacacgcccgatgcgctgccgcatatcacgaccggagaccgggtgggcagttg

SEQ ID NO: 17692 - DNA, 642 bp, Emericella nidulans
ctcgtgctcgccccgactttcatcgccgccggcatctcccttactttgaagcacatcatcctcgcgctcggccccgagcactcgcgtctcaagccgaaactctttacctggatcttcatctgctgcgatatcggatcgctcatcttacaggcagcaggtggcggtgttgcagccgctgcaggaaatgatatggaagttctcaagattggagatgatattataattgctggtatcgcattccaggtcgccacaatgtcagtctgcggactgcttgcagccgagttcttctggcgcgttaggaaaagtggccctggatctttcagcgagaagtctctcggccgcagaagcatacaccttatcctttttggagagatcttcgcatacttcaccgtgctgattcggtgtatttaccggtacgccttctctcttattacccttctctctatatcgccattcggttacttgtattaacagcgataattgcagtatccccgaaatggccggcggctggggcaatccgcttatgcaaaaagaaaaagaattcctagtactcgatggaatgtaagttctgatactgatatcatttggcccttgcccaagcgctaatttcatacaggatgatcggtctcgctgttctatcgc

SEQ ID NO: 17693 - DNA, 681 bp, Emericella nidulans
tcgcggcttcgatgggaaactgcgcctttttagaccagacctcaacggtgagcgtctatcgaacagcgctgtcagggcgtccctgccgagtttccggttccaggagctcaagaccctcatcgccaaactgatgcagattgacggtttacgtatgtttccccgcaccatttccccatccctaccgtcaagctaacataaacaggctggcttcctaaggaccagcctggtcgtttcctctaccttcgtccaaccctcatcggatccggcacgcagcttggcgttcaagcacccgccgaagccctccttttcatcatcgccgtcccctggcccgatccagccacccggctcaaggcaacccccggcgaagcccttggcctaaaactcctcacctccgcacccgacaccatccgcgcctggcctggcggtttcggatacgccaagctcggcgccaactacggcccctcgctcgcagcgcacggcaaggcgcaggcgcagggcttcgaccaggttctttggctcttcggtgaagaccgtcaagtgactgaggccggtgcaagcaactttttcattgtctgggagaatgcgcagacggggaagcgggacgttgtgactgctccgttagagaatcagcttatcctcccaggcgtaacgagacgtagtgttctggagcttgcacggtca

SEQ ID NO: 17694 - DNA, 764 bp, Emericella nidulans
cttccgaagacggtgcgtctggttctttttctataggctgaccttcaacggcgttaatcttggctacgagcacgggctcttcaacagccttattcatcggcccaacagtaggctccatatgttcattgttgctgattgaagctgcttctaactcgatatattcgagctgcggctgtggcgcaggctcaactgttgcctctggttcgggaaccttcgcatcgtcaggttgcggcccaggagcacgcacagactcagttgttggctctgattcgtgggcttcgacagtctcaacttccggttcaatttcccgtttcagctgtggctcatgttcaagctcagtttcagcgtccagcacactgtccttctcaacattctcagactccgtcacagagacatctcttgcagcgaaaggctcatagaggccagactctacacgtcgtagcgtctctattccggatgggagatccgtctcccatcccttctcctccacattatgatcagcctcatcccgactcatcgcatcaaagaactcatcctccgtggtatcagcgacggactcagcaggcttatttgtctcgctgggtgtggtcatggagaattccccttgtacggcattgtccacattggcggtacgagccattgtggcgcctacgatggaggcgaacgccaaggtgtcgggtggatgtaatcgcgttctgtcacggttctgggggagtgtgacggggttaagtctgcaagggtaggcacatcgttgccggtgactg

SEQ ID NO: 17695 - DNA, 1556 bp, Emericella nidulans
tgatgcacccagtgcctgtacttggctggcagggtgacggcaacatccgatactttgagctggagaatgacaagtttgagtacctctcggaatacaagtccgcagacccccaacgcggtatcgcctttatgcccaagcgtggtgtgaacatgcacgagaatgaggttacccgcgccttcaagaccgtcaacgatacctacattgagcccatctctttcattgttcctcgtagggccgagacattccaggacgacatctatcctcctaccgtcggcttgaagcctgccatgagtgcctcggagtggtttggcggcaaggaagcaattccccccaaaatctctatgggcagcctttacgacggccagggcttgaaggaggttaccggtatccaggacaagcccacctctaacttgggcactgagtccaagcctgaacccaagtctgaaccagaagcgaagcccgccccgcaagtgaagaccactgaatccgctcccgaaaccactcccgtggtcaagccagcaccctccatgaaagagcagggtgcctctatggctgccatggtcaacaagtttgcagacgatgaagaagctgagcccgcagaggagtccagctttgatgagccctcgaagccaatcgaacgcgctacccgttccccgggcacctcgtcaccaactgtcaaggacagccccttcctgcaaaaggaaaactccgctaaaatatcatccccagtctcggtaagccactcacccaccaaacctgattgaaccccgcaaagttctaacctttccgcccaggcttctcccgctccggccgaccgttctcagtctcctgctcaaagcaccttcaacgctcagcccacatcgtctcccgcaagcaccaccggttctaccgccgccggcgccagctctgtccccgtgacgccgtccagcgcgaaatcagcgcaatcaaggacctcatcgccgaacaaacaaagactatcgcgtcccaggccctgcaggtgcagaacctcaccgccgagatcgagtctctcaaggctaagctgggctagccttgcgtctgatacctcgctttggtattgcgaatggcattgtttccggttctttgtactttacaatactacttactatctacatatagtcatgtccacaaacttacctacgtagatggctcatagacaaagactacctacctggcaataacgtaggtacagaggcagaccgcttaccttcagaacttctcttgcgactcagccgtgcagtctattctttctttctggttgactgtctgtgcaaactcatgccaacttttcattctcctcgtgggtatgttaataaatagtacagtctaaggatgcaacgtatttttccagaccactaatcagacccagattgctccgcgagaaccaacgccatcttgttaaacagttcagcaacatcgtcgtgtccctctactcgagccaagtcctgtgctgtgcgtccgttaccatctcttccgtcagttgcggccccatgacccatcaaaaagtgcacatcctccttcagaccagcttccgcagc

SEQ ID NO: 17696 - DNA, 2059 bp, Emericella nidulans
cagtccttggcaaaggccttgaatgtttgatagcacggaacatgtcatggattgctatctactacaaagtcctggctagccaacaatttggagcgctgcctgtccaatctgctgttaaccttactacctgcctactctataatgtggagcaagcactaaaccagggcaagacagcctccctcctaacttttgatgtcaaaggggcctttgatagggtccttcctggcagactaatacacagactatgcacccagggctggccagacaacctagtctgctggatagcctcctttgtcacagagtgcatggttcaaattagactggatggtgaactagggcctgatataagagtactctgcagcttactacaaggcttgctaatatcccctatcctgtttatgctttaccttgcccccctgttctggctgggcagaccaaaggccagatttgggtatgcagatgatggggccttcctggcaacatccccttccctagagataaatgcccaaaacctgtcagagtccctgcaggaagcccttgactggggctatatacaagggattacctttaccctagataaatataagctactatacttctcctgatacagggtggaccaggatcctagctgcacactattagtcctagcagaccaggttatagtttcagagaacacaacacagccctacctttgctggctgggggtcctcttcaataaaaagctcagctttaaataccatgtcaaggagctggcttcaaaggccctgactattgccaataccctacacagccttggaaatataatacaaggagttaacccctacctaatgcggcaagccataactgcatgtactctacaaaaagtctactatggcactgaaacctggtagcctggctgctcctggatcagcccctgtgggtctatctccaaccaggtccaaggccttcttgacaagataaccaaggtaatcctatctggggcaagggcaatcctccctgtctaccaaacaataccacttcctgcactttaccgggagtccagacttctaccagcaaggattaagctggaccacctagcagctatagcaataatatgcctctaccagctggacttatattacccactctgcaagagagcagagaggatcacctaaagaggacacccaaccagctgcctcgcacgccgtgtattagctctaccagagtcagagcaactaaacctactataatatgccccatggctcccatataagacaagggcagctgcctgaaagcaaatcagggcccctacaactaacaaggagcaagctagtaacttccaagacttctatgcctctctccctcagactgatataaaggcctttacagacagttcaaaactagcaaatgggatggccggctctgctttgccctataccagtctggaaagctattctttcagtcttctttctccctaggcccgaacaaggaggtttttaataccgaagccgaagcagctttagcaggggctaaagcagctttcaggctatatacagcctgctttgccactaatctctgggtcttccttgataatctagaggtggctacttgactcctatcaccctttacaggctcatcccaagaggtctttagatccttccaatccctagctgcatcctggcccgcacgagagaggttctcctatactaatggaggctctgtacgagtatgctgggtgcccggccatgcccagatagaaggaaatgaaacagccgatcaagctgcaaagaaaggagctgctatggaccctccccctgcacacagacactcatttgcctctcttaaacacagggcaaaggcaaatacaatatctgctctacaaagctactggcagtctacagccccacagtctcatcaagatctccagattaccaccttcccccagtgccctgcagagctgagactcccaagacccctttttacacggatcctggcggcatgttcaggacatggagactttgcaagatattatgaacagtttaactatgaagatgcctacctcctctgctgctgcagctca

SEQ ID NO: 17697 - DNA, 294 bp, Emericella nidulans
catgcctagaagattaagggtagtaataataaatagattatagatataattaggctttgctggctttaaaaatactttattctagatatagaggtaataaagaggggagtatatactttttattctaaatagctatagaagctacttgaccttgacctttaatactatatataagaataataatattatccctatctatatacctccttatttatcttacctcctataatctctagatataggctgttttagcccttaaaaagagtatataaatccctgattgaacagaagaca

SEQ ID NO: 17698 - DNA, 321 bp, Emericella nidulans
ccgtacgtcaattgaacccttacatcgatctcaagtgctcaaaatgaagaagaatagatagaatattagctaactgatatccaatgccgaactacaggctacggcacaaaacccaagtaccatgccctcaagcaaccgccagcctcaccaccctcatggctctttccgccagtctggactctcctctacgggctaactggttacgcctcctaccacttcacggtgaacactctggaaccagacaccaccatcacgcagacgctgtacaccgctcagttattcctcaaccacctctggatgccgctcttctttgcagcgagg

SEQ ID NO: 17699 - DNA, 366 bp, Emericella nidulans
ttccacgtctcttgagtagcatataccggcggagccgcaagctggagaaggatagcgatggacaaacgtcagtgagcgtctccttgagttattacgaaatctacaacgataaggtcttcgacttgtttgagccgccggaaaagagaacattggcgggttgccactcagggacaacagcggaaagaccgtagtcgtgggcttgacagagaggccgtgccataccctgaaggaatttgagaccctgtatgaccaggcgaatatcaaccgatccacatccgctaccaaggtttgtttcttgatggtcatgacggcaagatcacacaaagctgacaagacacagctaaacgctcactcatcacggtctca

SEQ ID NO: 17700 - DNA, 706 bp, Emericella nidulans
ctggttccagggcatcaaagatacaagtgcaacaatgtctcgtatcatgagtctgccaatggttctatgcgttaccgcgtgctccctactatgtggttgggctgttggccaaataggttactatatgccattcattacagcacacccatagtagccgcagttggcgccggtttgcttgagacattgaagtttaggacgagctcaacttattgaattgactatcaagctctacctgggatagatttgggaattggaagatcgcagcccctagtaatcattaacattgcactcccggctgctgatatttccagtgggaccgtatctatcacctttatacagactttgtcggcagctctatttatctttgttcacagaatgtgtttcagaaccaactaccacaaaatatatcccaacttcccgacctggacgcggtgaactgatcgattcgtgtccaacgatgtttcgagctgtggtccctgatattatgcctgatgtgctagagatatacaatgccgctataattaggacgttctacaacggcgttacctgtgcagcgtctgccattcttgatgcgctgccccttcagtgactctctttgaaagagaaaataatcaaaccgtgcctgcaaaacataatgaccaagacttgacgcgttcgacagagtatcatattattgctcattactcatattcttgatttatggcca

SEQ ID NO: 17701 - DNA, 807 bp, Emericella nidulans
ctattgttacaacttttgttgctattatagcataaatatctatattaacattattattacatttagtacataatactaatagtattaatattacttctcaatatccttgaactataagtttcttaattagttctttattatctttaataataggaactgttttaggtttaactcaatttagaattaaaagattatttgcttatagtactatctctcatttaggttttatgttattagctttagctattaatactatagaatctattcaatctttcatattttatttaatacaatacagtttatctaatttaaatgcttttgttttattagtagctataggttatagtttatatgcttatacagataataatattaatcataataatttaatagataaaaataattctccaattcaattaattagtcaacttaaaggttatttctttattaatagtattttagctttaagtttatctattactttattatcatttgcaggtattcctcctttaataggattctttgctaaacttatggtattctctgctgctttacaagaaggatttattttcttaactattatagctgtattaactagtgtaattagtgctgtttattatttattaattgtaaaaacaatgttctttgatcaacattcttatacatactttagtaaattaaaagctcttaaattaccagctcttgttttacaaaaagataaagttgtagataaaatctatttttctaattcttcattatctaattctttatctataactatctctacattaactttatttatccttt

SEQ ID NO: 17702 - DNA, 996 bp, Emericella nidulans
gacaagcgtgacaagcaagatccccctatggatccaggatatgcgtctcggcaaaggcctccaacgcaatgcgggaacacctccaagctggcaagacgagtccgaggggcgcgttttcctcacaggggcaactggcttcgtaggggcaatgctcctggctcagctgctagcacatccacgagtaaaagcagttgcctgcctaatacgcgctaaagatgagagccatgctcgtgaccgcatccgagacaccctcagcaagtataacctggccctatatccacacgaggaggccaagatcgaggccgttgctggtgacttatcccagcccaacctcggctttgaggaagagcaatatcagcattacgcgcaatggtctagtgttgtcttccacctagcagcacacgtcaactacatagagccatactccacccaccgtgcggcaaatgtgactgggactctgaatgccatcctcttctcccaagcccatcggaccaaatcattacactatacatcaagtatcagcgcgtacggtccaacgggcttcgtgacgggaacccgctacttggcggaggacgagcggccgcaagaccatatgcttgcccttgaattcgacactgggtatgcgcaaagcaagtttacagccgaaacgatcgtctggaacgcgatagatgccggactgccgatcgccatataccggctagggacggttctagggtacactagtggcaaggggccgatgcacgcgaacccggccgatttccttactcgtctagtaaagacttgcatccagcagggagtctatccatgcctgtccgatcacaaagatagcatcgtccccgttaatttcgttgtttcgagtctaatgcatatatcatccagaactgcgagcctgcatcgtgcctacaatgttgtgcatcctcatcaatgcaccttggatttctcagccgtattccagtccatcagcaaccatttaggcactgattgcctacgcgaagt

SEQ ID NO: 17703 - DNA, 2976 bp, Emericella nidulans
actcgaaagcatccgacactggtctgttgagtttgactgtgcgtatcatccttttgccgaaatatccttgtctgaagcataaggctaatttgatgctttccagtgttgggagtgtgcatatttactgcaggccttgtattgttccagctaccttttgacattgccgattatgcacctgaaggctgggcctcagactacatcatcgccatgctagttgttggcttctcaatgctgttcttttttgcaatctgggaaaagtggcttgcgccagttcctctcttcgagtggcgtctgcttaccaaccgcaccatcataggtgctgtactcctggacgcaacttaccagctctcaaactactgctggagctactacttcacttcctggctgcaagtcaacaataacctaactatcgcgacagcaaactacatcaacaacatctttgatgttgtctctggcgtactactgctgttcctcggctgggtgatccgccgagttggcaagtacaagtggactttatacatctccatcccactttatatcttcacccaagggctcatgattcatttccgcaaacccaatatgagcgtcggttatcaagtgatgtgccagattttccttgcaattgctggctcagttttcatcctcgttgaacagattgctattcttgctgccgtagatcaccagcatgttgccaccgtattggccattctgaacgttgttgggactattgggaattctgctgggttgaccatcagcacatctatctggcaacacacataccggaacgctcttattcggtatcttcctgagtcggccatgtctaacttcagcagcatctacgatgatctcagaacgcagatagggtacccagtaggcagccccatcaggacggccatccagatggcctacgcctatgctgaactcagactacttgctgttggctgcggcattatgatgcttgcgattccttggtgtatccttattagggatatcgatttaaagaggaagatgcaggtcaagggcactgtgctttgagctgcagggatagtgctgttctctggtagaattattcgtacttatggtggtttagcgtaaataaacgcggcttatatgtcatccatcgtatatatagtttcaaccatttttcagcatctgaaataggaagatgccggggtattatgaacggtacacgagaaagaaccgtcagtattattgccccgcctagagtctgagtacacaagatccgaaatcggacaaagcatggtccttaaatggaataagggccgccctaaacagacatgccatgcgagctcgagtgggttcttgaccagaaccgtgccccactgtctgggtacctactaacatccatgaacggtgcatcatcctcttccttcattgtccttgctcgcgcttacgtcggccccgcggaaccctacatacgtagctacctataactcacggctttcgttcacctctcttgatcatccccgcagacctccaatacctagcttgatggcccctaccgcagagctgcaacaacacaaccatggacgaccccgaacaagacaagatcgctgactcgaacctcgttgagcaccccgctggactcatctacgacgataacgagagtgttagagctggatctcttgcagcactggtggaacatcttactcatccaaacaagctagatgcatctttcaacagaatatttctcacgacatatacatacttcacttcaggcacggaacttgtccagctgctcattaggaggtatgattgcgccccgcctgtcaatctaaacccaatgaaagcagcagaatggtcaagtcaggcaaagcccttgattcaggtacgggtgttggataccctaaatcaatggctcgaaaatttctggacatggaatgagccgaaaggccctgaaacgcatgagaatctcctaaatctccagtcattcgttagggccctcgcgtcaagtacacagcagcagaagcttcatgaaatgacccattgccgacttgtgggcctcgagccagagggcatgaggaggccgcgttcccagccatcatctatcgcaacgtccagctcaagctcaaccgcccccaagccaatcctgccacggaagatgaaaccgaataagcttcaatttctcaaaattgatgccagagagatcgcgcgccaactaaccctaatggaatcatgcatctttggtaaagtacagcctaatgaactcatgcataaaaactggcaaaggagggagagccaagacgtggctcccaatgtcagagccctaattcaattcttcaatcagctctctggttgggttggagccctagtacttgcagaatcggacttgaaaccgcggacgcaggttatagggcacttcattaatgtcgccaatgtatgatcgttcctacaaaagttggatcttagactgacacggtacctaacaggcatgtcatgaccttcagaactactcagctgttgtctccatattgtcaggtctgcagagtgcacctgtgtaccggcttggtcgaacttgggcaatggtcacacagcgtgactgcgacaaacttgaaccattacaagctatgatgtcgagcgaacaaaaccatcagacttatcggaatatcctgcggcgcgcaataccgccatgtatcccttttcttggttagtattattcactagttccgggtcttgcaattttacgaaccgcccaagtagtaggtactgatcgtgatctcgtcttgcaggcatattcctaaaagacctagtcttcatcgaagatggaaatccggaactaacgccagatgaacgactgatcaatttctccagatactccttgatggcatccaccatcgataccgttcagcactttcaagaagcgatgtactgtttacagcccgtaccagagctgcaggaatacctcgcgacggagctgcaacgcgcggttaattcggagaggctgtgggacagaag

SEQ ID NO: 17704 - DNA, 2977 bp, Emericella nidulans
ccccctaatgacccagttgcccctgctggtgctggctcaacaccctctacactttccacactcctaggatatgcacccccagagaacaccatcctagcaggagacttcagatacccagcacccattctggcagccagatactgagtcttatgctgtcatacctggcgcaacaggattattagactggcttgatgcccatgagctggaacttcgccttgagccaggcacccccacccgtggaccaaacaccctagaccttgtcttctctaacctaccactaagggccctagtagaagaccatctaaagactccaagtgaccatgcaacaattggaataatactggaacaagaagagcccccgcctatatacaagcttggatctactaactgggagaaagccagagccctggcaagcctgcctgacccaaccctactaattgacctactagccaaacaactggtccagacatcccagcttgcaatacaaggcgcatcaagatacaatactcgcagactccctaggaccccatggtggactccagaactaacagacatactacaccaaacaagacagtaacaaaaccccgactataaacagctccggaaggccattgtacgggcaaaggctgaatactggaagcagcgaattgaacaagccacagcacctatagatgcattcaaacttgctaaatggatacaacatccagaccagctcgctgcttctcccctgaatatacaaggggcacaggttactactccacagggcaaggcagatgccttccttaattacctcttagagaagggggccctgcttccaaatcagacagaagagggacccccaaacaagcccctgggctcactacacctgccaacaaaagagcactgctgggctgctctctgtgccccacccctgtctgcccccagggaggacagacttgccaccactgcttggagggagctctggcccgtactaggggatataatcacacaactgtactacaggtgtatggaggaaggctgctttccactgagcctgaagtcagcaaaggtaataatgttaccaaaaccaggaaagaggggctatacctaactcaatgcctggcagccaattagcctcctctctaccctaggtaaaggcctagagcgcctcctagcacagtagatagctgtaagagcaattcaggcagatgtgctagccccctgccacttcagggccctaccaggatgctctgccattgacctggtccaggttcttgttcacagggtagaggaggccttttaacagggaaaagatgctttactactcctactagatgtgaaaggggtatttgacgctgtaatacaccaacggctcctttctcacttacacctgcaaggatggtataaaggcttactccagctacttaaggactggcttactggctgctctgtatctgttcatatcaaagaaggcactgccacagcaccaattaaaggcagactcccccagggatcccccctatccccaatactcttcctgctatatgcggcaagaatagtctctaccttagagggctccttctgctatgcagatgatatgggtatattattaactgggaataccctggaagagagcttacaacaactggtagaggcctacaagcaaattactgctctagggacagagacaggcctccctttctcaatagagaaaacagagatacaatacttctctagaaagcagcagcagcatctccctacagttactctacctggtataggggagattacaccatccctatatacacagtagttaggagttcttctggatacaaagcttacttttaaagcccacattaatttggtctttagccgcgggaaacgactcgcccagcacctaaagagacttagcaatacccagcgcggctgcccagtggcctccatgtgggcagcagttatacagtatgttcttctaacagctctgtacagggcagaagtcttctatacaggcaaacaataaaaaggggtagttaactccctgctttctctcttccgcacagcagccctggctattatcccagcctacaagactacccctactgcagcactcctccgcgaagcagacctaccagacccagaagctctactcaacagcatcctctggagggcagcagtgagatacatgagccttgatactaaacacccaattgcccaaatagccgcagagactaccgcgggcaggcccaaaaccaggcttaaaaggatcctacagctcctcctcagccccctgccagagcacgctataatagagctgcctctccctctattatgcatgctcccaacagacaacaaaggctacagccctgcccctttacagattttagtatacttagatggctcacggaccagccagggggcagggtatggctatgcaatctactttggccctatcctcatgtccaagggacatggtcccgcgggccccaggacagaagtctatgatgcagaaatcataggtgctgtggaaggcctacgcgcagccctgggacaaccatgcgttggctactccacccagctagttatcctcctagataacctagctgcagcctccctgctagcaagctataggccaaccccttacagacatggtctgtcagagacctttagccaactagccgcctagtggatggaaagcccttcaatcctaaccatgcaacagaagccccttcaggtccgctggattccaggccactctggaattgctgggaatgagctggcagacaagctcgctaagctagggtcttctatatacagccccgacatccccccctccccagcatacctacgacgggaggcaaaacagtggctccgtacagagacatatacagcatatgctaataaggcgcctgaaacctacaaagccctgaatatcagaccccatacaaaagaaagccgctcccgcgagcacaagctgccccggtgggtacttggccgactc

SEQ ID NO: 17705 - DNA, 2987 bp, Emericella nidulans
gctcagaccaggaagatggactccgtcgacgccgtcgacgcagaggtcgcttctccggtcgatttggcgcccgcgggggtaaaggaatcaagagaggtccccgcaaaccggtagagcccagtccggagttcaagcttttgcactcggaggcaacatctgctttcatcgatggggactatgaccgcgcaatcgaccttgttaggcgtgccattcaggtcaaccctgagatgtttgcagctcactccttgctctcagagattttcctagcccaaggcgagaaagaaaaggccgtgacagcactgttcagcggcgctcacactcggccaagagatacaacagtgtggttgaaggtggctaggatgataacggaacaggcaggcgacgatagacaggctgtactgaacgacgtcctctactgctatagtcgcgtgcttgaaattgatccccaaaaccacaacacccgcttccagagggctgccctctatcggggcttgggtcacaatggacgagcagtaaccgagtatgagagaatccttagggatcttcctcacaacgttcgagcgctccggctccttacagataccctttccgagcaaaatcaatatcaaaaagcgcttgactattggtcagagagcatacagcactatatggcacaggagcctgaggagaccccagagttcacgtggtctgacgctaatatttacatcgagctgtatacgtacttgggacggcatgctgaagggctcaaagctgcgaaagcggtgtcgcgatggttattggggcgcaaagacgacactatgtgggatgactttgacgaggatgatcgtgaatgggaccacgccgacttccctcgaaggattaaagcagatggttatattccgaaacagtggccgccggactcgtatggcccaggtttaccccttgaatttcgcataaaactcggtctcttccgtttgaagctaccggagcggcacatcaatgaagctcttgtaagtctatatcagaagctgcttttttgttctctactaactctgtttagcatcacttcagatggcttaaaccagaagatacctcagacgggtctctagtttacgattacggtgacctctttcgagaagccgccgacgcgctcaaagacgccgagatgttcgaggacgcccttcgattctataggcccattcagaaaaccgagtacgcggatgtcagcttcttcatggccatgggagattgcttcaagtccctgggcgaactggaagacgcagaaaattgttatttgactgttgcagaacatgacacaagcaatattgaatctcgagtgcaacttgccaagttatacgaaagcataggaatgaccgagcaggcgctcagatatgtcaacgatgccgttctactaggacggcaggagcatagaagtaatcgccgacggaaggatacccggctcgaagagctcgcaagggagttcaagtcggtgaatgtggccgcagggcctaaagaccagtccgttgaatcctcatcagcccttggtaacaagggtgaggcagaaaggaccgaaaatatacagttccttttcaagaagctgacgcaattggaaccgaaactccaagctggagactctgaggccacggaggactggctagacattgctgacgctcttctgcgtgaatttcgttccaacagaatcttttacccgcttcaacgcaatgtggtattccttggatatagtagcaaggcgggcaaggatgcgcttatggatgaattacaagaaatggcgaatcggcttcaggagtcactaggtgcggtacgtccggtaggcgtcacgtccgggcttagctaacttcgcataggggtggatgaggaatttccgcagtctacaatccctacagactaccatggcatcagtttcgacgaatggcttgacctattcctgcagtacgccctaacggtggcaggtcaaggtgaattcagcgaagcgtatgatactctaggagccgctgcggacgcgagtgtctggtaccactctagagacagctcaagattgattcatgtgtgctggttcagtaagtaccttgattgacactctcagcagtaaactgattgacttaatagcttgtgcactccgactccaagacgaagaaactctcgccaacgaagctcgctggtttattaaagagtaccaatttgtgacagacacataccgcctgtttgccatgcttagctgtctcagcggcgaccctcaccgatcgcttttccactcatcccccttgatgaagttcatgctccgccagattaaagccatagactttaccctccccgaccacatcgccggcgcccgtcacaccaaagccatccgagaatcaatctacaaggaacgagcagcactatcaacaaaagacgagaagggagagcctatcccagcagaggaaatggacgtagccctacttgtcctctacggccacatcctctactcaggaaacagcttctacccagccctcaactacttcttccgcgcgtacgcactggacgacaagaatccggccgtccttctttcaataggcctctgctacatccaccactccatgaaacgccagtccgagaacaggcacttccaaatcatgcaaggactctccttcatgaacgagtacaaacgcctccgcgaacgcaagggaacaccccttgtcgagaggcaagagatggaattcaacttcgcccgtgtttggcataccctcggactcgcgcatctcgcagtggaaggataccagcgcgtcctcgacctcggcaaagaaatacaagcacaattccaaacaaaacagttgcttactcctgctcacgcagccaatggagcgcaagcagacgataacgatgcagacatctcaatgcccgacgtcgactccaatgtcaatatagacgtcaatgttgatcgggccacccacagcgtagaggtgaaaccgcaatcgccacagcctgtcatagaaaacttctcccgcgaa

SEQ ID NO: 17706 - DNA, 2993 bp, Emericella nidulans
gaatcggaaccgcattagtttatggggtagagattccagacgtccgatatgcgccaacaacaacagcagacctactgtcattcagccaattggatgaccaggattttgatgtatccacacaaggcactgtcaacaagaagcacttctatattacatcacccacaggagcttctcttaatgccttcaaagagcaaaatacacgcctatatcaagtcaaaccagttgcatacgcaatacagccaactctacacgcaaaggacacccaaaaagatacaaatgacataatacctacagcaactatggaggaatggcatcagcgcctatcccatgtccatctacgagccatattgaaaatggcacaacagaaaatcatcaaaatcaaaggcccaaaaaccttggctttctgcgatatctgtcgacaggctaaggagaggagaaagagctccaaggagccagcctcgcgcgccacaaagatcctggcgcgaatccatattgatattgcaggaggaggagcaacattggactgcaaggatgaacaagcccctcccggcattagaaatattcgatatttcttgttgattactgatgatgcaactcgatatcgatgggtttataccctccgaaccagagatgaggctattcccaccttccagggatggcttgagcatatcaaaaaccaaggatacagcccaccagctttcgtacgaagtgatcgcgaatttctaactgaacacgtcaagaagctctgccaaacctatggcctaatttgggagccaaccgctgcagactccccatggcaagatggcgtcagtgagcgcggaatacagacggttttacaatatacaagggcaatgttatatgactccagattaccacgatggctatggccacaggctctacaaacagctgtctatcacatgaaccggttacctacaagaattcccttgtacaatgatcgacggcctatggcaccaaccagcgatccggaaatccagccatgtgcccattttacgccctattccgcctggaccaatggtgacactgatatcaagcatcttgtcaaatttgggtcacctgcttggatgcacctacatggagcatcaaaatatgctggcaagccaaccagtaagattgacccaaaagccaagaaggtccatgtcgttgggtatagaggccgccatatctatgttatttgggaccctgaaatcaaccaactacgcgataccagtgatatctccatcaaggaggagtttaacccgccacagagcaagccgtacgaagctgccaaagctcccgaagctgctaaagctctcgaaactgtcaaacctgccgaaactgtcaaaacggctgacactgtcaaaactgccgaagctgtcaaacctggcgaaactgccgaagctgcagaaccaaaaaccaataaagaccttcttatacaggatatatcagatattacctccagagaagagctataccgacctgccaaaggatttgctatccaaaaatctgtcgaatcacctctacctgagcccaaatcgtacaatgaggctatcaaaggccctgaatcagctcaatggcatgcagcaatgcaagaagagattaataccttgaaacggaaacaatgttgggatttgatccgaaaatctgacatgcctgctcgcacgcgccataccaggaagatgggtttataaaaagaagcttaatcctgacaactccatccgttacaaagcatgatgggtaatcagggggaatcttcttgataaatcggaatttgaaggagcaacgtacgccccagttgtcgacctgattacttcacgaatcttgtttggtgtcagcgcccaaaaaggctggcatattattcaggcagatgcagttctagcgtttctaaatgcaaagttaaaaggccaaccgatttatatgcatcaaccacttggattcgctgaaggggagccagggaccctagtttgcctgctccgccaatcactatatggcctaaccccgtccgcgcgcctatggtacgatgatctacgagcatatcttgaatctataggatttaaggtttccccgcatgacccaggcctattcgtacatgttacagaaaagctctatatcaccacccatgttgatgacttcatgattgttggtgaaaaggcccaaaacgccgtacaagcgctcgaaagcttgaaatcccgatttgaaattaaagaagcgccggaattcaagcgatatctaggcatgaatatcaaaacaacgcctacaggcatccacctgtcacaggaggatcaaattgatgacattatcaactcttttgggcttcatgatgcccatcctaccaaatcaccccttgatcctggaacagttatcgatgatgctccagatctaaaaatcaatatcaaagaataccagcgcggtactggcagcttgcagtatctagctacaaaaactaggccagatatcagccgagccgcctgctttcttgctgaatttaatacagcgcctacagccaaatgctgggcagctcttatgcatgttatcaaatacctaaaaggcacccgcagtctaggaatcagatattaacatgatcctgcagccaatatcgagccccctaaagcctttagtgattctgattggggtggacctcatacaaaagcacgtcggtcagttggcggatatgttttcaaacttgccggaggaccaattgcttggcaatcaaagcgccaaacctgcgtagcaaccagctctaatgaagctgaatatattgctgcatccgaagcctcgcgcgaagcctattggatacgcgaaattatgaaggatcttcgattatttgatgaccaacatgcacctggtatcccattacatatggacaacaaaggagctattgatcttacaatgtccgacatacaaaccaaaagatcaaagcacattgacatccgctaccattacacccgtgatatggtcgaccaaggcatcatccatatcaagcagatccctaccgc

SEQ ID NO: 17707 - DNA, 352 bp, Emericella nidulans
atgcgcaatacgggcgtttcagcccctcgctacgtcagtctcgagatgaacccaaccttcgcatctgtgtcgcgcgccttgattgagcttgccggcctcagtgatgtcgttgaggttcaagagggtccgtctcgagcgtcaatgaaacgtcttgcagcgggctcctcgaaccagggatccagcgcgaagtggagtatgctgtttttggatcactccaagatctcgtacttaaatgatctgaaattggccgaggagctgggaatcgttgcgcctgggtcaattgttattgcggacgatatgaaacgaccgggcaatccaatgtattcagaatacgtgagggctgataccgcga

SEQ ID NO: 17708 - DNA, 453 bp, Emericella nidulans
ctcgcactcgcccttccctgtgaaccaagaggcatctagcgggttcttgccagccgaagacgaaacccggattcgcaaattgctccagcagacattaccggctttagcgaatagaccgcttgtgctgaagagtctgtgctggtttgcggatacgaaagacagcgactttattatcgatttcgtgccagggagtaagggaagtgttgttatcgagtcagcggactcgggccacgggtttaagatgtttcccatagtggggagctgggtgagaacttgctagaggatgaacagaaggagcagaaggtgaagaggtggagatggaagggcgaggaaggcagacaggaggattggggggccgatgttagttggcgacttgcagagagtagggagctcagggatgtgctgccggggaggataaagctttagcttactgagctcaccgacgctactctc

SEQ ID NO: 17709 - DNA, 506 bp, Emericella nidulans
ccccaatcagaacttttcgcagcaggttttggttagagatggaaagaaggaaacttttgatgaagccaatccatttgctaatgaaggtgaagagattgcttctgttgcttataggtatagaaggtggaagcttgatgataatatgcatcttgttgcgaggtgtgagttacagagtgttgctgatctcaacaaccaaaggtcgtttcttactttgaatgctcttaacgagtttgatcctaagtactctggtgttgattggagacagaagcttgaaactcagagaggtgcggttttagctacagaattgaagaacaatggaaataagttggctaaatggactgcacaagctttattggctaatgctgatatgatgaagattggttttgtctctagggttcatcctcgtgatcatttcaaccatgttatattatctgttttggggtataagccgaaggatttcgctggacagattaatctcaacacttctaacatgtgggggattgtga

SEQ ID NO: 17710 - DNA, 521 bp, Emericella nidulans
aactgggcacagatgacgctccagaacgtccggctagagagagaagggctgcaggcattcaaagaggccggtgtcaactgcgtctgcaattccagcccgctggctagcgggctcctgcggggagaaggcgtgccgattgctgccctgggggactggcatccagccccggagggactgcgaagagcggcccatgcagcggccgcctatgtcgcctcccagggggaggtgctggcgcgtcttgcacttcgatatgcccttcgacgagcgcagcactgctccacgtcagacgtgcgtgtgggtaccatcatgggaggcacgacggtagctgaagttgaagagaatgtcacgactgcactcaaggttctgcaacggagcaatgggaggctgcaatggagcagccaggggataggagggtggacggagaatcgcgatgcgcagttagacctgcgcctgtctagggacgtccagcaaatcttagggaagtggaggaattacagcttttcagacgggaaaactgagcg

SEQ ID NO: 17711 - DNA, 574 bp, Emericella nidulans
gcgacagcgagcacgaaaaagaaaaggaaaaagagaagcctacgccagcctcgacccacggaacagttgcgcccgcaactgcattctcgaactcttcaaacgctgtaacaatgtacaaacttcacggctcccttccgcaacacgtccgtacatccacactttcctctttcgctaagaatcgcgacccttctgtcctgatctgtaccgacgttgcatcccgaggtctcgaccttccaaacgtcgacctcgtcgtcgagtacgaccctgccttcagcgcagacgagcaccttcaccgaattggacgtactgctcgtctgggccgcgacggccgcgctctcgttttcctacttcccggctgcgaagagaactacgtcgaaatcctgaaacgcgggtaccgcgatggcggaaaggctctgacacgctcaacaacagacgacattctcaagcgcggcttcggtggcaacatcgagtcccagagtaaagactgggaccagaaagccacagaatggcagcttgagctggagcgttgggcgctggacaatcctgagtatttggagatggctcggcgggcata

SEQ ID NO: 17712 - DNA, 922 bp, Emericella nidulans
tgatcatcaagccgtccccgtacacgccttactgcgatctgaagctcggcgaaattggcatgcgcatcttcccgccgggtgtcctccaggtgctcagcggcggcgacgagctgggtccgatacttacgcagcatcctggcattgataagattacatttacagggtcgagcgctacggggaagctggtcatgcagagctgcgccaaaacactgaaacgcgtgactctggagctcgggggcaacgacccggctatcatctgtgaggatgttgatatcgatgctattgtgcccaagatcaccagtctcgcgttcctcaactccggccagatctgtatgctcattaaacgggtatacatccacgagagtatctacgatgcctttcgtgacgctatggtcgcgtttgcaaagtcgatcaagaccgcagacgggtttgagccagacgcgttcgtcagcacgatccagaacagcatgcagtaagtttttgtcgtatatttattccctgatcttgaattttttggagacttcacgctaatcggaataagaggtacgaaaaagtcaaagacatgtactctgagatcggaaagcgcaactggaaacaggctctcgagggcaaggtattcgagaactccaagggctattacatcagccctgccatcattgacaaccctcctgaagattcgcgtatcgtcctcgaggagcccttcggccccatcgttcctcttctcaaatggtctgacgaggaggatgtgattgcacgcgccaacagcctgaaagacgggctaggtgcctccgtctggagcaaggatctcgatcgggcggacgaatcggcaggcaactgtctgccggcagcgtttggctcaactcgcactttgatgtcgctccgaacgttccattcggcgggcataaatggagcggcctcggca

SEQ ID NO: 17713 - DNA, 1165 bp, Emericella nidulans
ttcgtctcgcagggcaaccaggaaggccttttcgggctatgtaaggcttatgctctatatgatgaggctgtgggatatgcccaagggatgaacttcattgtcatgccgctcttgttcaatgtaaggattgcgactctgtctaggctattaattgtcagtgccaggtgactgatttggaaacagatggacgaggctgaagcttttaccctactggtaaaactcatgaaccagtacggtttgagggaaatgtttatccaggatatgcctggcttacaccgttgcttatacatcttcgaacggctacttgaggatttcgagcctgccctgtattgtcatttacggcggcggggagtccacccccagctctacgctactcaatggtttctgaccttatttgcctaccgatttccgttgcaactggttcttcgaatatacgatcttattctcgaagaaggcttggaaagtactattctaaagtttgcccttgcaatcatgcgtcgaaattcagatgctcttctggcaatgaaggacatggcacctctgacggcatttttgaaggatcgattgttcgatgtatatatcgataaacagcccaccccgtcatccatcctcgaatcagggttctttgggtcatcaggtgctgcggacaaggagatttaccgtgccgacattatggtccaggacgcctgtgatattcctcttgacccagcgacaataaatgcatacactgctgagtgggaagagaaggagcgttctgaaaaagagcgtgaagccgaattgaatcatctgaggcataccgtagctacgcaaagtgctcgcatccgtcttctagaggagcaagcagaggcatccgacaaggaacacgttcagcttgcttcagaggtcgtccatctgaaggttgagaacgaagagctttctgatattaacgatgctttaagaatgcaggtgaaagagcttaaaatcgtggttgatcaacagcccgcagaggtggaacagaaactacagactgaaatggaccgcattatgaaacggaatgtcgaggtgcagaatgagaatcgcgctatggttgaacaaatggccgagatggagaaggagcttgtcgcggctaaactcagttacgcagaggtaagagcattccaattgttatggtcatggcaggcctgga

SEQ ID NO: 17714 - DNA, 1234 bp, Emericella nidulans
cgatttcaaatttgcgccagcagagcggccgcgctggacgcagaaacaaggacagcctttccattcttattggcgagcgctatcccacagaccaattctacatgcgaaatcctgaagagctcttctccaaaccgaactgcgaactgcaggttgatctcaccaacgaacttgtcttagaaggccatgttcaatgcgctgcctttgaactccccatcaagcccgacgatgatcagatctactttggtccccagctatctgaattcgcatccacccgccttgtccgtgatgcaatggggttttaccattgtcatgagaggttcagaccccagccgtcacgttgcgtccccattcgcgacacagaagaccagcactttgccgtcattgacacaacgaacgctcggaatgtggttctcgaagaggttgaagcctcccgcgctttcttcaccctttacgaaggtggcatcttccttcaccaaggccaaacatatctcgtcaaagaactaaaccctgaccgcttctttgctcgtgttgtctgcgtcacggtcgattggaatactatgcagcgcgacttcacagacatcgaccctgttgagacagagcacatgcgtctcattacctcatcctccccaaccaaagccacaaaaataacagactcctcaagcacccgctcactggaacgagaaaaagaaagggcgattcgcgctttcttcggccccattcgcatccacgccatcgtctacggcttcttcaagattgacaaacgcgggcgcgtccttgacgctgttgccgttgacaacccgcccatcacaatcatgacgaaagggatgtggctcgatgttcccaaggttgcgcttgatatactcgaatccagacgcctgaatattgctgctgcgattcatgcagctgaacatgcaatcttatctctcctgccgagttttgtcatctcgagtccgggtgatgttaggacggagtgtaaggttgcgaagaaggaattgggcaaggatttgcagaaagttgtgaggaggggtggtggcgttggtgaccaagacaatatccccgtgctgaagcccccacaccgccaacgacccgcacgattgacattttacgatgcgaagggaggctcatgcggttccggcattgcacgaaaggcattcgagttcattgactcgctcctgaagcgtgctgtcgcgcggatagaggcttgtgcctgcgttacaccgaagggctgcctgga

SEQ ID NO: 17715 - DNA, 1274 bp, Emericella nidulans
cccggcacgagaacaaacagacttgggtctaccgtatccttcccgccgcagcgcacgagaacttcgttgaagaggatgcgagctcttaccacacgctctcagatgccaaaaagcttcagcatatccccaaccagctacggtgggatccattcgatctggacgagaccgtcgactgggttcatgggttgcaccttgtggctggttctggagaccctaccgtaaaacaaggcctgggcatcttgctgtatgcggcggggaaagatatgggaaaggaagctttctactccgcggatggcgacttcctgatcgtagcacagcatggcgtgctcgatattcagactgagcttggccgcttgctggttcggccgaacgagatttgcgtgattcctcgtggtgtaaggtttgtactacgcgctgacaaaccatatttgagatcatgagcttacggaataagataccgtgttaccctacccgacggtcctgtgagaggctacatttgcgagctctaccagggccactatcagctacccgaattaggacctattggatccaacggtcttgcgaatgcacgagactttcaagcaccagtggctgcctttgacgacgaggaaggaccgacggaataccgactgtacagcaagttcaacaaccacctcttctccgcgcgccaggatcacaccccttttgacattgtcgcatggcatggcaactactacccctacaaatatgaccttggccgcttcaacaccatgggctccgtatcattcgaccaccctgacccctccatctacacggtgctcaccggcccgtccgatcatgtgggcactgctattgctgactttgttatttttccgccgcgctggttggttgcggagaaaactttccggcctccctggtatcaccgcaatactatgtcagaattcatgggtttgatcaccggaaactatgatgcgaagactggtggcggcttccaacctgctggcgcgagtctgcacaacatcatgagtgcacatgggccggacatgcatgcattcgagggagcaagcaacgcggacctgaaacctacgaagattggggatggcagcatggctttcatgtttgaaaggtaggtcaacctgtcttttttccaagttcgaaatactaactttgcatagctccctcatggttggcgtgtcggagtggggtcttaagacatgccagaaggtgcaggaggagtataacgaacatagctggcagcccttgaagaggcacttcaaggatccaaggaaggccca

SEQ ID NO: 17716 - DNA, 2983 bp, Emericella nidulans
atgccgctgtatccgcacccgattctgatcggtaccagccctaccctcctcgtcgacgaccctccaaccgtagtcgtcactcagtgtcccccccttcgatccaggaaattcccggcttgtcacgcactgaaacagtacccacgctttgctcgcgctcatcaagcgttgctcccagtacaagaagcaacacaccggctagcctgcgaccgtctagctcatacaacagtatggaccaggaaattcaggttgtcgatgtatcgcgcagcccaggcctgagcagtggatacgtccaccttccttccagcactatgatggtcccgctccccgcagatgtggcaatggcaaaaggagacgacattgcggtgcagcagccgagcaagaaaatgcgaatgagcggccatagtggcagcagcggctttgtggcgcggttcttggcgtcggcgacgggaacctatatgggccaccggatgcggcctcgcgtttagaccagcctcggtcttgtcgatttgcgggtcctctcaggtccaacttcttcaaccaccgacaaatgacaacctgcaactaagctgtttgactcttgagctggcctcacaaacatgctaaacaagttagccctctaccaatcaacactaacacctaatacccctcaaattcgcaccactaaaaattggtttcatatccaataccccgtcgctaagaaagttccttcattctcgtcttcgtttgatgttctccttcgtttgtttcagattggcccggaccttgcattgcattctaggcggcgttttgagttgtgcttattccatttgggatttgggacaggcttggcggttggtggctcggggatacagacgattgatgtacgtaacatgctatatgtgaatgaacttatctatccttcgacttatccggtcgcaactataacacctgatcttaaagagcgtacgtatttggactacgcaacctagttctggatggatgccaccgaagtcgggcgcgatcacaaacttaatccggctctgagaatgcggcggaatgtggctgcctcaacttttcgccggactgatccagtaggcattttggattacagcacctggagatgcagccttgtcggaccggatgtttccatgtgttgtctatcatgacaatttgaactttgggagttacagtattattttgatgggtgactgaaccgtggatagtctcaacgttgacatgtgtactaacccaccgctgtcgtcataccccaccacttccaagaaagagcttttgccgactttcccctctccttatccttgttcccaggctggctttcatctatcagtgccagcaaagttccatcgggcgcacttgacgagaacggctgcccactgcaacctcgagcacgaccgcatctgttcgccacttaggtactgatatctccgaatcccggcgctcgcttacctccgtcaagaccaagttacatccgactcagttatttccttgaaagaccggcttcatttcgttatcaccgacgccgcgccgcttgctctggagctatataagctgagccgggccaacaccgcctgcgttcgaactacctaggtagtatagagatttcgttttgccctgaacacccgagaaagaagtctccatgccgatcacagtcctctcaggagcgcagctccgcacccttctcacctcgttgacccgcgatcagattgtctcgatccagcggaatctagcagacgcactacgcgattactccatcgggaaccaggattctggatgcgcggctacgctgcaacctagacgaacagcggtaacgaggcaatgcgggcgaacgacaatattcatgccatcgagcacgcggcgctcgatcgggatcaaggttatctctctacaggatagggagagtaaacctggatgtgaggtggaatcgggggaggacctgcgtggtatcaagaggtttacagcaagtggtcctggggaggccggctcgcggacttcggtgtcctcaatatcgtctgagatgagcgagttgtcgttctcatcacatgaggatgagcccgaggctgagcagtcggttagcttgtctacatctagtggggagagcgatccgttgcctgtggcttcagtggataagaaacctattggggctggggtgtcgcagacgctgggcgcgtggccgggacccggatcccgggatacctcgccgaaaggaagcgtcacgctgtatgatgatgatagcttgccgtttgggctgatcaatgccgaggagctgacgccctttcgaacggcgctaacgactacgatgatattcaacaagcgcaagaaggtgcgcacggtggtagtgtttggtgcgggcaagcaggcttactggcatatccgactggcggtcatcttacgaggcgaggacatcaagcgcgtggtcatcgtcaaccggtcgtttgagcgggcagcgcagctgctccgggagatctattcaccagagaatgctagctggcgaggggatgtcaagttctccgcagtcagcagcgaattcggggagtacaaacggatcctccacgacgctatcaacaaagcagatgctatcttctgctgtacgccgtcgcatgaaccgctgttcccgtcggagctcctcacctcgcgggaggggcgccgcaagggccgtttcatcagcgccatcggatcgtacaagccgaacatgacagagttacatcctgatatcctccgggaggaggttacaatatcaccgccccatcgccacttccacaagcatgttcagcgcagtgggattgtcgtggttgacagccttgatgcggcgatgaaggaggccggcgagctgatccaggcggaggtcaaacccaaccaggtagtggagattggcgaactactgatggtgcgggatgccgcgaaggattcaagtttggctgacgacgagaaacacctgcgcgaatgggtcgagcgtgggaatgtgatatttaagggcgtgggattgggc

SEQ ID NO: 17717 - DNA, 219 bp, Emericella nidulans
tctccgagtacggaacgatttttttttttgtcgcaaagcggaaccttaaggcgaagggacaggcatttattgtcttcgacaatgtggacagcgcaacacgcgccattgacgaagtcaatggcttcgatctttttgataaacccatggtcttagactacgcaaagacgaggagcgatgcgacggtgcgtcgtgaggggggcgatgaggagctagaggctc

SEQ ID NO: 17718 - DNA, 324 bp, Emericella nidulans
atcacccaacaccgaacaatcctcgatttcgcaacatcctacgaaccagaaaattggaccgactttcgcactcatctacacatgaaaatggataatgaatacccgaactaacatatttccgctatagtcaaggacaaggcccagcacgccgtcgtcctcgagaaggcgaccgctgagagactcaacaaggacgtccagtcctaccgtctcatcaccgtcgccactctcgttgaccgtctcaagatcaacggcagcttggcccgcaaggccctcgctgatctcgaggaaaagggacagatcaagaaggttgtcggtcactccaag

SEQ ID NO: 17719 - DNA, 345 bp, Emericella nidulans
gaagtacctccaaggccatatatcttgcattcgatgctcgacctgtgctgctgagctttgtatgaccaaccaaattatcagcaaaggattcactggccgcatggccaggcttatcttgtgtctgcgaaacctacagtcaacacaccatcctgtccaggagactcgcttcccaatactttacttcaaagtcctgtgtccagaaacctagtcacaggtgcccatacagtaagcgatattgaatgtgtcttctgtgggagcgtccttggctggaaatatctcaatgcggaggagcaatcgcaaaaatataaagtcggaaagttcattttggagacgagcaaaattacg

SEQ ID NO: 17720 - DNA, 398 bp, Emericella nidulans
tcaaaggggtgagcttaacgttacggaatcattgcaaaaggcaatatctgcgggtaacaacttcgataaggattaccgtatctttcccgctcagctgggagaggtccttgagattgtctggcagaatcgtggtgctgttggtaacagtaccgttcggaaccgcggcgtagagactcacccgtttcacggccatggcagacacttttatgatattggcggcggcgacggcgagtacaatgctgcggaaaatgagaagcgcctgcaggagacacagcctgttctgcgggatacaacagtgctatatgggtatagcagggaggttgcccctggtgctccatcaggatggagagcatggcgtatccgggtgacaaatccaggtgtatggatgatgcattgcc

SEQ ID NO: 17721 - DNA, 412 bp, Emericella nidulans
agcgctgtggatgaaagcttcctcgcaatcgaagctgtcaacgcgctcattacgtacaatgacaccatgtgtgaggtatgtattcgccaatctgattgctgagctgttcgctaaaccgaacgtacagattccggaagaccttcaatctgttctcagcgacagccacctcttcaaggagaactcggaagtcacgaccaaagatatcctgaaaagatatggtgacattgcaaggggtggcttctctcagaaagcaagcaatggcggtgaaacattcactataactaatcaaagccgtggagccaacgtccctacttctgcccggattgagacagacccgtaccaggatacggcatctcagatgcaaagttcggttcgacatgtgcctggaccgggtggaaactcgcatccaagt

SEQ ID NO: 17722 - DNA, 450 bp, Emericella nidulans
gcaaataatcgcgttccaataaattacgtaacgcctccgttcccatccctctacgacccattccccggccgcgacaatgttgcttattacttataccataccagagatatctggcgattcacattatactggacgctgattttctacatagcctgtcacctagcggttgctgcctgttcgctcgtcatgcaaggccggaactggaagatttgcttaggcatacctattatctacgccgccataggaggtatagaggcagttgtagcgggaagtatcgttgggggcatgtacgtaaccgattctgaggagctctgcgggttgctgcgactgcacgctaacatttcaggttgggctccgtatacgaagcgggtaatttcagaatgtcgacgtggattcccattgtctgggccggggtgaatatcatggttttgatactgtcgagcttcccga

SEQ ID NO: 17723 - DNA, 457 bp, Emericella nidulans
tctaaaggtcctgtgatctcctacctcgccgattgcggcgacgactgcacgaccgtcgacaagacaacgctcgagtttttcaagatcgacgccgtcggcctcgtcgacgactctaccgtccctggtacctggggtgacgatgagctcatcgagaacaacaactcctggatggtcgagatccccacctccatcgcgccgggtaactacgtcctgcgccacgagatcatcgcccttcacagcgccggcactgagggcggcgcccagaactacccacaatgcttcaacctgaaggttacaggctctggcacggattccccggccggcacgctcggtacagagctctacaacctagatgaccccggtatcctggtcaatatatacgccagcctgtcgacttatgttatccccggcccgacgctgtacagcgcccctccacgcattgcccaggctacctctg

SEQ ID NO: 17724 - DNA, 466 bp, Emericella nidulans
tctctattttgccgatgcagcagcccgcaatcgtgaactcattgcagagtccggcgagccaacgcttcctctcaccgagtgggccttccagtatagccggtcaacgccactaacagtggccgaaaattgggagctcaactgccagcgcgacatttaccgggacgactatcatgcacttatgaaatctcacggtgtagacttcattctctgccctgcatatgttggtgtcgcaagcgtcctaggcgaatcccaatactggaactatacggctatctggaatatcctggaccagcctgctgcagtttttcccagcgggttatacgtggatccgcaactcgacccggtagacaactcctatcaaccacgaagcgcagaagatgagcgtgaatggaagaaatattctcctgaaagatatgttggggctccgattgggctgcaactagttgggaggcatttcaaggatgaa

SEQ ID NO: 17725 - DNA, 470 bp, Emericella nidulans
gatgtcgcatccgctactttacgccaacggttgaagtgccgatttgcggtcagcacagtagctgcgcactatgtacgtgcgaaggtgttaggtttaggaaattgcacgatctggcaaacatcgctggcaggaaaacatcgcgtgactatcgaaaagcacaacgatgattatcgtatttcgctggaacaaggtacgccgggctttgagccaccgctggaaggtgaaacacgtgcggcgattatcaacgcgcttcatctcactgaggacgatattctgccaggcttgccaattcaggtggcaacaacaggacactcaaaagtgatgatcccactgaaaccggaagtggatatcgacgccctttcgcctgaccttaatgcgctgaccgctatcagcaaaaagattggctgcaatggtttcttcccgttccagatccgcccaggcaaaaacgaaaccgatggtcgcatgttctc

SEQ ID NO: 17726 - DNA, 482 bp, Emericella nidulans
gtgtccgtatccgcctacactatcagccgggcccttcgatcgcatggttggagcaagaaagtagctccacggatagcacgagaaaggaatgcagatttaagggataactattcgtatcagctgtcagagttctgctcgtatcacctagtctacatcagtgaatcaggctgtgataagcgggctggctttaggaggacaggctggtctcccccgtggggtggcacctgtccaagtttcccgttttcagcggggtcaacggtaccagattctccccacgtattgccaggatggcatcttgatgtcgcgagtctccgaaggattgactgatgctagtttgttcgaggactttattgaacagcttctccatcattgggtagatggccagagccaaagtccgtcctgtttatggacaatgcgtctttccatcatacggagcaaataaccgagctatgctcaagggccggtgtcaagctgttgttctt

SEQ ID NO: 17727 - DNA, 485 bp, Emericella nidulans
tacagcacctgtaccgcaaggaagctggagctcacggaaaagatgcgtgggggattttccgtgtccatcaattcgagaaggttagacatagatttttattgattgtggtgctctgagaactcacttgggaatagatcgagcaatttgtcctcaccaaacctgaggattcctggaaagctttcgacgaaatgatctcaacttcggaggagttttacaaatcgctgggccttccctaccaggttgtttccatagtctcgggggctttgaacaatgccgcagcgaagaagtacgaccttgaagcctggttccctttccagcaggaatacaaggagctagtttcttgctccaactgtaccgactatcaagcacgcgccctaggaattcgatatggtcctaagaaaaccactgacgcaaagaaatcatatgtccatgcgctaaatgctacactatgcgctacggagaggactctctgttgcgtgcttgag

SEQ ID NO: 17728 - DNA, 487 bp, Emericella nidulans
aggaaattgacgtcgtgacacaggaccccttcctgattgctgggagtgttcgcttcaacattgatcctttacagacagcgtccgatcagaaaattatcagcgcattgcagatccttggcctgtgggataggattgcacaggaaggtggcctggatggacgaatggaaccagacgcatggtcgcagggccagagacagcttctctgtctcgccagagcaatggtccaacagggcaaattattgatcctggacgaggcaatgagtaggtatgctatgttatatgccatcacaaacgcggacaatgcttacccagccttttttcccagtgtcgacaacgagactgaagacattatgcaagcagcaatcaacagcgagttctcatcgcatacagtcctcgctgtcatgcaccgcctgaggcatatttattgttatgaccgcgttgtccttctcgttgacggggttgtggtcgagttcgattcgcctacagc

SEQ ID NO: 17729 - DNA, 519 bp, Emericella nidulans
gaacgaggccaaacagaaaccacccttgccctgttgctatacaccatccagatggaaaacgaagatgtttctcaatctcatgagtcctacctttcctgcttccactctacgaaccgccgccgcacggaaatcacctgtctgacctgggcaatccaggccctctgtggctcctcgttcatgggctattcgacttacttctaccagcaggcaggtctatccgtatcgcagtccttcaatatgtcgctaggccagtacgcgtttgggatcgtcggaacactcgtctcgtggttgttaatgactcggtttggacggcgcaccctctacgtcgtcggtcttctccttctggtcatcatacttttctctgtgggttttacctctttgtctgatacgaagacagcgagctgggctattggctctttattactactgtttacatttacgtacgattgcactatcgggccggtatgttatagtattgtctccgagatcccttcgacgcagcttcgaggaaagacaatc

SEQ ID NO: 17730 - DNA, 525 bp, Emericella nidulans
caaagggagcaaacggataatggccttgctgggagccggtctctccgcttcctctggcctccccacattccgcggcgccggcgggctctggcgctcctacgatgcaacagagctagcaactccggaagccttcgaggcgaacccggacctggtttggcaattttacagttataggcgacatatggcactgaaggccaaaccaaataaagcgcattacgcccttgcagagctagcaaggagaaagagagagttcatcacgttgagtcaaaatgttgatggtatggctgcctcaatactcgaatattgtgaggttgctaatgggcttctgttgcataaggtttgtcgcaacgagcgaatcatccccctgaacaacttcaccttctgcatgggaacctgttcacggtcaaatgtacatcgttctactgcaaatatgtccgtgagaacgactttacggacccgattgtccccgcacttgcgataccgaagaacatccctgaaccgcgaccgttcacagacgacaaatcc

SEQ ID NO: 17731 - DNA, 529 bp, Emericella nidulans
aggatccccacaaccaaaatttaggtcttaaatataacttttgatatcttgcgacagaagtattcttaaattttgattttgttgcagtttgagcttaacccggatgaatacatcaaatcggtggaagcaacctatgataaaccggacattttccgcaatgtcgtcattacatcgcttacatttgaaacatcgaaggggagaacgtcattctctgggtataagggaggtaagaagtttaagctagagcaaaagggtcgtaggcttgtcgggttccatggaaaggaaggttcagctattgatgcccttggagcatattttgcacctattcctactccgactcctataattccagccaagaaactaccagcaataggcggcacgggaggagttgcatgggatgatggtgtctacgatggtgtaaggaagatacttgtaggacaaggtaacgatggtgtagcctttgtcaagtttgaatacaataaaggaaaagatcttgtatctggagatgaccatgggaagatgacattac

SEQ ID NO: 17732 - DNA, 549 bp, Emericella nidulans
atcgactgtccgatccatgtcgacgccgcgagcggagggttcgtggcgccctttatctgccctgagctggtgtgggattttcgtctagagaaggtcgtgtcgatcaatgtctcagggcataaatacggccttgtatttttacaactcttcctgaatgaacgagcgaaaaactgacaccaggctaggtctaccccggcgttggctggatcttctggcgatcaccagaataccttcccagagagctagtcttcaacatcaactatctcggctccgaacaggcgacctttactctaaatttctctaaaggcgcctcgcacattatcggccaatactaccagctcatccgcctcggtcgaaacggttacaaagccatcatgcagaatctagtccaggtatcgcaaaatctcgcccgtggcttgccagacctaggtctccttatcctcagtgacaacacaggaaatggctctggcggcgtgccactagtcgcatttcggcttccagacgatgaaagtcggctgttcgatgagtttgctgtttctgctgttctgc

SEQ ID NO: 17733 - DNA, 559 bp, Emericella nidulans
agttcactggcacacagcagtctgatcgacaggtttataatgtcgatgtggaaatcaagcacgtggacatggctgagtcctacctttgcggttatctccgtatccaaggtttgtagatcaacccggtcttcctatcaaacagttgcgattgacttttgtcatccttgcaggtcttaccgaggaccatcctaccttgacaaccttcttcgagggagagatcatcggtacgaagcacaccttcaagacccgaaacgaatcatggggtgcttcggagaagaccgacatgcttcactgggcaaggtttccggcttggcgaccgttggccaaacaagcgaagagatccgacttcacgtattgggattttgctgagcgtgaccacattttcatgcgctggaaggaacatttccttgttccggaccatcgtgtacggacgatatccggcgctacgtttgaaggtttttattacatctgcttcaatcaagtggaagggaccgtttccggtatatactttcatgcaaagagcgagaagtgagtatatcgccacaactattgcctgaag

SEQ ID NO: 17734 - DNA, 561 bp, Emericella nidulans
atatcttcggacccccagagagggtatcgtatgagaacgtcaaactggctctacgaatccatgctgagtctcacggcagcgatgtgttccaatcggatatctgcacgtgccggccctacctggcgttcgggattcgcgaggccatccgagaggcacagaatggtggcagtggtgttgtaatctacttccgaaaggagggccgtgccttgggagaagtgaccaaatatttggtatacaacgcacgcaagcgtggcggcgatactgccgataagtactttactcggacggagaatatagcaggagtacgagatgtaagtgtcaacataccaactgcaaatataccatacattctgatctcgatctagatgcgattccaagccctcatgcccgacattctgcattggttaggaatcaagaagatcgaccggatgctatcgatgtccaacatgaagcatgatgccatcgtcgagtcaggtatcaagatcgtcgagcgtatacccatccccgaggatatgatccctgatgactcgagagtcgagatcgatgcaaagatcaatgctg

SEQ ID NO: 17735 - DNA, 567 bp, Emericella nidulans
tccgtgtctccgtatgtctgggcgaatattggtattgcaatgtgcattggactatcagtagtgggcgctgcatggtatgatatgactcaataaacggcgaggtcgaggtttctgacgaccatctccaggggtatcttcctgaccggctcatcgattgtcggtggaggtgtcaaggctcccagaatccgaaccaagaacctgatttcgatcattttctgcgaagtcgtcgctatctacggtgttattatggctattgtcttctcctcgaagctcaacctcgcaaccggcgacgaaattcattcacccagcagttactacaccggctatgcgcttttctggggaggaatcactgttggcgcctgcaacctgatttgcggtatctccgttggtataaacggtagcggtgctgctctggccgacgccgctgatcccagcttgttagttccgcctcttcttgcatttccggtgggcagcgactaatgttttacaggttcgttaagattcttgtcgtcgaaatctttagctctgtcctgggcatgtttggtcttatcgtcggtctcttggtcc

SEQ ID NO: 17736 - DNA, 575 bp, Emericella nidulans
agcacaaaaaccttggtactgaaccctactttttaggaactagagcatgctaaggcacgaggtgctcgtatatatgctgaggtgaaaggctacggttgttcaggagacgcccaccatatgacagcccccaaggcgaacggtggaggcgctctgctagcaatgaaaaaagccctaaagaacgcttgtctcgagccctcagctgtcgactatattaacgcccatgcaacttcgactgtcatcggcgacgctgctgaaaatgccgcaatcaaggctctcctccttggccccgggggtaaacagaaagcggctgatgtgaatgtcagcagtaccaagggagccataggacatctactaggaggagcgggagccgtcgaggctctatttactgtccttgctattcatgaggttggtcttacgttttgattttgtggtaccgctaattgccttctagaatgttatgccacctaccattaacctggatcgtctgaatgacggtttcgactttaattacgcgcccaatgaggctcaggagcgccgtattgatctagcgttgacgaatagcttcggatttgggg

SEQ ID NO: 17737 - DNA, 581 bp, Emericella nidulans
gcaattgtcgacttcttaacagcgaaatggaagcgcgagcgaaattacaggctgcgaaaagagcttttctcatttactgataaccgcatcgccgttcagttctggtatgagtttcaagatgccaatgattccatgcggtggaagcggtgttacggcctcgaagactggaccttcgacagagaatcgggaaagatgtgcaaacgcatgatgagcggcaatgacattttactaggtcctgatgggaacggcgaaggacgatggtttgtggatggggtcgacgttgatgatgtagagattgggcaggaacattggtgattgcatgttcattcaacggcgacatcctgttaccagagtgtgtgtccacccggtgcaagtagtcagtaaaaatagaagccagagctattgggtaatagccaaggccacctatagttggaatgttcgggttggcgagtatgttgatcagatctagataacaccccttcgcccttggctcaaggaatctggacttatccgcccctttgctcgcaggctaatcaacactttcatcaagagaaggattcttgtctattggggttgttggg

SEQ ID NO: 17738 - DNA, 623 bp, Emericella nidulans
cgttctaccgggtttagcagcaaacgggcacaagatccagtttggaacaaattacctaagtcatgtcctgctgaccgtcctcctcatgccacttcttgaaagaacagcctctttttcgcagtgtaacgtgcggataatcctcgtctcttcgcacggccgcttgtacgtgcctaaaccgcaggggatcaggtgtgagacactacgcacaaacggacaaagtctaggcccatacgagcgctacggacagagcaaattggcgctgatactattggccaaagaggcggcgagacggtacccgcggattaccgttgtctcggtgcaccctggggttgtaggcacaaatctgatggacgatgcgactgggtctcctcactgggtgaggttgctagggaaggttgcaaagaaggtggttacatctgtggaacagggggtgagaaatcaattttgagcctctgtgagtgtggatgttgcgtcagctgttattatgaaccggttgggatcgggggcttggatacggggttagcaaaggacgataatctaacgagagggctgtgggagtggacggaaagggagattcgcgagtatttaaggttagtttattttcttttaattcgacagacata

SEQ ID NO: 17739 - DNA, 635 bp, Emericella nidulans
cgattgctctcttgaggtcggccgaaaattcgtgctcaatcatctggaacatgaagcaaggaacaagaacaaagatacccggcacgaagaggacctggcagaacttgatagctgcattggcgtgctaggagggcgtcttacggatctcgagttcatggcgcatcgtatcgaggctggagaaacgccccgaggagccgtcacccgcatcgtggaacaatcagcctccgagattttgaagatgttcattttgaatcctgagtccgaatcacagaagtggactcaccaacaggcctggcatttgatcaaaaccctcgcacgctcgaaggacggcagcgtaccctacaatcatgtcattcaatctgacttgttcaaatcaaacagtcaagctctccgtgagctcgaacaggcggagctgatatcaatcgtcaccgtcaatggctcgcctgagagggtgagggctggcaggccggtttatcaggctgtgttcaagcgattgactgaaaacaaggccttgagcagccgcttggatatggaggtcttgtcacagctcatcagtaaagagaacaagagcattggaaagtacgaagaggagctcctcttgctagggaagtgccaaagcagcctcgagaactcac

SEQ ID NO: 17740 - DNA, 661 bp, Emericella nidulans
cctacatgctcaacaccgatattgacgaagttctgtatgatgagaacggaaagtcgtccggcatcaaggccacaatgaaggaccgcgaagatggcggcgaaaccatgaagttcgagaccaagacaaagaagatcatcgcagacccatcctacttccccggcaaggtttctgtctccggctacctgctcaaggctatctgcatcttaaagcatcctatcgacaagaccgatggcagcgactccctccagctgatcattccccagtcccaggttggacgcaagcgtgatatttacgttgcaatggtctcatcggcacacaacgtctgccccaaaggctactacattgccatcgtctcgaccatcgccgagactgactccaaccaccaccttgaactggagccagggttcgaacgcctgggtgatattgaagagaagttcttcccgcctcccattccgctctaccagcccctggaagatggaaagaaagacaacatcttcatttcgaagagctacgatgccacatctcactttgagaccactactggtaagttctttagccctatgtagagcaaatgagtagtgttaagtactgacatccctagatgacgtgcgggacatttaccgccgtgcgactggcgaagagcttgtcgttgaaggtctcc

SEQ ID NO: 17741 - DNA, 669 bp, Emericella nidulans
ctgacacccgacagcactacagcgacggtctgcaaggtgcctgcggctgtgggaataagataggcacctatgactggtcttacggcatcgcgaacaaagtctacacagccgccgcaaaccaagcccttttcgacagcggccctaatgacgcaacccactggtgcggcaatggatgcggcaaatgctacagactgacatctaccggtgtatcgacatgcgagacctgcggcgctggcggcgaacaaggaaagtctatcgtcgtcatggtcacgaatctgtgcccgttcaagggcaacgagcgctggtgcccgaatcccggtcagctaaacccccacggctacgcataccatttcgacatcatgggcggcgccggcgttttcggtgacaacgtcgtggtggagtttgaggaggttccttgccctggcgacgcagcttttaagtgggcggcctgcgaatgtcatcccaacttgaggaacaaggatttgactttgaatgccggtgcacatgctgctggatcgaagattgttggacctgctcaggctgctatcatctctgtcaacgggcttccggcacctgctgctatggcggttcagcctccaccccctccagccccacctgcgcctgcccggcctgctatcgagatccccccgcctccagctcctgtctagg

SEQ ID NO: 17742 - DNA, 670 bp, Emericella nidulans
tctggagttgtctgcctcagtatcgtgatcagcccccacctgcattcagtagtggctggctacatcaattcaaacaacgctataatatcaagcagcggacataccacggagaagctggctcagtactagaagaggctgaggaaaagatgaaggcaatgcgtacgtttgctggccagtataatgaggatgatatttacaatatggatgaaactgggcttttctggcgtatgcctccttcatggagtctatcgtctgttaatacgccaggaatcaggaaagataagagtcggatatctataatatgttgtgtcaatgcctctggaactgatcgactaccaatctgggtaattggaaaggaacgtacgccacgagctcttcgcaatatcaatatctcagcaattgggattcgatggcaatggaacaaaaatgcctggatggaccagattatcatgcgagaatggctccttgaattctatcaatatattggccagcgatctatccttcttacaatggacaacctccctgcacatctttctggcctggagctggcaccaccgcctcccaatgtacgcatctgctggctcccaaagaattcaacaagccggttccagcctcttgatcagggaatcatccagaatctgaagatatattatcggagacagtggctacg

SEQ ID NO: 17743 - DNA, 690 bp, Emericella nidulans
gcatcgacattgagggactagagtcttatatcaaagacgacgttgaacgtctcggaacgaaactcgtgactgcacatgatcgcttacgctcgcttctttctgagctccttcgccccgtcctgcaagatggtggtgaagatggctctatggccttcgctgacggtagtgaacaatttgtcggtggtgattttgccgaagatatcgacgaagacttttttggcttcaaagagctgggcttggacaaagaatttgggctagccacgcttagcgtgccattgcatcttttgcaaaacaggatgtacaacgcggcccaggcgcaaaacacaaagtaagttatccagaccgctgcctattcttcaatactaaccaagactccgacagtacctcccaatccgttacagtctttcccccgcctcctccgtatccacgcatcactaccgaaaatgtatcatcgcagatcggcttggtgcaagccttttttaatgccaaattacaagcgcgcaacaacgaaccactggtcgaggacctcgaattacctcctaagcaaaggccatcggctggtcgacctcgtcttcctgcttctgggaaaatcccgccgccttctagtcttcctggaccaacttcgagtccacagaagcggccactgccgctatcagttcctggattcaacgcaaacaaaccaggaagctc

SEQ ID NO: 17744 - DNA, 707 bp, Emericella nidulans
cctgcccgagcaacttactaactattctgattccgggcctgcatgggtgaatgcagacatatggaaactccaagcacgacgagccacaaaaccgtatctttacagcaaccagtacggcttccacaacggggcgcacctgtggcgcgctcactttaatggcactgccgatgaaatttaccttgaagtctagggcggcaccgctcatggttggacagtctggttgaatggaagcttcatcggctcggttttgggaaacatcggctcatcagttggcattaaggagatcacatttcccaatggtacggtcagtaacagagagaatgtccttctcgtcatgcaaggtattacaggccacgatcaaagttccggatccctgaatatcgtggcatcgtcaattccaccttgctgaacagccagtccggattctcctcttggaaggtcgccaggacagcgggaggtgcaaccggtgctacgctcgatccagaacgaactcgctacaacgagggtggattgacagccgaacttcttggatggcacctcccaggcttcgacgattcgaaatggccccgagcatcacctagtgacgggtttacaggagcaggagtccggttctaccgcactaatcttgctttcaacacaccagctggccatgatgtggtccgctggccatgatgtggcgttgagtgtcaagctcaactttgacagcg

SEQ ID NO: 17745 - DNA, 723 bp, Emericella nidulans
ctggtccgctttaccagaaggatattatcaagatcttttatgactaactatgatcctcttgagcagatctcgatataaatgctgatggcttctcatgggacgaggcaacaagacgcggaagcaggggcctgacaatctggcgctccgacaatctcgttgactgggacgatgctacattagagatgtacgtttctcataacatattgctactgagttatatccaatctaatgcctagctgcagaatcgaatcacccgaagctggaatggcctgggcaccgtccgtagtctacaacgccactgaaagcgaatactacctcttctgggcttcacgcctttatgcagaggacgacgcagaccacaccgacaccgcatctcttgaccgaattcggtacgcgacaacgccagatttcagcacgggatcgttcagcgagcctgccgattacgtcgccctagatgcggagaatatcccactcatagaccaggaattcctctatctcggtaacgaagggcactacgcacggttcttaaaagacgagaatgtgctgcatgtgtaccaggaaacaacgacaggaggcctgtttggtgaatggacgaggacgcagccggagggcgaatatatcaggacgagcgtatatgaagggcccgcggcatttcccgatgttaatgttgaagggcgctattatcttctcatggataactatgaggagtatgtgcccttcgtg

SEQ ID NO: 17746 - DNA, 806 bp, Emericella nidulans
tcgaagaagtccgtcctagatatatcatcatgtacgagcccgaccgtgcattcatccggcgggtcgaagtataccgcagctcccatgtagggagggacgtgcgggtttacttcatgtattatggtggctccgtcgaggaacagcgttacctgagcgcagtgcgacgggagaaagacgcattcacaaagcttatcaaagagaaaagcgtcagaacccagctaagctgtataaacaaaccaaagctaaccatcaatagaatatggccgtaaccctcacgcacgacaaaagcgccgaagatccccaagagcaattcctccgcacagtaaatactcgcatcgccggcgggggccgcttgacagcaacagcctcacccccgcgtgtcgtcgttgacgtgcgcgaattccgcagcgctctgccctccctcctccacggcaacaatatggtcattgtaccctgccagatcaccgtcggcgactacatcctcaccccggacatctgtgtcgagcgcaagtccgtccgtgatctcatttcctccctccgcaacggccgcctctacaaccaagccgagaccatgacgcaacattacaaatcgccattgctgctcatcgaattcgacgagaacaaatcgtttacttttgacgctttcacgtctgccacgacgccggggacaacattcctcacggatttcggattctcctcatctggaaccgtaactacgtctctatcatccagcagcgcgctgattaaccccttcgcgccaaagtcagcacaacaccttctcgtcctcctgacacttgcattcccgc

SEQ ID NO: 17747 - DNA, 818 bp, Emericella nidulans
  unsure (1)..(818): unsure at all n locations
tgaatggtgcataggctgagtataaatggcaggtgcacaatctctcgccaacgagatntccaacctcgttggcgcttccaacatccacctttcctcccgtatcgccagcattagcgaccatggttcgcacatgagcatcacaacaacaacaggccggaccttcacaggccgaaaagtcattgtctccatcccaagcaccatgtacaaagagctcaacatccagccacccctccctccgcgcctccagaccgtcacgaacgccacagtgctgggagactataacaaagccatcgtctgctacgataagccatggtggcgcgaccacggtttcaacgggtactttgcatcctacgtcggccctatcattctagcccgtgacacttctgttgatgaggtcggcaactactgcctcacctgcttcgtgaatgggaagccagggagggagtggggaaagatgcgcccccacgagcgccgcgctgtggtgctagcacaactcgcacaggtcttcgggcacgaagaggaggtgtataaaccgatcgagttcttcgaccagatctggcagcacgagacgtatagccggggcgcattagcgatatcactgccttgggccatcttacagagtataaggacgtgtacgggaagaaggtcggcaatctgcattttgtcgggacagaatatagcgacgagtggaaggggtatatggaaggggcaatctgctcgggcgaggctggggggcgcgaggtcgttgaggcattgagggggaaggaaaggtccagtctgtagtttgtctttattgcaggtgacaaatggaacatgca

SEQ ID NO: 17748 - DNA, 839 bp, Emericella nidulans
gatcccatcatgggagacatctattctgtcttgtgggagcccgagatgctcaaaagtatgggtgcaaccataaatatcttagctaccgaggtatggtctattccgtcacatcatgttatcttactgactcaagtaggccttaacccaagggttgcagcaagttcttggaagcactattctcacggctctcatggcatccttacagctccctcttatccttacaaaactctcctaccttattgataacccatggaacgtgtctctcgcacgagcgactgcggctgggctcattttggccgactcattgatggaccgcaatctaggcaagcggccggtgaccttgctgggttattcacttggtgctcgagtcatattttcatgtctaaaggaacttgcagacaagggtgcgtatggtattgttcagaatgtctatctgtttgggtcaccggtggttgcgaataaggacgaatatatcaaggcccgtggtgtcgtttcaggcagctttgtcaacggatacgcttcaaatgactggatcctgggatatctgttccgcgctaccagcggtggtattttgcgagtggctgggctggctccagttgaaggcattcgaggaatcgagaatgtcgatgtcaccaagctcgtgaatgggcacatggattaccgggcagctattcctcgtctattgaagcatgtcgggtgggaagtcctgagcgaggaatttgcggagattgaagatcccgaccctgaaaatcatgccgagcggcagcgagaattaatccgcgagattgacgaggcgcgtcgagaagcagagaccaagccggaaaagaaacgattcggct

SEQ ID NO: 17749 - DNA, 877 bp, Emericella nidulans
tcacacatttccactacccttttttgcccaatattgaaagaagaagtgtcctgacaatcaagaagatgcgttctcgcttcgcgtaacccaaacacttgcgcaaatctcaaatattgcggcctcgaccccacggatggcacgctgcagcaatatttcacctgcaaggcgcacatggccatccccattccggaggagatatcctgggaagaagcgggcgcaatccagcctcttgcgattgcggtgcagctggctagacgcgcggctctgagtgcgagtaagacggtggctatactgtacgctagccctcccacatcctattaacaatgaagtagctgctaaagtggttggtgacggtgggtgtggaccattaggcctcctcgtaattgccattgcgaaagcctacggtgtgtgcaagatcgtggtctttgatatcgagcaatcccggcttgatttcgcattgtcgtatggagaagatattggcgttctttcaccgaaaatatctgaaaatgttgaacctctgaaattcgtcttcgaatttacatcctccgtcgtaagagaacacaaccttggccacggggtcgacatctctgtcgaagccagtggcgccgactcatctgctcaaatggcacttactatcctgaaacccaggggcacatgcatccaagctgggctggggaagcgactcacaaagcccctctttttcctactgatagcgaacgagttgacgcttaggggacggtccggttcacgccgggatgttaccaggaagcgattgagcttgtacaaagtaaagagcgcatctgaagccgttgattacgaagacttttcccttgacgagggcacaggaggcgtttcgggcacagtttgagagaagggg

SEQ ID NO: 17750 - DNA, 885 bp, Emericella nidulans
tccgcataaagtcccacttctcagcgcatgagttggttcagcattgctgactggagatttgtcctaccgtcttttagctcgttacatacagaaaatcatgatgctctctcgacgtgcctgctacaagtgtggcaacattggccattacgctggttagtcgcggggaaggaataccggggtgagaagcggaatgtgctaacgggcttgtcaagaggtctgctcttcttctgagcgtctctgctacaactgtgagtggattataatgattcagaacctatacctctagttcatcacgctgattcgcttgggtacaataggcaagcagcctggtaggtctcagatggtgtgtgacattgcacggagcaaatatctgatccgcggacaggacacgaatccagcagctgcccgcgccctcgtactaccgagagtaagagttccaagtcaatcgaggaaaggcacaggggtactgatatttataacttccagctaagcaatgctacaactgccaaggcctaggccacgttcaagcggattgtcccacgttgcgcctcaacggcgccaacggtcgttgctacaactgcagccagcccggccaccttgctgtacgtttgacaatccatccctgcatgtcaaaacaaaactaactgcgtttcttgccagcgtaactgcccggctcctgcatctggtgctcctcgaggcactggcgctccccgtggaggatttggtggcggtttccgcggtggatatggcggctaccctcgcgctgccacttgctacaaatgcggtggcccgaatcactttgcccgtgactgtcaggcccaggctatgaagtgctacgcctgcggaaagcttgtaagtgcaacatacattctttgtagacttaat

SEQ ID NO: 17751 - DNA, 895 bp, Emericella nidulans
acttttggggtatccctggtacacggtggctcgcctccccatcgacggaagcttgtgcggcattggggcggatgggccagtatcatgaagatattcaaatgctcccattccgtaaacaggagcttgaagaccgtgtgatgcagggcacagcactaagtactgaagaagaaagaatcatggctgatatacacgcaatccagcatttcacggacttcgaaaacgccacacaattgagcgcttttggtctagaacaattatctagaacgctgcaacctggttccttctctatcttatttcgcaacgatcacttctctaccctttacaagcatccgcaactgcagagactctttacactcgtcaccgatgctggttactctaaccatgcagaagttgtgtgggagagtcttgttgatgtgaacggatccaatgcgggcttttacgccggcgattttagacttgtcagccacagtacacctcaagaatccgacccatcggggccccggacttcgagtcacgacacttcgcagcattccagcacactttcagcccaagagcaggcagacgcggactatgcgtatgctctctctctccagtaccaggaagaggaacaacagcgaccgggacctgcgcgcggccgctcccagagcgcagccaaccttggaactagcgcaaacactcctgctgtaaatcgtcaacagcgtcaatcatatggtcaccactcccaatcccactttcagagtagtggaccggtacacgaagatcaggatgacattccgcctccgtcttatgagcaggcggccaagagtccgatatatacgcccccgcaacagagccctaatatcacagatgcgcccccacggagcccataccaaaggaatccgtatgctcgacatcc

SEQ ID NO: 17752 - DNA, 906 bp, Emericella nidulans
ttggtacgtgtctacaagtgtccttacttttctgtcgcctgtttcaattggttgaatagttcgttaattatcttttttaggacatggcttttctacgttgcggccattgtgaccggaatcctgaccctcctgctgctgggcatccgtgaatctcgtcccgccctacttctcgaacgggaagtggctaatcttcgagaaataaccaagatcgactaccttgtgagccttaacccggacagtgcacccgatctgcgaacgttcgcacgtgtcgcactaggccgtccgatccggctcttcttcactgagctcattgtcttcactgtctcggttatgagcgccgtagcaactgccctcgtctacctcttcactcaatgtctgccgccgatatacaagagtctgggtttctcagagagacaagcctgccttccatttattgccattggcgctggcttgagcctggggctacttacaagatacctcgatatgcacctcatcgagcggcgccgtagacatggcactattcttctgccagagcataagctcgcggggttctggatcgggtccggggttctcgctggtgcactctgggtctttgcctggacaataccaccggcggtccagcatttgcattggatagtgtccgtgctggcactggtccttatcggatacgcgctgaacgagattgactacgttctcggcggatatcttgccgacagctacctcagctacgctgccagtggactggcggcgctgagcttgatccgggctttactctcaggtatcctgcctctcgtatcaagtccgatgttcacgaatcttggagccaatgtggcggtctcgctcttggctgctgtagccacattattttgccttgtgcctccgttgttttcacggtttggagagacc

SEQ ID NO: 17753 - DNA, 926 bp, Emericella nidulans
caaccgcggatctgtaagttggcgcgcacgaagttactttggatgatattctaacatttgcaatgtaggtttcgcaaagatattctcaagatgaacccctcccgtttcgaaatcgggcccgtttacaataggaacccgcgagatagaaagacactcggcagcggacaactaaaacccctcgccaaagaactcgtttttgatatcgatttaacagattatgacgacattcgtacctgctgtacaaaggcgaacatctgcgcgaaatgctgggcattcgtgacaatggccatcaaggtcgtcgacacggctctacgacaagacttcggcttccaacatattctatgggtttactcaggacgtcgtggtgctcacgcctgggtctgtgattctcgcgcacggaatctctcagatgaccggcgtcgaggcatcgcagggtacctcgaccttgtcaggggaggcacaaacagcggcaagcgcgtcaatctcaaacgaccgctccacccccacatgacccgcagtctggagatcttaaagccatacttcgtgcaaaccaccttagtagaccaagataccttcgccagcccagagcaagagcaacgccttctctcccttctccccgataaggggctcaatgactccttgcgccggaaatgggaatcagcccccgaccgctctagcacaaacaagtgggctgacattgatgctcttgcaaaggccggtaaaagctctactcttaaccccgctaccctacgcgaggccaaacaagatatcgttctcgagtacacatacccacgtctcgattccgaggtcagcaagaagatgatccacttgctcaagagcccattcgtcattcacccgggcaccgggcgagtttgtgttcctattgacattcgtaatgtcgagaagttcgatcctctctccgtacc

SEQ ID NO: 17754 - DNA, 934 bp, Emericella nidulans
tgagtttggtcacacatcctgataagaacgggtatgaaggggcggacgaggcatttaagagtgagttgaaaggcaggctatccattgctgaaggataacttgtctgataatgtgtttgcttgattagtggtctcgcgcgccttccaggttctgtcggattcggagaagagggcaaggtatgataagtttggcggggatccggatagtaggttccagccgagcagcggccctgcaggtgcttcaccgtttggtggcggattttctgggggcggcttccctcgggcaggtggagggtttgaagcggagatatctcctgaggagctgttcaaccggtttttcaacggtgggcttggtggtggatttggaccgttcggtatagttcatgctgcatgatctctaaggaaagtttgctgactaggtcgcaggtggtccgcagttcgttttcaacatgggaggtgggccgggctttagggttcatcaatttggagggactcaacctcgaagacggcctcgcgccgatgcacagcccgagcccacgccatctgccgcatctgtatttcggcagctcctgcctctgatcctcctattcctgcttcctctactttcgtcgctcttctctagtggccctgccccatctgggccatcatatcgattcgaccctattccccctcatacgcagcaacgaacaactccagagatcaaaatagactacttccttaacccgaaagacgtgagcgacttcagttcccgagagtttcgcaaactggacaagcaggtggaagttgattatgtcaagaagctccgttatgagtgtgagggcgaaattctcgcccgggatcgcatgatccaggatgcgcagggctggttcttcccagacgtagagaagattaaggaggcgaaagcgatggagctcaagagttgtcggcggttagaa

SEQ ID NO: 17755 - DNA, 956 bp, Emericella nidulans
accaacgtccagttcactcctgaagccgaaatctggcacggcatccccgaatttgacctgctatcacacaacatctctctccccggcctttcccccctcttcccctcaatccactgctctgccgactatgaggtttgccagctcattacaggcgaaggcgagattaacgcagccagcacggtatccgccctgctttactccaacacctttaacctgacatcaacctacttcctcctcgccggcatcgcaggtatcaacccggaagttggtcccacagcttctgtcaccttcgcccgatttgctgtgcaagtagcgctacaatatgagtttgacgcgcgtgagatttatgccaacatgtcaaccggctacctcccgcagggatcaacctccaccacaccggaccagtacccgtcgtccatctacggcaccgaggtgttcgaggtaaacgcccagctgcgaagcattgcagcagcgtttgcaaagaatgccacgctcgcggactccgagtccgccaaggcatacaggaagctgtacaagtctgacagcggtatctacgacgccgcaacgcaggaccccctcgttctcgagtgtgacacttccaccagcgatgtctacttctccggccggctgctgggtgaggcattctcgaacaccaccaagacatttacgaacggcaaagggatttactgcactacgcagcaggaagataacgcgaccctggagtctctgctccgcggtgcgttggcgggcctagtcgacttcagccggattatcataatgcgcacggcgtccgacttcgacaggcctcatctgggcgagtcgccgttcgagaatcttttcacggctgatgagcagggcgcgtcgactcctgcgtttgagaacctttaccgagctggtattaaagttatcgagggtattctggataactgggagggtggatttgaaaagggcatcaa

SEQ ID NO: 17756 - DNA, 958 bp, Emericella nidulans
ttcaagcctgttccgttatggtgtacgcgctatcacacttattatgatcggaatgctcttgggtcacactcggtacccgaccaatctcagctgtgggccttcttcattgccctgatcatgggtgcagtatggttcgtgccttgcggtattatccaagcctcgaccaacattcagatcggtctcaacgttatcaccgagtttgtgattgggtacatgcagcctggccgcccgatggcaatgatgctcttcaaaacttatgggtacatcagcatgtaccagggcctttacttctgccaggacatgaagctcggccactacatgaagattcctccgcgggtgacctttgcagcacagatgatatcttgcctgtggtcatcgattgtccagatctgcgtcatgaactgggctctcggcgccatttcgagcgtctgcaccctcgatcagccgaaccgctacacctgtcccaacggccgcgtcttcttcaacgcctccatcatctggggcaccatcggccccgcccgcatgttctctcctggccaactctacgctagtctccaatggttctggctcgccggtgccgccctccccgtcgccatctacatcgcagccaagcttcttcggaacaccaagtacgcccgctacgtgcgccttctcaatgcgcccatcatcttcggtggatctagctttatccctcctgccacgccgctcaattatctgtcctggggcattatcggcttcatcttcaacaagtggatccgcgaccgttggcgcggctggtggatgcaatacaactatgttctttccgccggtctagatgtggccttgccctgtgcaccatcttgattttccttaccttgaacttgaccaacacggagttcccatcctggtgggggacgaacattgcggcgaatacgatggatgcggcggggacggctgtgcaggtgacggaggtgaagtt

SEQ ID NO: 17757 - DNA, 971 bp, Emericella nidulans
caactcaaagggcactgcattggtggtctatgaagacgttcacgacgccaaacaggcatgcgataagctcaatggattcaacttccagaacagatatcttgtcggtacgtttgagatgatcattgttggaacatgaggctcgaagatcgcttgctgactcgccatatattcccagtcttatatcaccagccggaaaagatgctcaagtcgaaggaagacttggcggaaaggcaagagaatttggaacgtcttaaacagcaacatggtatagaatgacgtgacgattttcttttaatcgcttattctacatgttctctgcgcgctgcaagacatgaggatgcgcgcactatgttcggttggctgcggggttttcggcgttcaatttttgcttctcactcatatgggtttcacggctcttgttcatgggttttgagggctggtaggtagaatgacacgcctccctggcttttgctccaggcacaggatgggagttttttctcaagctggatcaggattgttacaccgctcagctactgttatcaatatcaccatatcaactgccggccatttaaaggcatggcaaacctaagaaagacctaagctcactgcaggacagaagtgacggcacgatgaaccaagggtacagggttatagaagacactggggtctttgatgaactgtatacgtagcgataccttaagcttattcctacagtgccgattagggtgtagtgcattctagccgcctgggatcatgagttcttgatctcaactgtatccacttcgcggcactgcatgatcgtaccgaagcagttgacggtccagccgctcaggcccacagcttaagcatcatgatctacagcggtcagttgcccaccaagcgaatgcttctgcagggagatttcattgacggacagcattatcgccaagtcatctgcaacaacatgggtggtcttcgcatgcatattcgag

SEQ ID NO: 17758 - DNA, 974 bp, Emericella nidulans
tcgacagcctgtgtctcttcgagttcgatgccgactaccccatggcgcgccactcgacctccgaattcgtctccgtcaccaagaacgtctactttactctccgcagcgtctccaccatcggcaactatgactacatgttcagctacaacttccacatggacggaacgattggcgtcgaagtccgcgcgtcgggatacatccagtcggcatactacgccaacaatcaagacttcggctaccagatccacgactccctctcgggctccatgcacgaccacgttctgaacttcaaagcagacttcgacatcctcggtccaaataacacaatcgagctagtttccgtcgtccccgtcacaaaacaattctcctggagtggtaacaaaacacgcaacactatgcaactgggccgctccttcatccactcagaagacgaagcacggctaaactggggcttcaacggacaaactcagctccatgtcgtgaaccaggacaaaccaaataagttcggagaaccccgcggctaccgtatccttccctccgcagggaccgcccatctgactgtcctaaacagcagcaatctcgtgcacgccgcacactgggctgagtacgacgtccaggtgacaaggcagcacgacttcgaacccacctccgcacacccctacaacagccaagatatccacaatccgcctgttgatttctctaccttcttcaacggcgaatccctcaaccagaccgatcttgtcgtctggctgaatctcggcatgcaccatgtcccgcacacaggtgatcttccaaacacggtcttcacaactgcgcactcgggtgtcgccttcacgcccctgaattatctacccggtgatcctagtcgcgagacagtgaacatggtccgcgtggactatagtgacggcgcagcaaccgctgtccggacgtttggccagagtaatgagacttgcagtgtggtgctacagccagtg

SEQ ID NO: 17759 - DNA, 1006 bp, Emericella nidulans
cgctttgctgcagcttgtatgccgcaaagcccgtcaaagacaaatcagtagcaatggggaaagtcattcagaagttgcggatacaatttctgagggtgtcaaatcattgcgtctagatggagaaccagctatcggtctgaggattgaggaaggcgacattatcttggccttacaggaaaccagaccaactgccatgagagaagtgttcttggaaactccgaaagtgcggtggtcggacatcggtggtcagcatgacatcaaaagacgacttcagaaggctgtcgaacggccactgaaggtaagtgcttacaccaggacaaaatgcggcttatggtgcttactacgctagtttcccgaacgaatgaaacggcttaatgtaaagagcaaaaagggaattcttctctatggacccccaggttgttccaaaactctgacggtgaaagctttggctaccgaggcaggattaaatttcatggccgtcaagggtgctgagattttgagcatgtacgtcggcgaatctgaacgagctctgcgcgaggtattcagaaaggcacgctctgccaggcctagcatcattttctttgatgaaatagatgctatcgcctcgaagcgtggaagctcacctcaaagcggcgtgaatgtgcttacaactctgctgaacgagatggacggtatcgaggagctcaagagcgttttggttgttgccgctacgaacaaacccgaggtactcgatccggccttgatgcgtccagggcgtttggacaatatactatatattgggcctcctgactttgaggcacggaaggagatcctaagcatttggttctgcaagtcgatagtccaccctgaagtgaaagttgaggagctggccatgatgaccgagggatatacgggtgcggagatagtgagcatctgcgagactgccggggacgctgcgctggacgaagaggatgagagtggtcaggaacaagatgtttgtagagcgacattttgagtatgctctgaa

SEQ ID NO: 17760 - DNA, 1007 bp, Emericella nidulans
gcttatgaagctggtatctcccattcttctgttcttcgtatccttcattctcatggctttgttattgcataatcttcctggaagcctggtctgactgaagctgctcgtcttaggtgtcttgaattctgccttgcccaccaacattggacattagaagactggaaacgcgtgatctttaccgacaagactggtgttattcttggccaccgccgcggagcaatacgagtgtggaggactgtgaaagattcacatacaaggaattgtgtacggaggcgctggaaggcctgctctgacttcatggtatggggttgcttctcatataataagaagggccctttacatatctacaagccagagactgctgccatgcagaagcaggcagatatagagattgaagccatgaatcatgagctggaacctctatgccgggaggaataggagttggctacaggtctttctcgtgttcatttacgcccaaatcgcggccgtgttcctaaatggaattggaacgagaagaatggtaagcttatatataaaggtaaaggggggattaattagtagagatattaaacagtttgttcccttatctctataattctctattatagagtagttaagcacgtgctaattacttattctactgcctaggaagtccttaaacctcttcttattctatttgcaaaagaatgcatgattgagcgcctaaatactattattttagaggatagcgcacctgcccactgtcaccaaatccagcagcatatctataaagcagaagacatgcaaaagatccttgactggcctggcaatttaccacatctcaacgcaattaagccgtgctgggaatggatgaagaagcatacaatatcccgcagtgcgccccgcgatcagaagacaggagaagtagaatagaggcaggcttgggcggatctcccacaggagactatacaacactggattgagcgtctaatttgtcatattcagattgttatcgagctagaaggggg

SEQ ID NO: 17761 - DNA, 1009 bp, Emericella nidulans
caaccgtgcaacagaacaactacccaaccgctatctatgccacagccatagtaggaactgtcctctacgctgtcgtctctgacaaactgcgttcgcgatgggaagtctctattgccattggcctaacctttgtcataggctccgccattctcttctcagatcccccaacagcaggctacttcttcgccttctacttgctcggcaccacgtacgcgccgcaggcagtatggtatggctggttggccgacgtgaccggccatgacgtgcagctgcgcgccatcgcgacggggttcatgaactcgtttgattttgcatttgtcacttggtggccgttgattttctaccctgtcacagatgcaccggactatcgaaggggttatttcgctagcttggttactggggccttgacgctgccatttatagggttgattgcatacctggagaggagggataggaaaaggggtgttatcgggaggggagccgtggatgaggataggcttacagacggggatatcgatgtctttgtctcacaaagtgggcatacatttcaaacagagccgtcgaagatcagtcccgcacaaggcgctgttactgtgtgaacaacggaggatggttgagctctggccgctataccctccttccttaattatttgagcatgatgcttgtgtttgaggttccaataaattcaattgtagcgctcaactcgtcggttaccattcttcaaactcggaataactgctctggcaatggtgctgttctacccggcctgcccatggtcgagcccccattgtcgagcctgaaacccttcattgtgctgttgggacgattcagctggcgtagcatagaggggcaagatagaacagctcatgccgtctaaaatgaatggatgaaaccgaagaaagaagggggactcgaaaaagatgaaaatcagtgagaaagaataagattattcttgcctacttctcgcagggccattcgacgcttgctaagagcgtcatcatattgccc

SEQ ID NO: 17762 - DNA, 1009 bp, Emericella nidulans
cgcataggtcaatcgctcttctcttatgatgtgctctaaggtttatggacaattgcttactgacgacgtgcaggtctcatccccggtgacggtatcggacgggaggtcatcccggtaagtcggatatgagtgcagacaagcggtgcaaacgagaccgatactgaactgctcacgtaggccggtagacggatcctggaagctcttccggcctccctgaacctgaaattcaactttgttgacctcgatgccggttacgactgcttcaagcggaccggtaccgctctgcccgacaagaccgtcgaggtcctgaagaaggagtgtgacggtgctctgtttggtgcagtcaggtgagctgcacgagcttgtatttgcttattggacagacctaaacttctcttggcagctctccctccaccaaggtcgccggctactcctcccccatcgtcgccctccgcaagaagctcgacctctttgcgaatgtccgccctgtcaagaccaccgccggcaccagcgccggcaagcccatcgacctcgtcatcgtccgcgagaacactgaggacctctacgtgaaggaagaaagcaccgaggagacccccaatggcaaggttgcccgcgccatcaagcagatctccgagcgcgcatcctcccgcatcgccaccattgctggtgaaatcgccctgcgccgccaaaacatccgcgatggagccgctgcctcgggcctccgcaccaagcccatggtcactatcactcacaagtccaacgtcctctcccagacggacggtctcttccgtgagactgcccgtgccgcccttgccgcgcagaagttctcctccgtcgaagttgaggagcagattgttgactccatggtctacaagctcttccgccagcctgagtactacgatgttattgttgcgcctaacctctacggtgacatcctgtctgacggtgctgctgccctggttggcagtctgggtctcgtgcctagcgccaacgtcggtgacaactttgc

SEQ ID NO: 17763 - DNA, 1086 bp, Emericella nidulans
aagcaccggagagaagttgagttgccgcctgatggccgcattcttacaggatcgaggagtcgactcggagtacgtcgacctgtctgaaatcgttgattttcacatttcaggtcaaggccttgaccaagagttttatgacaatcttgcggctgctcttggtcgcaaggtacatgcctgcgaaaataaagttccagtcatcacgggatattttggaacgataccgggaggccttctcgatcagatcgggcgtggatacactgatctttgtgctgctctggtcgccgttggcgtacaggctggggaacttcaagtatggaaagaggttgatgggattttcactgcggacccccggaaagtgccaaccgcccgtcttctaccagcgataacacccgctgaagccgcggagttgactttttatggctcggaggtgatccatcccttcacaatggaacaagttatccgtgccaaaatacccatccggataaaaaatgttatgaatccgaaaggcgacggaaccgtgatattcccagattccacctatgagttggaaaggacgacgcccggccacgatccgagactattccgtacaaggagccctagccttcttcaacgccctaagcgcccaaccgctgttaccatcaagcacaacatcctcgtcattaatgttcattccaacaagcggtctctctctcatggattcttcgcaggaatattctcggttctcgaccgttggaagctgtcgattgatctgatatcgaccagcgaagtccacgtgtcaatggctcttcactcagaaaggccgcttctgaatggtgttgggagggatgaatatcaaatcatcgacgaagatttgaagggagctttgagtgatttacagagatatggtaccgtcgatataattcctgggatggctattcttagccttgtcggaaagcaaatgaagaacatggttggagtggctgggcgcatgttctctactctgggagagaacaatgtcaatattgagatgatttctcaaggtaacagttattattcttggtcttggataatgcgaaactaactaagttcatcttaggtgcaagcgaa

SEQ ID NO: 17764 - DNA, 1117 bp, Emericella nidulans
tcatcatggagaaaactactgatcttccacaacataatctggcctctcacccgtcaatggggcgatcttcctggaaaacacggtgcgctcttggcgtcattgttcggtggactgatcttctgggacgtcctcgcctgttatgcccaccctcacacctaccacgaccccgtcgaggaggtactgcatctgcagccattgacaggtaattacacaattattgcttccagcaatcaattctaatacatgtatgactagatggtcacaacgatttccccgaattcatccgttatttctaccacaaccacatctaccagagcaatttctctgaccaaatcgcgctccccggtcacgtcgactttccgcgtctagctaagggtggcgttcgcggtcagttctggagtgtctatgtagcatggtatgttgcgcctgcttcccatatacccatacagttcgcagaacgtggaatgctaatagtgcagccatgattctccccccgaaccagactacgagtacgtccacgataccctccaacaaattgacctcgtgcaccgcctcgcatccctctaccctggatacctggagattgtgcccgacaccaccgctttccgacacactttcgaatcatccccgacgaaaatagcctccttcctcggcgtcgagggtctgcaccagatcggctccagcgcatctaccctccgcctctaccactccctcggagcgcgctatgtgaccctaactcacatgtgccacaatgaatacgcggatagcgcgaccccgtctaagccgcgacacaacggtctctcggcaaaaggccgcgatatggtccttgaaatgaaccggctcggcatggccgtggacatctcacatgtcagcgcgaagacaatgcatgatgcgctagatacatccaaagcaccggtgatcttctcccattcctccgtgtatgcactctgtccccatgaacgaaatgttcccgacgacgtcctccttcgtcttgcggagaatggaggtgtgattatgatcacctttcttgatgaatacacccgctgcgacaatcctttggctgctacgttgtctgatgtggcggatcatatccagtacgttggagagttgattgggt

SEQ ID NO: 17765 - DNA, 1132 bp, Emericella nidulans
caaaaagccaatctctagtcagtatctatacgatcaatgggcttacgggaaacatcattctctaccctctctcagtcaccttagtgctgaagctcgtcgagtctgggagatggataaggcaatccggcaagagaagatagcatactggaaagaaaagcttcttgaagagcatgtggtcaacgttcaaggcctaatagccagactggacaggtgccagaagaaactggatgagatgtggaacgagagaacccgcgatgtcctgctatcaaaacgaataattggatgcacaacaactgcggccgcaattaatgcgagcgttctcaacacaacttcgccaggtgttgttctactagaggaggcaggagagattctggagtcccatgtccttaccgctcttgggtcccataccaaacaactgattatgataggagaccatcagcaactgcgaccgaaaatcaacaactacgctttgtctgtcgagaaaggctccgggtacgatctgaaccggtctctcttcgaacggcttgtagagtcaggatacccacattccaccctggcgaaacagcaccgcatggctcctgagatctcagcgctggtgcgaaggctgacctatccagatcttctggacggtgacaagacaaagacccgcctagcaccaagaggactacagaatcgggtcgtattcattgaccacagtcaaccggaagggttccttcatggcgtatcagacagagacggcgatggcggcaagggaagtaagcaaaatacttttgaagtgaagcttgtcctcaagattgtgaaatatctcggtcaacaaggctacggaacagacaaactcgtcattcttacaccgtaccttggccaactacatttgctccgtgaggaattgaggaaggacacagacccggttctgaacgatcttgactcgtatgacctagtccgagccggcctgatttcccatgctagcgcccagcatgtcaaaagacctattaagctgtcgaccataggtatgcatctgataccctcgaaaagttgaattctgctgattgaaatggacagataactatcagggtgaagagagcgatatcgtcattgccaccctcaccaggagtaacaaagacggcgatattgg

SEQ ID NO: 17766 - DNA, 1134 bp, Emericella nidulans
ggtggagcggtttcaactatggctcatgcttacgataattgcgtcgcgaaatatagtcgaaactggtgcgttcagttttgggggcaatttgatcagtacaagcgtgagtggcacgtcttctgcaacaaacagcacgctgctgtcgacacccccaaggtcgtcgacctcaatccttccgcaggcgttcactttcgttccatcgtctcttatggcctcctttagccacgtcaattcttttctgccggcgctggcccaggtacttggtccgttcctgatagttctgggttcggaaatgtttgtcgactggctcaaacatgcatacatcagcaaattcaacaacacccgacccgcgatctacggtcggttcctagacatcctcgccaaggactattataccaacgcctttggtgaccagaacttgatgcgccgtataggccttcctattatcccactctcatgccttttcttccgcgtctctgtacagacatatcagatgttcttggctgcactgctccctcaacctccccccctgtcgccttcctcatccattgctgttgagaccacatctctcgcagccattcatagtcagtatgtgccggctggcccggtaccctcgccgcctccaattaccttaagaacggttttcccagcaacagcagctcatgccgaagcatggtttcgacgagtgctagccaacacaatgccatcagctgatcactccgtttacatcttcacagttgttctggttcttaccggtttcgtccttctgctgattctcaagctccttcttggcatgcttcttctgacctgtgcgcgatcccgctacaagtcgatgaagcagcgggaggcagaacacgcagccgcagcttcatcttctgccattcccactgcctcagaccaccatggacccccgcgtgcacgagactacacggtagacggcgctcgacgtgttggtggctggggtacagttgaagtcaacgaagacagccggcggtggatctaccttgacgacccagaaagtctacgcaagctgaaagagaaggaaaaggcgagtcaaaagggtaagggtgtgtacggggatgatttgcatctagatcatgtccaacgatatgagatggtcgcaaagaggatttg

SEQ ID NO: 17767 - DNA, 1200 bp, Emericella nidulans
cgtctttcaacccagcttgttgaaggggaatatcacgtctaacttgaatagtctctggccgccttcggcgccgtgagattgagctcgctgaaattgagatgcccggtctcatggctatccgtgccaagtacggtcccgcccagcctctgaagggtgcccgcattgccggttgtcttcacatgagtacgttccgcataccggaatgattgtggaacgaactgacctttccccagccattcagactgccgtcctcattgagactctcactgctctcggtgctgaggtcacctggacttcctgcaacatcttctccacccaggaccacgccgctgctgccatcgctgccgccggtgtccctgtgtatgtcgattctcaatcttattggtcaactaagctaatatgagcagcttcgcctggaagggtgagaccgaggaagagtacaactggtgcttggagcagcagctctccgccttcaaggatggccagaagctcaacctcattctcgacgacggtggtgacctgacctcccttgtccacaccaagtaccccgaacagctccagggctgctacggtctttctgaggagaccactaccggtgtccaccacctctaccgcatgctcaaggagggcaagctcctcgttcccgccatcaacgtcaacgactccgttaccaagtccaagttcgacaacctgtacggctgccgtgagtctcttatcgacggtattaagcgtgctaccgatgtcatgattgccggtaaggtcgctgtcgttgccggtttcggtgacgtcggtaagggttgtgcccaggccctgcacaccatgggtgctcgcgtcctcgttactgagatcgaccccatcaacgccctccaggccgctgtccagggctacgaggtcgtcaccatggaggaggctgctcctctcggtcagatcttcgtcaccaccaccggttgccgtgacattctggttggcaagcacttcgaggtcatgcgcaacgatgccattgtttgcagtaagcacccttcaaccacactgataaagatgtagctaaacgtttagacatcggccacttcgacattgagatcgatgttgcttggctcaaggccaacgccaagtccgttcagaacatcaagccccaagtcgaccgctacctgatgcccaacggccgtcacattatcctcctcgctgagggtcgtcttgtca

SEQ ID NO: 17768 - DNA, 1294 bp, Emericella nidulans
gttccaaaacacgcagaacaacagttgcgcgatggggtcagccctccgtgctgggtacaaacttatttcgcccgttggaggcaagatgaccgttctcacctcgtctttgcctaatgttggccatggcgctttgactatgcgggaagataagaaagttctgggaacaagcaaggagagcagcctacttcaaaccgcgaacagcttctataagagtttcgcagtcgagtgctccaaggcacaagtgtctgtggatatgttcctgttctcatctcagtaccaagacgttgcgtcacttagcaaccttcccaggtacacaggtggtcagacatacttctaccctggatggaatgccgcccgcagtgaagacgcaatcaagtttgcgcgcgaattctctgactacttatcctccgaaattggcctcgaggctgtgctccgagtccgtgctaccactggtctccgaatgagcaccttctacggtaacttcttcaaccgtagctctgatctttgtgctttcccagcctttccccgtgaccaggcgtacgttgttgaagttgcaatcgatgagactgtcacaaagcctgttgtctgccttcagacggcggtgctccacacgacctgcaacggcgagcgtaggatccgagtcttgactctggcgctgccaaccacacaaaacctagcggacgtgtatgcgtcggcagatcagcaagccattgctaccttcttcagccacaaagccgttgaacggacactcggaagcgggctggagcaagctcgagaagccctgcaggcgaaggctgtggaactgctctcaacctatcgaaaggaacttgcaggtggaagcgtcggtggcggcggtcttcagtttcctgctaaccttagaggcctccctgttcttttcctcgcattgatcaagaatgtgagttcaaataactttctgaaaccataccgttttgactgacattgaatgtacagctcggccttcgcaagtcggtgcaaataccgacggatatgagatccgcagctctctgcttactatcaactcttcccctccctcttctcatccaatacatttatccgaagatgtactctcttcatgacatgcccgataacgccggtttgcctgatgaacagactggcgaaatcgtcctaccgccccccatcaacctgtcatctgagcggatagtcccttacggcctttatctcatcgatgacggtcagactcagttcctgtgggttggtcgcgacgcgtgtgccacagcttctactcgacgactttggcctaccagataggtcg

SEQ ID NO: 17769 - DNA, 1344 bp, Emericella nidulans
accttacaccggcttcagagcgattcgcgctggattgctcacagacacctatctcgaagcccagcacatcacccaccacaagaagtcttacaacgacatcggcatagacagccgaaccctacgcaagatcgaacaacaccaaaagtccggcaacatgtatgagtacctcgcccggtccattgcgcctgaaatctacggccacttggatgtcaagaaagcgctgcttctgctcctcattggcggtgtcactaaagagatgggcgacggcatgcacattcgtggtgacatcaacatctgcctgatgggtgatcccggtgttgccaaatcgcaactgttaaaatacattgccaaggtcgccccgcgaggtgtttacacgacaggtcgtggtagcagtggtgttggtctcacagctgctgttatgcgtgaccctgttacggacgaaatgattcttgagggtggtgccctggtactcgcagataatggtatctgttgcatcgatgaattcgacaagatggaagacggggaccgaacagccattcacgaagtcatggaacaacagactatctccatttccaaagccggcatcaccaccacccttaatgctcgtacttctatccttgctgcagccaacccgctgtacggtcgctacaacccccgagtttctccagtcgagaacatcaatcttccagcagctctactttctcgcttcgacgtgatgttcctcatcctcgacactccgtcccgcgatgcagacgaggagctggccagtcacgtcgcttacgtccacatgcacaacaagcaccccgaaaacgaagatgcaggcgtcatgttcacaccacacgaggtccgccaatatattgccaaggcacgaacataccgtcccgttgttccctcacgggtctctgactacatggtcggcgcctatgtgcaaatgagaaagcgccagaagcgcgacgaagcgaacaaaaagcagttctcccacgtcaccccgcgtaccctgctcggtgttgtccgtatctcccaggctcttgcgcgccttcggttcagtgaagaggtcgttacagaggacgtcgacgaggccctgcgcctgattgaggtcagccgagcgtccctgtccaacgatggccaatcgcaccttgaccaaagccctacatctaagatctacaacctcatccgtggtatgctcgagagcggtgcagctgccgtcggagacggcgaagacggcgagctcagcatgaggagaatccgagagagggttctggcaaagggctttacagaggatcaactcacaatgacgatcgacgagtatgaaaactctcacgtacgtctcttaatttccccacg

SEQ ID NO: 17770 - DNA, 1427 bp, Emericella nidulans
atgctgtcttcgccagtgttgcccaaaaggcaatccgcaaagttgcgcggaacgttttcgaacatcttttacgactagatctcaatttccacctctcgcggcagaccggaggtttaacgagggctattgatcgcggaactaaaggcatcagctttcttctgacatcaatggtgttccacgtcgtacccaccgctttggagatctccctcgtttgtggtatcctggtatctaagccctcgccataatgcatgtcagcacatctaacgcgtgcaacagacgcatcaatatggcatcaagttcgctgcgattactgccacgacaatgctggcttactccgcctttacgatagcgacaaccgcatggcgaaccaagttcaggaagcaagccaacgcagcagacaaccggggcgccacggttgctgtagactcgttgatcaactacgaggcggtgaagtacttcaacaatgaaaagtttgaggttgcacgttacgacaaagcgctgaaagcgtacgaagatgcctcgatcaaagtcacgacgtccttggcttttctcaattccgggcagaacatgatcttctcaagcgcacttgctgctatgatgtatcttgccgctgatggagttgccacaggcagtctgactgtcggtgacctggttatggtcaaccagcttgtcttccaactctccgtgccgctgaacttcttgggttccgtctaccgcgagctgcgccagtcgctgctcgatatggaaacgttattcaacttgcagaaggtcaatgtcaacatcaaggagaaacccgatgcgaaaccgttggagctcaaacaaggtgggcagatccgctttgagaacgtgacctttggataccacccggagcgtcccatcctaaagaatgctagctttacgattcctgctggacagaaattcgctattgttggccctagcggttgtggcaagtcgactattctcaggttgctcttccgatattatgacgtgcaagaaggacggatcctggtcgatggtcaggatattcggcacgtcacgatagaaagtctgcggaaagcgattggtgtggtcccccaggatacgccactgttcaacgacaccatcgaacacaatattcgctatggaaggctagatgcgtccgatgaggaagtccgcaaagccgcgcgccgcgctcatatccatgaactcgtcgagagactccccgagggctaccggacggctgttggcgaacgtggaatgatgatctccggtggagaaaaacaacgactggctatttcccggttgctcctgaaagacccacagttgctcttcttcgatgaagcagtaagtcatcctttcccgcggtagtgcaaactgaatttgatgacttgataactcacccatgctttccatagacctccgccctcgacacgtatacagagcaggcc

SEQ ID NO: 17771 - DNA, 1437 bp, Emericella nidulans
atcctgccaaagttgattgcgaagccaatcagtatgtggtcttttgctctttgacctgttgtctagctcatacatctttaggaacgtcctctggtatcgccgttgttgctgtgatgagcaaaccccaccgctgcccacacattgcctatacaggaaacatctgtgtctattgccccggcggccctgattccgacttcgagtattctacccaatcctataccggatatgaacctacgtcgatgcgagcaatccgcgcacgttatgatccgtttgagcaggcaaggggacgagtggaacagatcagatccttgggccatagcgtcgacaaggtcgagtacatcattatgggagggacattcatgtctctgcctgcagagtatcgggatacctttgtcgctcagcttcacaatgcgctcagcggttatcagactgataatgtggacgaagcagttcaggctggagaaatgagtaatataaagtgtgtgggaataactattgagactcgtcccgattactgtttggacacgcatttgagtagcatgcttcgctacggatgcacgagacttgaaatcggtgttcagagcttgtacgaggatgttgcacgagacacaaaccgcggccacacggttgctgcagttgcggaaacatttaagcttgcgaaggatgcgggctttaaggtggttagccacatgatgccagacttgccaaatgtcggcatggaacgtgacttgtttcagttcgaagagtattttgagaacccggcttttcgaaccgacgggctgaagatataccccacacttgtcattcgcggaaccggtctgtacgaactttggaggacaggccgctacaagaactacacccctaatgcgcttatcgaccttgttgctcgtatcctcgcactcgtccccccctggacccgtatctatcgtgttcagcgagacattccgatgccgctggttacttcaggtgtcgagaatggaaacctgcgagagctggctttagcgcgcatgaaagattttggtacaacttgtcgagatgtccgtacgcgcgaggtcggtatcaatgaagtcaagaacaagattcgcccgtctcaggtggagctgattcgccgcgattatacggcaaatggtggatgggagacgttccttgcgtatgaagaccctaagcaagacattttgatcggtcttctacgtctgcgcaagtgcagccccacgcacacattccgtcccgagttcaccggtcaacaaaccagtatcattcgtgaattgcacgtgtacggttccgcggttcctctccacggacgtgacccgcgcaagtttcaacatcgtggttttggaactttgttgatggaggaggccgacgaattgcgcgagaagagcacggcagtaccaagatcagtgtcatctcgggagtcggcgttcgcagctactatgctcg

SEQ ID NO: 17772 - DNA, 1448 bp, Emericella nidulans
gctattgaaaggcatgtctgagtttgaaatctcccattgacatatgtgctaactaccccaaagcgcagcctcaagctgcgcttagtgcggcaacctccgacgagggttcgccgccacaaactccagatatttctagactatcatcgccttcttcgagccacatactaacaggcaaagccggtcctggcggccgcatttctcgccgggcacgtaaagccgcgaatgcaagcgcgactgcctcatctggtgacgagcaggttcgaaaaggaaagacaccaaaaagtgggaagaagctacgggtatgggacgccgatggactcgcagatgaggacgatggaagagtccttgactactccgcgcctgctgaggcagatgatgctgtcgcaccgacagtggaagccgtggcgcaagagtcttggggtcgccgaactggcaaaggccagttcgtcctgaaagacttgggcgatgaagtccattctatccttgagaatgccgacaacaagaaggccacctctagcgcgccgtcagggcttgtcggttccggattcagcgccatcggtggtctgctgcgtaatatcgttggcggcaaaatactgactgaggctgatttggagaaaccattgaaggcgatggaagaccatcttttgaagaagaatgtggcgcgggaagcggctgtccggctgtgcgagggagtcaagcaggaattggttggaaagaagacgggcaactttcagagtgtggatgctgcactaaagtcggcgatggaatcttccctgcgcaaaatccttacgcccacctcgtcccttgacctccttcatgagattgacaccgttaccaaagcgaacaagcagggcacgtcacgtccgtacgtgatatcaattgtgggtgtcaacggcgttggcaaatcaacaaacctgggcaaaatctgttacttcttgttacagaataactaccgcattctgattgctgcatgcgatactttccgatcaggagccgttgagcagcttcgcgttcatgctcgaaatttgaaagagctcagtgctcgtgagaatgttggcgcagtggagctttacgagaagggctacggcaaggacgctgcaaatgtggccaagacgcggtggaatatggtgcagctaacctttcgaacgttgtcttgattgacaccgctggccgtcgtcacaatgatcagcgcctcatgtactcgttggagaaattcgccaagttcgctcagccgaacaagattttcatggttggagaagccctcgttggtaccgacagtgtgatgcaggcacgcaacttcaatcaggcctttggaacgggtagaaacctcgacggattcattatcagcaagtgcgatacagttggcgacatggttggaactcttgttagcatggtgcatgcgacgggcattccaattgttttcctaggcgttggtcagcattatggtg

SEQ ID NO: 17773 - DNA, 1481 bp, Emericella nidulans
cccctgcaattgaccataatgctaacagccttgactagaatcatcgtcaagaagccactcgaattcactccacttgggactcgcgtgctatcccctgcccattttgcatcaccctaccgacaagctcgcaacctcctccatgtttctgccgttccggactcgcttccctgccggaagaaggaattcgacacagtatatagccacctcagtgctgccattatggaggggacaggcacctgcatctatatttctggcacaccaggtactggaaaaacagccactgtccgcgaagtcgtcgcgcagttgaatgccgccgtacttgcagaagagatggacgacttcatattcgtggagataaacggcatgaaagtcaccgaccctcatcagtcctactccctgctttgggaggcgttgaagggtgatcgagtgtcaccttcccatgccctcgatctgctagatcgggagttctccaacccttcgcctcgaagagtatcatgtgttgttcttatggacgagttggaccaactagtcaccaagaaccaatcagtcatgtacaacttcttcaactggccagccctcagacattcgcgtctcatcgtgctcgccgtcgcaaacaccatggaccttccagagcgaaccctaagtaacaaaatttctagccgtctgggtctaacccgcattacttttccaggctataagcatacggatctaatggagatcatcactactcgattagccagcgtgcctggcaagatcgttgattccgacgcgatccaattcgctagccgcaaagtggcggcagtgagtggtgacgctcgacgcgccctagacatctgccgacgcgcggtcgagattgcggaacaaagcaacgaagccgccggagtagaagccctggatgcggacgacaccgagtccctccctccgacacccagcaagactgctgcgcggaaagaaagagcaaacgcaaaacaaaccctttctatatcgccgcaaaaatccaccgcgactccaaggaaacaaacacccggtcgcgtcaccatcgcaacaataaagcaagccatccaggaagctacctccacccccctgcagcaatccctccgctgtctcccgctctccgcgaaactcttcctagccgccctccttgcacgcgtccgccgaacaggaataacagaatccaccttcggtgacgtcaccgatgaagcgaaacgcattgccgacgctgcggtagcagttgctggagctgctggtgcaggaattaaagaattcttgcttgctggtggcaccgggacccgtgttcaggcgttgggatttgcggcaatggagctcatgaattcaggggttcttgctttagaggccacttccggttctagaggcttagggggcgcggcaattccgacgaggggcgatcgtagtggaaaggtgaggctcagggttgcggcggaagatgttcgcgctgcgtttcgagatgatgttgaggcaaa

SEQ ID NO: 17774 - DNA, 1549 bp, Emericella nidulans
ttctgaccatagtgcaggtccggaacgctgtattacaagcagaacctgcagcggtcatgctgtcctcattataccatgaggtacgtgtctggttgcgcagccagcttgatccggcatcgctaattagtccaggctcgaggcttcggcctacaaaccaagacgagatcaacgaaaggcgatcaatcgttggaacaagttcgttcttgggcccgagtatatccgtagagctgcgtatctctgcccaaaaacaagggagtaagcattctaaccggttgtcgcgacttggattctgagttcacaaatttgccagggaaaagaaacaccggaaatgcaactttgatctacacgatgctgtccatgcggttgagtatagcaatgtcaagcggccgactgacccaaagacgaagagatcactggagccggcgcatcgattcgaggtaaacttagagggcgacacagtctcccaagcgaagtatgtaaggcgcaccatgaccctcaactatatacttacatcttttaggtttgatcttttccgcaaataccaaacgaaggtccataaggaagacgtttccaaatggcaaacgaaagacttcaagcgcttcctctgttcgggactaaagcggagtgagcctaatgggcgagatgtacagcgcagaataggctcctggcaccagtgctaccgcctcgatgggaagctcatagctgtcgccgtgttggatctgatgcccaatggcgtcacgtctgtttacatcttgtaagcgtcacagcattggagacgaataagaaaacgtaactaacagccgaagctacgaccctgattacgagcagtgggaaattggaaaactgagtgcgatgagagagatagccttcgcagtcgaacaaggctaccaatattactacatgggttagtatccaacccatcagttccagaacccgctcgctaacacaatcctaccaggctactacattcactcctgccagaagatgcgctacaagggcaatttccggccccaatacattctaggtgcgcctccaacgaaaatcactcaaggccagccaaaagttaacgatagcagaccccgaatcctacacctgggatcctttagacggcgaactaaccgcaaagctcaacacacgaccctacgtttccctctcgcgagatcgcgccacgaccgcaacctccggtacggaagcaaacgcggctgataatgctgaagccgaagcagaaatcaacgatgaggaagtctcccttttcgcgctgcacatgccgggtgtcttaacagtggacgaagtcaagaagttggacctggggagctggccgttactcattcatgggtcatttgtgcatatgagcgtgagtattggcgcctttccaccccttctcatctcgttataacaacgtcatggtgtctggtaattcctgtgtatgtatgtgtgtgggctgacaatggacgaataggacttggtcggatgggagaaaatgccaatagacgagccgcagtcaatcaaaggaattgtagcggagctggcagcaacactgggacctaca

SEQ ID NO: 17775 - DNA, 1763 bp, Emericella nidulans
aaaaatatctccgaggactggcccggggatgaagttatccagaaactggtcgagatgtccgctccactgttcatctctgctgccaccttatgccgttatattgaaagttcaaaaatggaacccaaattgcgcctcgcagagctcctaaaggaccaagccaaatatgcatcaagaatggacaagacatacctgccaattctgacacgattactcgatgatcaagagagtgatgagtttgagcagcagcagcttctgcaagagttccaggccatagtcggcgttattattctccttgctaatccactgtctataaacacgctatcactgtttcttgggataggagcagaccagatcagcaatcgattagatatattccgatcggtgttaagcattcccagcagccgagatcagcctgtcaggattctacattcatcatttcgggatttttggtccagtccagaaccaaattccttgtggatgcgccaaaaaagcataaagacattgctaagtgctgtcttaaaactatgcagagtcacctacagaaagatatctgcagtctagaaagccctggaacgcgtagggcagacatcaaccctcaggatattcgccagtacctaccaccagaattgcgatattcttgtcgctactggatacaccatctcaaagagagtcaggtttcatcttctgagatagaggatgtgcgactattcctccagaagcattttctgcactgggtggaagcaatgtgcttgctaggtcttatatcagaggtggtgggtatgcttgatctcctccatacagatattctagtaagtaatatagtagacacctaattttgacttatgctaatagaagcagggcaataatgattctttattagctgattttctccatgatgcaaagcgctttgtgctgaagaattgccaagttgctgatgaagcaccacttcagatttattgtgcaggattggtgtttgcaccccaaacagcattaattcgttcaaatttcagtgaagaccttccaagttggatatgccagttgccaaaagttaatgagaagtggggtgcagaattacagacgctcgaaggccattcaaactcggtttgggcagtactggcgtccggctcggatgacgagacagtgcggctctgggacccggcgacgggcagcctgcagcagacgctcgaaggccattcaggctgggttttgtcagtggccttctcgcccgacggccggctactggcgtctggctcgtttgataagacagtgcggctctgggacccggcgacgggcagcctgcagcagacgctccgaggccattcaaactgggttcggtcagtggccttctcgcccgacggccggctactggcgtccggctcgtttgataagacagtgcggctctgggacccggcgacgggcagcctgcagcagacgctccgaggccattcagatacggttcggtcagtggccttctcgcccgacggccggctactggcgtccggatcgtttgacaagacagtgcggctctgggacccggcgacgggcactctgcagcagaccttgattatcaagggaacagtcactgaactccaattctcccaagatggttcatatatcagcactaacctgggatcgctcaatattcaatccaggtgtggtaataatctttccagttccccaaaaatgcattctgatatacttattaatggcccggactggatatctgtaaatggtagggaagtattatggcttcctcctgaggc

SEQ ID NO: 17776 - DNA, 1935 bp, Emericella nidulans
ttgacaacaagagccgacagcctgccgcactgtactccgtaccctatattttggagtaactctagtctagtcgccgtgctacgacgcctcagggtatgatggtatcccgtagatatgtcgataagggagcggcggtttctcccgaaggtttcaacgttggtgctgccggtgttggagtcgagctcaaccttcaccttccagagaaatggttttgttctaatatgcgggcgagcagtacatgctctcaagtctaggactcgctctttgtgctgagtgcaagatgccttctatctcaagctccccgccgcgggccgacgtcatcgcccggtccagtttcctcgcactcaggtcagcaccgggtccttggaagaaacacaaacgtcagaacaacgcggtcaagacattttttttaaccgcaaataaacaccaaacaggcccctgagtctacgacaacatcatggaccaacggccttcaatagatactgtaccgttgcccctctcgtgatagcctcaaccacgcacgctgacgctcgtcaagggtcatgatcacaagcaggagaacgatcctcccaagcaattcgaggtatgattaccagtcttatctcgaggaattaactaactcctgcctggttaataggttctattcccccgccgaacgtgcagccaccgccgcaaagcctcccttgttatggccgatgagcctcgaatcgaccacacggacgaggcaacagcatgcttcgtccactccctgatcgctggcgagggcccaatgccggccaaaattgcgaatttccgaatttccaaggacaggtcgaagctcgaggcggatatcgtcggtaaatcggctgccggagctcacgatgtcgccatcgaagaggaagacgaggatgaggatgacgagaaccagaagccggatgcgcatggacgcgccaagtcgccgtcgccagacgaggtccagtcgcgacatctgacgaaaaagcagctttctgatatggcgtggaatgtgcgcaacctgtctaagaaactcgatagcatccggctcaagctcaacgtcaagtcgatattcctggttaccaaggcgggcgatgaatcggtagtcgatgctacgcgccaggtcgcgcgctggctactctctaaagaccgcggaacgcagtacgtcgtctacattgagaacaacgtgcgcattgacccagagttcgactacgagagcctagtgaaggaggactcgtccgtgggagagcggctcaagttctgggatgcaaagctagcctcagagcaagcgcatctatttgatctcgtcatcgctctcggaggcgacgggacggtcctctatacgagctggttgttccagcatatagtgccgcctgttctgtccttctcgctaggctcattaggctttctaacgaagttcgatttcaatgattatcagaatattctctcatctgcgatccaggacggtgtactcgttagtctacgcttgcgcttcgagtgcacaatcatgcggagtaatccgcacgacaaggaaacgccggctacgaagaaacaccgtgacctggtcgatgaattgataggcgatgagacggaggggacgttaacacatcggcctgacggcgtcgtgcatatcctaaatgatatcgtcgttgatagagggccgaatccaagtatgcctacaatactcttcaaaataagtagaaatctgtgctaatgtatgccagccatgtcctcgatcgaactcttcggcggcgacgagcacttcacaactctgcaagccgacggtgtctgcatctccactccaaccggctcaacagcctacaacatggccgctggcggctccctcacacaccccgacaacccggtaatcctaatcacggcaatctgcgcacatacgctgtccttcagaccgattattctgcccgatacggttgtgctgcgagt

SEQ ID NO: 17777 - DNA, 1943 bp, Emericella nidulans
tactggcgataaggcactcctggctgatacgatctacccgtatctcgtcgacgttgcaaagttctaccagtgctataccttcgagcacgaagggtacaaagtgaccgggccctccctctccccggagaataccttcatcattccagagaactggaccgttgccgggaacaaagcagcgatggatgttgctattcccatggacgaccagattatttgggaagtcctgcacaacctgctcgacgcggcgtcagaactcggaatcgccgacgacgaccatacagtttcagccgcaaagtccttcctccacaagatccatccaccacgtatcggattccagggccaaatccaggaatggcgtcttgactatgaatcgtccgcccctggccaccgtcatctctcccccctcttcggtctgcaccctggaggccaattctcgccactagtaaatagcactctcagcgctgcggcagaagtcctccttgaagatcgccttagccacggctctggaagcacggggtggagtaatgcatggtttatcaaccaatatgcacggctatacaggggagacgatgcctgggcgcagatcgaaaagtggtttagcctctatccgacgaatactctctggaatacggatgatggggcaaccttccagattgatggaaatttcggggttgtaagtgggatcaccgagatgcttctccagagtcacgcgggtgttgtgcatctcttgccggcattgcctgcggttgctgtgccgaggggatcggcgagggggttgatggcgagaggaggctttacggttgacatagattgggaagacgggaggttgcggacggcagttataaggtcacttgctgggggcgcactgagggtccgagtacatgacggggtggaattctttgtcgatggggagaaatacgaaaagggcctggagacggaagagggaggagagtatgttgtcacgttgggtagatagataatcaaaccaggatacctggcactcagagaatggcatggttcattgagagtcaggtcgggtcctgcctctatcaagatccccttctgaagctttgtcggtatgtcagttcattgatagcttcagcgactggcttcgtcatgtcagagtactacctgcgctgggatatcaactcaggttgacttcatatatcagggatcacatcctttcgctgtaaatgaagagtcaatatgcggcaccatgctaaacaggcgtatcaaagtgcgtctagataactggcccaggggtaggcaagggtcggacgtagttaggaaactacgggcagcaggaataagggacgtgctctcttccgccctggctggccctgttccctgcctcctaatatatatgtgagggaagtggttaagatcgatcatacacaacactgaccaccaggagcccattgagatccgcaatgttaggggtactggaggagtttgtgttagggatacatggctctatttgtgcaggaatcctataaaagctctcgtcagcttcgtaggttgcaaaaggacagggaaacaggcttgtacgggacacaatagtgtcctagctacaggttaatcctttcgcctcttaacctcgttcgttctaagcatactcgtctcttgtcaaagttcatgatcatgttattgtcattactatcagttgttccgcgctaccgtaggtacgccaaacccaggtaacgcaatgctatatgtcagccgttcgtaccgccaagtctagtttcgagacattgttgcaatgacatgcatctagccgatcgacaacctagcgagatcactctcaacggccaaattctcatcggtcgtcaagacataaccagggaatcagagtatcggcagaatcttgtattttgtcggagctttcgcgccccaaccgcgttccagcgcgctttagtctccagtattcgttgtatcaacccccg

SEQ ID NO: 17778 - DNA, 2048 bp, Emericella nidulans
accctgggttgtcaatgctagtattgattttataggtcgtcttccagcggacctcgactcttgatcgaaatcaaggagctcgaaactggtgatgtactcgcgagccaaatttccgactctgttaccctgattgggacctcgataacaggagtgacgacgctcaaagacgcatctcctaagctatggtggccatcaagtcttggagctcagaacctctacaacgttacaataaccgttttcaataaaacggaagaggtagcacgcatcaccaagcgaactgggtttcggactatctttctcaatcagcgcaatatcacagccacccagttatcccagggcattgcgccaggcgcgaattggcactttgaggtcaatgggaaagagttttacgcgaagggctctaatttcattccgcctgacacattctggcctcgagttaccaagcagaagatgactcggttactcgatgccgtggtcgccggcaatcagaacatgctgcggatttggtcatcaggcgcgtacctcccagattttatttatgacttggccgatgagcggggaatcttgctatggagtgagttccaatttagtgactccatgtaccctgtggatgaagatttcctggacaacgttgctcaggaggtagtctataacgtgcggagagtgaatcaccatccgtcacttgctttatgggccgggggaaacgaaatcgagagtctgatgctcccactaactcgggaggccgatccggataactatccgaagtatctcgccgagtatgaaaagctatacatcagtctcatcctaccgctcgtgtatgagaatacccgctcaatatcatactcccctagcagcacaacggaagggtacctaagtgtcaatctttccgcccctgtccccatgactgaacggtacgagaacgatgaaccgggtgcatactacggtgacacagactattacaactacgacacgaccgtctcatttgactactcgatctacccggtaggacgcttcgccaacgaattcggctttcatagcatgcctagtctccagacatggcagcaagttgccgacccagaagacttatacttcaacagtaccacagtcgtcattcacaaccgacattatacatccgaagggtatggccgaatcgaaaactcgtctcgtggcatggcggagatgacgctgggtgtggaacgctactaccctatccctgacaatccagactcggtggcaaacttcagtgcctggtgtctcgcaacgcaacttttccaggccgatttctacaagtcccaaatacagttctaccgaagggggagcgggatgcctgagcggcagttggggtcgctctattggcagctggaggatatctggcagggaccgacgtgggctgggattgagtacgacggtcgatggaaggttctgcattatgttgcgcgagatgtctatcagcctattattgtttctccgttctggaactacactacgggtgatctggagatatacgttaccgcggatctatgggaaagtgcggctggcactgtgaatctaaaatggttaaatctctctggggagcagattatcgacaatgccggcacacccacagaaattccatttactgttggagcgataaacacaacaaaggtctacagcacaaatatccatgacctgaacctaccagacacaagggcctccatcctcactctttcactctccagccaagcaaatctcccaaatgctgcagtcaaaacctcgctgacacacgaaaatcacttcacgccatcgttcccaaaagacctggaactggtcaatcccggtctcgagctctcatacgacgcgcattccggaatcttcacagttgaagccaaatccggtgtgtcactttatacctggctcgactatccggctgggctggtgggttacttcacggagaacgcattcctactagtccctgggcagaagaagaaggttcagtttgtggttcaggatgggcctaaggatcaggactgggagtggcagtcggaagttacagttcggagtctctggga

SEQ ID NO: 17779 - DNA, 2076 bp, Emericella nidulans
gcaggcattatggacgaacttccgactcttgtgaacgagggatatgcgattattgcgactcccataagcagaaacagtggcaaggatatgcatccttgactgcagccgcctttgcaaagctgttgctatcaatggttcctgtttaccctgcagctgtcaacttcgttaagggcaccagagagcggcactggatggtcccgttagcaaggaatccaagatttgttagtcgccaggaagaaataatggagctgggaaaaatgattgcaatgcaggacgggccgaggaggattgcattaactggcttaggaggtgttgggaagacccaggcggccctagagctcgcataccgcatacgggataaggataaagagctttcggtcttctggctcccatgcactagtcatgcaatggttgagcagtcatttctaaagatgagacaaatggttgggctcagtaacgtgaagccagcagaaatcaaagaacagataaagtcatatttcagctctgagcacggaggcaaatggcttttgatcttcgacaatgcagatgatacagagatgtggctagggcccaatgacacagctccaggttttgagcaattccttcctcagagtgaaaatggccacattctattcactacccgcaatagggaacttgcggtagatctcaccttctctaataatatttccattccagacgaggatcaggaaactgcgcagagtatcccagagagcctactgttgcggaaacatttagttgaggaccatggcatgatggtggctctcttggaaaagcttgcatatcttccattagcgatcgcgcaggcatcagcgtgcatcaataaaaagtgcataagtctgcctgcatattttaagatcttacaagaggaagaacaagttgctgtggagctcctcagcgaggactttagggacccaggacgctataaggatatcgagagttccgtgatcaccacctggtggatatccttcaaacagatccaacaccaagcaccattagcagcagactatctatccttcatggcctgcattagcccacggaatattccgcagtctcttcttccgtcgtaaacatcagaaaagaagagaatggatgcgctagggctcctgaacgcgtagtcctttacaaacagcaaagacacagacataaatatgcacaggctggtgcattttgcaactaggaactggctgagaaagaattgactttttactcactggatccaaagagtggctaatcaactggcgaaagtgtttccaaataattattatacaaatcgaggactttggcaagagtaccttcctcatgctttagcgcttgtacaggagaaggagtttagcaaacaacaagagcagcatactgatcttgtcagaaatattgcaggttgcctacttaaggacgggagatataaggaagccgaagctctatatagagggctgctggatctgaaccaggagaggaatggacctcggcatccctctactctgaccggcttggacgacatggcatcaacataccacaatcagggacgctggaatgaagctgagaagctgcaagtacaagttatggagacaaggaagacagtgcttggagctgagcatccggacactctgaccagcatggccaatctggcatcatcctactggaaccagtgacgctggactgaagccgagaagctagaggtacaagttatggagaaattcaaggaagtgctaggagctgagcatcctaatactcttaccagcatggccaatctagcatcaacctactgggaccagggacgctgggctgaagctgagaatctggatgtacaagcaatagggataaggaaaagagtgctgggaactgagcatcctgatactttgactagcttggacaacctggcatcaacctattgcaataagggacactgggctgaagctaagaagctgcacatacaagttttggagatacgaaagagaatgctaggagctgagcaatctgatactctgaccagaatgaacaatctggcattaacctattgcaagcagggaagcttgactgaagctgagaaactgcacg

SEQ ID NO: 17780 - DNA, 2076 bp, Emericella nidulans; identical to SEQ ID NO: 17779

SEQ ID NO: 17781 - DNA, 2091 bp, Emericella nidulans
accccgacaatgtctcgttagattcatccgacgatgcctctacgcctgctgccactactgctcaaccagagtctacatcatcgacgactgatacaaaagatgaacccacagaaattgaccagcaggacagcgcagtatcatcgtgccctccccctgccgaccatcgaatgtcctaccagtcataccaccccgatgtccagcagcagcccgcctcacattatgcttccccgatcccgtcccagccacaacattccgcccccacgagctcatcccgccccgtatcgacattatactcaaatgggggcgcgccagtatcagccattcgagaaggcccatatcgtattcgtacagactctgccgcgtcttctgcttccgaaagtctggcacgagccgaatctcgtggagggtctgcggcctaccaggctggagtgcccatccgcgacaatacccatagcgaccgctcgtatcacacggcccaaatgccccccaacggtgcagcggtgatgcgtcaaccatctcgagcacgcgctgcagccgcgcaacaactgtcggggtcgccctatgggacggaaaatggtccgatgtcaagcagcgatgagtggcaggagcgtggtgccgctgtcacagtaagacaggagattgatgctaatgggaagccggtcgcgcggtacattaagaaaggggttcgggatttctccttcggtcagaccctcggtgagggctcatatagcacggtcgtactggggacagaccgtcaaaccctcaaggaatacgcaatcaagatcctggacaaacgccacatcataaaggagaaaaaggtcaagtatgttaacatcgaaaaagacactctcaaccgcctcaccgatcacccaggtgtcgtccgattatattatacatttcaagatgagcgctcgctatatttcgtccttgacctctgcaaaggcggcgaattgctaggcgtcttgaagcgaatgaccaccttcgatgaagagtgtacgagattttatggcgcccaaatattagatgcgattgactacatgcacaagcgcggcgtcattcaccgagatctgaaaccggaaaacgttctgcttgacagtcaaatgcatatcaaagtcactgactttggtacggcgaagatactcaagggtaatcaagcctctcagaattcgagcggcatcccgtcgctagactctgatatgcctgaggaggagcgtgccagttcatttgttgggacggctgaatatgtcagtcctgaattattaacagacaagaacgcgtgcaaagcaagtgatttgtgggcattcggttgtattatttaccaacttctcgcaggccggccacctttcaaagccgccaatgagtacctgacattccagaagattgttgcgctagagtacgaatttcctttgggcttccccagcgtcgcccgcgatcttgtcgagcgcctcctcgtcctcgacccaacacgtcgtctccctatcgaacatatcaagaaccatgaattcttcgagggtatgacttggggacccgacttgtggaaacaaaaagcgccccgcctgaaagcttataccccgccaccccgcgaacccattaaacttaatgggggctcagatggagacagctttccccccagcattaacacagcaccatcaaatgcgagctcccgagtaatgcccaggctgattaccgaattgccggctcctagccaattggacattgagtggtctcctgtgctgacaaaaaacaacgaaaggattctgaagttagggaacctggttgtcgtgtcatctgcagcctctcacagtcccgtctccaaaaatggggagtacgaagcgccaaagaagttttcacgattcttcggcggtagcactacgaagaagcggcaacgcctggtaatgattacctcctccggtcgaattatcatggctgctgccggcggcgacgagaaaaaagcaaaaatggaactgtctctgcttgctccgggaacacattatcgcacatctacagacctaaaggtgtatcgtgctggatagtggatacggattggaattccttccctttacccagaaattcagatatcatcctgaccaa

SEQ ID NO: 17782 - DNA, 2099 bp, Emericella nidulans
cgtattgacgagtaataggaggccgatcggacaccgctcggctgctttagcgcagaatttcaagatgcgttgcatcctctgtaagatcatggcatggacgccaagctgccgcccacgaggcgcgctaagccacaagcagatgggggcctcccatttgttcctggcgagtgccccagtcatgccaaacggcgccagtcccccgcttatccccattgcggcaagcccccagcccatcattctgctcctagtggtgctcgcccaggacggagaagtgaatctctggtcagcgcagtcctcgtcctatcccagcccatcctcagagcgggacaataatttcatgcccagaagatgtaacctatagcaccgtctcttttaaatcaaccctccctcgctcttctctttttttttttggccctttttttttcttgcttttcacgcctctcaagactgtcacgatgaatccaaaaccagacctcgaaaagagtaacactaacgatggctcagaagtacgggctgagcccatcctcgcaacgggctctggcctgcagcgtcgactgggaaaccgccagatccaattaatcgccattggaggctcaatcggtacggcgaccttcgtctctatcggcggcggcctggccaagggcggttcaggatctcttctgatctcttggttcatccactgctgttttctggcgatggtcaataactgcctgacggagatgtccgtataccagccggtcgagggagggtttatccgcttggccggtaaatgggtcgatgatgcctggggtttcatggctggctggaacttcttcttgtacgaggcgctgctgatcccgttcgagattacggccatcaatgtggtcttgacctactggagggacgatattcccgtgtggagtatttgtttagcatgtgttataatctatgggtacgtttgcacggtccctgcggtagtccctcacgaaagactgaccggctaggcttttgaatatcctcgccgtccgggcatacggagaagccgagttctggctctccggcggaaaagtgatcctcatcctcatgctcttcgcgtttacgttcgtcaccatggtcggcgggaacccgcagcacgacgtatacgggtttaggaactggaacaagcccggcgcattcgccgaatacctcagccacggtaaccttggtcgttttgagggtttcctcgcctgcctctggtctgccgggtttgcctgcgtcggacccgagtatatctccatggtggcagcggaggccaaacaccctcgcagatacattagagcggccttccagaccgtgtatttccgattcattgtgttcttcataggctcggccctttgctgcggtattgtcgtctcctatgcggatcccaccctacgcgccatccatttcggtgacggtgaaggctccggcaccgccgccgcctcgccctatgtaatagccatgaaaaacatgtctatcgaaggcctaccgcatgtcgtcaacgccctcctgatcacctccattttcagcgccggaaacacctacacctatacagcgacccgtatcctgcattccctagccctagaaggccgagccccacgcatcctccgcaagtgtaccaagcagggcgtccctatctactgcttccttgttgtaatgatcttcccgtttttgtccttcctccaaatgggcgacagttcctccacggtcctcacctggctcacaaacatcatcacggctgccggtcttatcaactacgtcatcatcacccttacgtacatcttcttctaccgtgcgactgttgcccaaggattcgaccgctccacgctcccttacactggttggttccagccgtactgcggctacctcggctttgcgtggatgtttaccgtggtctgctgtttcggctacgagagtttcaccccctggagtgtagagaccttcttcaccaactacacgatggtccttcttgcgccggtcctgtttctgggctggaaattggtgaaacggaccagatttgtcacaccgcttgagacagatctgatctgggaggcgcctgagattgatctgtacgaggaggagctcagtgtggttgagccatc

SEQ ID NO: 17783 - DNA, 2225 bp, Emericella nidulans
ggtcaagtcttgtataatgcaactttttacagaaaaatacttggggaagatggtagttgccaccctctgaccagctgaagagcaaccatgggagctgtatgaaaaaagtgatatatagaaggaggcacttaaacaggatgaaagatatagtaaagcagtactgtgcctgaaagatggagcaaggagatttcttctatacctataattgaaagtcagaatctcagaatgccagctggacgcccaagaccatatcctcttctataggaggaggtgggtgcctgatagtaaacagctctatataagtataattcaggctgtacatgactctatattaacaggacatcctggctaagagcaaatatatttgctggttagctgtaaatacttctggcctaatatgtcccaggatatcagaagattcatctggaactgtgatatatgtgggaggaccaagtcttggagagaccagagaagggggctattaaagcccctccctgtgcctgatcgtccctggcaggaggttttaatggattttattatagacctaccagagagcaaaggttgtacaaatatcatagttatcacagactgattaaccaaaggtgtgatactagaaggaatatcagaaactgactctgagagtgtggcctgggcacttgtacaagtacttataagcaaatacaggatcctaaaggctatcacctcggacaggggaagccagtttacaagtaatacatgggcctgcatatataccctgacagggatcaaccgccggctatctacagcctatcatcctcagactaatagatcaacagagagaatgaacagcatagtggaaacctacctctgcatgtatacctgctatgaccagaaggactagaacaggctacttctacttgcagagctggcaattaatagctgtacatcaacagcaacaggggtcagccccttctatctaagctatgggtacaacctcagcctatttacccctaccgaggaggtagagcatctagctgaagaaccaaccaagagtcctatccagaaaggggaagccattgtacagaaagttaaggaagccctagactgggctcaagcctccatggcctattcccaacagaatacagagaatcaggctaataaacacaggagcccggccacaaactaccaagtaggagataaggtctggctaagtctgaagaacatccgtacggaccaacccagtaagaaacttgactggaagaacaccaagtataaggttataggcctggtgggcagtcatgctgtacagctgaatacgcccccagggatccatccagtcttccatgtggacctgcttcggctggcttcatcagatccacttccttcccagaagaatgatgatagccagccccctagcatcatggtgaacggtgaggaagaatacatggtagagaaaatcctggacgaacatcgcaggagatacgggagaggtcaccggctggaatacctagtgaaatagtcaggctatgctcagccaacctgggaagctgccacagctttggaggaagtacaagctctggatgagtggctggatcatacaaaacaatatagacttcaggacggctcactaaacagagatgcatatataaaggctaaagcaacatgacctaccctgtgacctgtacttcctacatagagggaggggggggtactgttatgggtcctttgcctatacaaggaccttagaccttagtgactcggccaaggcctgcgctgtcctgaaggcggtgagccacctacaagacttccttgcaacaacaatccttctttctcatttcttctttagcgattccttcttgtacgtacggcacgtctagataggaagatccatctaaatacgtcccttaacacccaggtccatctacatctgcatctaccttatcaatacattacttattaccatctcactttgtaactccatagcgacatcaatatgcctacagccctcaaagccaccagcgtcggctggctgctgatctccgtcggacacgtggtatgcccatccccggccaccctaactatccttcgaccttacagtatcctacacgtacaaatcctatgacaagctttctctaatgcagcgacagctcggcgccaaagaatggcaatcttctccgcaattcctgcgccttgtccgtaacgccgacacctgtgcccgggtcggctggtaccaggggagcgccttt

SEQ ID NO: 17784 - DNA, 2300 bp, Emericella nidulans
gaacaacatggcaccacaagatcttagagtcgccattctaggcgctggtaggtccacttccctttatctccattcgtcctatcccatcgacaagctaaggactaacaaagataggaatgggcggcctcacgtcggccctcgctctcgcggaaaaggggttcaagcacatcgacatctacgagacagcttcagatctgggctttgtaggcgccggcatccagctcgcaccgaatatggctcgggtgctggacaagctcggtgtctggaaggcaatcgaggccgaagcagtaaacatcgaggaaacgagtgtgagaggtgcgtcgtctgcttctatatttactgcgattttatgaagagatgcggcttggtgtgagggctaactgaagcgacagtcggcgcatcaaactccgaactcgcccatgtcgatctgcactatattgagccgacgtatggctacaaacatatggttggacaccggtactccctcgcaaacggcctgtaccagggctgccttaagcacagcgacaagatcactttccactttggcacgtccgtgactgaggtgcactcttttgggcgcggaacgcagccaaagccctcattcaccgtaacgccacgggactcttcgaaacagccctataccgtgcacgcagacattcttctcggcgcggatggaatcaaatccgtgacgcgcgtcgcgatgctcaacgacctcgccatctcacccgtccccgcggtaaaagacacaaaccaggccgcgtaccggatcatgattcacaaggatcagattgagtctgaccccaacgcagatccagagctgaaagcgttgctggccagcaataaggttgtgcggtggattggcgagaagagacatatcattgcttacccggtctctaacaacacaatttacaatctgagcaccacgcagccggatacaaatttcgcggctgccacgaatgccacctacacgacgaagggttcgaagagtgcgatgttgggcgtgttcgcggatttctgtccgcttgttcagcgcatgctgaattatgttcctgagggggaggtttgtgagtggaagctgcgcacacatgaacctttgccgacctgggtggacgggtgtacggcgctggtgggtgatgcttgtcatccgacgctgccgcatctggcgcaggcgcgggcccaagcgattgaggatggggctgtgctggctgttgtgctgagcaagctaccgagtacagatacagagagcatcaacaaggcattaaaggtgtatgagatggtgcgcaaggaccgggcatacgcgcttgttgagttggccgctgcgagtgggcgggcgctgcatctgggcgagggagcggcgaaggaggagcgtgacaagcagtttgcggcacttaaggcgggcaaaggccctgtgccggataagtgggcagacgcggatgtgcagagggagatttatgggtttgattgcatcaaagaggcggagcaaatgttcgaggagtactttggggctgcggctgcgactgcgactgcgtaggtcttcttaactttagcaagaaaggacgtataggctgaccgaaataggtctggccgtatgagtaagttggcatgatatcatacgaatacgattgtatatagagaagcatagaacgaataattcaatgacaggaccggtcactttgaagcaaaagcacaagatcccatatcaagcttaacagcgtccgcctcaggtcgaatatcaaagtcaaagatatccatcggtacccccagagtcgtacacgcattcgggatatcaaccaggcccgcaatatggccctgcaccggcgcacagcttagcaacagataaatttggtaatcgttatacccatatcttctcagatactcaataactctcaagcaagtctggcggtacgcaaccgttgcatcaagataatgctgtttgcctttctcatcaacagaaaaaccctcgaaagtaaggtaacgaccaggcccgaattgcggctcaacggggcccgggtggaagatgggtgacttcattgccattttggccatgccgtccttgatgactgtgaactttaaagtgatgacgccggccatttctatggcaccgcagaaagaaatctcgccgtccccttgggaaaagtgcaggtcgcctacagagaatttggccccggggacatggacagggaggtagacttttgagccgcgggagagattcttgatatcacagttgccaccgtgttcgggtcggccctattgctacatatgagaataaggcatgaagaaggatactgaggacttacagg

SEQ ID NO: 17785 - DNA, 2407 bp, Emericella nidulans
ggctggatgggtatgctaagccccattttgcgcagtcaaggttcttcgctgagaacagattttacctacataggcacgttcggatggatttcgttcgcagcgagtgccccattttttgcggcaacaatgcttcagcggtccatagttctcaactacgagagctacggcatggaacgatggcagtggacccttatatgatggccctcgttgtgctcaaacagcaatcaatatctggggtaaccgtctgttgtccctggtggagagcatgtctctgctaattcatgtctgtgcctttatcgctatctttacggtcctgtgggtttgttctcctgacaggcattctgccgagtttttcttcactacatttctgaatagctccggttggtcgagtgatggaatagcatggtcaattggaatgctctccagttgctatgttctaacgggtattgtcatcctgtatctctggcatgtagtacggggctgactttgactgagtagggtacgacggcgcgatacataccggcgaagagatgacatacccggcaatggaagtcccattctgcatgctaggctcggttttgctgaatggggtcatggggttcgccttcatgattgcccttttattctgcatgggagatatagacgaaggcctgagcagtcctacagggcacccattcatcgatatgttccggggcgtcaccaaatctcgagtggccagtagcgtgatgactctggtcgtgatagtgactgctctgctggctacgattgcgttgattgcgtcggctgccaggatggtatggtcgcctgcgcgagataagggtgaggttccctcatatcagacagataaatgcatttttatctgacagaattccctgcagcactcccttttcaggatcatcttgccaaagttcaccctgacacccagatgccggtcagagcgatcctagccacaagcggtctccttgctcttctggatgcagtcaacattggctcgacaacggcgctgaatgcagtaatatcactcgctgtcctaggcttacaaatgtcgtcatttcgctagccgatcagctaggcactcaaaacactaaaatcccaaatcccatcgtcggcgcttggttccgtatagagaagagcctgtatccattaccccagcgtacgagtatgactagattgctatttagttaaaggtatatatactacttgtacccataccctagatatctaatcataggttgatggtttttaggggagttcaattttcgcgacgagactggcaacacagcaacagtaaaggcaggcgacctattcttccttcctagggggacgaccattaccttttcgtccgatagttatgggcttgctgtcaagtgccggacgcaggcgctggctaaattatagaggcaacagtggatgagtcaggactcttttcgcatatacaatcgccgcaccatactagaagagtatgtcgctgtcaattcatcatttgcaagaatgatgatatatgtcacacggaatttataacagtaaaagaaatcaagtatatccaaacatagatccatcgtacccaggtctggcctgatataaacaaatgatataagctcaatgtgatcacgatccaaattaatcttttctgagcaaagcagacaacttccacctcaagctaggtagaaacgaggagatctattagctccggtatcttgacgtcttagaacccttattgattgtacatggagcggtctttccaagcggacatgcagaagccatcgatacaccgtaagttttgctagaggtgccttcttctactcttgtgctctttctagcgcgagagtcttatcggcattctgtggctcgctgtattacttggaattggatcaggccgacctggttgcggccgcctctacgcgcaacccccctgcccgcaggcggttggcgagttgtctgcctattgaacacaatatattcgagactcactcaagctgtcttctaacatttccactaagttagtctataatagaggatagaggtgtcctacgttcgttgacactgttcttgtcctgcactgtattggtaaggcaggccaatacaactgctgtagcacagggttcatgtcggccgagaaggctgtgccctacaggctgcggatatgcaatgcttttttgattcatgcatataccctgcctatatagcagcccaataggctactgtactatctgctagctctcttagcccggctaattcgggcattcggcttcgaaggcctgcagacagcctatgcatgattactctactgcatcagatgcccattcagtgtgacctacataatcagaattggaatgatgaataatgtatgatttgtaaacacgagtatacattgtcgatttgattccatacatggtgttaacgcgca

SEQ ID NO: 17786 - DNA, 2561 bp, Emericella nidulans
caaaaatcggaattacgcaaatgaagttctactatcagatcttgacgacgccgacggctgataccccaggctcggcgcttctcctgcatttcccagggaaacgttatcttttcggccaaattgcagaggggttccaacgagcatgtacggaacgagggacaaagttgacggacgtgtctgatgttttcctgtcgggtcggatgggatgggacacaactggaggcttgattggcatgattcttacgaaggccgatgctcgcgccagttcaaaggaggctctggaagccctcgagcgcgaaaaggaggcgaatcgacagaagcgagggtggaccaagaaagatacgaaacaaacgccggccaacgcagagctcgaagatccgcagcacgacttgactgtccacggttcaaagaatcttgctcataccctggctactgcgcggaggtttgtcttcagacaaggtttgcccgtgcatacgaaggagtacgacgcggaaagtgttgcaaagaggctgcgcactgatcaaagcgacccctttgaagtgccgactttctcggatgaaaacatcaaggtctggaccatgcctatcagcccgtcttctactacaccacgttcgcaaagccctaaaaagaggagtcttgacgaatttcgcgaagatgtgcggggtttagtggaggtggaccagcaatccaaggatcaattggtgcggcagtctgttgtgtctcatatgtttgactcaacttggactctggatgcattggaggaaacccgtcttgccgacgtcaaaatgccagcgcaaatctttgtacgaaatccggagaccaaggacctggacaagtacacaggcccgcttcctggaggagatgaggaggttcctgagatgaccgttcttgtccgtaaaccctggcccggcgcgtcgatcagcaagatcccaacaaccacaccatgcgttgagagtctatgttacatcatcaagaaccacgacctccgcggaaagtttgatgctaagaaggcaatcgctctgaatgtcaagcctggccctgactttggtgctctgacaaggggtgaaactgtcaaggctactgatggaacgatggtgacacctgaaatggtgttggagcctacaaagcctggcaaaggactggcagtaatggacctcccgacttcggattatgtcgagagcctgctaaaccggcccgaatggaagtccccctcagttgcaagcaatttggcagctttcttttggatcctgggtcctggtgtcggggaacaccctcggcttcgggaattcgtcgcttcaatgccgaactgcaaacacatcgtctcgagcacggattattgcccgaacgatctgaccatgcagagtgttgccgggtcggcattcgcatggcccggataaggcctgataattacctagtccctatacacgacaacaacagtgttccacaaacgcaatccagtctggaagatcgcatggccgtggatagccaaaaccattcattcgaacgagccgagcccggactcatcgttagtatggagcccgagttcaagataaactcagatgaagtaccgcgacgactgaacgcaggtagcatcctgacaaagatgccgcagtctgctgtaaggcgggctcgactagttaccaagaggctgcaacatccgctacgccaggagaagattcagcaatttgtgagcgacattcctggtgccgatgcggagatcatcacgctcggaacgggatcttctgcaccttcaaaatatcgggaatgtttccagcaccctggttcatgttccaggtcgggatattatctatttgattgtggcgagggcacgcttggtcagcttaagcgcatgttcagccctgagcagctgcgtgaagttcttcaaaacctgcggctaatctggattagccatctccatgcggaccaccaccttggtacagtctctgttataaaggcttggtaccaggaaaactatcccagcggagttgcacagctgagcgagcctgaaaaagacatagggaagatcctggaggagaagcgtttgtttgtcgtatctgatctcatgatgattgagtggttggaggaatatgctggtgttgaagattttggtttcgccaagtcacgcctctatctgcctatctatacaggactggcgacgaggggatgaaatggtcattcaaataccgccactgccgtgccgacggctcttatcgtgggcgggaagttgaacacataaaaccggaacaaagtgaactgaaatttaactgcaaaggatcaccaggagaggagctaagcgccaagcttcgcaaagccacgggtctgtccgatattctaacggcatacgtctcccattgccgtggtgcaatggcagtctcactcatcttccctgatggcttcaaagtctccttctcaggtgactgccggccatcgcctacgtttgtgactattggacaggactctaccgtccttatccacgaagccacatttagcgatgacatggtcggctccgctctcgcaaaaaaacattccaccgcccaagaagctattgaagtaggccgcaa

SEQ ID NO: 17787 - DNA, 241 bp, Emericella nidulans
cgcagccacgggcgagatactctactctaaagtacctcttagcttctggggcggggtcgagcagacgactggcgacattatcgaccaccaccacccactctttggcgaaaatatcaaggatcgcgtccttgttttaccttcaactcgtggatcatgcagtggaagtctagtgcttatagagctcctagtcaatcgagttgcgcctaccgcgcttgtgttttgggacagcgaggcgatcgta

SEQ ID NO: 17788 - DNA, 262 bp, Emericella nidulans
cccttgatcaagccgctgaggacgacgatgcggagctatcgtcctctgacgacgaaccgacaacagagccagtggcaaagaagaggaagacgaaggacaaatcaggagatgtgacgcaggttgacgcggagttggactcgggagacgaggcaatgatccgcaaggcaaaggaaaagaagttgaagcacaagcacgggaagaagggttctcacgatgaggaggatatggatgtgaattatagatgatgacgagggcggcactg

SEQ ID NO: 17789 - DNA, 290 bp, Emericella nidulans
ggtgggccttgacgggacctcccttgatgatagacagcaaggtgaggcctgcgttgtatgtatgccccagtccctgtttgcgtaccggatccagactggaagggctgaggatacccctgcgagctctgctgatgtcttttaggaggtcttctctcctgagagttgtgccgaccggttagtagcccacctggccgtcgaccacaaggacaaccatcatgcaggtagaaactaacacgatctagtggcctggttgaatgtgatggagctggatccatccgaatttgctgcgt

SEQ ID NO: 17790 - DNA, 305 bp, Emericella nidulans
gagatcatgaaattctgcaacagacacaagcttcatctgattagtgatgagatctatgcattgtgcgtatttgactctgggagcccagacgcagtcccattcacatctatattatcccttgcaacaccggagataatcaatccgaatctggtacatgtactatacggattcagtaaggtaagagcaaacaggatccctaaaacagctacgaagccctaatcagcatgtgagagcaggacttcgcctccggtggccttcatctcggcttcataatatctcgaaactttgagctccgtcgagcctgc

SEQ ID NO: 17791 - DNA, 336 bp, Emericella nidulans
ctgcctacgcgcgtcgaaccgaaagtcttcttcgctaacgaacgtaccttcctctcgtggcttaactttaccgtcatcctaggcggcctggctgttggccttctcaacttcggagaccgcgttgggcgcatctccgccggtctcttcaccgtcattgctatggcggccatgatatatgccctcgtgaccttccactggagagcgcagagcattcgaaaacgaggccacagtggcattgatgaccggtttgggccaactatcttggctatctcgttacttgcagctgttgtagtgaactttgttctacgtatgttgcaggattaggcggaatgagga

SEQ ID NO: 17792 - DNA, 352 bp, Emericella nidulans
gctctggaggaacgacgcaaggctggcgagggagtgcgcagcttattgggacccagcgaacaaacaccagatgaggccaagatgagtgaagccctaggtaaggtggctgccgagcacggaattgagtcggtgacggccgtcgccttggcctatgtcttgcagaaggttcccaacgtgttccccatcgtgggagggcgcaaggtcgaacatctctccgataacatccaggcactcaagatcaagttgacgccggaacaagtggcgtacctggaaagcgttcgcccgttggaccttgggttcccgcacgatatgataggaactgatcctaaggttagcggggtcccaagccctt

SEQ ID NO: 17793 - DNA, 357 bp, Emericella nidulans
tgaagctcacctccccctctcactctctccttgaacagcactacattgaccttaaaagaagcctttcttccccggcctcgttacctgtgagtttccacgcctcaagtaattgacgcttgtgatcgcaatcttataccagaatagacatgctcagcggccctatcgtcgccatggtctgggagggtaaggacgtcgtcaagaccggccgcaccatcctcggtgccaccaacccccttgcctacgcccccggcaccatccgtggtgacttcgctatcgacgtcggccgcaacgtctgccacggctccgacagtgtcgagagcgccaagaaggagatcggtctctggttcacccccgagg

SEQ ID NO: 17794 - DNA, 373 bp, Emericella nidulans
cagcaatcgaacaaaagtagaagtgaatgaggaggaggagcgaaaggacgtcgcgcgagcaacagaccgaggtttggagctgctgcgtgagatggaagcaaatgcctctactatatctccggatggtggtcttattccttttgctacatgaaccagattaagcagttccacgcgcttccgtcaggaggtggtgttcccaactacccgccaatggaggatcacacgacgcactcgttcatactggggagatttccgcaagaagaaggtcaggatgagggaaagggtgcgaagtcggggaagtcttccacagaattggcagaattgcagacgaaaggaggctcgcgctacctggttcagcgacttgaaagcggcg

SEQ ID NO: 17795 - DNA, 380 bp, Emericella nidulans
ggtcttcgaccggtttcccaagttgaaaattattatcgggcatatgggtgagatggtcccctacatgcttcagaggatagagcgggtgtcatcgcggtggggaaaggagagatcgttcagggaagtctgggatcagaacctgtggttgacgacgagtggcaattgggcgttggatccgctggcttgtatattgcgtaatacaaaacatgatagaatcatgtatagcgtggactatccatttgcaaagagtgccgatgggttgaagtggttggaagagctggaggagagcgggatggtgactgaagaggtgttggaggcattcgctggagaaatgcggctcaattattgaaactgaatgcccttccagtttcttaactcca

SEQ ID NO: 17796 - DNA, 382 bp, Emericella nidulans
atattatccatctaccctcactaaccgtttgcgaagtctccgccggcggcgttgccggatacctgaagacacgctcaaggccctccctgatcgctggtcttggtctgggtgtttcctatgctttctctggtaactagaacctggaatgatatctctgtgtgaaatctttgtggacttcgagctaaccaagcaaggctacctcctgaagcaaaacaaggactacggcgctgagctcgccctggccaacagcgtggttctgctgggcgctggagcatcaaggacaatcaagaccaaggcgaaggcccctgttccaatcggccttgctactgctggtctcttggcgtcgctatactatgcgaagaaggtcaaggagttccggtat

SEQ ID NO: 17797 - DNA, 382 bp, Emericella nidulans
ccccagcatccagtatggttcacaaagtcctcttctggagcggcttcggtacgtccacctctaccacgattggctccgaggattcttttcaattcgcattgtatccttacggatcgcccgggtacatttacagcttctatttcaagaatactgaccggtcaattccaggcattgccgtccgactctggcaactcggcattgagatgcgcccgctcttcgtcaaggaatccctctgggcctaccccctcttcgctggcatcggcggtagcttcggatactggatccagggcattgcacatcgcctgctccaaatcctcgctcagcataagtaagctatcctcgataagccacgacgactatatgagggcctgagcaaggtgga

SEQ ID NO: 17798 - DNA, 389 bp, Emericella nidulans
cactgcgcgaaggcggtaggaccgcactttaagcagcgtgggaaggggtcccttgttatcactgctagtatgagcgggcacattgccaactacccgcaagagcagactagctacaatgttgcgaaggcgggctgcattcatatggcgcggtcgctggcgaacgagtggagggactttgcgcgcgtcaactctatttcgcccggttatattgataccggtctgagtgactttgtcgacaaaaagacgcaggatctgtggctgagtatgattcctatggggcgccatggtgatgcgaaggagcttaagggagcgtatgtttacctggtcagcgatgcgagtacgtacaccactggtgcggatctggttattgatggcggttacacctgccg

SEQ ID NO: 17799 - DNA, 405 bp, Emericella nidulans
gaagaaaggaggacactgcgaagaagatcgctgcacgacgtaccaagatcatcattaagaacttgccgttccaggccacgaagaaagacgtcaggtcgcttttcggggcttatggccagctccggtctgtgcgggtgcccaagaagttcgaccggtctgctcggggttttggtttcgctgattttgtaagcgctcgagaagcggaaaatgccatggatgccttgaagaacacacaccttctcggcaggcgattggtattggaattcgcgaacaagaaggccatagatgccgaagaggagattcaaagaatcgaaaagaaggtaggggagcagctggacagggtcaagctccaaaagctcactggagctgggcgcaaaaagttcactgtaggggcccaggacgacg

SEQ ID NO: 17800 - DNA, 407 bp, Emericella nidulans
cgagctgcgcgtgtctctccagcagagcatccacagcgacgacgccgcgctgcccgatctgctcctctgggatgaacaggggctgcgctattttgaggatgttacctactgcccatcgtactatttaacgagggaggaaattggtctgttgaagaaatacagcctgcaaatcgccgaacacatccagccgggcagcatgctggtcgagctggggagcgggtgcgtgcccactgttcactgttttctacggatgccttttattgactttcagcagaaacctccgcaagacgaagattctgctggatgcgctcgaggagctaggtcggccggtagactatttcgccctccacgtctcctaacctgagctcaagcgcacactccgccccgtcaggccgggcgtctaccag

SEQ ID NO: 17801 - DNA, 411 bp, Emericella nidulans
ccttcccggacgctgatggaaacctcctatcctggactgctactattaccggcccttcagaaacaccatacgagggtctgactttcaagctctccttctcgttccccaacaactacccatactcgccacctaccgtgctcttcaagaccccaatctaccacccgaatgtcgacttctccggccgcatttgcctggatatccttcgagacaagtggagtgccgtgtataatgtacagaacgttctgcttagcttgcagagtctccttggagagcccaacaagtaaggctacatcctgaatttattttttgttgttatactaacggtcaattagcgcgagccctctgaatgcccaggctgctgaactctgggacaccaaccaggaggagtataagcgccacgtactggccagg

SEQ ID NO: 17802 - DNA, 413 bp, Emericella nidulans
cccttcctgaaactgtccgtgtgcttgacgaaatcgtcacagacttcgtgctagagatgtgccacggcgcggcccagcacgcgaactactcgcgccggcaaaagattaaagtagatgatttccgtttcgcgctgcgtcgggatccgaacaagctaggtcgtgtacaggagcttctgcgcatggagcgtgagctgaaagaggctcggaagcaattcgatcagaacgatgaccaggttgggaatctcaaggatgctgctgggaaaagaggccttgacgatataggtgatggtggggacgggaagaagtcgaaggggaaggggaaaaagggagctaggcgggactcggacgctactgaggatacgtcgatggcgaagaagcggaaggtttaaggatgcaagggtgcactgcccgtt

SEQ ID NO: 17803 - DNA, 419 bp, Emericella nidulans
catcgagacccaggcgttcttgaaatttgctccagcgtatttccagattatgtctgaagctttgttccatgagctcccgtctgccatcgcgaagatgtttggcttctaccaggtcatcataaagaatccggcaaccaacaccgagttcaattggttcctcctattgatggagaaccttttctatgatcgagtgccaacacggattttcgacctcaaggggtcgatgcggaatcgcaaggtacagagcactggtgaacggaacgaggtcctcttagatgagaatatggtggatttcatctacgagacgcccttgtttgctcgagagcactctaaaaaacttctaagtcagagcgtgtggaacgatactttgttcctgggacgttagaacgtaatggactattccctcatgatcgcgatcg

SEQ ID NO: 17804 - DNA, 428 bp, Emericella nidulans
tggacggccatacgaagtttccctgatgatttaatcaaagagtccatgattcattgcttgaattcaaaaaaagcatacccctctgtcatcacgggctttgactttgtcggacaggaagatgcaggccgtccactggttgatcttctcccgctctgcaaatggtttcaacaacaatgcgccgatgaacagctccaaatacccttcttcctccacgccggtgagtgcctaggcgatggcaatgataccgacagcaatctggtggacgccatattgctgaactcccggagaattgggcacgccttttcgctatacaaacaccccctcctgatcgacctcgtcaaggacaagaacatccttattgagatgtgccccatatctcatgaagtactccgactaacttcgaatatactgatgcacccgatgcctgc

SEQ ID NO: 17805 - DNA, 431 bp, Emericella nidulans
acgcggcgtcacccaatcttacggtttctacaccgagtgcgcccgcaagtacggtaatgccaacgtctggcactactttacagacatgttcgacttcctcaccctcgctgtagtcattaatgaccagatcttttgcgtccacgggggcctttccccctccattcactcaatagaccagatcaaaatcattggccgcttccgcgagatcccgcacgagggacccatggctgaccttgtttggtcggaccccgatacggagcgcgacgagttttccctctcgccgcgcggtgcgggatatacctttggagcgcaggtcgttcggaaattcctcgaggttaatagtatgtctcatatcctgcgcgctcatcaattgtgccaggaggggtaccaggttctttatgatgatcggttgagtacggtttggagcgcgc

SEQ ID NO: 17806 - DNA, 431 bp, Emericella nidulans
gcgcaacggcttcgatcgttcaccatccgtgatccgcagatggggttcacttctagcggcgtaccatacaacaagtccgctggcaacattggtcaagcttggtgttctatacgtcaaaaagaaccagtcgattttctggagcattgaagctactctctgcggtcttgattgctcaatgttccttgaaaatgcttcgttgtatgaaggaaacaatgcaggctacgagtctaacaggtatgtacagttagttcttccaaagaaaatacttctaacgtaataccgtaggccacgaaaaatgtggtctagactggatcaatgacgttgtcaatgagggcttatcgtccgtcaacgcctgttcctttgacaacattcccaggcctcccgttctagatgaccagatcatcacggtctggtcgcatatcatgcagggc

SEQ ID NO: 17807 - DNA, 432 bp, Emericella nidulans
cgcaatctccaggacgccatgtccgtcgcacggaatgttatcttccacccccgtctgtgccctggcggcggtgctattgagatggccgtctccgtcaagctaggccagctagccaagtctattgaaggtgtccaacagtggccgtacaaggccgtcgcggatgcaatggaaatcattccccgaacactggcgcagaacgctggtgcaagccctattcgtgtcctcacacgcatgagggctaagcacgtcgagggccacaccacatggggtctggacggcgacacaggcgctctagtcgatatgaaggagtatggcgtttgggagccagaagccgtcaagcttcagagcatcaagacagctgtcgaggtgaatatcctttctatcattgactcatgatcatcagctaacttaaacagtccgcatgcctgctgc

SEQ ID NO: 17808 - DNA, 433 bp, Emericella nidulans
gccgcaggcccatcacagtcgcaatctgcaagtaagctggaagcggcaaaagcacacagggataagcttctacagttccaagcacaaaacgcgaaacgtacgcgtgttgttgatgaggctgcggactttgagacgccctccgttgcgtcgaccctctggatgacgccgtcacagcgagcactggcgctaaaaaagcagcaacggattatgcgcgagatggaagagaaggcacggccggagtgggagaagaaaaagaccatcatgagcctggatatcaaaggcggtcgcgtcaggagggtgtaccaggcggcgccggctgagacttctgcgcccgtggaagacgaagaaactgaggacctcacctatgatgtcggtcgccagcggagcggcggcgaggcgttaagtcgaaatcctctacttgcagcaggtgggc

SEQ ID NO: 17809 - DNA, 435 bp, Emericella nidulans
gcaatttagtgtgctccgacttgctaacccgaggtatcgacattcaagctgtcaacgtggttatcaactttgactttcccaaaaatgccgaaacctacctacatcgcattggtcggtccggtcgttttggacatctgggtttagcaatcaaccttattaattgggatgatcgcttcaacctgtataagattgagcaggaattaggaaccgagatacaaccaattccgcagaatatcgataagaagctttatgtgtacgattctcccgacaccattcctcggccaatctcgaatccgcctcaacaatcccagggtgccactgcagcatcaaaccccagtgaccgccgtcataatcaccacacgaacgggggacattatcagtccaagggacgaggtccataccgaggtggacgtggacaaggccagcgtcgcaaca

SEQ ID NO: 17810 - DNA, 438 bp, Emericella nidulans
gagaccatgatggatgtgtttaacttctcaactgttttcattccccgcatgcttgcacttttaacatacgagggtcgaccaagcaagagagaaactgtcttgcaggaggagaaggtagcgccggctccaaccgaaatcccacgggtgcctccagagctactgaaagacctgatggatatttctgagccggaacgtagctctcgctggcttcgttgctgcttcgtcgaggatgccgagtgtgaaattacacagattgcgctctggcaagcatatcagagtcggtttgccgatcctcgagttcctggcggcggtgttctccctgctgcggagtttatcaagaacgtcagcacgacgtttacgaatgcgcaggcgcaggtaatcaacggacctggttcatcaacgaggttcatcatcaagggcattcggcccctggaaacc

SEQ ID NO: 17811 - DNA, 439 bp, Emericella nidulans
gccgccagtatcgtttccaccctcttgtccataacccaaagcattctcgcctcgaggcacgagagatggaacaccattcccgagcaccggctctacttcgcgtgtgtcgagagcgtcctcttgcccgccgggctgtttatgttcggctggacgtcgcagcacggcgatacgatcccatggattgtgccgactatagccgtagggatctcgacgatggggatcttctcgatctacctctccgtgttcaattacctggctgacacgtacgtccgctacgcgagctctgcgctggcggcgcagaatttctgccggaatctcatgaacggggtgtttcccttggtgtccaggcagctgtttaagaatctagggtacgggcctgcagcaagtctgctgggaggcatagccgctgggctgtgtcatgtgccctggctgttggtgg

SEQ ID NO: 17812 - DNA, 439 bp, Emericella nidulans
ctcgccctccagcaacacccggtcagcgtccaggatacttaccaggatatgggcaacccacgccgcagtttaaccagggaaacccagtgccacagtatcagcgccctggacaaaacggatataatccatatacacctcaaccagggcccaacccagctcaaggctctccgcaaccatacacgccgcgaccgggtcagcccacatcttacaacgtggctagctacgggcctgggcgcagtgcctctcctcagaagccgccatcatatgtagctcctcgagcgccgtatagtattcccccaggctctgcccccagcaacggtacgtgcaacaaccccagccgcaacagcccacccccgggtacgccaactacactcccaaccaagcaccgaacacctactccaactccgcagctgctgtgacgtacgctcgcagtgccgcg

SEQ ID NO: 17813 - DNA, 441 bp, Emericella nidulans
cgagccgggctctcctgaacatttcgggcttctatcaatgatgctttgggcgactgtgccgtacgtcatctggcagctctcttaccacttgtttatcaccgtccgccgtgcagacaagattgcagctggtcgtccaacaagcttcacgtgcgttcgcaagtcttatgcaaaggcctggattggtcgacttgtcctcagccttccggaaacactccaagcccctgcgttcatgctgattcaatatacctacgcgctgttgaccatgatcccatgccccatctggctctggtcgcggtgggctagtggtatttttatcacaggcttgttcatcttgagtatccataacggtgcaacgtactatattgacgtgttcggcaagcgcttccagaaagagctggaggagttgaaaaaagatgttgctcgatggcagtctagccccga

SEQ ID NO: 17814 - DNA, 449 bp, Emericella nidulans
aggcgtgcgagctcgatgtgcccatctacctgcaccctacctggccctcggcccgcatggccgagaacttcatgggctcctacccagtccccgtcggcatcagcctgggcggcccgggctggggttggcatcccgatgttggcctccacgtgctgaagctgttcgctgcgggggtgtttgatcgcttcccaaggctgaagatcatcgtgggccacatgggtgagatgcttccctatatgctcgaacgagccagtgacatgagtactcgctggggcggatggggccctcgagaccgaccgctccggcaggtctgggatgagaatatctggattactacatctgggagttggagtctcgcgcctctgaagtgcatcctccacaacacaaaagtggagcgcatcatgtacagcgttgactaccccttcgaatccaacgagcggggactggag

SEQ ID NO: 17815 - DNA, 452 bp, Emericella nidulans
tcatccgtgggcctggtgtgcctgagaacaaagtgaaggaagccgttaccacgcatattgacctcgcgcccacgatctttgacctagcggagataccactgcgcgaagactttgacggcacgccaatccctcttccaagcgcggaagataatgcctctatacgccatgagcacgtcactgtcgagtattggggaaagtcgtaccttgagggggagaagggccctctgagtaagtgtaccagtttcggttcctgttgtagagctgactcgctgtcgtaggcaacccagagaacctcccattcttcaccaacaacacttacaagtcagtacgaattattggggagggctataacctctactattccgtatggtgtaataacgaacacgagctgtacgacttaactgtaagtactaacccacggtatggcccagtctaatacgacactaacctgc

SEQ ID NO: 17816 - DNA, 453 bp, Emericella nidulans
caaccttatggctgtcgaaggcactcgcgcgctggcctcagccctacccgagattgtcgagaacccctcctcccaatccgctcgctcgctcgccctctacggcgcctggctctgcggaacctgcctgggcagcgtgggcatgtctatccaccacaagctctgccacacccttggcggtagcttcaaccttccgcatgcggagacgcacacggccgtcttgccgcatgcgatatcatacaatgcgccgaagatccctgaggcgatgaagaagttggctgaggtgctgcctgagagcaacggcgatgcgatccagggcttgaatgtcttgctcactaagctgaaggttaagcgtggtgttaaggcctttggtatgaaggaggaggatatcgataaggcggctgatattgctgttggcaatccttattggaacccgagggagatcgagcgcgagcc

SEQ ID NO: 17817 - DNA, 457 bp, Emericella nidulans
gggccaaattgaccggacgagagtgcttacatcgcgcggcgtcgctttcgttacgtacaccaacgaagcgaatgcacagttcgccaaggaagccatggcgcaccagagcttggatcataacgaaatcttaaatgtgcggtgggcgaccgttgatccaaatcccttggcgcagaagagggaggcaaggaggttagaggagcaggctgctgaggctgtgaggagggcgctgccagcggagtttgtggcggagttggaggggagggatcccgaggcgaagaagagaaagaggattgaggggagttatggactgcaggggtatgaacctccagatgaggtgtggtttgcgagggcgaaggaacttgagggtacgggaaatgaacatgcgaaactcgaggcccctgagcagccgctcatgattgagagataaaaaagcttcagcgcctcagaaccaagttga

SEQ ID NO: 17818 - DNA, 458 bp, Emericella nidulans
ccacgcgatgcacaccaagctctggcggatgccgaagctattgatacaggcaaaggtatgaatgatatggttcttcgctaaataccttccacccctattgcttcaaatgcagcatttctctttccgtaactatatttctgttttcaaaagaaagtttggcggcctttttatatcgtcttccagacttgacaaacaagccgctgactacttatcagtcactgtccggttccaacccctggcatctgccccgattcttaaaaaccgggttttcaaaataagtgcctctcaaaaatttgagaccgtcgtcaatttccttaggaagaagcttaattgcaaggacacggattcagtaatctgctacgtcaacagtgtttttgctccccgccttgatgaaggtgtagggggcctttggagagtaagtacaggccatagtttctatctggaagggagaattcatg

SEQ ID NO: 17819 - DNA, 458 bp, Emericella nidulans
cacctttgtcgacggagtggatcccagcgacgtccgagaggtcgtcagccacttcatcgacactccgctgtcacagcactcaaaaacaaacacatcacccaatgttcggttaaaatcccgaccctgcgagtatgactatgtcgtgctcctctgctctcacaagcgacgcgatgcacgatgcggcattacagcgcccctaatcaagcgcgagctcgaacgccatctccggccacgtggtttgtaccgcgacgccgatgacgagcgtcctggtggggttgggatcttctttgtctcccatgtcggcgggcacaagttctcggcgaacgtgctggtctaccgcaagaaggagcagcagatgatctggctagcgagagtccggcctgagcactgtgagggcatcgtcaactatacgcttctgcagggaaaagtcgtcacccggattttcagctgcgcggcgg

SEQ ID NO: 17820 - DNA, 463 bp, Emericella nidulans
cgcagtgcaacttcaccgagggtaactatatcgattaccgctattttgacgcctataacgttgctcctcgctacgagttcggctacggcctttcctacaccgacttcgcctactcaaacctccacatccagggcccctctgccctctccacctaccctacaggtcagctcgcggtcggtggctatgaagatctgtgggatacagtcgccaaggtgaccgtgaccatccgcaacgccggctctcttgatggggccgaggtgcctcagctctacatctcgtacccggacgtcgcgaagcagccagtgcgccagctgcgtggtttccacaatgtctacatcaagaagggtcagtcgaccaaggtgaccttcgagctccgccgccgtgacatctcctactgggatgtccagcaccaaaagtgggcagttgctcctggtacgtacgaggcttgggtgggcgccagctc

SEQ ID NO: 17821 - DNA, 464 bp, Emericella nidulans
gacaaacacggctgcgtggaagagttctctcaatcgtctcaatgctcggtgaagccagtgcactcttcttccgaccaaaggacaagaagattcatgcagacagcgcgcgcaatcgctttaccgtcaaagatggcggtgaccaccttaccctcctcaacatctggaaccagtgggtggactctgacttcagctacgtttgggcgaaagaaaactttcttcagcagcgcagtcttactcgagcacgcgacgtgcgcgatcaactcgcgaaactctgtgatcgcgtcgaggtaaccgtcagctcttgtggctcaaacaacatcgtaccgatccagaaagccattactgccgggttcttcccgaacgcagcgcgtctccagcgcggcggtgacagctaccgcaccattaagacagggcagacggtatacctgcacccgtcaagtacgctcttcgaggtgaacccgcgg

SEQ ID NO: 17822 - DNA, 467 bp, Emericella nidulans
tcctcgagttcgacgtcacaaaagccgatactgtttcagatactgtagaaaaggcgaacgcgttatatggcggcatcgacattctcgtcaataatgcgggtactcgctcttgggcgctgtggaggacatgacgtgagttttgcccaatgacagccctttctcctgaagagggaaagttcatgtctctgggatctgagggctaacaatcacagagatgacgaggccaaactccaaatggaaacgaacttcttcggcccttttcgcctcatccgctcattcctgccgacattgcggtcccgcaagaacggaggcgcgaccattgtcaacgtcagcagcgtagctggccaagatgccctgcctacatgcggcctgtacgcggcctccaagttcgcattggaaggtctatcagaggcattagcccgcgaggtcgcaccgttcaacatctccgtcctcatcgtcgagcccgg

SEQ ID NO: 17823 - DNA, 468 bp, Emericella nidulans
ttcgttgccgcttgccttccgagtctcttccaggtgacgcagttcgcccaatcacggacggaagaacacgtgtttgatacggaaaacgcatctgcaagcattgccaagattctgcacttcaactccagcaaggtacaaaacgcagcagaaatagcggccaactggatttccacgctaccaatcacctatgacgaagaggccgcgccatatgcatactctttcctcgcacagttgattgaccagtaagtttgtctttagcaaaatgagaagagaaaacaactaacatgaccagacaaaaccctgcggtgatgtccaacgcaggccaggttttcgggtacattgtgcaagctctggatgccgagaccctccagggccaaaccgccggtcgagtggccaattccgcgaaggctttggtgcaagcgacaggcttgaacgcggaacaaattcttgctggtgtgagcccggaga

SEQ ID NO: 17824 - DNA, 469 bp, Emericella nidulans
ttccaaacttcagtcactgcgcacaaaatcttactcgcttgagactctagccgcggtggttcttgaactccaatcgacgcccctgaagaaattgaagcaggcacgcgtgttggaaatgctatcggttgttatagacgcagagtctgttaaattcagagctggttggctcagggagatcctgaacgagattcttgaagcggcccaccactatgatggacacgagacaacggtggtggagaaggatgggcgtgaacgggatatgctgcttgaaagagaagaaatgaagaagatacaggaggaggtgagattgaaggagaaggaggcaaaggactttcgtaaaggagtcatggaaatggcagggcgtttgggagaactgaagatgaagcgagcgcgtttggagaaacgcttggcgtttctgagctccaaggtggaaaagtttgagggggaatctttgttagagaacgtcttt

SEQ ID NO: 17825 - DNA, 471 bp, Emericella nidulans
tgggttatgtctaggcggagggtgtgaaatgatcacggaacacggatgagtgattgcatccgagaaggcattttttgggtttccggaggtgcagcgcggggtagtcgcttgggccggggcgttgccacggattgtgaggacggttggaaagcagcgggcaatggaaatggtgcttactgggcgtagggtagaggcgagtgaggcggagaagtggggctttgtgaatgaggttgttagtgcagagaaagttgttaagagggctgttgaggttgcgctgcagatcgcgggcaatagtcctgacgccgtgattgtgagccggcaaggggtcaagatgggatgggagggagttagtgccgaggaagggacacgcctgcttgttgagaactgggagaagaagctgactgctggcgagaatatcaaggagggtctgaaagcatttgtcgaaaagagaaagccggaatggaaagaaag

SEQ ID NO: 17826 - DNA, 471 bp, Emericella nidulans
tcctcaccttcagctataaatccaacaacatctcattcacctcaccaaccgacaccaccaaacgcctggaagatcgctccactctcgtatgctccgacgaatacaaccaggttgtgcaagatgcgatctcccgggcagctgaaatggccactgctgcggcggccgatgctcgcaccggtagcgctctctttcaaaaatacttcaagtccacatccgaggacgatatagaggaggttgctggtcggctagatgccattgctaaagaagcaacaacgacaggccagctaaagtactactgtgagccacggcagaagactactgcgctggcaatgttgcggccatgacataccccactctcaacagagttgtcaactgcccagggtactacgccagcaccaaggtctcgaattattgcgggtatctcgaccaagctgccatcacactccatgagtacgcacacgcggacgctct

SEQ ID NO: 17827 - DNA, 471 bp, Emericella nidulans
aacactagtgcagtatcaacagactctggtctcacgactgaagatgctgtcacgaccgctgaagccgaagccgagttaaatgcctttgaagaccgcgaacttgaacccttcatcaagcccatctgcgatctcttcctggagacctttgagctcaacaagggaaacaactggcttcgcggccgcgcagtcgtcgtggtcctccatcagcttcttggcggtacaatcgaacgcaaagttcgtgaaggtgcccgctcgctatttcaggacgagcaccttctccgctacctcacgctagcgaaggacaccctctggcctggtggtgttcttcgtgagaacagagtacgcacagcttccgaacgccttaagagccgaacagaggcaagtctcgttcttgcaacccttgttcctgaactagcgggtaatgtagtcggacgcgcaaacgcccaagctgcagcaaggcgaatcttcgca

SEQ ID NO: 17828 - DNA, 474 bp, Emericella nidulans
attcattgaaagtatatagcgtggtccttgaccacaagcgaaaccgttgtatcagtgggtctatggacaacatggtcaaggtttggtcactggagactggctcgattctctacaacctggaaggtcatacgtctcttgttgggcttctggacctgaagtgtgatcgtcttgtctcagcagctgcagactccactctccgcatctgggatcctgagacgggtcaatgcaagagcatgttaagtgctcatactggcgcaatcacatgtttccagcatgatggccagaaggtcatttcgggctccgaccgaactctgaaaatgtgggatatacgaactggagagtgtgttcgcgatctcctcacaaatcttggaggagtctggcagatcaagttcaatgaacgtaggtgtgtagccgcagtgcagcgggatggcatgacttatattgaggtaagttgagttttctttcctttttcta

SEQ ID NO: 17829 - DNA, 477 bp, Emericella nidulans
cgccattcaagagccagcacctaacaaatcctgcagtaaatggcgccggcctagcaatgaacaccgttgacgcccttacacaccacggcggctcatgcgccaacttcctcgacacaggtggcaaagctacctccgagacggtgaaatcctccttccgaattatcacctcagatccgcgcgtaaaggccatcttcgtgaatatcttcggcggcttgacgaggtgcgatatgattgctgaggggatcatacttgctttcagggatatgcaaatgagtgtgccagttgttgtgaggctgagggggactaatgaggagagtgggcagcagatggtatgtacctttcttttaatccttcaactgcttctggtttgtttggggatggtgattggggtgctgaccaggcttgccgaacagatcgctgaaagtgggcttccgctgcatgcctttgatagctttgaagatgcagcgaagaaagtca

SEQ ID NO: 17830 - DNA, 478 bp, Emericella nidulans
ccccgatgtgcgaggttcactcggggccagtcatcgtccggggtcgcagtcctcgtaatttccagtctaggaaagatctaccgttgagtggtagtgctgctgcttccaggaagaacgcgcaagcggctgcagctagtaataatcttactcgaacctcgcccagtctgaccgacaaggcaaaaaccgtcgtgaagagcagctctcccgaaacttcatcaaacggggtcccccagcaatcccccccaaattgggctcttgcaacaaattcaacgcttcctcctccgacgacgacgacgctgccgcactcgtcagtctattcgcagtccagtccagaattttcgagaccggtagaggcacatcgacggacgacgagcgccattgctgcccctattaatttatctcttttggacgacgactctctcaatctctcaaacggcgattcccgtcctcatacatcattctctaatgacctcgcgtc

SEQ ID NO: 17831 - DNA, 480 bp, Emericella nidulans
gctctccttgcccgccatgcgcgtcgcttgctcaattgcctcgacgatacttcggtgattcctggagacgagccgaaaccctatgagcgaggcaacgacgccaagcaaatcgtcgaagatgccgaacgagaattgcagtcctgggagaccgattacgagcatgtagagacaaaagcagagcacggagcggcagctgtacctatgagcacatcgctcccctcttctcacgaagagcgcggacaacgtgcttcccaatcccaggcaactgagtctcttgaggagcagcaggaggagtacacccaagcagatgcgacttcggtttctgacacatactctcgcatctccgctaacgatgcggcttctccaaccaggattcatagcatctcagccccaagaatgtatgccggtgcctttgagactgctccagtagtgaatcgtgagagtgtgaggaaggagaacgaacggattggtggggaagtg

SEQ ID NO: 17832 - DNA, 486 bp, Emericella nidulans
tcgtgctccaaaatggcatgaaggcgcagcttcctcataacacgcccctcgctcctcatttcagccctcgctacaatccctggcagcaaagactctgtttctgtccagatggagacttcttcagggccctcagatccacaaaagccagggtcgaaactggagtgatcgaacgggttgaggaggatggtatccaactggtctcaggtaagagactcgacgccgatgtcattgtcactgcaaccggcctgcagatgcagcttttcggcggtattcccatctatatcaacggtgagaagctggatccatcgcagaagtatatgtggaatggcctgatgctggaggatctaccgaatgcgattcttgttatggggtttagcaatgcttcctggacacttggggccgacctcgctatgcgggtcacctgcaagatcgtggagcatatgaaccgtcaaagtttgacgtttgtgatgccaaccctaggcgaga

SEQ ID NO: 17833 - DNA, 489 bp, Emericella nidulans
cgctgccgaatactacgcctccagaggcggggttgaagaagccgcgaagcaggctactcaggtccttagcgaaaccaaccccgtccgaagcagcgacatcttcctcgccattcaacgtgtcgcccagacgacgtcaaccgccgacctcttccaggccggcccggcaacggaaaaggccgttccagagggtgtagtggatgttcctgacgctccggaagaagaggtcgccttcgccctgtaccttcacgatccaatccacggcatcgcgttccataccgtatcacaagccgtgccccagaaatggatcaactggctcgacgcgtcctcagcccctgcacataaccccgaccctgaatctgatagccacgtgccccaagccgtcgtcccagaagacattgctgagatcattgagggtggtggtgtcgaccctcgtgaatgggcagctgagtggattgaggaagcaatctcgcttgctgttggcgtcgtcgc

SEQ ID NO: 17834 - DNA, 489 bp, Emericella nidulans
acatggaagtatactccggcttctgtgtggtttagtcaggacctacgacgaccgtaggcgagctggaccgagatgaaccccagcttcgttcaccaagtcattccagacgatacccttcatcacctcgtcaaatacttatatggctcgatccctgaggtgcttgaggcgttcaattcaatgccgatacctgtaatgaaagccgactttttcaggtatctgatcctcctggcgcgcggtggagtttatagcgatattgataccactgcgcttaaaccagtggtggattggttaccggacagcctcgacctgtcaactattggcttcgttgtcggaattgaggctgatccggaccggccagactggcatgactggtactctcgtaggattcagttctgccagtggaccatccagtccaagccgggccatccgatcttgctagatatcgtgacgtacattacccaaaaagccctacggatgaagaaggcggga

SEQ ID NO: 17835 - DNA, 489 bp, Emericella nidulans
atgaaagcttcgccaaacttcctgtttttactcttcggccgacgcagtattcttagctcaaccacaatgtggcagaccatcctttacccgccaatattcatgcggattattgacacgtcgctctccttcctcttcaattggaagtgcaagaatatcagccatgatcaaaagttggcaggttatctccacctcttctcattcactagtaccaagtctgtggtacactggtttcagataatccgcaataggaacttccagttctacgatgacgagatatatgcaccattcagcatcgtggcaagtgagcgattctacaagccagtcaagtatcccacgaagaatatcaaaacgccaattgtcttgttgtacggcggcagcgatagccttgtcgatatcgatgtgatgcagaaagaacttccgcgtggaacaacggccaagataattacgaagtacgagcacttggattttctctgggccagtgatgtgtcc

SEQ ID NO: 17836 - DNA, 491 bp, Emericella nidulans
tggtgtacgtcctttccatcccatactttagtgctagcgctaataacagtagcacgaaacaaccgccagcgccctaacctggacctgctaccttcttactctccacccagaggtccaggaccgtcttcgggctgaaatccgcaccgctattccccattccacccatccggttacacattctgacctcgaatctcttcccctccttaatggcgtttgccaggaagtactccgcctttaccccacggtgccttccacaatccgggaagcagtccgtgacacgaccgtggccggaaagcatgttcccaagggaacaaagatcatgttatgcccgtacgcaatcaaccgggcacctgagttttggggggccgacggcgacgcgttccgtcctgagcggtggatcgatacagatcccgtaactggaaagacgagcgtgaacaaccacggcggagcagcaacaaactacgcgcagattacgttcctgcacgggcagc

SEQ ID NO: 17837 - DNA, 493 bp, Emericella nidulans
tacctattagaccaggttcaagaacactccaaggctgaagagatcatcatcttctatgcaataacaactcggcatactgattgccgagggcctcgaactgctgggggtggacttccggatctacgctaacacattaaaaccgaccctccgcgaagaatacttaatcctatttcgcgaatttgagcaggtccgcgtactcctaatggacctccggcaagcctcgcacgggctgcacattgcacaggcctcgcgagtgtacatagtcaatccaatttggcaaccgaacatagagtctcaagctatcaagcgtgcccaccgcattgggcagacccgtcccgtcttcgtcgagaccctcgtgctccgcgacacgctcgaggacaagattctccaacgccggaaagccatggcagatgttgagattcaaaatgatctgctggatgactataccatgagctcaatcatccagcatgagcgtttcattcccatgccctgc

SEQ ID NO: 17838 - DNA, 494 bp, Emericella nidulans
ctactatgacccagtacaagaccgattacaccttccctgtcgccttccccccacaacatatgggcaacgtcttggctgaatggctcggcaagaaggacgtccagcagtgtcacgttgccgaaaccgagaagtacgcccacgtcactttcttcttcaacggcggtattgaaaagcagttccctggtgaggtccgcgacatgattccctcaccaaaggttgctacctacgaccttgagcccgagatgagcgcagagggcgtaggcaagaaggtggaggagcgcattgccgagggcaagttcgagttcgtcatgaacaactttgctccccctgacatggttggccacactggtgtctacgaggctgctatcaagggtgttgctgctaccgacaaggccattggtatcatttacgaggcctgcaagaagcacggttacacccttttcattactgctgatcacgggtaagttttgcaatccaatcaagatactagtata

SEQ ID NO: 17839 - DNA, 495 bp, Emericella nidulans
cgctaatgaggcccatgttcatggaattcccggaagatctgaacacgtacccgcttgacacgcagtatatgtttggctcgaatttactggttgcgccagtgttttcggacgagggaatcgttacgttttatgttccaagaacgccggaggaggaaggaagaaagcagtggatctcctggttcgaccacggcaagaaatacgaaggtggacggtggtatacagagacacacggtttcgataccctgccaatcctcattcgtcctggctctgtgacgcccattaactacaagcttgagaagccggagggaaatccgttggatgggctggagatcttggtgaatggatctatcgataaggaggtggaaattgagattgtggatcccgagacaacgcataaggttttgaaggttatgactgtttcggagagagagacagagaacggagttgaagtgattgcaagacttgatggggttgatggtaatgagaacagcgtga

SEQ ID NO: 17840 - DNA, 497 bp, Emericella nidulans
cgctctccggcgctcatcaaccgatcgcagatgaagggcgtgtgcatgaagacgggtatcacgaaaccgaagaaacctaactccggtgagcgtaagacggccagagtcaggcttagtagtgggaaggttgttacggcttatatccctggtgaaggtaggtctccaacccctctcctctttccctcctttcaatacgtctagctactagactaagatgcgctggctggactggtctgttaactggttgttttctttgtaggtcataatgtccagcagcacagtgttgtgcttgttcgcggtggcagagcgccggattgtcctggtgtgaagtaccatttggtccgaggagctatggatctggtacgtttggaaccccttgttttaaattccatattgagcctaccgagttcatatgttctgacggtcgtctttaggccggtgttgctagtcgagttaccagcaggtcaaagtatggtaccaagaagcccaagaaggat

SEQ ID NO: 17841 - DNA, 499 bp, Emericella nidulans
aggaaaggccccacgccctcttatccgaaccggctctggagcacctcaggattcacggcgttgatggcagcatacttcttcggtttcggctctttcttcggtgcatggcagttctatgtcacccagttctggctgcgcatccaaggtgccgctcccataaccgtcgctttgtatttcatccccaatgccctcgtcgggatcttcgccacctgggttgtcagccgcaccttgcatatcttcccaggccattatatctatactgcagctatgttcgccttcacgatggggcctgttttcttcatccctcagacacccaacacaaattactgggcgctctctttccccggtgttgtgttggtcactttcggtcctgatctagcctttgcagccgcatcaatcttcatcacgagtaacgtctcgaggtcgtaccagggtagtgccgcgagtcttctggtaaccaaccagaatctgtcgtctgcgattatgacaagtatcgccg

SEQ ID NO: 17842 - DNA, 500 bp, Emericella nidulans
  unsure (1)..(500): unsure at all n locations
cgattgtgagaaggagttcaagaacgagaatgtgtacaggaatcacttaacaggcaagaagcacattcnggctgctgaggcccgtaaagctgctggtggttcgggcgaaggacctacgccgtccgccagcgggccatcggcagctcaccgcttgaaagagcgagcagttgctgagcgcgagcaccgcgttcgttctctagcaagagtactcatcaacgagcgtcaggcaacaaagataaatgttgagcggagacaaggtatgacagagcgggagcgtcaaatggagcttgaggctatgctcgcagagaccgaagacgccaagggtgaccgtggcaacgagtcggatgaggaaggcgaagatcgcatttacaatcctctaaaacttcccctcgcatgggatggcaagcctattccgtactggctctacaaactacatgggaagggtgtggagtattcttgcgagatttgcggtaactatgttacatgggccgtcgcgcatt

SEQ ID NO: 17843 - DNA, 501 bp, Emericella nidulans
cccccacaacttctactggccttgggccgaagatctctccagcatagacgagaccctcgtcggggcctcttgcaaaatgctcggtgtcgaccgcttgatcccctgtttgctaaacaaaggccacaaaattctcatcttctcgcaattcaagacacagctcgacatcctccaggattgggccacacacctccgctcctggaactgctgccgcatcgacggcgcaattagtcaggcagaccgccaagcccaaatcaaagctttcaacacagataaagattacaaaatcttcctccttagtacccgcgccgggggacaaggaattaatctcgtggcagcggatacagtcatcctctttgactcggactggaacccgcagcaagacttgcaagctcaggatcgcgctcaccgaattggccagacgaaaccggttatcgtctaccgtttagcaactaagggaacagttgagcagacactacttgaaaaagccgattcgaagcgccg

SEQ ID NO: 17844 - DNA, 504 bp, Emericella nidulans
tccctgcgcgtatgaccgctatagatacagctattcagaaccgcgatttccccgctttttcgtaaatcaccatgcgtgattccaatggtttccatgctacctgccttgactcatggcctcccatcttctacatgaatgatgtctcccgggccgccgtcaggctcgtacatgatatcaacaacgccgtcggtcgtacagtgtgcgcgtatactttcgatgctggccctaacgccgtcatctactaccttgagaaggattccaaccttgttgcgggaactttcaagtctattcttggcacagaacttgaaggatggtctggccccttctatgatgccgtgaaggacgtcagctcgggtgtatctctcgaacaggtcgactcccgcgccgtagacgtgctcaagactggattgagccgtgtgatcctcaccggtgttggtgaaggtcctatcagtgtacaggatcacctcgttggggaaaacggtgaaattctctctgatcaataga

SEQ ID NO: 17845 - DNA, 504 bp, Emericella nidulans
tgccgaacgtcgggaagtcaacattaatcaataacctgcgcaatcgcggcgtgggaaaggcgaaagccgtgcacacgggggaccaaccgggcatcacgcggaaaatcggaacgcctgtaaaaatcatagagcgagacaatggcgcccatgtttatgtgctggatacacccggcgtgtttatgccctatgtgcctgacgcggagaatatgttgaagctggccctttgcggctgcgttaaagattcggtaatctctccggtcacattagcggactacttgctctaccatattaacctgcacgatcccactgtatatcagcgctggtccctaccgacgaatgaggttcacccgcttttggatagttttgcccgcagtacgggtttgcttgccaagggtggtataccgaatatggaccttgctgctttacatttcatccaaaagtggcgcggtggcgggctcggtaggttcatattagacgacctgcaggaagagcgacgtcgtcggg

SEQ ID NO: 17846 - DNA, 505 bp, Emericella nidulans
cgatgggtcatcaccggcaaacagcgtcggaagggtgtctccgggggtagatttgtggttatcagatgaagcagagatcttggtgaaggggccctatatgttttccaagtacctccatgatacattcgcgacatcagaggcacatgacaaggatgggtatcttcagacaggtgatatcgcatcctgcatggggatacctactttattcaggggcgggcttcgcttgacattatcaagagtggcgggtacaaaatctcggctcttgatattgagcgggagatactaggccttgattatgtctctgaggtgatgattgtcggcgtcgaggacgaggagtttgggcaacgggttgcggccgttgttacgctaaaagatgaacacagagcaagcgggttgtctctagagaagctgaggggggatctaaggggggtgctagcgggttataagatgccgactgtcttgagggtagcggggggcgagattcccaaaggagcgacgggaaagg

SEQ ID NO: 17847 - DNA, 506 bp, Emericella nidulans
gctcttctcgcagtttgaagctaatgtcgaacagagctgcaggcgcaatacacaaacttcaagaacactctgcaacagctagctcagaagattggtgatattgagcaggaggctgaggagcacaagtaagcctttctggcctttctacctttgggctccctagagtctcgagcgaaatgtggatgatgctaatagttgtgcccttcgaagactcgtgatcgataccctggagcccctacctcaagaccggacgtgctttcggatggtaaatggagttttggttgagcggacagttgccgatgttctacctacgctgaaaacaaactcggatggcttaaagcaagtattggaggatatgctgaaacagtacaagtaaaagcaatcggagctggacaattggaaggttcgtttgccgaccttaatgagcagtcccgtacaaatcgttcaggaagtcgctaacttttggcacaacagaaaaagaataatatccaggttgtacaacctta

SEQ ID NO: 17848 - DNA, 507 bp, Emericella nidulans
ccgctgcgagcgagtggttgagctagagatctcgctcgacgacgcccgagagcagtacaataacgtgctccgctcatcgaacaaccgggcccaacagaagaagatggcgttcttggaacgcatccttgaacaactcacccacgttcagcgacagcttgtggagcagaatagcagcctaaagaaagaggtcgccatcgcagagcgcaactcatcgcccggaacgagcggatatcaagcttggaagccctcctccaggagagccaagagaaactcacccaagccaaccattggtacgcctgcaccttttactctcaggagattccttctttggaaatccaagagcagtccctcttttataaggtcccttctcagaagaaacatatactgacgtccactcccaacaacagttttgaagcccaactcacagcagtcaaagagcgccttgaggccgccaaacagggctcaacgaaaggtcttcccggcatggacagcaacggcggcttcagc

SEQ ID NO: 17849 - DNA, 509 bp, Emericella nidulans
cagagattcaagtcacctctcgacagataccccagtgggagcgcatcccaaatacctccattcaacacaagccgctcattatttaccatcaagctttcagtgcctcggcagaggaattgtcgaaacatttagacaaaatcggtgaagtctccgcaagatggacatactccatgtacccccagacacacttccactcgactagccacgaggtcctgggcgtggtttccgggtctgcaaaactctgctttgggggcgaagggaaccccgatcgatttgaaccggaggtctctgagggggatctgattatagttccagctggtgtgggcaccggctgctctctgagaccgatgaagctcagaggccattcatgatggtcggcgcttacccacggggtaagtcttgggatatgtgctatgggcgaccgggggaagaacgacaatcttcggaatattgaaagcttagaatggtttcaagcggatccgctttatgggaaagatggacctgcgctg

SEQ ID NO: 17850 - DNA, 510 bp, Emericella nidulans
tgtggattgatgcggaacaacagatcttccaacagaccattgacaactggactatcgatttgatgaggcagttcaatcgtcaaggcaaggtggtcgtcttcaacaccatccaggcatatctcaaagcgtcaacggagaatgtcagccgccatctctctcttgcacaagcagaaggatggtcgctcgggatcaagctcgttcgaggagcgtacatcgcccatgattatcgctcgcggatccacgacaccaaagccgggacggacgccaactacaaccacatcgtgcagtccctgctcacgcgacaataccccaccggcgattcagtggccccgcaccattttcccaaaacccagttgtttgtcgcgtcgcataacgcgcagaggctgcggcaggcctattcgctggcacggtaccggctgcaaaacaggctcccaacgattccaatcgacattgtacagctgcagggcatggcagacgagctaagctgcgagatattggcatacaactcaa

SEQ ID NO: 17851 - DNA, 514 bp, Emericella nidulans
gctacaccagctgagactttgaaggaggagcctgtaaccgagtctgtcactgaaaatgctgctgaagccgacagggtagaacctgaagttgtcgagccgtcgaaggacgcgtcccccgtggaagtcatcgaagagcctgtcgcagaagcagctacagaaaccactgttgttgaggaaaatacgccagctaccactgaaaatgagcccgcttccatcaaggaagaggttaccgaaccggctgagccagtgattgatgaggcggcagttgaagagccagtggccgagaaacccgcggcgaatgctcctgcaattgaggctggtgcatcaactgttccccaagaaacgagtgaggagttcgaagccccttcaaagccagctgctcctttggaccaagcagccattgtcgaagctcccgcagtcgcatctgaggagcagaaactcgacgaagtcagcgcatccgaaatccggcccgagacatctcagcaagctcctgaagaaacaacgccggtccccg

SEQ ID NO: 17852 - DNA, 514 bp, Emericella nidulans
cggcagattaccatatcaagggcaaaactcacggtggattatccggcgagtttcatgctcgttgccgccatgaacccctgtccctgtggctatttcaatcaccccgaaaaagaatgcatatgcggcacagatactgtacaacgttatttaagtaaaatatcgggacctcttttagaccgtatcgatctgcatattgaggtgacgcctgtactatttgaccaactgagtacgacacgtatagccgaagacagccgtactgtgcgaactcgagtcattcaaacccgagaaattcagaaagaacggttcgattcttttccagacatccattgtaatgcccagatgagtacacaattgacccgagaaatatgtcagattgatgagcccggaagaaagttactcaaaacggctattgaacatctgagcctatctgcaagagcatacgatagaatactcaaagttgctcgaacaatcgctgatatggagcaaagtaaaatgatcgaaaatcatcatctcg

SEQ ID NO: 17853 - DNA, 515 bp, Emericella nidulans
gccatttcttccccaacgctcccatctacaatgaccgagaacgcctccagatatacctctctgatgcgggtattctagccgtctgttttggtctttaccgttacgctgctgcacaagggatggcctcgatgatctgcctctacggagtaccgcttctgatagtgaatgcgttcctcgtcttgatcacttacttgcagcacactcatccctcgttgcctcactacgattcatcagagtgggactggctcaggggagctttggctaccgtagacagagactacggaatcttgaacaaggtgttccacaacattacagacacacacgtggctcatcacctgttctcgacaatgccgcattataacgcaatggaagctacaaaggcgataaagccaattctgggagactattaccagttcgatggaacaccgtggtatgtagcgatgtatagggaggcaaaggagtgtatctatgtagaaccggacagggaaggtgaccagaaaggtgtgtactggtac

SEQ ID NO: 17854 - DNA, 517 bp, Emericella nidulans
ccttccaaagcgctgggtgcgctcgctattaccgattctgtgcttgctggtcccctaggaatggctacgctcgatccttctgatctgaactatcgcccagactacaataacgcggaagactccaccgattttgcaacatcaaaaggcagaaactaccatcaaggtccggagtgggtttggctacgaggatactttctccgcgcactcttgtactttgatcttgcgcgacgcaagactgcggatgagcggacggaagcattccagcaggtaacaagaaggctagcgggttgcaagaaagctctgagggaaagcccttggaagggccttactgagctaacaaataggaacggcaatcattgtgcagactcggtaggtgacctttcctggagatgctcgttcaagttgggagaataatgggctgacattacttctttccgcagtcaccaactcaatcatggtcggcaggttgtctactcgatctttattatgacgcctcacggtatatttaactcttgcc

SEQ ID NO: 17855 - DNA, 519 bp, Emericella nidulans
ttggtgggtgtgcagggtgccgatattactgatggtcagcggaccctcacgctagggttggtatggcaattgatgaggcggatatcaccaataccctctcaagccttgcaagtcgtttgggcaaacacgagatcaccgactcagaaatgattaaatgggccaatgacatgactcgcaaaggtggccgcagctcttcgatacgcagtttcaaggaccagtcaattggatcaggcgtgttccttcttgatgttcttaacggcatgaaggcttcctacgtcgattatgatctcgtgactcctggtcagactgatgaacaggcgtatgcaaacgcgaaattaagcatcagtatcgctcgcaagctgggtgcaaccatctggttggtgcctgaggatatctgtcaggtccggtctcgcctggtgactacatttattggtaagtgttgccctagtacctgcactggtatggacctgtttctctaaatagtattttctaggctctctaatggctacgtacgaaaaa

SEQ ID NO: 17856 - DNA, 520 bp, Emericella nidulans
cagtcgcaactggcttaaggtaaaaaaggactacctcgccggcgtcggcgattccctcgaccttctcgttctcggcgcatactacggccgcgggaaacgaacttccgtctgcggcgctttcctcctggctgcgtacaactcgaactcgcaaacatacgaaacaatatgcaatattggcacgggcttctcggaagctatgcttgatgaacttcacactaccctctcgccccttgtcatcgaccgcccaaaacccttctacagccattccacggtccccaaagaccaaccagatgtctggcttgaaccgcgctatgtctgggaagtcaaaactgctgatctcacgcttagtccgcggtacaaggctgctgcggatgagtttgttggtaccactggaggcggcggaaagggtgtttcattgcgctttccgaggttcattaaggttcgtgatgacaagaagccagagcaggcgacgactaccagggctgttgcggagatgtatcggaagcaggaggctgtggcg

SEQ ID NO: 17857 - DNA, 521 bp, Emericella nidulans
gtcggcgaacaccagagccgcctctcggtttcacatgccgccttcaactgcgtcgggcagatcgcaacgtcttcttacgatgatacgttgaaactgtacgatttcagctccaagggtatctcgtcctggaagccgggacacatacttgatgaatcggaaatgaaacccgatactattgtacggcataattgtcagacgggccgatgggttactatgtacgctctctatttactcaccagtactgagaccgtgccaccgtcatgctaacatctaatccagtctccgcccgcaatggcaactcaacccgcaatcggccattcagcgattctgcatcgggaacatgaaccgcttcgtggacatttacagtggctctggcgatcaacttgcgcagctgggaggcgatggtattacagctgtccccgcggtggcggtattccacagaagcaagaactgggttgccggtgggacggcaagtgggaagatttgtttatggatgtagaggcgtggagaggcttctttcc

SEQ ID NO: 17858 - DNA, 525 bp, Emericella nidulans
acgcggcccatattcgaggcagagaacccgtcctctgcagtgtgcgtcgcggactcgcgcgtcgtggtctacgagcacgtcgccgagagcaagaagatctggatcaagggggaggacttctctatcacgaacctcgtcatggatcgtaaattgggtccgcagttcggagacggccccgttgcgagtttccgtctttccccgcaggattaccatcgctaccatagtccggtttcagggaagatcaaggtctttcgcagtatgccgggggattactatgaggttgatccgctggctatccggagcggcgtcgatattctgacgcggaatgcaagggactatgtggtcattgagacggaggagttcggcgaggtgctctttgttgctattggggctagccaagtgggcactgttgagtatgtttcctgccctaatcctgccctgctctatcatctagatatacactcttgatgaaggatgctgacgacggtaggatccacgagaaatggcagaaacccggtgcggaaa

SEQ ID NO: 17859 - DNA, 528 bp, Emericella nidulans
ggtggttccattttgactggtgtcctcaagttgaacgatgaaatcgaaattcgaccaggtctcgtcactaaggacgagaacggcaagatccagtgtcgccctatcttctcgcgggttgtgtctttgtttgccgaacacaacgacctgaaattcgctgtccccggtggattgatcggtgttggtactcgtgttgaccctactctttgccgtgccgatcgcctggttggtttcgtcctcggtcaccgtgggcgccttcccgctatctacacagagctagaggtcaattactttttgctgcgccgacttttgggtgtcaagactgccgacggcaagcaggccaaggtcgccaagctggctaagaacgaggttctcatggttaatatcggctctacagctaccggtgcgaaggtggtcggtgtcaaggctgatgctgctaagctgagcttgactagcccagcctgtactgaggttggcgagaagattgccattagtcgaagaattgagaagcactggcgtttgattggttgg

SEQ ID NO: 17860 - DNA, 528 bp, Emericella nidulans
tcctcctcacgaccccaacctacaacttcctcctccttgcgcgtcttcccggcggcgaagccttcgaacttcccgacctgatcttctcccgtgtcgccttggtcttcatcattctcgagttctttgccgaccagcaacaatggagattccagaatgccaagcacgaatacaacacctccgccaggatccccggtaaccttaaggaccagtatgaccctgaagatcttgagcgtggcttcgtcgtcagcgggttgtggtcgctctcccgccatcccaactttgccgcggaacaggccatttggctcactctttacctctggaacgcctaccgaactgagcattatgtccagtggactgccctaggcgtcatcggccttatggctatcttccaaggaagcgtccgcctcactgaggagatcagtgctagaaagtacccagagtaccaagaataccaggctcgcgtcggaagattcattcctcgtctatctattacgcctaggtgcaaaggcaacaaaaacaagaagaggg

SEQ ID NO: 17861 - DNA, 532 bp, Emericella nidulans
tctgctactacattttatgacttcgagcctgttgacagtaggtcctcacccgtctcttttgtgtaccccgctctctttcacctccgccagacaaacactaacctccactctccaatagagaaaggcgaagcttatcccctcaaccagctaaagggcaaagttatccttgtcgtcaacaccgcgtcgaaatgcggtttcacgcctcaattcaaaggcctcgagaccctttaccagtccatcaaagccaagcgccccgatgacttcgttatccttggtttcccctgcaaccagtttggcggtcaggacccgggctccaacgaccagattcaggaattctgtcaattgaactacggcgttaccttccccgttctcggcaagacggaggtcaacggagataatgcgaaccctctttggacttggctgaaagagagccagcctggtctgttggggttgaagaggataaagtggaactttgagaaattcctgatttccgcggatggccaggttggtgggaggtgggctagtaccacca

SEQ ID NO: 17862 - DNA, 532 bp, Emericella nidulans
tgcacgcggtgaacagagcagcagctctgcggcggcctcgccatatgtggttgctatgaagcatctggggatcagtgtcttgcccgatattgttaacgcactcatcttcacaagcattttgtcagctggtaacacgtacactttctgcgcgatgcggagtctctacggcatggcgcttgaaggcagggcacctggattcttgagaaaatgcaccaagggaggaataccaatctattgtctcggtgtcacaacgttgctctcgtgccttgcatttcttcaggaatcgagaagctcccacgttgtgctgcaatggttcgtcaacctagttacagctggctgtataatcagctttatcgtcatctgtatcacctacctacggttcttccgggcgtgcaaggtccagggcgttgaccggaagaattttccatactatgcctacctccagccatacggggcctggcttggccttttctggacggtctttgtggttctgggatatgggtactctagtttcaccccatggaatgtgggc

SEQ ID NO: 17863 - DNA, 533 bp, Emericella nidulans
tggcgatgcgacatcaaaggtttccacattaaatgctggatacatctggatgttgataaactgcctctgcacgtcatcttacgttctcggaatgcgcaaacgaatcaagctgaccaacttcgaggattttgatagtcagtggccggacttcacaacacctggcttgtcttctaacattgtcatcctagccatgttctacaacaatcttctctcaattcccgttctgatcgtctgttccggcatcttggaagactggtcccctgcgaatgtcgcccgtaacttcccgtctgctgaccgcaacggcatcatgtttgcgatgattctgtctggactgtccacggtttttatctcatatacctccgcctggtgtgttcgcgtcacatcgtcgaccacttattccatggttggcgctctcaacaagcttcctatcgcactttctggcctaattttcttcgacgctcctgtcacgtttcctagcgtttcggccatcatggttgggtttgtaagtggtatcgtgtacgccgttgccaaga

SEQ ID NO: 17864 - DNA, 533 bp, Emericella nidulans
ggtcacgagtttttcgcggaggtctcggaagattttattgaagacgactttaatctgaccgggctgcagtctcaggtgccgatgtacaaggaagccttggaaatgatactggacgtggagcctgaagaggatgaagaggaggaggaagaggaggaagaggaggaagatgaggatgagatacttggtgatgagaagccgcccggttaccgaagagagcgaagacacacaagggttgcaagcgacctgagtatgatcgagacctctgcagagctgctttacggtttgatccaccaacggtacatcacttcacgtcccggtatccagcagatgctagagaagtacgagttgcaacatttcggagtctgcccgcgagtgcactgcaatgggtgcaaagtgcttcctgtgggccgttccgacacgccaggccaagagaccgtgaagctcttctgtcctagctgccaggacctgtatacgcctcccaacagccgatttcactcggtcgatggtgctttcttcggcaccacattcggctg

SEQ ID NO: 17865 - DNA, 535 bp, Emericella nidulans
tcattccaaaccgctctgtgggattacattccagatgggccatatgacgatgtcgctcatctacgcgccgattttgctgctagagagatttcaaaagatcccgtcttcttcgcgataatcgatacgcgcccatctcgcccgacaactgggaacgcgatcggctacatcgcattcatgaacatatcccccgaacacaggcgcattgagataggacatgtgatttttaccatggcactgcagcgtacaattggcgcaacggaggccgtctaccttctcctacagcatgcgattgaagagctggggtacagacgtgtggagtggaagtgtaatgcgcttaatgaggggtccaggcgtgcggcactccgcctggggttccaatttgagggtgtctttcgtcagcatatggttgttaaggggcggaatcgggatacggcgtggttctcgatcgtaagggaggagtggccggaactcaagaaggcgttcgatggttggcttgacgaggggaatttcgatgagaacggagcgcaacggagga

SEQ ID NO: 17866 - DNA, 537 bp, Emericella nidulans
atccgatcaatcgaatagtacggaactggacttgtgggccggatctagagcttctcccgttaattgacatagccaacatcgcgtgtggtttccacgctggcgatcctttgatcatgatggaaacagtacggaactgtaaagcccacaatattttggtgggtgcccatcccggcttaccggacatccaagggttcggacggcgcgaaatgaagctatccccggaagagctcactgcgatcactatctaccaagtgggagctctccaaggcttcctggatcgcgaaggggtgcgcctgaaccatgttaagcctcatggtgtcctttatggtatgatgtgcagggattatgaggtggcaaaggccgtcatgctggggattcccaaggggatccctgtgttcggcttaccagggaccaacatggaaaaggctgccaatgatctgggaattgaatttcgagctgagttctatggtgatgtcaagtacgactctaacggaatgcttgtcattgaccgcaagaagaagccatgggacctgcgga

SEQ ID NO: 17867 - DNA, 538 bp, Emericella nidulans
ggtgctctcgcgccaattccgagaaatcgcccgctctagagttgaagctttactcgcatcctttccaaaactcgcggattccggtacccagcatacgaccgtggagcaagacaatgtccgcttcgtttatcaaccctcgacgagctatacatcgtcctgatcacaaaccgccaatcgaacattctacaagacattgacagccttcacctcttcgcccaggtgaccaccagtatctgcaagagtctagacgaacgggagattctgcgcaatgcgtttgagttacttagcgcatatgatgagctggtgaccctcggttatagggagaatttgtctctgtcccaaatcaagacattcttggagatggagagtcacagaagagcgaatccaagaaattatagaaagggtatgccgtattatatggtaacgttcaaggagatactgagtgctcgcagaacaaagagctcgaggcgagcgaagaacgcaaaaggaaagccaaacaattggagatgcaacggaaagaagccgcacgcaactcacg

SEQ ID NO: 17868 - DNA, 538 bp, Emericella nidulans
gatatagatatgccgtctcgtactttcttcctattgtcctcatgcagggccttgaatttaatgttgcagaggcccagactcttactgctcctgtatgcgtccttccctccatgatcacggttacgtactgactctctgaaatagtgctttctatttggcacactcctcggtctaacagagtcttggctatccgataaatataagacgcgagggatagtagtagtcatcaacgccgctctccagataatgggggttgcgctcttggggtatgcgaaaaacaacggggtgcgatattttggggcttttatactggccggatcctgcaacgccaatatcccggcatcactaacttaccagtcgaataatatcacaggtcagtggcgaagagcgtttgggtcggccttgattgtcgctgccggcggcgttggcggcgttattgggggcttagtgtttcgtgaccgagacgcgcctgattatcggtacggttttatccttaaattctctttcttgggaaaggttgttgatgtgcctacagacc

SEQ ID NO: 17869 - DNA, 539 bp, Emericella nidulans
ggtcaagccggctctgtatcagctaaaattgatggacagcgtgctgaaggagactcagcggctgaagccgatttcaataggtagccttctccccaaagacgatataatgattccagtctctcatctaacaaaatcttgattcaggcacaatggtccgcaccacaacatcccccgtaacattcagcgacggtcttcaagtgcccgccaacacacgaacgctagtatcgtgccacaacatgtggacagagtccgtgcatgagaacccagaggtattcgacggatatagattcctcaagctgcggcagctccccggccaagaaaactggacccagctcgtttcaacgagtaacaatcatctgggcttcggacacgggatgcatgcatgtccagggcgattcttcgctgcgactacggctaaagtgctgattgcccatgtggtactaaagtacgatttgaaactactggacggtcagaagccggttattattgagcatggggcagcccagtatgccaatgtttggtgtccgatcggggtcagg

SEQ ID NO: 17870 - DNA, 541 bp, Emericella nidulans
acgacgctcgcacagtgctcgaagaccagaaaattggccactacctacacctcccaccgcggcaggtagttgggatccaaatcattgccaacatgctcgcactgcccgtaaactacggcgtgacgcgctgggttctcgccactaaattcgagtacgtgagcggccagaaaaccgatccgctcgttcaatggacagggcacgaattccaatcgtacaacacggctggtatccagtatgcgctcgttggacccaagaagctctttgcgtccgatttcttccgccctatactctggggattccttgcaggagcggtcgcaccgattctcatgtggctcctgcaccgtagattcccccgcgcacgcttcgatctctggaatacaaccatcttctttgcatctgcggcggttttctacggaaatctgagtacgggaccgtttacgacgttccttgtgggcacttttacgaacttctaccttttccggtatcgacgggtcttttggaacaaatgggcctacatcagtgggctgcgactgatacaggg

SEQ ID NO: 17871 - DNA, 541 bp, Emericella nidulans
caggcggtcgctcagctcaatgctctgcccggaatccagggcaaggcgattggcatcccgggaagcgccgccgagaccgatgaaatccaggccttggtcgacaaggtaaaaggaatcgagccaaagctcgacatcctggtcgccaatgccggggcgacatggggcggtccgttcgagacgtccccggactgggcgagcaagaaggtcgtcgacctgaatgtccgcggcgtcttcaacctcgtgcgcttgtacgctgtccctgggacccgaccatcacagtcaaagctaacggccatccagattcctccccctccttgaagcggccgggtcgcactcgtctcccgctcgcgttgtcatcgtcagctctgtcgccggctccgtcgtttcccatggcggcgacaacgggaccatcatgtactccatttccaaagcagcggcgacccatctggcccgcaacctcgctgttgagctcggtccaagaaatattacggcgaacagtctctcgcccggcttctttccgtcgaagctggcgaacgggttg

SEQ ID NO: 17872 - DNA, 549 bp, Emericella nidulans
cgctcgcacaataaccgcaccggactcgggccctgggcgcaacagcaaatgctcctcctctgcgcgccccccttactctccgcgagtatctacatgacgctgtcccggttgatgacagctctgaacgcagaagaacactcacccatccgtccgaaaagactgactgtgctctttgtgctcaacgacataatctgtctgctgacgcagctcgtcggcgcgggcctccaagtcacaggggacgagaaaatcataagtattgggaacaaagccgtcctggcagggttgatcttcacgctctttgtgtttggatggtttatttggattgcttctatgtttcatcgacggcttgaagcccatccgacggctatttcgcttgatgaagcaattggcaattggagggtttatatgggagttttgtatggagtctgcgggtcaatggttgttaggaatctggtaagaacaattgagtttgggagtccgcatggagcggatgtgagaagtcgcgaagtgtatatttatttgtttgatggagcgttgatggcatgtgtc

SEQ ID NO: 17873 - DNA, 551 bp, Emericella nidulans
gctgatcaagcaaggtttggtgacagttaacggacaagtggtgcgtgaactagcaaccactatcaagtcaggcgacaaggtcgaagttgaaggtcaacctatctacaacgaagaaaaggtctattatctgcttaacaaaccacgcggtgtcatttccagtgtaacagatgacaagggtcgcaagacggttgtcgacctcttgcccaatgtcaaagagcgcatttaccctgtgggtcgtttggactgggatacatcaggagtcttgattttgaccaatgatggggactttacagacgagatgattcaccctcgtaatgagattgacaaggtttatgtcgcgcgtgttaaaggtgtggccaataaggacaatcttcgccccttgacccgtggtcttgagattgatggtaagaaaaccaagccagctgtttatgaaattctcaaagtggacccagtcaaaaatcgctctgtggtgcagttgaccatccatgaagggcgtaaccatcaggttaaaaagatgtttgaagctgttggtcccaagtagataagttgtc

SEQ ID NO: 17874 - DNA, 552 bp, Emericella nidulans
ccaaaacattgccgccagcagttgtggtaaatggactgctgccgagctggtacaagcatcattgcttgatagcgcgatcaaagagagtctccggtttaacggcatcaacgctctttctcccacccgaatggtatgctcttcccaatcttaccatgtacatcagctaacactgctccaggtcgttgcaccagagggtaccacgctcctaacggtctcttcctcccatacggaaccaagatcggcatcccgcaatacgccgtccaccgcgacagcgacctatatcccaatcccgaccaatacaatccttaccgtttctatacaccgggtgccagccccgctcagctgcgcgaaagttcaatgacgaatacgagcgagtcctatgtcgtctttggtcacggccgccggcaatgtcccggccggtggatcttcgcccacattttcaagctcctaatcgccgagatgcttctcaaatacgaaataaagccctttcctacacggcccaaaattcaccgtaagtgtctcaaacctcgttgttggttcgtggactaaccc

SEQ ID NO: 17875 - DNA, 555 bp, Emericella nidulans
aaaagctaacctacacctccttgaaggaaaacaccttctgaatcagtggctccatttccagatgagcgggcagggaccttatttcggacaggccggatggtaagattgcgtgttgactttcatctctcaccctagtgtctacctactacttcttcatgtacccagcacgcagcagacaacacaagcgcaaccgctaacaactgttctacctacctaggttcaacgtcttgcatgctgaaaaacttccttccgcaattgagcggtacgagaatgaagttcatcgcatcctcggcgtgctcaacacagcactagaaggccgcaactggctcgtcggcgataaatgcacgttcgctgatttggccttcctcccctggaatgcccgcgtcaacatggtgcttctgacgcctgagggcgaagaccctcttgcgccgtacccgaatgtccaggcctggcagcgccgcatggaaatgcgcgagtcgtggcgtgaggcgatgcgtacgagagatcggctgatggacgaacaggggctgatgccgaacggaatgccgaaggggg

SEQ ID NO: 17876 - DNA, 557 bp, Emericella nidulans
gaaactatttctaaggcgtatggaaaccaggctgtcgttgtaagcgttgacccgaagcgcgtttatgtcagccaaccagaagacacgaaacaccgtacgatagaaacgaaatttcctaacgccgccgggcaaaatttctgttggtaccagtgtactataaagggtggcagagagaccagagacttagatgtctgccagctggtgcaagccgtcgaggcaatgggtgctggggagattctgctgaattgcattgataaagacgggagcaacagtggtttcgatcttgaactgatcaaccacgtcaaagctgcagtaaaaatacccgtgattgcctctagcggagctggtatgccgaagcattttgaggaagtttttgatcaaacgacgacagatgctgctctgggtgctgggatggtatgtatatatgtgtaccttttcctgtttctgtctactacagcaatactaattgaggtacagttccatcgtggtgagtatactgttggtgaagtcaagcaataccttgaggatagaggtttccttgttcgacgattcgagcc

SEQ ID NO: 17877 - DNA, 558 bp, Emericella nidulans
tcttgctgactcgcatagctcctcacgaggtcatcatcactccctctcctaaacaatacatgcacacatttcatctccgtaattctctcggcacgcggccttcaagaaggcaaagattcattccctgttttccatgttaacccgggttcgactctggcccatacggtggctaaagttgtagccactaggtcacatcggtaggtttgccgtccttcagcggttatgcagtgctgacttttgtagtttatgggttaccgatccatactcaccgtcgtcatcgggacctcctactccatcgcactcaacggtgcacattccactctatccgactggaagcaccagcgcacagtcgccgccccaatctcccaacgcaccggtggcccatgtgcagccggcgggccaatctacggcaggtccatatgtgaatccggcaccccttacgccgtcgattccagcgtctgctctgccgggggcccggttgtcaggacgccttgtgggcgtagtgagcctaacagacgtgttgaacctgcatgctcgagccagcggattaagcccagc

SEQ ID NO: 17878 - DNA, 558 bp, Emericella nidulans
cggctgggcgaagattgtgcggctgcacacagttcccagcaacttccgagctctgctctgtgctgcgggctaatggtcctctcccagatttctggattcaatacactgatgtattactcctccacgatattctcgttggtgggattcaccagtccaacacgcgtcggcctcgttgtggctgggacgaacctgatcatgacttttgccaatatgatcttggtagatcgccttggccgccgacgtctgcttctgtccaccgtctggggaatgagcgccggcctgatagctgtttcggtggctttcagtttcatccatgttgatgtgaacgcaacggaagtcactcctcagtccgtgactacgcccgccatcgtggtgttaatattcattatctggtttgtggtcttttacggcgtatcggtggggaacacggcatggatgtctgccgacttcttccctctagaagttcgagcaatggggaccatgtggatgacttgttcgtcgtgggcgagcaatgtcatcgtctccagtacattcttgtccatgaccaacgccatgacg

SEQ ID NO: 17879 - DNA, 560 bp, Emericella nidulans
tgcgggcaagaactgggtcaagatctacgaggacggatacaacgatggtacatgggctgtcgacactctcatcgcaaacaagggcaagcactcggtgaccgtccccgacgtgccggccggtaactacctcttccgccctgagatcattgccctgcatgagggcaaccgcgagggaggcgcgcagctctacatggagtgcgtccagttcaaggtcacctctgacggtaccactcagctgccggagggtgtcagtctgccgggtgcctacactgccaccgacgagggaattctcttcgacatctacagctcctttgactcctaccccatccctggcccggccgtttgggacggcgcttcgtctggctctggctcttctggctctggctccagctccagtgctgccgctacatccagcgctgagaagactgctacctccaccactgccgctgccacaaccaccgctgttgcgacgtccacctcgtctgccactcaggtccaacccacctccgtggcgaccttcaccaccagcgtccgacccaccacctccgctgcccccacta

SEQ ID NO: 17880 - DNA, 561 bp, Emericella nidulans
ggtgtgttcatgggtttgaattctggacaggtcttgctcgatcagttcttccctgaggcagcggaggcgatctctcatctggatctgggacacgggccactctcacagccatggggtagacgttcttggacccagcattcacgctgcctggcttgcggcaggctccattgttgtgaaggagtggctctatcatgccagtgagtttgcgctaggttcttttcaattgaaactatgctaaccactatctgccaaccagcgatgaaaatcgcagttgaacgcaaatcgtccgtcctagcgtcaaacgctgtccaccaccgagtcgattccctcaccagcattgtcgctctattcaccattggcggaacctaccttttccaagacgcctcctggctggaccccgtaggcggactactcatttcgctcatggttatcaaggccggatggggaaatactcgtacatcgcttctcgaattggcagacacgacggtcgatgatgaaatcaagactgccgtgcataaggctgccgccaaagctctcagtaccatcaacgaaggcggcctt

SEQ ID NO: 17881 - DNA, 563 bp, Emericella nidulans
gctgcctcggggattgatcgctcacaaatatttttcactaccaagattccgccagactcgatggggtataatgccacgaaacgggctatcgactcgagtctacggactgcagagcaggaatacttcgacctgtgggttgcgccgacctaactcaaagaatcccctcagctaataggcatgtagaatcctccttcacgccccttacggcggcaaagaagcccgacggggctcatggaaagcgcttgttgaggcccagagagccggaaagacaaagtcaattggtgtgtctaactatggtatccaccatctcgacgagcttgaagcatacatccagtccagtggcgatgacggtgtgagagaaagtaagattgatgttgggcagtatgagttacatccatggctcgatcggtcggaaattgtcgagtggttgcagaaaagaaatattattgtccaggcttattcaccgctagcgcatgggacgaggatgcgagagccattgttgaagaagttggggtacaagtatggaaaatcgccagcgcagattatgattcgatggggattgc

SEQ ID NO: 17882 - DNA, 563 bp, Emericella nidulans
ccgaagttaccggcgaaggtccgccgccggacaaagtgaaaccaaatttcgcaaacacgggccgtctcgccgcagaatctaacgctgtaactgtcaacggcgacaccgtcgttctgaaataccacgaaccccccgaggcgcgcaagccgccgcctaaagaatcctggcgcctctacgtcttcaagggtgaggatctgctggaaatggtggagctgaacgagcgaagttgctggcttatcggtcgtgagcggttagtcgttgacttcccgcttgaccatcctagctgctcgaagcagcatgcggctatacagttccggtttgtggagaaacgaaatgagtttggagatcgggttgggaaagttaagccatatcttattgacttagagagcgcgaatggatcaactgttaatggggatccagctccgccaggacggtatatggaattgcgggataaagatatgctgaagtttggaaatagttctcgagagtacgttctcatgctggacaagccgaacacataacattcacttcacttattagatttgaatgagaaacatcgcgat

SEQ ID NO: 17883 - DNA, 563 bp, Emericella nidulans
cattaagatgcaatgtcgacttgttgaagatgatacagctcgggatcacgcttttttcgccgaaaggggaagtcccaccgccagatgccaccgatgcgaatggccagccattaggaaatggcctggtacctgcaccttgcacatggcagttcaacttccggttttcactagaagaggacatgtacgcacaggaatcaacggcaatgttagcaaaagccggcattgactttgcaacgcatgagaagaacggtatcgacccgcttgaatttggagcactgctgattagctctggactggtattattggatgatgtccattggatctcgttccattccgggtacgactttggctacctgatgaagattatgctctgtcaagcgcttccagagaatgaggaagaattccataagctcctcaacatcttcttcccatcgctatatgacatcaaatacttgatgaaacacgcaacacgcaaccaagctgtcaatgactcaccactaactccggctgctgctcagatcatctccaatctcgggcaaaagtctgggcttcaggacatcgca

SEQ ID NO: 17884 - DNA, 567 bp, Emericella nidulans
gcttcgaatccgctgccagacttacccctcacctgccgccgctgcaaggaacgctccgtctttgaggggctcgcagcctcaatccacatgtgtaaacccaccggcttgttctgccctaactcttcttgtggaaacccaatctcaactctcaccatcatcgcccagctcgagagtcagatccgcgcccagacctcaaagtactacgagggatggcttgtctgcgacgaatcaacatgcggcaaccgaacacgccaaatcagcgtgtatgggcaccgctgtctgggtccgcgtgggcaggcagaagggtgcctgggacgcatggcgtacgagtattccgagaagcagatgtacaaccagctattgtacttcgccagcctatgggacgtcgataaggcgcgggccgcggcggagaaagagagcaatgaggagaagaaggatagcattgcagctttggtggagttcaatcgggtacgctttgggacgataaagggggtcgttgatgcttacttgaagaagtgtggaaggcaatgggttgagatggatgccttgtttaagtttatgttggct

SEQ ID NO: 17885 - DNA, 567 bp, Emericella nidulans
tcccgtctcgttgagaaaatgcaatatatccggccaggtccgctgttcgatgagaacaccaacttcgggccccttagctcggccgtccaccaggagaaagtcaccgcttatattcgccacggcattgagcaggacaaggccacccttctttacggaggccttggcaagccttctctgccgaaagacctcgaagcaggcttctgggtccgtccgacgatcttcaccgattgcacggacgacatgcgtatcgtcaaggaggaaatttttgggcctgttatgtcaattctgacctacgactctgtggaagaagcagtcaagcgcgccaatacgacggagctgggtcttgccgccggtgtcttcacgaaggacctcaacctagcacaccgcattattgaccagctcgaggcaggtatcacctgggtgaacacatggggcgagagtcctgctgagatggccgtcggtggctggaagaagagcggtcttggcgtggaaaatggtcgtcgcggtattgaggcctgggttcggaataagagcacccttgtcgatatgggcaatgctgttgcgacg

SEQ ID NO: 17886 - DNA, 573 bp, Emericella nidulans
tccagctgcaccacctccaccaccccctgcagcggccgcacctcgaccacctccaccacctcctacgcgtcccactccaccaccaccccctccgtctgctacagctccaccatcactccccaatggagcgtctccggcatctctagcagttcaggctgcgcggaatgctcttggacacagtagtcagaccccgtcaatacctccccctccgcctccccttccggctgcctcagcgccttctgctcctccccctcctcctccatctgctcctccgtccgcccccccatccgcccctccaagcgaaccaccatcgcgaccacattcccacgaaactcagtccagccatataccagaccgctccagtctggcccctagtgcttatactctatccaatggcggttcatcaccgggctcaagtgccaccagcttaggggcacacgggatcgtccgcattgaagattccagattcaaattccagaatgaggggctatttccaaagccacgaccgttcgttggtggtaccaagcggtaccgcgccggtaggggaagcagtgtgccgttggatctcagcgc

SEQ ID NO: 17887 - DNA, 576 bp, Emericella nidulans
ccttgcgaccggggtctacggcatcgtcaactgcgctcagcactctaccagccctcttcttcatcgataaggtcggtcgccgcgtgctcctgatgctggcgccactggcacttgtatctccctcgttattgtgggagcgattgtcggggcgtatggtgccagcctcgtggaccacaaggccgctggctgggctgggattgcgtttatttatatctatgacgtgaacttctcttattcctttggtaggtcattgagtctcgtttagatatcaggcagagcataaagagggaaaaaaactgactactactgtatagcgcccatcgggtgggttctcccctccgaaatctttaacctctctatccggtcaaaggccatttccatcacgacctctgcgacttggatgtgcaacttgtgagttttacactttctgaaagaaaaatatcaccgtctggcaagcttcttatacctttgttcgcagtattatcgggctcgtcacaccagacatgctggactcgatctcctggggcacgtacattttcttcgcggcattttgtcttctcgcgctcgcattcacgt

SEQ ID NO: 17888 - DNA, 577 bp, Emericella nidulans
gccagacgcgacgcaaagagattgaggcctatatgcgaagggccgcgccggccaaataccatgaccttctcatcccagactttgaagtcggctgcaaggtatacctcttcttcctctaatgtgactgtctactgtgaacctgctaatgttatcagcgtcggatcttcgattgcggttacctcgactccttgcacaatgataagtatctcctcacggacgccaagatcctcgaaatcaccccggaaggtatacaaacctcgaacggactcattgaggcagacgtgatcgtccttgcgaccggattcaatacgaacactttcctcccgggtatgcaagttcatggtcgagatggcataaccgttgacgaacactggagccgccagggcggtccaggggcatacaatacctgcgcgatgaacggcttcccgaacttcttcgtcctactgggaccaaatacggtaacgggccatacgtcggctgttatggctgctgagaagtatgcactaaacgtccacctgatatggtatttgttaactcgggctatagctcggtaaattacgcacttcgcgtcctaaaa

SEQ ID NO: 17889 - DNA, 579 bp, Emericella nidulans
gcggtctgggcgcagatttaggtctaactgacccggtgtttcaaaaacgctgccgcgaagaggatcgaccccgagaaagacgtcgtggcagcctcgaccaaatggatcgactccgtctggcatggacgcgcctggacgtgggagaaaattccttggctgattaagacgtggaaagagatatctggtggtcgaccattcgctatcaaggggattcaatccgtaccggatgcaaagaagtgcgttgagctcggtgtcgacgggattgtggtgagtaatcatgcgggccggcagtcgacggtgcaattgcgtctcttgatgcgctcgagaatattgcgaatccgttggcgaccagatctatatcatgtatgattcgggtgtgaggggggcaagcgatgttggcaaggcattggcactgggcgcgaagtttgtgtttgtggggaggttgtggatttgggggttaagtataatgggagaggaaggggtgaggcatgttatgaagagtttgctagcagattttgatattctgatggctgtgggagggtttaagagcgtgaaagactttgaccggtcgatcctcgg

SEQ ID NO: 17890 - DNA, 581 bp, Emericella nidulans
cgaaaccagaattagcctaagatgaacatctctggagagatatagttaactgaccgatgtcacactagtaaatgaacgctctccgcctctaggcggatgaggcccatgagaaaaatgaggaactcaaggccagggtgaagaccttggagcaggagaacctggcgaaggagcaagagatcacatccctcacccaccgcaaccaactcctcgaggctgaggtggagaagctggagtcttccgcaaaggaggccaaggatgccgcgagccagagcgcccagcacgatacccagaacgaagcgctgcagaggcgtatacagctgctagaggaggaggctgaggaggctgaccgaaatctgcgcgagacaaacgagaagtatgctccctttctttgtcacccttttctagcggtcaaggttaaccattatctctgaaggctccgccaaacagacgtcaaggctggccactacgaacgcaaggtgcaggctctcgagacatctcgtgacgaatgggagaggaagtacgaggagatggcagcgaaacacgagagcttgaagaaggaacttgcggagctcgagctctcc

SEQ ID NO: 17891 - DNA, 582 bp, Emericella nidulans
tgttatcttcgcgattgactcctctgctgatgttaacgactggccgaacggcactgctctcgtcgccacctacgagcgcagtctgaattccaccggtattggcaacggaactgagttccctgcaattcccgaccagaacaccatcgtcaacctgggattgaacactcgtccaactttcttcggatgcgacagcactaacacctccgctccgctggtcgtctacatcgccaatcgccccttcgtctaccagtctgaagaaaccatatccaatttctcgaccttccagctcagcacctcactcgaacaaagagacaacagtatccaaaatggctatgctgttgcaacaatgggtaacagcactgaagacagcaactggtctgcttgcgttggctgtgcgatcctcagccgctcgtttgaccgcaccaacgagcaggttcctgatatctgcacccaatgcttcgacagatactgctggaatggaaccctcaacagcaccacacctgccccttactaccctgctgccgttctgggtagcggctcttccaagcttttcccaacagttttgtcgagtgtcgtggcggc

SEQ ID NO: 17892 - DNA, 582 bp, Emericella nidulans
gctggaggcgggctcggatacaacttccagcacgctttacgcattcgtccaggcgatgctgctgtatcctgagattcagcgcaaagcccaggctgagattgaccgtgttatcggtccggaccgattgccggtcatggatgacctcgccgacctccagtacattcgcagttgcatgaaggagacccttcgctggatgccaaccactatcctcggagccgttcctcatgccgtcacccaggatgacagctacatgggctacttcatccccaagggtgctggtgtcatgaacaatgtctgggccatccaccacgacgagaagcgacatcccaacccgcgacagttcaacccagaccggtataaagacgacacacagagcctcggtgacgcagctgctaatccagatgcctccaagcgcgacgctttcacttttggtgccgggcgcaggatctgtccaggcatccatgttgcggagcgcagtctgttcttgggaatgagtagaattctgtgggcgtttaacatttcgccgaagaaggacgcaagtggcaaggagattattccagaccaggaacgcttgacacaggg

SEQ ID NO: 17893 - DNA, 584 bp, Emericella nidulans
ttgtatctggctaactctgtcaaagctaaaaaactaggtgaaggtacatacgctgtagtctatctcggccacgtccgatccgatcctacttcattcgtcgccataaaaaagataaaagtcaatacggaatacagagatggattatccatggacgcaattcgggaagtgaaatatctccaggagctctcccatcccaatgtcattgcgctccatgacgtattctcgtcaaaggaccagaatctcaaccttgtcctggagtacttaccacgcggtgacttggagatgcttatcaaggacagcgatatccactatggtgctgccgatgtgaaagcttggatgggaatgcttatccgcggggtctggttttgtcatgagaactttgtcctgcatcgtgatatcaagccaaataacttgcttattgcctcggacggggaagtcaagttagctgatttcggtctggccagatcgtttgctgacccttatatgaacatgactcaccaagtgatcacacgatggtaccgaccacctgaacttctgtatggtgccgccaatattctggcgctgtggatatttggtcagtggga

SEQ ID NO: 17894 - DNA, 584 bp, Emericella nidulans; identical to SEQ ID NO: 16315

SEQ ID NO: 17895 - DNA, 586 bp, Emericella nidulans
cggctgggaaatccagacctctgctgagcacggcgcacgcctgtgggaggcgattttcagcgcaggcaaaaggcatggcctcatcgccactgggcgggcggcatacaaccccctccgtatcgagaagggctatcgcacgtatggagttgacatggccaccgagcatgatccatacgaggccgggctaggatccgccattgccaacttgaagctggagggcacgagtaagaaagcggaatttgttggtaaggctgcgttacgagctcgcggcaagaaagctctaacccgccgtctgacttgtctgacggttgatgatggaatgtccatggttatgggcaaggagccggtctatcttagcgggaatgctgtaggatatgtcacgaatgcggcttttggatatactatcaggaagccagtagtctatgcctgggtgcctgctgggctgaatgaaggggtgggcgtcgagattgggtattttggaaagaaaattaaggccactgttgttggggagccggtggttgatccggaggggaagagactggctggtccggctgaggaggaaaataagatgaagagtccgcttagg

SEQ ID NO: 17896 - DNA, 591 bp, Emericella nidulans
ggaaggcctccctcggcctaaacaccggcgagcccaccggagaccccaacgacccccgaacatgtatcatcaaaaccctagcgcttgaagttcaaggccgtccggatgttgttatcgatgtctctgccccgggcgcgctcgagaagctgaaggacaagcccttcactatcaaggaggcagcccacttccgcattaagtcgacctttgaggtccaccacgatgttctgagcggcctcaagtacctccaggttgtcaagcgcaagggtatccgggttagcaaggatcaggagatgcttgtaagtttgggagaatagcgaaggccatgtcaggacaggtttatagaatgtgctaactggtattagggaagttatgcgccatgcactacaggaaagccaatttacgagaagaagtgtaagtcttttctttctcctatggagcgcctccaatactgactcttgcatctttcagtccaagaagaggaggccccctcggggatgatggctcgcggccactacaacgcggaatcgaagtttatcgacgacgatgacaaagtgcatctccacttccactggtccttcgacattgcgaagg

SEQ ID NO: 17897 - DNA, 592 bp, Emericella nidulans
ctgaacttttctgacagtggtagggcttttcatggtcccgtccttattcccaccaacggtccaaatggagctgctcaaccgcctgttccaccgagatctctccaacagtgcacacaagacgaatctccatctccactacgatgtaatgtaccctgtgcggacggacggcggaattgagtaccgtgacacgactacctcgctaaacgagtcctatcaacaaccgatctcttttttccaggacatccagacacggacattctatcccaaggatccagaggtacataagccacttagcatgcaaagtgttttgaccaagaagcttcgttgggtcactctgggtggtcagtacgattggactgccaaggaatacccggccgagcgcccgcctgcttttcctgaagacattgcagagcttctccgagcagcttttcctgagaccgaacccgaagccgctatcttgaatctatactctcccggaaacaccttgagcccgcaccgtgacgtcagtgaagaatgtgacgcaggccttatcagtgttagttttggctgcgatggtctgtttcttatcagtcacgatgacggcgccgggtgt

SEQ ID NO: 17898 - DNA, 593 bp, Emericella nidulans
gccctgccgtaccgttgcatagagtgagtctagaagatgcgatgaagctcttattactgacttgagaccagttacctcaatttcaagggttgcgaggaggaaggcctctatcgtgtgccggggagtggcaaagaagtgaagcactggcagagacgctttgatacaggtgagtgccacgttcctatcctaatccggccatgtgctcaccaaacccgcagaactcgacataagcctttttgatgaaccagatttgtatgacatcaacaccattggctcgctcttcaaagcctggcttcgtgaattacccgatgaactattcccgaaagagactcaagccatgatcgctgaaaaatgcgagggtgctaccacccgtccgcaaatgctcaaggatgaactctccaaattgcccccttatcattactaccttctcttcgctataacctgccacctcaaccttctccactcatacgtcgaccaaaacaaaatggattaccgcaacctttgcatttgcttccaaccctgcatgaaaatagatgcattctgttttcaatttctggtatgcgactggaagaattgctggcaaggttgctgga

SEQ ID NO: 17899 - DNA, 593 bp, Emericella nidulans
tcaacgtcgtcatcccgcaaattacaccgctgtcaaaaggcgagatattaggctgcacctccccttccctatctgctcagcaaattgactacttgctgtacctcggtgacggccgcttccacctcgaatctgccatgatccataacccctccatacccgctaaccgcgacgatccttactctcgcaccctcagccgcgaatcctatgaccacaccgaaatgcacaccctccgccgcgatgccatcgccgccgcccgcactgcgaaaaaatggggtatcattcttggctccctcggtcgtcagggaaacccacatacgatggccatgattgagtcgcacctcaacgagaggggtatccccttcgtcaatttgcttttgagcgagatctttcccggaaagttggcggcaatgtcggatgtagagtgttgggtgcagattgcttgtccgcgattaagtatcgattggggttatgcgttcccgagaccgctattgacgccctacgaggcgcttattgcacttggggttcgagacgactgggagaagacgcatgaaggtgtttatccaatggatttctatgcgaaagatggtttgggg

SEQ ID NO: 17900 - DNA, 594 bp, Emericella nidulans
tgacgctcggtctgccttggtatgttccagccatgaaaccaacccaatccgattcaatacaagctttaccccgaacatcaagcatcgaacgtcggatataatcaattcctcaaatcgctctaccctcacctacattcaccaatacacacgattacacttcgaaaaacaaggaaaagcaaagactaacattcgaacagcggcgccgtcctcaactgctgcgacaactcaggtgcccgtaacctctacatcatctccgtcaagggcattggtgcgcgtgggaaccgtttacccgccgccggggtcggtgacatggtcatggccaccgtcaagaagggaaagcccgagcttcgtaagaaggttatgcccgctgtcgttgtccgccagagcaagccctggcgccgacctgacggcatctacctctacttcgaggacaatgccggtgttgtatgtttcactcctacaggctcacatgcttcgccatatcggccataatttatctaggctattcaggtgaaaattgtctaacatgaaatccgtttagatcgtcaatgccaagggtgaaatgaagggttccgctattaccggccccgtcgg

SEQ ID NO: 17901 - DNA, 597 bp, Emericella nidulans
gcggatctcgcacaggcaaaggcctctgctgccaggattttcatggcgcggacgccgtctgcaaccatcagtactcaagatcctgcaatcacacctccagacgcaagagcaccatcagatgcgagtcttgaattctgcagtgtttccttccgctatcccttccgcaaagcgccagtctttgcagacctcaatcttcgaatcgaaagcgggcaatttgttgcattcgtcgggccttcggggtgcgggaaatcaacactcatatccctgatagagcggttctacgagcccactgagggcagcatactgtttggaggagtgccgatcaacacgcttgatattgtatcctaccgcaggaacctatctctcgtcgcgcaagacccgaagctgttcaacgccactatacgcgagaatctctgtctgggaattgacccagacaatcatgaacaggaccatgaccgtgatctcgaggagaggatgatatccgcctgtacttccgccgagatccacccattcattctctccctgcccgatggctacaacacagtgctcggaacaaacgcctactcgtcggcatctctaagcggcgggcagaagcag

SEQ ID NO: 17902 - DNA, 597 bp, Emericella nidulans
cctctttgggttgcggttcgcggcaagggactggcgtatggtacgactttcgcctacaacatagatacgggtttcgtcaactttgacgtttaccgatcgcccaatgcccacaaggccttcgagtcaagcaaggatattgtacaagcacatctttctggggaggccccctttgacccgttgatgtttgagggcgcaatcagcagcattgtggtcactttcgcaaatgaacaagtaaccaccgccaatgcagctcagggaagcttcattcgtcaggttgtgcgctccttgccaagtgattacaaggagagaatcctccgggaggtccgtgataccagcgttgaggatgtcaagagagcactgcgcgagataatccttcctcttttctcatctgacacggcgaacattgtgattacgtgcacaactgtgcttcgagaggtatacttgtttttcttatgggatttgaaaatcagattactgaccttcacaatagacgatagagagtggtctcaaggaatccggtttctctccaaaggtccagccgctcaaggaatttgaggacgactatggactcaaagtcggagacggcagcgatgcaga

SEQ ID NO: 17903 - DNA, 598 bp, Emericella nidulans
cggcggttccacatcccaagatcatggggatcatccgagaatgtggaggcaagatgcacatgagcgaggagaactgggaggaggcgcaaagcgatttcttcgagtcgttccgaaactacgacgaagcgggctcgatgcagcgcattcaggtactcaagtatctggtgctgaccaccatgctgatgaaatcggacatcaatcccttccactcgcaggagacgaaaccgtacaagactgaccctcgcatctctgcaatgacggatttggttgacgccttccagagagatgacattcatgcatacgaggaggttttaagcaagaacccagacgtgctggccgaccccttcatcgcggagaacatcgacgaggttagccggaatatgaggaccaaggccatccttaaattgatcgcaccctacacgcggttcacgctcagctttatttcaaaacacatcaagatctcggtaacggaagcacaagatatcctgagcttcctgatcttagacaagaaactcaacgccaagattgaccaggaaagtgggacggttgtagtcgaaagcgcaagcgatgtggaacgactccggtccgtggaggagtg

SEQ ID NO: 17904 - DNA, 599 bp, Emericella nidulans
tcggtcggcctgattcttcagaagaatggcaagccagacgtggtgaatactccgaaattgacaaggaaacagcagaggccaaggattccaagaaccctgaccttcttaagttccgtgctgcaaatattgtcaaccactactactcctttgacttcttcaactccatcgagacctgggttcacaagctgccgcaccacatcgctcgaaagaagatacctagtgttaacatcgagagcggcgaggttgtcaagcccgagaagccgaatggtatcaagctggaacagttcatcttcgatgttttccccatgcttccccttgagaagtttgccagcattgaggtacgtcgagaagacgagttctcacctctaaagaacgctcgaggcactggggaggacgacccagacaccagcaagcgagacatcatgaaccagggtcagcgatggattgagagtgctggtggggttgttgtcactgagggagatgccgtgggtgttgaagtatctcctttgatcagttatgtaagtttcttgggctttcaaatattaactcgcgtgtttctaacaaacgtctgttgtagggtggagagggactcgagttcc

SEQ ID NO: 17905 - DNA, 599 bp, Emericella nidulans
gcagaaaggttccacgcgcttcgttcgtagcgcgctgcctggcgtcatatggctctctactcgtttgcacaatgtacgaagtggtggcctcgatcgtccaccgcgtggtggggtacggccgcatctcccaatgggccaccgcccgcagtttcaaatgggtgatgaggttcacgaccggcgtgcgctttgatatcgtcgagggtaaagagtacctctctacgcgccccgccgtcatcatcggcaatcaccaatccgaactcgatgttctcatgctcggcgagatcttcccgccttactgcagtgtcacggcgaagaagtcactccgttatgttcctttccttgggtggttcatggcgctctcccggaccgtgttcattgaccgtgccaaccggcaaacggccgtgaaggcatttgatagcgcagcggaggagatgcgcagtcaccgacagagtgtgtttattttcgccgagggtacgaggagttactcggagaagcccgaactcctacccttcaagaagggtgctttccacttggctgtcaaagcgggtgtgcctattgttcctgttgtcgtggagaactactcgcatatcctggcgccg

SEQ ID NO: 17906 - DNA, 599 bp, Emericella nidulans
agtattcttttgtacgtcttctttcctttcattctttttcagcccagactgactcccttcgactaggtctacttcggcttcacacactgcccggacatctgtcccgatgagctcgacaagatggctgaaattatcgacaaagtgaaagaggcgaacaagggcgagaacattttcgtcccggtcttcattacatgcgatcccgcgcgggatacgcccgaggtgctgcgcaactatctgcaggagttccacaaggatatcattggcttgacagggacgtacgagcaggtgaagcaggtgtgcaaggcgtaccgtgtgtatttcagtactccgcgcgatgtcaagcctggcgaggactatctagttgatcacagtatttacttttatcttatgggtgagtttttcccttctctattcgagagtgcaaatcaagttgtgaatcatactgacgttaatagatcctgagggcgactttgtcgagtgtatcggacggcaggatacgcccgagaccgcgacgaagacgatcatggagcatatcaatgactggaagagagagggaaagcccttaaagagggattagaatgttgcctttcctcgtccaa

SEQ ID NO: 17907 - DNA, 600 bp, Emericella nidulans
tttttgccgcgcctgtcattcgctaatccccctcaagagcctctaggccgcgtcgagttcaagctcttcgacgatgtcgttcccaagaccgctcgcaacttccgtgagctcgcgaccggtcagcacggcttcggctacaagggctctcccttccaccgtgtcattccccagttcatgctccagggtggtgacttcacccgccagaacgtgagtcgcagtctctctgggaaccgcgagatgcagagattctaaattttggctttttagggcactggcggcaagtccatctacggtgagaagttcgaggacgagaacttcacactcaagcacgacaggccttacctcctctccatggccaacgccggccgcaacaccaacggctctcagttcttcatcacggtgagtcgcgccattgataccggcagaagaagatgctaatgcgatactttctagaccgtcaagacttcatggctcgacggtgcccacgtcgtcttcggcgaggttgttaagggccaggaggtcgtcgatgctgttgagaagctcggctcccagagcggtgccaccaagaagaaggtcgtcatctctaacagcggtaccctc

SEQ ID NO: 17908 - DNA, 603 bp, Emericella nidulans
gcaagcgatcgatcttgtcctgaaagagctacacgtcgactcgattgatttacttattgtatcatttccggggatccattttgatgcggaagacgacagtgaggaagaagaaagtatctcggttgacggcgggagcagcttcgaacatgaagacgacttcgatagcctcgtgcagacgtggaaatgtcttgaatccttacatgagcaggggaagatactgcagcttggcgttgcggaatttggaagcgagcggttagcccgatttctggagcacacgcgcgttaagcccgcagtaaaccagatcaatttgaaggactgctgtgttgttccgaagagtttgattctgtatgcgaaggagcagaagatcgatttgttaacgcataatgattgtaacgatatcttgcccaaggggacgattagggagttgctggggcctggggagcggggggccgggatcctggctccaacgccggagttggatggcaaggatggtggtttggtcaagggggatattgagacgcaatgggtggttaagtatacggctgtggtgaaggaccgaggggttgttgagaacaagggctactttgcgcttgcggatgttgg

SEQ ID NO: 17909 - DNA, 604 bp, Emericella nidulans
gcatcggatacgaagcctgcaaggctttctacgagtctccgaagtcctacatcatcctcatgggctcccgctccctcgagaaaggcgaagcggccataaggaaaatcaaggaggtggtcccaaacagctcaaatactctcgagctcattcagctcgacgtcaccagcgacgagtctatccagaaagcgtacgagcagattctcaaaagcccggggcgtttagatgcgcttgttaacaacgccggtatatacttccctctatcggtaatcagatagtgcagagtcgctaatagacaaaaggagcaacctttgatttcgactacaatgccagcaaagttaccctccgcgagtgctttaacaaagcctacgacgttaacgtaaccggtgccacagtcctaacacacacgctcgccccgctcctcatcaaatcctctgacccccgcctcctcttcatagccggtctttccatgatgaccgtcgcaatgaaggagtacttcccgacgcctccgctgccagcgggctggccgaagaaggtcgaattcgagacaatcggggtaccggtgctctaagacggcgctgaatatgcttatgcttgactggaacca

SEQ ID NO: 17910 - DNA, 604 bp, Emericella nidulans
cccactcagtatacaaaaggcttggtcgactccttcaggggccaggtggagaggcaatcgactcactcttacgggtgccgcgttatccagagaatgcttgaattttgtgaagatgttgatcgcagattcatacttgctgagattcgtgcctgtgctccaaggcttattgaagatcagtatggcaactatgtgattcaacatataattcaatctggcgaggaagaggatcggtcgttcatgattgagatggtcaagcaaaagcttctctggtattcgaagcacaaattcgccagcaatgttgtcgagaaaagcattgagtttggaaatgaggcccaacgccaagacatcatcacgaggctgacagcaaagacggagggccatgaaacccagctcattgagttaatggctgatcaatacgggaattatgtgtttcgtaagttgctctatctcctattatccaagaaagtgttctctaatgaccctgcagaaaaggttcttggtcatctcagtggcgtggagcggctgcgcttgtggatcgcatcaaaccgttgctggtgcatctaaagaaatctaactgtggcaagcaaattgcggcgatcgaaaa

SEQ ID NO: 17911 - DNA, 605 bp, Emericella nidulans
cttcaaccactctatgaggtctactactttggtaagcgagccggaagcccggttcagttctcgatttgctctacccatacttaccaaccgtgaaggaatggccatagcgaagcagcaatttccctctcaatccgctgacctgaacccggcaacctgggcacttacctgcttgctgcacgacattggcacagccaaagagaacctcaccgcgacgcgcatgtcatttgatctctacggcggcatcaaggcgctgcaggttctcaaagaccacggcgcagccatcgaccaggccgaagcagccgctgaggcgatcatccggcaccaggacatgggcgttgacgggacgattacgttcctgggccagctgatccagctggccacgctgtatgacaatgttggcgctcacccgcgggtgaaggggtacgagaagctgatccacccgacgttccggcgcgaggttaatgaggcgcatccaagaataggatggtgtgggttcttttcaggcattattcggaaggaggaggagatcaagccatggtgccattcgacgcatattgttgattttgataagcagattgagggaaatgcactcatgaagcaatggg

SEQ ID NO: 17912 - DNA, 607 bp, Emericella nidulans
acatgagtttctaggtgagtctagagccgaatactcgagatattacaatttactaaatatggcagaattcgattttcgcacccttggcgatggccgtagcgctgccgttcggtatgcgaacaactccaactatcgcaatgactccctcatccgtaaagaaagtgagcaggacacaccgaaaatggtgctgcgcgttgctaatgggctggcgatagtgtgtgtgagctcggcaatgatccaggaagtcaagcgcattataaagaacagcgaaattttaaagtacgcatgcttgtcctattgtcatgatactgtccgtctaatacaaggctagggaggacgattcgaagtggcctcagaagaacaaggacggacgacaagaactggaaatccgattaggaaatgaacacatttcatttgaggtgtgttcttaaatgagtcgttgttagacttgctttctgacatggcgcagaccgcgaaaatcggctccctggtggatgtgacagaatcagcagacccggagggtcttcgagtgttctactacctagtgcaggatctgaaggcgctgatcttttccctgatatcgcttcacttcaaggtatgcttattc

SEQ ID NO: 17913 - DNA, 609 bp, Emericella nidulans
aacacctccctgctgaatatgcccaccggggtgactgtcgaccttgtctgcatttgctttctcttggatagcagccaagtggtctaatcgccggtgtcttgtcactatgatagcatcctgtgttcccgccatcggtgctatcatcgtctataccctgcctcgaagcaacattggcggtcagatggttggcatatacctggtactattcgtccgaccctctttctaagacattattcctgctaacctctcaagttatacacctacttcggcccctatgtcgtcggaatctcgatggcacaggcaaacaccgcgggcagcacgaagaagaccgtgcagtactccgttctgtatatcggatacgcggttggaaatctcatcggcccccagacgtttcgtgcgaaccaagcaccagcatataccgggggatttgtgtctatgcttgtctgttactgcgtatgcgtggccttgatggccggttactggtccattgccgtagtattgaaccgcagacgggtgaatgctgttgagactccagagagggatggagacttgcaagaggcgtttgctgatatgacggattttcagcaaaaggggttcaaatatactacg

SEQ ID NO: 17914 - DNA, 611 bp, Emericella nidulans
caccgtgcttctcgtccttctcgtcccgacaaggcccgtcgtctcggttacaaggctaagcagggatatgttatctaccgtgtccgtgtgcgccgcggtggccgcaagaggcccgttcccaagggtgccactacggtatgcattcctcgaatacttcatatggcacagagagtaggaggttaattgaagttttcgcatttagcaagcccaccaacatgggtgttaaccagctcaagtaccagcgtcgtctcgctcgtaccgctgaggagcgtgtcggtcgccgttgcgccaacctgcgtgtcctgaactcctactggatcaaccaggactccacctacaagtacttcgaggtcatccttgtcgacccccagcacaaggccatccgccgcgatccccgcatcaactggatctgcaacgccgttcacaaggtacgtcgtcatttatattggaagctcatatatctgtttgtacggggcatttgctaatgtagatctcatatagcaccgcgaggctcgtggtctcacctctaccggcaagaagtcccgtggtatcaacaagggtcaccgctacaacaacacctctggcggtcgccgacacacctggaagcgcca

SEQ ID NO: 17915 - DNA, 612 bp, Emericella nidulans
gaacgagtacgcccgcgctaacggcctgcgctcttctctgtctatcaagggctctggaatccgctgcgtcgcgacatggagagtgagattatcccaatgtgtagagaccagggcatgggtatagccccgtggggtcctcttgctcagggaaagctcaagactgccaaagctcggggagtaaaaggtggaggccgatcggacggggacatgacggaggatgagatccgcgtgtcggatgcccttgatgaagtcgcgaagagcagaaataccactctcgcggctgtggtatgtgtaactagtatctagatcctaacctgaagagaactgacaatcgcaggcccttgcatatctgctccacaagacaccatacgttttcccgatagtcgggcagaggaagatcgagcacctgaaagccaacgtgcaagctcttgagatcgagctgaccaaagaagatatggacaagatcgatgcggccgtaccgttcgatcctggtttcccaatgagcttcatcttccctggcaaatacgatttgacccttactgctgccgatgttcccttgacgcggaaggccggccatatcgatgcgccccctcaacagggaatagtgccccc

SEQ ID NO: 17916 - DNA, 612 bp, Emericella nidulans
tactcttattcatagtgaggtgctcaagggtggctatgctggtacagtcctgggtctcatcggtggctatgcaggtgtcttggccgcatcccgccgctatcacactatccgcaacatcagatttcccatgaaagcatttctcgtcacatcttccggaaccttcgttagcattagtggagctgaccgctcctcgcgcagcttcgaagctgcgcaaatccagaaccgacaatggtacgaaaaccgcgaggacactgcgcgcccaggaacttcgcggtatgagctttagcgatcgcgccctcgcctgggctagggaggaacgctacacaatcgttttctcgacatgggttgcttcgatgattggtagctttgcccttgtcgggcggaacccttatctttcgggccctcagaagctcgtccaggctcgtgtctatgcgcagggtgctacgcttgccgttcttatcgccagtgctgcattcgagatttccgagaggaggagggtcagacgggagcttgatgcgaagtctgcgagtgctaaggcggactctaagttgagtaacaacactggtgaagataccgagctatggaaggacatggtcgctgctgaggagcagc

SEQ ID NO: 17917 - DNA, 616 bp, Emericella nidulans
  unsure (1)..(616): unsure at all n locations
gctcaaccggctgggctccgacgaagggactatcctcttcgcggcgtcaacaccgcccactacaccggtcccctgcgaaccctccccgtcgtgaggtacaatggacactacatccacctctngctcacgctcacggggatgggcgtcgagtccgcctcggacgatattacaaagtcatactcggaaacgcggtccaccactggggagcaggaattccccttcgtcgcgctcctcgactccggcgcgactctcacgtacctcccctcgaacattgtcgcacagatcttttccgacctcgacgtgcacttgtacgaaccagagcaattcggctacgtaccgtgcgacacatacctcgttggccgagaagactacaatctgacgttcacattcagcggcgtgacgatccgcgttccactccgtgagcttgtgctgcgggatgcgatctccggccccggcagggacgcactccagctgcccaacaacgccgacgaggaaagctgcctattcggtattctgccgaataccgacctctttcccatactaggcgatacatttctcagaagtgcatatgtcgtctttgacttggataacaacgagatttcgcttgctcaggcca

SEQ ID NO: 17918 - DNA, 617 bp, Emericella nidulans
ccgcgcagttactcggtctggtgcatacgaagggcctcgagctcgttacgttcgatggagacgtaactttgtatgatgatggggctaatcttaatgctgatagccccgtcatcccacgaatcatccgcctccttcaacaaggcatcaaggtagggatcgtaactgcggcaggatataccgacgaggccaagtattatgaacgactgcaggggctgcttgatgtcatgcgcgatgcctctgatcttactgacgagcaacggtccgcactaattgtcatgggcggcgaaagcaattatcttttccgttatgacgcttcctctccacaccggctcacctacgtcccgcgcgagaattgggtgattggcgaaatggccacctgggaagaggaggatattacacaactactaaacatcgccgagtcgtctctccgcgcttgtgtcgcgaacctgaacctaccagtctccgtcctccgtaaagaccgtgcggtcggcgttttccccaagaacagaggccgcctatcccgcgaacagctagaagagaccgtcctcgtggtccaaaacacggtcgaaaggtcccaagtcggatcgcggctcccattttgcgcattcaacggttgc

SEQ ID NO: 17919 - DNA, 617 bp, Emericella nidulans
gaacatcgacggagtcaacacccttgcttgcttgtgtacgtggccgtcagaacgatagcagccttgatatgcagcaggagttaacaatggcaggccgtattcctactgacgccaccaaggaatcccgcatctacccgttgccacacacctacgtcgtcaaggatctcgttcccgatttgacccagatctacaagcagtacaagtcgatcaagccttacctgcagcgcgataccaagaccgaagatgtaaggactttcgattcggttaaggtgtgaaatgactgaccattccagggccttgagaaccgccagagccccgaggaccgcaagaagctggacggtctgtacgagtgcattctctgcttctgctgctcaacctcctgcccgtcgtactggtggaacagcgaggagtacctcggccctgccatcctcctccagtcctaccgatggttggccgattcgcgtgaccagaagaccgccgagcgcaagcacgccattgacaacagcatgagcgtgtaccgttgccacactatccttaactgcacacggacctgccccaagggtctgaaccctgcccgggctatttccgagatcaagaagatgttggctgctcactag

SEQ ID NO: 17920 - DNA, 619 bp, Emericella nidulans
tggacggtgttgcaggtcttcgtggatggcgctggatcatcatcctcgaaggattcctacctttgctctgggcatttctatctggtggtggctagctgattctcctgacaccgcgcactacctgaccatggccgagcgcgagctcatcgacgcccgcatgcgccgacagattggccacaccaaatcctccgatcagatgcacaagaaggacgtcatcgaaggtctgacggactggaaaatctggttgttcacaatcggccagtttggtggcgacacaatcctctacggatactcgactttcctcccgaccatcatccaaggactaggcgattggacctcagcagaagttcaggcgcttacaatcccttgctacgcgcttggtgccattagctacattgttactgcgtggttctcggatcgcacgcagaaacgcgctatatttaccgtattttttggcctcacctgtgcggcggggtatgccattctaatcagccctgcgcccggcggtgtcaagtactttggctgcttcctttcagccatgggactgtatgtgattgtcgggctgcctcttgcgtggcttcctagcaataaccccagatatgggaagcggaccgttgca

SEQ ID NO: 17921 - DNA, 619 bp, Emericella nidulans; identical to SEQ ID NO: 17920

SEQ ID NO: 17922 - DNA, 620 bp, Emericella nidulans
ccctatctgataccatcactcgattctgctcgcttcatgtgcatgttatgtttccttcagaactgacagacattgcaggtcgaagtcatcaaccctctgtcctcctcactgctaagccagttgtctacctggtcaacctgagcgagaaggactacatccggcagaagaacaagtatattcctaaactcatggagtggattaagaccaactcccctggagactctatccttcccatctccgcctctttcgaggagcgtcttacccagttcgagaccgaggcggaagccgaggaggagtgcaagaggctcggcactaaatctggtctacccaaggccatcgtgcaaatgcgccaggttctaaacttggccagtttcttcaccactggtgctgatgaagttcgccagtggaccatccggaagaacaccaaggcaccagccgcggccggtgtaatccacggtgactttgaaaagaccttcatccaagcaattgtttacaactacaacactcttcgggagtatggtgatgaagccgcggtcaaggctgctggtaaagtcatgaccaagggtaaggattatattgtcgaggatggtgatatccttttgattaaggctgcgctgccc

SEQ ID NO: 17923 - DNA, 624 bp, Emericella nidulans
tctggtgggcgctcagacattagggttattaacatcggaggtgctagcacttaccagcagtacgtcgtttctcccgcgcgatatgcaacgcctatacctgaggggatccctgatgagatcgctgcgccaattatgtgcagtgcgtcaacgatataccgttcgcttgtagaatcgaggctccaggcaggcgattgggctgttttccccggcggtggtgtatgtcgctcttatcatatgagtatgcctggtctccaggactgacagagccagggtggtgtcggcattcagggcgtccaactggcatcggctatcgcatgcgccccattgtcgttgatactggcgaggagaaaaagaatctagcgctcaagatgggcgctgaggccttcatcgacttcaagaccgtccctgacgcagccgcagccgtggttgaaatcgcggacggcataggtgggcacggtgttttcgtcacagcacaagctgcgtaccccactgcattggcatacctgggcacccgcattggcggggatttgatgtgtattggcattgcgccggccggaaccatgagtatccccgttgaccctaacttgttgctcttcaggaacacccggatacaagggacactgg

SEQ ID NO: 17924 - DNA, 626 bp, Emericella nidulans
gcatcgcccgcgaatacgacgccttcatcatccaccgcgcccagatgcgtgctcaataccttgtaccctccgcgcaaacccaacctggtgcagccaccccatcaccagcctcggaatctgacagcgcaattggcattggcaataacggagccggggcccataagactcctgccaacacctcgacggcaccagcagcagcctctgggcccggttcagcagcacccttccgcgtccgtccaagccttattgaacagtttatccgtgcgctgctgcatatgttgcagtttgcggtcgcgtactttgtgatgttgctggcaatgtacttcaacgggtacattattatttgtatcttcatcggagccttcctgggctcgttcatcttctcgtgggagtacattgggggtggaattaaggagtacgttgaccttattgccctcgctgccccgtctttctctgctatctctttggcttcaaatcaaacgattcgatgtcagtcgagatagccgagacctgagccttaagaattatcgctaacggagcgttaaacaaacaggaacgacgcaacggctgttacgaaatgctgcggttgatgtttcacatacgcatataatttagatccaataagc

SEQ ID NO: 17925 - DNA, 627 bp, Emericella nidulans
tcacgactggtgacgcatctgggctggtgcgcctcccaagacggccgtctcgttcttcgctccggaaaagaaaggtgtacaagccggcaactttaaacttgttcgcactattgagaagaagaccagcaatgctatttactggtctcctaagggccgtttcgtcgtggtggcgactgttcactcgcaatcaaactttgaccttgatttctgggatatggatttcgagggtgagaagaacgataacgagaaggatctagcggccaacctgcagctgatgaagaccgtcgaccactatggtgtcacagatattgaatgggatcccacaggtcgttacgttgtcagtggtgctagcgcgtggacgcaccaggtatgtctcgcaaaatgggttcctcatccagctaggttactaacactaatctttagatggaaaacggattcaaccttcacaccttctccggagagactcttgcggagaaccctacggacaagttcaagcagttcctctggcgtcctcgccctcctactcttctcagcaaagaagagcaaaagcaagtacggaagaacctccgcgagtactcgaaggaattcgaggaggaagacaagtatgctgtcgacattgccaacacc

SEQ ID NO: 17926 - DNA, 627 bp, Emericella nidulans
cgccggagagtgtccttgacgccatcgacgagtatgctcggacaagaaagtacctgatgaatgtcggtgaggataaggggaggatcgtgtgtgacttgattgcggaggtgaaaccaaagacaatggtatgtcccggttagtccgcggtatcgatccctagatcaagagagctaataaatggtcgcattcaggttgaactaggcggctatgtcggttactccagcatccttttcggggccgcagttcgcgccgccggtggaagtcggtattacagtttagaaatgaaccccgaattcgcggcggtgattatggccctcgtcgacctggcagggttatcggatgtcgtgaaagtggttattggaccaagcgatgtatcgatcgcgcgtctctacgaatcagccgcactaacgcatatcggcctgctgtttctagaccactataagcctgcatacacgactgacctgaagctctgcgaggaattgaaactgatcactcctggctccgttttagccgcggataatgtgatcaagcccgggaacccgccgtatcttgagtatgtacgacggagtgtggacgagaagaggaagcatctgggggtgtcgacgaatggtggtggtttcccgggaa

SEQ ID NO: 17927 - DNA, 627 bp, Emericella nidulans
tgctcctttcctggctttctgctcgacagtacgcaccagaggggggattcgccggaagaaccaataagctggtcgatggatgttatagtcactgggttggtagttgctggccgttgatccaatctgcgctggacggcgttcaggatgccgctggccctaagcctgctgttggcaatctttacagccgcgagggactgacaagatatatccttggctgctgtcagtcgaagaacggagggctccgtgataagcccgggaagtaggttgaccacggcctcgattattgcaagacactaatgtgagctctagacacccagactcatatcatacctgctacactcttactggcctaagctccgttcagcactaccactaccacaccaattccagcgttgttcccaacggacgtttttcgtcggcgttttcatggaaatatcggcctgcttgggattcggacgagaaagggtacgatgttaatgtctttgatgaaagtgaccgcctgaaggcttttcaccctctgtatgttattccccacaaggccgcagaaaatatgcgtctctggtttgaacagaagccttgggaaaatgttggagaatgaagcgtacagaagatgaaatggaaatagat

SEQ ID NO: 17928 - DNA, 627 bp, Emericella nidulans
aaaccatatcctcttttcagggtgcctggtatgtttttgtcacttgatctgttatgtacggagttgctaatgtttataggctatcataaatcatcagttgcatatgagtcgaccggtcatcggaggtataaccaaccgtttacctcgctcccatatgggccccaactcacccaaggcgatgtcgtgggtgtgggttaccggccccgctctggtacgatattcttcacccgcaacggcaagaaactggaggatgtagtgcatggtcagaagtcacaaaatttcttccccactgtcggggctaatggtccatgcacggtacatgtgaactttggacagctgggatttgtgtttattgaagccaatgtcaagaaatggggtcttgcgccaatgaccggtagcctggcaccccctccgccatatggaagcgagcagggtagcattcttcttgagtctggccgagaaagtgccgctcatgtggcgcatcgggtttaccaggaccccagcaatgcgcagacaaactcgacggttcggataccgccgtcggtcagtcctgggcctattcgatcaccgaccgatatctccctcgcgccgctcgcacacattccgtcacatgacgatgccggggaa

SEQ ID NO: 17929 - DNA, 628 bp, Emericella nidulans
gcgtttcgaacccaaagcatttatccagaagcttcttggtatgggtgacatggcgggcttagtcgagcacgttcaggccgtaacgaaggactcagccgctgccaaggaaacctacaagcatatcgctgaaggtatttataccctccgcgacttccgcgaaaacattacatcaatcatgaagatgggcccgctgtcaaagctttccggtatgatccctggcttgtcaaatcttaccgccggccttgacgatgaggacggctccatgaaactgcgccgcatgatctatatatttgacagcatgtcagccgtcgaattggacagcgacggcaagatctttgacacacagccgagccgaatggttcgtattgcccatggtagcggcacttcagtgcgcgaagttgaggatctcctgtcacaacaccgcatgatggccgggatggcgaagcgtgtcggtggccagaagaagcaaatgcaacgagcacagaatatgctcaagggtggcaacaaggatcaacagcttgctgctatgcagaagcggatggcctcgatgggtggagctggtggcatgggcggcatgcccggaatgggcgatatggcgaagatgatgcagatgctgcagggccaaggc

SEQ ID NO: 17930 - DNA, 632 bp, Emericella nidulans
ggccccgctggaaaagacctggtataacatgcaatgactgctcttttcgccgatcgccaactgcggtggatcagttcctacgatgttattgatagactaacattatatttaaacgggcagttccattggcaagcaacgatcatgggtcctgtaagtcaccacttcacttttgaacgatggcgttgtagggcctgtgtgctttccgagcgaggaattcgcgggccttgcaactttctcttcatggctagccgctgacggattgtcttcacagggtgactccccatactcgggcggcgtgtttttcctaacaattcacttccctaccgactatcccttcaagccaccaaaggtcaacttcaacactcggatctaccatccgaacatcaactccaacggcagtatctgccttgacattctccgagaccagtggagtccagccttgacaatctccaaaggtccgtcatcgaaactttgttccactaaatttgtcgaccaacactaaatgcttcgcagtgctgctctcgatatgctccatgctcacagatcccaacccggatgaccctctggtgcctgagattgctcatgtgtacaagactgaccgtccccgatatgaagccaccgcacgtgaatgg

SEQ ID NO: 17931 - DNA, 634 bp, Emericella nidulans
tcgctggctgctgtctctctggacagagacttgtcggatctcctgacacggcctttgattgctgcgctaatgcacatgaccttgccggttcaaagaaaaccgggtatagatgctgcccggagggcgagacctatgacggagtcacctgcaaagctgatgatccagtgtgccagaacggaaagttgctgaagaacggagaatgcgcttgtcccaaggggactaaggaggacgaaaatggaatctgtgctcctgctaaatgctcttctggtttggagactggtatgtattattcctcacctactgcccagtcctagtttattccttaccctataccttcgtgaacagaaaaaaaagggaaaaagaaaaggaattaacaatcacaggtaaatgctacaccttcacaggcgagaatggccaccgtctgggcttcggcggcagctggttcatcaccgcgcccgaaagcatgtctttgaaatccggacgctttaagctctgcaaggacgaggagtgcaaagccggcgagaccatcaacccggctgatcagatttacatcaaggacatccacggcaacccggggaatggggcgcttccgaaccgctggctcaactcggccatgaacgggaaccacgtcggc

SEQ ID NO: 17932 - DNA, 636 bp, Emericella nidulans
ccgtcacggctttcgctgctccttctgaccagagtatcgctgagcgatctctgtccgagcgttctactcccagctccactggtacaagtggtggctactactactccttctggactgatggtggcggtgacgtgacctacaccaacggcgatggtggctcctacactgtcgaatggaccaacgtgggcaactttgtcggcggaaagggatggaacccaggcagctctcagtatggacgaccttatccttttccagcgactcagctaacaaattaggaccatctcctactccggctcctttaaccctagcggtaacggctacctctccgtctatgggtggacccagaacccgctgatcgagtactacattgtcgagtcctacggcgattacaacccaggcacggcaggaacacaccagggaactctcgagtcggacggctcgacctacgatatctacactgcgactcgtgagaacgcaccctcaattgagggtactgccagcttcacgcagttctggtctgttcgccagagcaagcgcacctcgggcagcgttaccagccagaaccactttgacgcatggtcgcagcttggcatgactcttggaactcacaactaccagattgtggctgttgaggga

SEQ ID NO: 17933 - DNA, 637 bp, Emericella nidulans
tcgcagcgatcgtcaacgtgaaaaaccacgcaaaggtctatagtgaggaagtttggaatcctatcacttgggaggaaggtttagactcctcacagacttatcgggcgagcaaggtatgaacccaatctccctgtaaaagcgcgtcgtaacaaagctgaccgcgaacgacgaacagaccctggcagaaaaagccgcttgggacttcgtggagaaggagaagcccagctttgaccttgcaacaatcaatccgcccctagttctaggacctgtcgtgcactaccttagctcccttgactccatcaacacctccaatgcgcggatcagcagtttcgtgcgggggttcagtaaggatgcgttaccgccaaccggcacgtatgtttgggtggatgtccgtgatgtcgcgctagcccatgtcagaaccatcgaggtgccggaggccggagggcagcgattcttcatcaccgctggtcactattcgaacaaggacatcgtcgacattatccgtgacgcgtatcctgagctggaggatagactgccgcctaaggacgccccgagtgacatgcctaaagatgtatacggatatgacaactcaaaatcaatgcaggttctgggtcttaagtaccgtgggttaaaggag

SEQ ID NO: 17934 - DNA, 637 bp, Emericella nidulans
tgacaccacccttcccgcaaaaatcgtccgggtaatctccaaccgcaaagacgcttgtggcctggaacgtgcccgacgtgccaacatctcccacacagtatcacaacctcgtgaagtacaagaagcaacatcccgcgacaccggagggtgtgcagcgcgcaagagaggagtacgatgcagagcttgcacgactggtcttagaggataagccggacttggtcgcctgtttggggttcatgcatgtgctttcggagggtttcttggggcctcttgaggccaagggtgttagaattgtgaacttgcatccggcgttgccgggggagttcaatggagcggtaagttgttaccttgtgagccatactgagctctgttcggcctttggtgctgactggttttcctacagaatgccatcgaaagagctcatcaggcatggctcgacggtaagattgagaggacgggagtcatgatccataatgtcatctcggaagtggatatgggaaaaccgattcttgtcaaagagatcccatttgtgaagggagctgatgaggatctgcacgcattcgagcagaaggtgcacgagattgagtggaaggttgtcattgaggggttacagaagaccatcgaggaaattcggtcg

SEQ ID NO: 17935 - DNA, 637 bp, Emericella nidulans
cggtcgcaatggccctgaagtctcctccgtgggccttggctcatgagcattggtggcatctacggcgcagctcccagcgacgaggaccggttggcactcttggaccgcgcccacgccattgggcagtggttctgggatacggcagacgtctatttcgacagcgaagatatcgtcggcatttggcgagcaaagaaccctataaaggcaaaagatatctttctcgcatccaagttcggcatcacgatgcgtaaggacggcagtcaaactgtcgatacctgccccgaatatgccagaatcgcactgaaaaggagtctggagaggctccaaactggaaccatcgatctgtactatgctcatcgtgttgacggcaaaacacccattgagaagacggtcgaggctatggcccagttcaagaagtcaagtcgtctgcctctcgtcttttcccgaactaacacgaattatagggaaggcaagatccgatttctcggcctcagtgaggtgtctgccgacactcttcgccgtgctcatgctgtccaccccatcactgccgtccaggtcgagtatagcccatttacattggacatcgaggatccccgtgtcgctctgcttgagacatgtcgtgagcttggcgtagccg

SEQ ID NO: 17936 - DNA, 637 bp, Emericella nidulans
gccaccagttccgcctgcacttggtgttccaacttatgccgaccgccccgagatccttgacaaggttcgcgaggagaacctgcgtctccgtaatggagatgtgaatgctcccttgaccatggacttgctcgactcaatgacttacacccgcgccgttgtcaaggagactctccgttaccggccccctgtcattatggttccctacattgccaagaaggacttccctattaccgacaagattactgtcgccaagggctccatgatcaatccttcggtctaccctgccactcgtgatgaggaagcttacccgaacgctgactctttcgaccctgaccgttggatcaccggtaccgccgagcagcaccctaagaacttcctcatcttcggcaccgggcctcactactgccttggtcagacatacgctgtccttaacttgatggcgatgatcggcaaggccagtatggagatggactgggtacacactcctacaccccagtctgaggaaatcaaggtctttgctactatcttccctcaggtatacccctctatctttaccttaatcttctgctcttcgactaacctgtgttaggacgactgcctgcttacttttcgtcctcgcgcttaattcttgtaccgc

SEQ ID NO: 17937 - DNA, 640 bp, Emericella nidulans
cctcggcaccatcccaccatcacaagccaatcctaacatatgcatttcaattatatagggcttcaatcgccaccccgatcaacctcatcctcttctctgccttcgccttcctcgtctacacgcaattccgccctaagccacctgccgtgctccctaaggcccctgcccccgttgtcttccgcacattcacgcccaagacactactccccttcaacggcgagaatgacaagcccgtctacctcgcggtacggggacgcgtcttcgatgttacaccaggaaggaacttttacggaccggtatgttacttggactccaccgccagcaaatgagcgttattttcgaggtacagaactgacgtggtcgtgggtagggtggaccctacgagaattttgctggccgggacgcatcgcgcggtttggcctttcagagctttgataaagagatgttaacggaggatttgtcgggtccattggatgatcttaaggatttgaatgcggaccagctggagaatctgcaaagttgggaagagaggttcctggagaagtaccttgttgttggaaagttgctcgccgagggggatcctgaggcgcccaagtcataaattgaagaagatattttctgcggtagctgtatgtggacc

SEQ ID NO: 17938 - DNA, 640 bp, Emericella nidulans
tggacgtccaggtcgttgacattcagaacgtgcttgcttccgagcaggagctcatgctagatctcaacgttcaagcgattaaccccaatctgtttcccgtcgttattgacgacatcaatgttgacatatttgctaaaagccgttatgtcgggactgaccaattctggcgcgaggatgccccgagccttgcaagacttgcgcgagtggaacgcaaaaagcgtgctgatgttactcacacgactcactgcaccgatggcctggattgcgaaagcaacggcttagtaggtcaggtgggacgttggaaacctaaagggggtgtggacaagggtactgatccaatcccgtctgacccggccggcgaccaccaaaccatgctaattgggcgcgttttccgactcgattcgactctgactttcgaagcgtcaccgtggcactacgaaccatctacttcaaaaggtcagatccgcctctccaggcccgggaattccacggaaaagggcggcaccgagcgttgggagcgtgtgttgcagcacccattcgagcttatcgttgctggagccgtccaatatcaattgcccctcagctctcgctttcactcatcatccatcagctccagtataagggtgacccctgatggcga

SEQ ID NO: 17939 - DNA, 641 bp, Emericella nidulans
caggtcgactctagaggatcccctgtgttagtgtcttttgagagtagtcttggtgttatgacaggtgaatgcaaggagtttctggtggaaagtgaaggaaacgctgttgatgaggataaaggattagatgaaactgtaagcagccttgtcgaacaaggggtgggtcaagctagtaccagcaaggagagcaataacagaactgatgttggtagtgtctgtgatgcagatgaattgataattccacgtgacgagtctattggatcagaaagcagagactcaggggataaagacgctggaaatatgataggcaaggcagaagaacactgtgaaaatgatcgtggtgctgttagcgaattagaaaaacttgagtgcgcggatgaacctgaaattggtatgagttctgaaagttttcagttaactccaacttcagattctgaaatgataatgaaccttgaggtcgctggaggaatagatgtcgttgtaattggttgtggttcttccgatcaaaaagctgaagaagaatctgaaaatgaaggaaatcaagaatcagacgatactgataggaagttgcacttcctgatgaagatagagcatcaagtttaataagttcctttgaaacagccaatgagactgtggaagat

SEQ ID NO: 17940 - DNA, 646 bp, Emericella nidulans
gggcaaggaagcgatggcacattacgatcctgggctgtgtttccggaggcaggcctagttcattcgccgagaacgttggactggttgtcggcggccaccttaccctgtacttggctaacggcttggaacgctctcttcggtctgaacggcaagcaagcgggaccggactcatgggtgcttgtccaaggtacaggcggtgtcagcatagcagcattgcagctcgcggtcgccgctggggcaacagtcgtcgccactacatccacggtcgagaaagccgatcgcctcaaggcgctaggtgcggcccatgtggtcaattatcgcaataatccagaatcttggggcaaagaagcacgactccttaccccagctgagaggggctttgacttcgtcgtcgacgtcggtggtaatgagacgtttccgcactccttggccgctatacgagttgacggggtggtcttagcggtcgggcaagtcggcgacagcacagcagagccagtacctatatttgccgccctgatacataactgtattatccgtggcattctagccggctcctgcaaccagtttaaggaattgttgcggtttatcgatgagaagaggctcgtgcctgcgatggatgacgtgatttttcgagcttgcccaggca

SEQ ID NO: 17941 - DNA, 647 bp, Emericella nidulans
gacgaggccgacgacgaacccgccgacttcaaagcagttgatcttgcggattccgacgaggaaacagaggagccagctcgcaagcaacaaaagcaaacgaaaagcaaggaagcaaagaaaccagaacctcaagaagattcttcaagcgaggacgatgagtccgcgtccaacgacgactccgatgtggacgacgatacagacgatgatgctcattccgatggctctacaccaaccggtgctataggaaagaggacagttcctaaacggaatgaccctacggcattctctacttccatctcgaagatccttgcgacgaaattaccaacgtctgcccgtgcagatcctgtcctatcgcgcagcaaaaccgtgacacaaatcacctctcaaattgcggaagagaagctggacaatgcggcacgggccaagctacgtgcagaaaagaaggaggagttggacaggggtcgcgttcgtgatgtacggggtatttcgacaggccaggccggtgctgtggcagaggaggagaagcggttgcgcaaaatcgcacagcgcggtgtggtgaaactgttcaatgccgttcgtgccgcgcaggtacgtggtgaagaggctgccaaggaagagaggaagaagggcacagtcggaattggcga

SEQ ID NO: 17942 - DNA, 647 bp, Emericella nidulans
caccggtgccgcagggtaacccaccccacacaacacacacagcccacgtataccaataacccagctaacagcaacacaacagcggtattggactcgaaactagcatcttattcgcccgcgaaggcgccaatgtcctgatggcagacatctccgcgtcggctctcgaaaaagccctcgcgaaggtcagagagctcgtccctgacgcgccccgtgttgagaccatcaagtgcgacgtctccaaggaatccgaggttcaggctatggtcgagtcccaggactcctggggcggcacagatgtgatcttcaacaatgccggaatcatgcacgcggacgacgccgatgccatcgacactcctgagaaaatttgggacttgacgcagaacatcaacgtcaagggcgtgtggtttggatgtaaacatgcggtactgagcatgcggagacacaagaagagcaagggcagtatcatcaacacggcgagtgttgttgcgctggtcgggagtgccacgccgcagctggcgtacacggcgtccaagggtgctgtgctggcgctgacgagggagctggcgatcgtgcatgctcgggagggaatccggttcaatgcactgtgcccggcaccattgaagtatgtctatcctttcttcgatctg

SEQ ID NO: 17943 - DNA, 653 bp, Emericella nidulans
gaatatatgaccaattcttgctatataggtgccgctaaccgaggttgtatcttctctagttgcgttgaccgacaggacggccgatcagactttctcacgcatattatgggcgacaaaagccgcgacccgacagaactagagttaagttatgatgaggtgcatagtaacgccaccgttctcatgtgagtcgtgactacctgaggccgccatgataagtggattattgtaactgaattatatgtttaggatcgccggctacaagacgactgagacatccctttcagccctgttctaccgaattttgtcaaccccaggagtactcaagaatcttcagagtgagctttttagcaacttccagagcatcgatggaatcacggggagaaaactgctgtcactgccatatttgaatgggtgtatctacgaatcgctccgtttggcacccccggttgcgggaaagttcgcgtctcgtcgatccccgggggcggtaattcaaggcttctacgtccctcctgggacggaagtatttacagagacgtacaccatgcagcggacgccgctttactggtacgccccggacgagtaccatccggaacgctggcttaaacagagtgagggtagtcctatgctcaagatgtgcacgaggcattcaagcc

SEQ ID NO: 17944 - DNA, 654 bp, Emericella nidulans
ccactaaggccatcctcgtcgtctacggtacgtaatctaaatacccaaacccaatcctttaaacaccaggacctctcaaccctgtaacgctgccagacatctttggcttcttccctcaaacccttcagggcgccgatatcctcgctacctcgtcgaaacagaaataccgcatcttcatgcccgacttctttgagggcgagcccgcagatatcacctggttcccgccctccaacgaagaccagaagaacaagctcggcaacttcttccagacaaaggcggcgctcccaagaccctctccaagatccccggcgtcgtctcggaagcaaactcctacgccccctctggtggcgccttcgaatcatggagcatcctgggctactgctggggcggcaagatcaccgttctctcgtcgggttccgagaacaagacgttcaaggccgctgtgcagtgtcaccctgccatgctggaccctaacgatgccaagggcgtgaacatccccatggcgctgttggcgtctaaggacgaaaagcccgacgacgtcagccagttcggcgcgaacttgaaggtcgatcactatgtcgagactttcccgacgcagatccacggctggatggccgccagaagtcagttggaggatgagcaggtgcggaagga

SEQ ID NO: 17945 - DNA, 659 bp, Emericella nidulans
taatcgaaaatgcgaacgtcaccaaatatcataatcacaggtactcccggagttgggaagacagtgcactgcgagcagctagcccaagataccggcttgcgacatttatcgataaaccagattgcgaaagaccgagactgtattgaaacctatgacgaagaattgaaaacatgggtagtagatgaggacaaagtatgtctttcttcagctcgcagcatacgcagtcttactttctcctgcttactttcgccggcgacgttagcttctagatgcaattgaggatgaggtactccaaggcggctatctgatagactggcatgcttgtgatctgtttcctaaatcctggatcgaccttgttgtggtactgcgttgcccttctacgtccactctatatgaccgtctcagctcacggtacgtttacccaaatatctttcgatagatggcatttttcttcatggtaaaactgacttctgctgcaggggataccatgaaacgaaactacaagagaatctagatgcagagattttcggggtcctcatcgaggaagcccgcgagggttttgatgaagagattgtggttgaactaaatagtgaagaggacggcgacgtagaagccaattgcgctagaatagcttcctggatagagaactggaaaagcga

SEQ ID NO: 17946 - DNA, 659 bp, Emericella nidulans
cgtgttgcgccacagttacgggtctttctcttcgcaggtagagatacaacgagcagtacactgctctatgcattctacctgctttcccgacatccagaggccctagctaaggtgcgcttagagcacgaccaggtcttcggcccatatcatcaacaagtacacgagaaaatccaccaagatgcgaaactcctcaaccaactcccctacacaacagctgtccttaaagagactctgaggctcttccctccgtctgcctccatgcgtgaagcgcgtcccggcgttgaaatcaccgacgacaacggccaagtatatcccactgcagggtgcaacgtctggacgctcaccgtggcactgcaccacaacagtgcgcactgggctgaagccgagtcatttatccccgaacggtggctcgtgggatctgaccatccgctgtacccagccaaaggcgcatggagggccttcgagttcggcccgcggagttgtatcgggcagacgctggcaatgttggagctgcgggttgcactagcgatgacgctccgcgagtttgatattgcaccggcgtatgataagtgggatcacatttatccaaatgacgccgtcaaggagttcaatgggcatcgggcatatcaggcagaaaaggggggagggggtgcgcatcc

SEQ ID NO: 17947 - DNA, 662 bp, Emericella nidulans
gctccaggcgccggtcttcgagcgaaaggccttaataggattggcaatctcattgttcccaatagcaactattgttcgtttgaggactggttggtacctatcttggacaaaatgttggaggagcaagaggcggccaacaagaaggcccgcgagactgggaacgaggaggatgagttgcactggacaccgagccgtataatcgaacgtctaggtcgcgagatcaaccacgaggactcagtgctatactgggctgccaagaataacattcctattttctgtccggccctcactgacggctcgttgggtgacatgctctacttccacactttccgcgcatcccccctccgacttcgagtcgatatcgtcgatgatctgcgtcgtattaatacgatggccgtacgagcggcccgcgctggaatgattatcctcgggggaggtattgtcaaacatcacatagccaatgcttgtttgatgcggaacggtgcggaacatgccgtctatattaatactgcacaggaattcgatgggagcgatgctggcgctcgtccggatgaggccgtaagttggggtaaaattaaggcggatggtcagtccgtcaaggtgtacgccgaagccacagtcgtgttccctcttatcgttgcagccacctttgcacgagcagg

SEQ ID NO: 17948 - DNA, 662 bp, Emericella nidulans
tgggccacaaggagttccatacggccagcttacacatagctcagatgttgtacatctggccctacttcgtcttcttctcgtggcctcttcttctggtcccaatggccaatatcgtccttcccaaattcatgctgccgaaattcctcaatcaaggctttccggcttcgcggagaaggcttccaagtcttctgactgtgttgatcatccttccaatcatgctcgctgtggtgcatttcaacaccattgtccatccgttcacccttgccgataataggcactacgtcttctacgtattccgcattttgctgaattctcatccgtatacgagatatgtcgctactcttgtctacttcctcggcgcgtggatgatcatctccgccatgggttattcacctgtcacggctgctcctgggttggcttcagtcgttagaacgcaggcaccgcccgcgtcagcgacctcggcagaggagcgaaccgaaaagacgcaaaagctggagcgcaacgcagaaaggctttaaaaaatcggcccaagtggcctcttcagctcctgccccaatcgaccctaaagtcctcgctgacctccaagagcatattaggcggcgcaacgacttgaacatgagacatcccgcgtgacgtttgttcttgtttggctggctgccaca

SEQ ID NO: 17949 - DNA, 663 bp, Emericella nidulans
ggggctacaacagcggcttgcggaggcgacgaaggagcgggacgcatacatcacctttctacggaacctgaactcgtcggtcccaacacaggaggaggttgaaacagctgagaagtctcttaaagagactttggaagccgaggaggcggcatacgcagaactggttgcgttggaaaaggaaaatgctgccttggacgaggagattgctcggttagaagaggagtctcgccaactagattacgaagaggaaaagttttggcgcgatcggaatgcgttctcgttggtgcttgctgatttccagaatgagcgggatgcgttgaatatgaaatatgaccacgactctcgccagctggaaagactgcagcgaaccaatgtttacaatgatgccttctgtattggccatgacggctattttggaacaatcaacggcctccgactcggccgcctggcaaacccttcggtcgaatggcctgagataaacgctgcctggggccagactgcgctgctgctggctaccatagcggagaaactgaactttcagttccaggggtaccggctgcggccgatgggctcgatgtccagaatcgataagatcgagtatccgcgaccgttaccggcgcaatcgaccgttgaaggagctagcaatgcccatcaaccagcggc

SEQ ID NO: 17950 - DNA, 663 bp, Emericella nidulans
accaactgatcatgtaaacagttctccggcttaattatcaacggattcggctacggccgggtccgctccctgctcatgcagatgcccaccggcgcctcgcagatcgtcttcatcaccatcggcaccgcgatcgcaacctacttccgcaacactcgctgcttgatgatgatcttcaacagctcggtcgcagtagtcggcatgacgctagtgtggaagctcgacgagtcgcacgcggaggcccgcgtcgccggtctagcgctggcctcggcctttgcagcgaacatgccgctccagatgagtctgatcagctcgaatgtggccaccttcacgaagaggagccttaccagcgctatgttattcatcggctactgcatcgggaatatcgttggaccgcagttcttcttggagagcgaggagccggcttatccggtatgcttcagttccttctccatgcctacctacctgcctacctagtcctgtggaaattgaggagtttgatgctaaccagtacagaccggcatgaccacagccgtctcgggtctctcctttggcgtattcttcctaattctgcttttggcgtactacgcgtgggagaacaagcggagggatagggtatacggtccggccgggcagtttacggagagcgaggagttggagcaaggg

SEQ ID NO: 17951 - DNA, 664 bp, Emericella nidulans
ccgcacttgtgcctggaaacctaacgtctcaggcgaaaggtccttgcgacgggaagcttcgacgcaacggtaggcatttggagacgatgggatgactatggagaggaggaaaccttagcgcaaggaaataagaacacaaaaaactttggagctgaagaagaccgcgaagaagacgaagacgacgaatggcgttttgccgtcctactcgacggacacgacagcgaagtcaaatccgtctcgtggtctgcatcaggcatgcttcttgctacgtgctcacgggacaaatctatctggatctgggaggacctcgaagatggagacaacaatttcgagaccgtagctgtgatgcaggagcatgagggagacgtcaaatgcgttgcctggcaccccgcagaggaatgtcttgccagtggtagttacgatgatactatccgaatctggcgtgaggatatcgatgactggggtcaggtcgcctgtatcaaaggccacacgggaacggtctggggcattgactgggaggatgctgagaatgtgcctttcccttcaacttccaatggcgtatccggacaggaggaagagtggaaaacgtggcatgctctttcggggcctcgtcttgtgtcttgctcgcatgatcaatctgtccgcgtttggcgacgacagccaa

SEQ ID NO: 17952 - DNA, 667 bp, Emericella nidulans
aggcggagcgcgagaggctagcgcttgcctaccagcagaagattcagacagaattgcagagagcccaggaaatcgcagagcagcgtctccagaacgaactcgtggaacaggcaattgagctcaaccgcaagtacatacatgaagtgaaagacttagttgacggcgagcgcgagggccgccttagcaagctgtctgagcttacctcaagcgtcagcgaacttgagacactcgtcaccggctggagggaggtcatcgacactaacctcaaaacccagcaactccaggtggctgtggacgcagttagatccgctcttgagcgctcaacagtccctcgacccttcgtgcgagaattggtggctgtcaaagaattggctggagatgacccggtcgttgaagcggctattgcatctatcaaccccgcagcgtatcagcgcggtattccttcaacatcccagatcattgagcgtttccgccgtgtcgccgatgaagtccgtaaagccagcctgcttcccgaggacgccggtattgcaagccacgcggcaagcttagtattgagcaaggttatgttcaagaaggatgccgaggccggaagtgatgacgttgagagtgttttgctgcggacggaaaatcttctggaacaaggaaacctggacgatgctgctcgtga

SEQ ID NO: 17953 - DNA, 667 bp, Emericella nidulans
gcccacgctattctacttcgagcccaaggatgtctggatcctcgcgtaccaatggggccctactgcattttcctacctgacgtcgagtgatccaaccgatgccaatggttggtcatcaccccaaccgctcttttccgggtcaatttcagactcagacaccggggtcattgaccagacagtcatcggcgacagtacaacaatgtacctctttttcgcgggagacaacggccgcatctatcgcgccagtatgcccatcgaccaattccccggcgatttcggtaccgagtccgagattatcctgtcagatgaaagaaacaacttgttcgaagctgtccaggtgtacacggtctcaggtcaaagcaaagacacatacctaatgattgtcgaagcgatcggggcacaggggcgctatttccggtcattcactgccgacagccttggtggctcatggacaccgcaggcggccactgagagcgcaccttttgctggcaaagcaatcagcggtgccacctggacggacgatatcagccatgggattcttgtgcgcagtaccccggatcagacaatgagcatcgacccttgcaacctgcagctcctctatcagggccgagatcccagcctcaaccccggctacgaccttctgccatatcggccagggctcctcacc

SEQ ID NO: 17954 - DNA, 668 bp, Emericella nidulans
tccccggccgagaagttagcagagacactggtgaaggattttggggtccgggccaaggcgtataaagtggccgtgcaggtgtttgagcaggtccaggccgccataaatgccgttgtggccgacttcggcgggctggacgttatgattgcgaatgcgggcattccgtccaaggcaggtggactcgacgacagactcgaggactggcaccgggtcgtggatgtggacttctcgggcgcgtactactgtgcgcgtgttgcgggcgagatcttcaggaagcaggggcatggcaatctcatcttcacagcaagcatgagcgggcatgctgtcaacgtgccgcagcagcaggtatgtatcctcttcgtctcatcctggccagaacttttgagatgctcacaatttctgttaggcctgctacaacgcctgcaaagcgggcattatccacctcgccaaatcgctcgccgtcgaatgggccgactttgcccgggtcaacagcgtcagtcctgggtatatcgacacggccattagtggagactgtccgtttgagatgaaagaggcgtggtatggacttacgccgttgaagagggatgcggatccacgagagctcaagggggtgtatctgtacctggcgagcgatgcaagcacatatacgacgggggctgatattgtcg

SEQ ID NO: 17955 - DNA, 670 bp, Emericella nidulans
accggagaccgcgacattgcaagtatgtgttccggcagtgaccttgacggagacgattttcttgtgatctgggatcaagatctgcttccggacgattggtttcggtcctttcaactacgacagtgagaaagaatatgagctcgagcacgtcaccgtcgacgagatcacttcgttcttgtcacatatattaagaacgattgccttcccaagattgcccacgcgcatctcgcatggggtgattaccttgatgatggtctcaacgaagcaaaatgcatacggctccctcagctacactcaaaagccgtcgactactacaagacaggtattccagcagtgatgacccggcagattagcctcataaatggccgcattttatgggaaagaacaatatacctgagtccgcccgatatcactctaagaaaatcctcggccagctttacgacgctgtcggaaggatcgattttggccccaatatcgagatggactttgataagcggatcttgaactgtaatgtagaagtccacgatgccatatatggctttgccaggagactcaaagacgaatatgatattgccatccgtcgaataacggcacagcacgagatcaagacagagtttgaggtgtggttgacgtttgtgcttagtcatgctacaatagacagatagttact

SEQ ID NO: 17956 - DNA, 675 bp, Emericella nidulans
cggctccgacgaagcggtagtatcgcgaaaaaattggacgccacctatcggctcagtcttccgcacgtggaacgcatcctaactcagatctactcccgaacagtatccccgcgggttgattctcttcggcagtacgagaacggaacggacaatgtctacggagaacttctccctcgatttattagcacgattttcaaggaaaccgggctaaagtcaaaccatgtttttgttgatctcggctcgggtgttggtaatgtggtcctgcaagcagctttggagattggctgtgagagctggggttgtgaaatgatgcagaacgcatgcgatctcgcggacttcaacaagcggaattcaaggcacgttgtcggttatggggtatcgctccaggcaaaacacatcttgtacgaggcgattttctcaaggaacagagtatcatcgacgtactaaaaagagccgacgtcgttttaataaacaaccaagcgtttaccccccaactcaataacgagctcatcaaccattttttggatatgaaagagggatgccagatcgtctctctcaaatctttcgtccctgtcggtcataagattcagtcacggaatctcaactcacctatcaaccttctgacagtgaaacagaggcagtattggtctaacagcgtcagttggacagacgttg

SEQ ID NO: 17957 - DNA, 677 bp, Emericella nidulans
aaatctgccaacgcaatgaagaactctagtccttctctctggcaatcgatcctggccggagaggctgctgggggctttgagagtcctttgacactaagtccacggttaaacaccggcgcagtattaattttcctagtaccctaccgaatacctggaaaaccaggcagcaattacaagctacagcagctggagtacgagtttcgccatggcggctgtttaccaccacgattcggcagcatggcctgtcacacatgtacaccggtagcgcggcattctgcgtctccaacgcaagcaaatccggagtccagttcttcgcattcgagacagcacgccaattgatgcccacggacacttccgcaaggtccaccgcacggggaatatgggggctggaataatcgcgggtgcagcagagagtattcttgtcgtcactcccggcgagacgctaaagaccaagatcatcgacaacgaagccggagcaaagcgatatacgtcggctcgcgcgctatccggtcggcggttgccaccgagggagtcgccggtctgcaccggggcgtagtgacggtgacgtcgaaacagtcagccaatgcaatggtgcgattcaccagctataacttctttctccgacaccttcaggccatgtccgggtcagactcgaacaactccgtcatcggagctac

SEQ ID NO: 17958 - DNA, 678 bp, Emericella nidulans
tcactctcatgaagtcattgctgcctttatcggctacctattcattcactacgtcctctcgccatggctgtctccgaagctattccctcgccactaccccaacctaaacaagcgtaccaagcttaattgggatgttcatgtcgtctcgcttgtccagagctccttcattaacgctgtcgctctttgggtgcttttcgccgacgaggagagaaaatccatgacaattggtgagcgagttttcgggtacactgggtcttgtgctctaataaactctctcgccgtcggctattttatctatgatttgataatcagcactctctacgtcaagatgtttggtattggcatgctcttccatgccgtctctgcgctatgggtgttcagtttcggattcgtaagtggctccattaccgcgagcggggactatcactgataatagtgcagagaccgtttgtcaacttttacgcccccgtctttatcctctacgaactctccagcccctttctcaatatccactggttccttgacaaagttaacatgaccggctctaagttgcaatggtacaatggcatggcgcttcttgtcgtgttcttctgttgtcgtctcatctggggaacttggcagtccgtcctcgtatacatggacatgtttgctgctctcagacagacttggtccgctggc

SEQ ID NO: 17959 - DNA, 682 bp, Emericella nidulans
gtgaactgcgccccgatcctgccttccaccggcgcggaagcacaacaacttctagcggcatccccccacaaggatcagccgccggcacacgttaccccacaatcaccactgccggaaaccaagtcaccagcgcagcctctcggacaacagccagcagctcagaaaaacctacaaacacaggcgcaaccacaaccccaatcgcagccccaagcaccacctcaagtaacacctccgccgcaacctacatcgcacgctattctacaccctactccaccacagcaaccgcaccatactccacaaccacaggctcctcctatccatccccaacaagttcagtcctcagcacaaaatgtccaacggcagccgcagccaccccacgaaaaaggagcatcgccgcctcagcaatcacttgttaccgccccaagcgtaccagctctgggagagccagcgaatgtgccgccgacgcagcccgtggagccatcgtcgattcccacggctgtgactcctactcctgctcacgaccccgctatcacgccattgccgccctcgcgacaacctcaaccacctcatcctccgcagacaaacaatgtgccggttgcttcccctactccgcaaaagactccctcgactgtggaggctgctggaaagaaggttgtgcctgtacctcctccacgcggacctc

SEQ ID NO: 17960 - DNA, 685 bp, Emericella nidulans
catcaaatgcaccactccagtccattagcgacttcgaagagacacatggtctgcagctacctcacttcattcccgaggagcaagcagacaatttacctcgcatcgacaaggccaccctcgtggatatcaaagagggaaatatgataatatgtttgacaatatcatgatcattgattgccggtttgaatatgaatacgatggcgggcacatcgtcggagctgtcaattacaatgacaaggagaatctggccgccgaactttttgcggacccgaagccacggactgctatagtcttccactgcgagtattcggtacacagggctcctcttatggccaagtatatccggcatcgggatcgtgcttataatgtggatcattacccccaactatcttatcctgatatgtacattctagaagggggctacagtggtttctttgctgagcatcgatcgctgtgctaccctcaaaactacgtcgaaatgtccgctaaggagcacgagtttgcttgcgagcgtggacttggaaaggtcaagcagcggtccaaattgagcagggcccagacttttgcctttggccaacagtccccggaaatggaggatagtcctacgggaggtgtaggaacaaccccggtgatcgcaaacttctcgcttctccgttcaatgacagtcctggcagccgctttcctg

SEQ ID NO: 17961 - DNA, 686 bp, Emericella nidulans
tgcattctgagactttggatcctgaacatcagcgggttagtattaggtctagatcccctcaaggccaagtacgggatactaacggtatatagacgggcgatttcaaagagtaagccactacctatcaggatatacactgcgaatacaagataaccataaacctttgctagagccttcaacttcggcgaattcacagcggaaggcaaagctcaacagccgcttcccccggccctagctccccatgaagctgagatcgcagactttgcatccctctgcacaaagacctgcaaccgcattctcagccttctttctctaggcctcaaagtacaattaccctacccttcccagctcctcagagcgatgagagttgaccctgccagatctccccctcattctttttaacccgccacgatccaatgaggggcccaacaggttgcatactgcgctatctatactacccatccatctctgcgccccagacagcagactacgaccatactgttgacgtacgtgctggcgcacactcggactacgggagcatcacattgctattccagagacctggacagccgggattggagatcctcacgccagaggggacatgggcgcctgttgccgtagagcctggaaggccgagtccgagcggtgatgacgttaacaacgaatttgctttcccgcccatcctg

SEQ ID NO: 17962 - DNA, 686 bp, Emericella nidulans
gcatctccgcccccatcctaatggaggcgcccaagcgcgcgaccaaattcgctgccaacgattcctggggcgccttcggccgcaacctcttcggcgtggaaaagcaaaaccagtcgctcgccatcctgaccggtgcaaccgccggtgcaaccgaatccttcgtcgtcgtccccttcgagcttgtcaagattcgcctgcaggaccgtgcttcagccggcaaatacaacggcatgctggatgttgtgcgcaagatcatcgctgccgaggggccacttgcgctctataacggtcttgaaagtacattgtggcgccacatcctctggaactccggctatttcgggtgcattttccaggtgcgcgcgcagatgccgaagcctgagcctgggaacaagacgcaacagacgcggaacgatctgattgctggttcgatcggcggaacggccggtacgatcctgaacacgcccatggacgttgtcaagtcgcgtatccagaatagccctaaaatcgcggggcagacgcccaagtacaactgggcttggccggctgtggggacagtgatgaaggaggaaggttttggcgcgctatacaagggattcatgcctaaggtgctgcggttgggtccgggtggtggtatcctgcttgttgtgtttacgggagtgatggacttcttcaggaagatgaggggg

SEQ ID NO: 17963 - DNA, 688 bp, Emericella nidulans
agaaaagagcagactccgtgtgggagtcactatgttcggcgtgacgacgccctgtgtcgacacgatccggtcgcacctcgaaaccaactacgctgtcgaggtctatgtcttccacgcaacagggcatggagggaaagccatggagcggctggtggaggaaggacacctcgacgcgatgctcgacctgacgacaacggagatctgcgatctcatcgcgggaggggaaatggcgtgtgatctccgccgactcgaaacgagtctgaagaagggtatcccaactatcatctctgtcggcgcgacagatatggtcaatttcggcccgatcgagacggtcccgccgaagtatcaaggaaggaaattgtttgtgcataaccccagtgtaacactcatgaggacgtccagggaggaatgcgaggccgtagggagattcatcgttgagaaggtgaatgggtgtgtacgggagggtaaagctgggcttgtggaggtggtgattcctaagggtggagtgagcaaaatttctacgactggaggcgtctttgaggataaacaggcggatgaggcgcttgcgaacgttctcatggtcggactggaaggcaaggtcagagttgtgcaagatccgagggatgtgaatgatagagggttcgccgttgatattgcagaaaggctgatgacattggtagcagctgca

SEQ ID NO: 17964 - DNA, 690 bp, Emericella nidulans
tggggtttctcggcgaatggaagttcagtgaatataagcgcgcattccgcgaagtgtatatgtctggcgcaggagtgggagatcgcgcttctgtcctcgcgacctcccagtcttcgaacgccaaggataaatcagagggcaccactgggtggtcatcagttcgcggcaaatctatgggtctgaatcggggagctcgaatcttaatgcggaaccgtctcaaggttgctctattcaatgcagatgggcaccctgttgaagcagataaatgttcaaaacacaaccgaggcatcgagaacgacggactatacgttatgaatgaaatcctgcttcaccgcggaaaggagccgcatcttgccatcctggacgtatatgtgggagggagatttctcaccgaagcagtggcggacggtatcattatttccacacccactggaagcacagcatacagtcttagcagcggaggcagtatcgtgcatcccctagtgccagcagtgcttttgaccccaatctgtgctcgaagcctcagctttcggcctttagttttgccggcgagcacaccaatcactcttcggttgagcgagaaaaatcgggggagagaactggaggtcagtattgacggcgtcaacatgacccgaggaatgacagcaggaatggaagctcgtgtctggaatgaggagatgcggcatggca

SEQ ID NO: 17965 - DNA, 694 bp, Emericella nidulans
cggctcaggtttatatcaagcgatactacacgaagaacgagatcaggaatacaaacccgtatcttgttctgacgacggccttctatctcgcctgtaaaatggaagagtgtccgcagcatatcagattcgtcgtcagtgaggctcgagctctctggccaggtgcgtgaatgtggaacagcatatggtcattgctaatgcaccacagagtttatcgtccctgacgtctctaaagttggcgaatgcgagttctccctgatatctgagatgcaagcccaacttatcgtacatcacccgtaccgaactctatcggagctccagcctgagttatcccttacgtccgatgaggtcgcgcttgcgtggtcagtgatcaacgatcactatctcaccgacttatccttactatacccgccacatattatcgcagtcatggcgattattgtagccgttgtcttcaagcccagcagccagacggcctttcatggctctgcagctccaatcgcaggggcaatgcgagacggcggcatgaatattctcgcggcccttagcgataaggggggagctggtcctcctcctaggatacagaaactcatcgcatggcttgctgaaagtgaggtcgacatcaaggcggtcattgaatctacgcaggaattggtctcactatacgaagtctgggaacaatatagtgagaagaact

SEQ ID NO: 17966 - DNA, 697 bp, Emericella nidulans
cttcgccgcctcctacagcacttactacttccagctagcagggtacactgacgccatgagctttcgtcttcaaattgtacagcaagtcatgtcgattgtcgggaatctcatgtcctacctcttgatcgaccgcctcggccgccgcaacctcatgctttacggccttggcatcatgacctgcatcctcatgattacgggtggacttggcgtcgtggcatccgacggaagtaaccctaactccggcggtgctgtcaagggaaccgtcgcgctgattctcctctactgctggtggtataactgcaccatcggggcagcgggatacacgctgctcgcagaggtctcaacctctcgtctccggattaagacaatagccattggccttgccttgcaaaacgccctctacacgatgtggtcctttgttctcccgtacctatttaacccagacaaggcggatctcggcgcgaaagtgacgtttatctttggtgggctgtcggttatctcccttgtctatttgtggttttatcagccggagacggcgggaaggacctatgcggaattggacgagatgtttgcgaagagggttccggcttggaaattcaagacgtatcacacggattctcaagctatgggcgaggcggctagggagggacgtaatgtgaagcggggtgtttagtttttgtcttgccggatcttccgc

SEQ ID NO: 17967 - DNA, 698 bp, Emericella nidulans
gatttcagtatcactcagttccaccacattaccaagctgcttgtctggcacggacgaaactcctacaagcgctcggccaaacttgcacagtttatcatgcatcgtggcctcatcatcagcgcttgccagaccatgtatagcattgctagccactttgatccgaagggtctttttatcaactggcttatggttggatacgcaacagtctacaccaatgcgcctgttttctccttggtccttgatcgcgacgtggatgaacagctggccaatctttaccctgagctatacaaagagcacaagacgggtcgcagtctaagctatcgctcctttttcacctgggtcctagtgtctgtttaccagggcgctgtgatccagggcctgtctcaaatcctccttgacaccatatctggaaagcggcttatcagtgtttcatttacagctctcgtaatgaacgagctgctcatggtcgccatcgccgtcactacatggcaccctgtgatgatattctgcctcctcggtaccgcgttggtgtacgctgccagcgtgcccttcctcggcgagtatttcgacctcaagtatgtgatcacgctagactggatctggcgcgtggtagctgtcacggctgtgtctgttatacccgtgtgggctgcgaaactgatcaagcagtcttggaatccaccgagttaccggaaagtgcg

SEQ ID NO: 17968 - DNA, 698 bp, Emericella nidulans
gcgctcgggcgacaaactctgagaccttgctcagaaccgtaacccttttgtctccgttttacatgtggcttgggatcttcaccctacaagctcacaaagaggaaagattcatgtacccggcatatccgtttcttgccctcaatgcggcgatcgcttttcatatgattctctcatacatcggctcgagtaacccgaaagagctgatagggcgagtccccgcaaaattaaagcttgcaggagtgatgtctgttatcttgcttgccataaacagcgggctactaaggaccctagggatgattaccgcttataatgcccccctgaaagtcctgcagccattggagcagtcagagatagctcagccgggcgatacggtttgctttggtaaagaatggtatcgctttccttcgtctttctttctacccgatggcatgcgagccaaatttatccaaagcgagtttcgtggtctgctccctggcgagttccaagacgctccaagctattcggccctgcttgagggtacctcccgggtaccggaaggtatgaatgaccgcaataaagaggacacggggaaatcggtaagttctatggttctgcaatctatgacttttgcgtgactaacaattcaatagaccgacatctcacaatgctctttcttggttgactcccactccccggtcgcgaagccacagcgctggaac

SEQ ID NO: 17969 - DNA, 701 bp, Emericella nidulans
cattcccgttctgccgcatattgttaacgccatgattcttctggcggttttcagtgcaggaaacagctatgtttattgcggcagcaggaccttgtacgggcttgcccttgacgcaaagccccgcgcgttttcaccaggtgcacaaaatccggtgtccccatctactgcgtggctactgtcctccttattgggcttatttctttcctccaagtctccaacagcgcgtcagtagtgctgaactggatcattagcttggtatgctgctcatcctgggacttgcaagaggtcataatctaacaaagctacaggtaactgcgtcacagctcatcaacttctccgtcattacttttacttatactcgtttccggaaagccctcattgcgcagggtatctcccgtgacaccctcccttacaaaagtctcggccagccgtacgtcgcgtacattgctctagtatcaacaataattatggcgtttgttgggggctacgaggtcttcctaccgggcaattgggacgtaccaacttttctcttctcgtatacgatgattggcgtctttcctgtgatttacgttgggtggaaaatcatccaccggacttcggttcgaaagcctgaggaagtcgacctctttacaggagtcgatgagatcgaggagtatacgaggaactatagaccagagcaagcgaggtatgttgatctcttg

SEQ ID NO: 17970 - DNA, 703 bp, Emericella nidulans
atcatattcgatttttataaagacactacagcccactcggcgactcttatcacaatgtccacttcaatcagaccctcccttgaccccgaactcgtcactgttcacgcctcgatcccttctatagacatcgagacaccctcgaagctctcagcctatcgcgcggccattgcaccaatgttcactctcgagaacgcaatcaaaggctcagaatccagcgtggagcctagcgagatatctatacccggcccagcaggaccaatgcacgctactgtcttccgtcctaagagccgcacccgctctgtttctgagactcctggagtcctgcacatccacggcggcggcctggcaacgggcaaccgcttcttgggcttcacaatgttgaactgggttcgaagagctcggtgctgtgatcgtcacggcggaatacaggctcacgccggagcatccgcagcccgcggcgctggaggatagttatgcggcgctggagtacatggccgcgcactcggaggagttaggattcaacgctgaaaaactgattgttgccggcggctcggctggtggaaaccttgcttggggcattacgcttttcgcccgcgacagggaaggccctaggattgcgggccaggtcctcatgtacccgtgggttgatgacagcatggccttcgcctcgatcacgcagtttggggacattgcgccggtgaag

SEQ ID NO: 17971 - DNA, 704 bp, Emericella nidulans
gctctgcactgaacgagaaacacaacttcgaggataaagggtatgccggcggcgtgctggccatgatcttcgtcttcagcgccgcataccacatgtgctcgcctgtcgcgccaacgtacattatggaggtcgtacctttttcgttgaggtccaaggcggctatgatgtaccagctgacggggaaccttgcgggcctgtataacagttttgcgaatccggttgccatggacgcgatcagctggcggtactatatcgtttggtgtgtggtcatcggagtcaacttcaccctcatctttctgttcttccccgagacgaagggaaagggccttgaggaggttgcagagatttttgacgggccggacgcgcttgcgggcaagaacgccatgagggagatggggttggatgtcaatgccgacaaggttgttgctgttggggggggggggaaagcatgttgagcaggcttagttctgagactgcgggctcaatgagagaagggcactatctagtcaatatgtcagggctgaatattgccagcaatgtatcagcaatgtacctccgaggctgtttgacaactactgccgcatctaggtatcttatttctagcttgattcttaccaaggataaggtgattgtatgtttatacatcttggtcccgagatatgagaactggcataatgtactacacagctccgagatacgcggca

SEQ ID NO: 17972 - DNA, 705 bp, Emericella nidulans
cgtctggggccttggtccactcattgggccggtggctggcccaattgccggaggatttataggggagaacgtggggtggcgatggacattctggaccttgttgatagccggcgggactgtggccctgggcatcgagtttttgaacaaggagacctttgccccggtcctgataaagtggaaaacgaccaagctcgcgcaggagacagggcgcgctgacctacggagtgcatacgatctggagcgtgaatcgctgtctgtgggtcaggctttgaaactcggcctgaagcgtccagttcttctcctcgtcaaatcaccaatcgtatttcttctctctgtctacatggtgagaatcacccaagactttcttgacatatagggaacgttgctgacagactgattacttctaggcttttatttacggacttctgtaccttttcttcacaacaatctcgtctgtctttaccagtaactacgggttttctactggcctgtcggggctggcctaccttgggattggcataggcttcatagtcggtatctgtttcatggctgtaacaaatgacagaatgctggttaagctaaccgcgcgcgctgggggcaaattcgaacctgaaatgcggcttcctttgatgataatattctcaagcattctccccatcagtttcttctggtatgggtggtcagcagacaagcacgttcactgga

SEQ ID NO: 17973 - DNA, 707 bp, Emericella nidulans
tcgaccctttcgtgggtccagatctgttttcctgtcactataccaatgctaacagtcagctcctagggctattcactacgcaacctatcctcgctctcctaacactataccagtccttcgtatacggagttctctttctcttctaccagacctatcccgtcgccttcggtgaagaccgcagctggcccacgagcctaaaatacgtgcctctcctcgcacttatcgtaggcgtcttcgccggctccctgggcatcatcatcaccaatcaaatctacacccgtcaccacagccacacccctgatggcgtctacatccccgaaagccgtcttccacccatgatcgtcggcggggttatggtccccattgggatgttctggttcgcctggacagcttcgtccatatttatatcttgggccagccccgtttgcgcgagtttcctaaccggctgcggcatgtacttgctgttcatccaggggtttaactatattatcgactgctacactagcatggccaacagtgcgatgggcgtgaatggctcgatgaggagtatttttggggccgctttcccgctcttcgccaaccaggtgattgaaaggctcggtgtcgcgaaaacaactagtatacttggatgcgtttgtgtagcattagttcctgtcccaatttgcttttggttctggggggagaggatacgggcttggtcgtcagcg

SEQ ID NO: 17974 - DNA, 708 bp, Emericella nidulans
gcctgctcaagtggacgcgaacataaacccttccacatcactcgactattggaatagtgttcctgccaatgccaatagcatgcttggaatgctgggtccctacccctggtactcgcggattgatcttcgaggctccaagtccttccttgccaaactccgacgcttggtgcccggttgcccgattgaagggaagctcaaccgaggcgtggattgtggcgcgggggtgggccgtgtcaccgaaggttccttagccatgtctgcaacgtggttgatgctgttgaaccagtgggcaaatttacgcaagttctcaatgagagcgcactcaagaaggcaggcgtcattggagacgtctacaccatgggtctagaggcctggaacccgcccccacggtattatgacttgatatggatccagttctgtataggacatttgaatgatcaacagctggaggacttgatcaagcggtgttgcgcacgtctgacggatggtacgggaatcttggttttgaaggagaacatctcgacggatcccgggaacaatgatatgtttgacgaagaggatagcagcgtgacgaggacgaacgacaagttcaggtctattttcatcaatgcagggatgcaggtcattctatctgacctgcaaactgggttcccgaagacctttaagcttctgccagtacggttttatgcgttgcagccacaaaccccc

SEQ ID NO: 17975 - DNA, 709 bp, Emericella nidulans
caagggtcaggcgcgtgtcattttacctaccctcacatcatgtatcgagtgtcaactcgatatgcacgctccccgcccggcggtaccgctctgcactatcgccactattccccgccagcctcagcattgcattgaatgggcacaccagatagcatggcaggataaacgcaaggatgatacgtttgacagtgatgacatggagcacatcggttgggtatacaatgccgcgcttgaacgagctaaagaattcaatatttccggggtgacctttcagatgacgcaaggcgtggtgaagaacatcattccggctatcgcatcaacaaacgccgtcatcgcagccgccacaacatctgaagcgttgaagatcgctacctcttgcaatcccttcttagagaactacatgatgtatgctggggaggaaggcgtatacacttacacttttgaagcggaaaagaagccagactgccctgtctgtggtaacctcgcacgcaagataacagtgaaccctgatgccacgttggaggaattcattgagacgcttggggagcgacccgaggcacagctgaagaagccgagcttgagaacggaagagaagaccctttaccagcgcttcccacctcaattggaagagcagactcggccacacctgaaacaaaagcttcgtgatcttattgtgagtgggcaggaggttgctgtgagcgaccctgca

SEQ ID NO: 17976 - DNA, 709 bp, Emericella nidulans
cctgaccgacctccgctacgcgatggtcaacgtggggttcttttatctcgtgaacgctcccatcaaaccgcaaatcagacaagacctcgtgaaaaagtgcagggcaatctttgaccttcctctggagaagaagctcgagatcgaaatggttaacagcaagcactttctcggctactctcgacttggggccgaaatcactgcacggaagcaggactaccgagaacagttcgatgtgcgcatatccacaagatctccccgtataagatccaaaatcaggcgatatactgattgcgatatagtttgcgacggagttacctgctcctgcaccggacgagcccctatataggaacattaggggccccaaccaggtactggattcccaccccgcattatactttggccttaatctgatcttaattagtggcccgatgagaatgcaatcccaggcttccgccaatccgtcgaagcatacctggcggaactgagcccggtggcggagaatttccaggtcctcatcgccgaggccctggatctgcccccaaacgcgctgaaacaattctttgataagccggtgcagcagaagatgaaactaatcaaataccctccgccacccagcgacgccgaatcccaaggtgttggacccataaagactcggagttcttgacattcctcctgcaagctactccgcatcacggactcgaagtgcaga

SEQ ID NO: 17977 - DNA, 711 bp, Emericella nidulans
cgtcggagcggtgcagacaaggcggctcgtatgctcgatctcgctgccaatgctactgcgcctattcaggtcgccgctcacgacgccccgatcagatgttgccacatgatcccaaatccggccggtggcacgcctctcctcgtgacgggctcctgggacaaacaggtcaaatactgggatttacggcagtcaactcctatcgcttcgttagagtgtcaggaacgtgtttacacgatggatgtcaaggataaactgctagttattgggacggcggaccggtacatcaatatagtcgacctcaataaccccacaaaattctacaaaaccatgcagtcacctctgaaatggcaaactcgggtggttagctgcttcacagacgcaaatggttttgccgttggaagtatcgaaggccgctgtgctatacagtacgtcgaagacaaggattcgagctcaaacttcagttttaaatgccatcgcgaaacaccgcccaaccagcgtgatatcaacaacatctactcggtcaacgccatttctttccaccccgttcacggtaccttcagtacggccggtgcagatggcacttttcacttctgggataaggatgccaaacatcgtcttaagggatatcccagcgtcgggggcacaatttcaagtactgccttcaatcgcacaggcaacatattcgcctatgccgtgagctacgactggagc

SEQ ID NO: 17978 - DNA, 711 bp, Emericella nidulans
ggctgccgccaagccctactacatttaccccggctttgctttcgtcgcctaccctaaccgcgactctacccctttccgtgagcgctacaacatccccgaggctcagaccctcgagcgcggcactctccgctatcagggcttccccgaattcatcaaggtccttgtggacatgggcttcctgagtgacgagcctcagacttacctcagcaccccgatcgcctggaaggaggccacccagaagatccttggcgcgacctcatccgatgagaaagacctcgagtgggccatctcttccaagaccaccttccccaacaatgacgagcgtgaccgtatcatctccggtctccgctggattgggattttctccgacgagaagatcaccccccgcggcaacccgctcgacaccctctgcgccaccctcgagcagaagatgcagtatggccccgaggagcgggacctcgtcatgctccagcacaagttcggcatcgaacataaggatggctccaaggaggtccgcaccagcacgctctgcgagtacggtgtccctggtggttactctgccatggccaagcttgttggcatcccctgtggtgttgctgtgaagctggtccttgatggcactattaaccagactggtgttcttgctcccatgacttgggacatctgcgaacctatccagaagaccctcaaggaggagtatggtattgaaat

SEQ ID NO: 17979 - DNA, 712 bp, Emericella nidulans
gggaggtgacgccatcactctgaacgacgtggatatggtctggatcgaccacgttactgtacgtcttacttgcgcacgccataccctaaccctatcagtggtcctacggccaggagtatatgctaacgttagcaaagaccgctcgcattgctcgtcagcacatcgtcctcggcaccgaagccgacaaccgcgtgaccatctccaactcgttcatcaacggtgaatccgactactcggccacttgcgatggttaccactactggggtatctacctcgacggctccagcgacatggtcaccatgaagggcaactacatctaccacaccagcggtcgtagtcccaaggtccagggtaacactctgctgcacgctgtatgtccttcataccaacaattgaagacgatctgacaaagctaatgcgaataggtcaacaactactggcacgacaactctgatcacgccttcgagatcggtgagggtgcctacgtgctcgctgaaggaaacgttttccagaacatccccaccgtggccgaggaccccattgagggtgagctcttcgcttctccctccgaatctgccaacgaggtttgctcgacttaccttggccgtgtttgcgagctcaacgggttcggcagctctggcaccttcaaccaggccgacaccgatttcctcagcaagttcgagggcaagaacatcgcatccgccgactccta

SEQ ID NO: 17980 - DNA, 712 bp, Emericella nidulans
tccttcattggtgccggactctcgccttacatggttggtctcgttgactccaaaattcgtttagtaccgaccgtggaaggtgggctaatttttctttcgtctgtggcctctgaacgctcttttctcaatctggcttcccgcatgttgtctacgatggcggagacgggtcacgctccagcattgttcatgattcgcaatcgatggaatgttccttatatgtccgtcgccatctcagcaggattcacctggctatgcttcctgtgcatggtaatttcgagctctgaggtgtacaactatctgatgtttttcataaccaccatcggttatgtttcctgggtctgttcgcttgtagcgtacctgcgtttccgaagagtggtcaagaaatcagaaatcatgcctctgcatcgatcttttatccagccctttgggacatatttcgcactgggtggcactgtcttgttgattatgctcaatctctcgcaaatcatggttgcacctcgccatgggctgaatccccttaacggaatccccgcccatattgcgcttaacatgtttggtcttttgtacggcggacaccgactcgttgttgctgtccggaagaaggctacccgattggaaccacacgtggtcgaataccgtggtgacgaggacgaagatcagccccaagaccaagtcattgaaatggaagaaacgcaagggcgaagaccggagg

SEQ ID NO: 17981 - DNA, 715 bp, Emericella nidulans
tcgtcgcattacaccaaacccaaggcgccacctcctcccgaaggctctcacaaaacgtgcgctcaaagcggaagcggaagcacgagatgctttacgaagagagtttttggtcatgcaggacgctataaaaaacactgagatcatggtcccttttgtattctacgatggaacgaatatacctgccggtacagccaaggtaaagaagggcgatcaagtatggctgttgctcgatcgatgccgaaaagtaggtgccgaattgggtgtcagcggtaccagcggggcatcgaaaggacgcaagtacaatcgccgggaatgggcgagggttagcgtggatgacttgatgcttgttaaaggagatgtcattattccacatgtaagactttgtccagtctggtcatgactctttcgctgacagctatctctagcactacgaactgtactactttatcgcaaacagtgttcccagtttctcgagcgccggggggctgctcttcgactattccaacaaacctccaccaccgcctcccaccgatgatcccttataccggccgagtaacgacgaactcgaaggcagcgacaaagatccgacgctaacgaaggtggtcgacagacggtggtacgagcggaacaagcacatttttcccgcaagtctatggcgggagtacgaaccgggaccagaatttgaagagaagatgcgtacaacgagacgcgatgc

SEQ ID NO: 17982 - DNA, 718 bp, Emericella nidulans
ttgcttctcggccgccttactatccctctccaggagaagagaagccttgaaccggccgtcagccagcttctatccaccctagctggcccctatcacgccagaaaccccgtggtcttgaagttttccatctttctggaacctcgctatatttatatagtgtcgtcatcttctggccgtcactttctcaccatctttacttcggaaatcctccattcattatattttacctcagtgtgaagtgcagcattgactctatctcttcaatcattctgcattttatcatataactttctttgcgaggttccgcaaacggatttttcatataattttctcgctggtccaacatggtggaccaggttcgttcaatggagtcccgcgtagggcgaaaaaaccaacgtgagtccccagattaattctcgaattctcgcattagcccttcccagagcttcacctttgtatccggccttctttcgcagagctatgctgacatgctctttccttagggtatggatcgaagggcgaacggctcgtggccggcgtcgtcccattatcaaaagataaaagcttagtgatgatgattcagtcagctggtcgaggtggttgggtgcttccgaaaggcggatgggagacagacgaagcaagtgcccaacaggcggcttgcagagaagcctgggaagaagccggagtaatttgcactgttctccgggatttggggacg

SEQ ID NO: 17983 - DNA, 720 bp, Emericella nidulans
gcgatggccggaaaaatgactctctataaattggtggtgctgggagatggtggtgtcgggaagactgctctcacaattcaggttagccattgtctctggtcggccgcgttgttctgaatggctaatcagatgctttgccattagttgtgtctaaaccatttcgtcgaaacatacgatccgaccattgaagattcgtatcgcaagcaagtcgtcattgatcagcagtcatgcatgttggaggtcctcgatactgccggccaggaggagtacaccgcactacgcgaccaatggatccgggacggcgaggggttcgtcctcgtctacagcattacgtcgcgtgcttccttctccagaataacgaagttctacaaccaaatcaagatggtcaaggagtctgcgaattccagctcgccgtctggcgccagctatctaggctccccgatgagctcgccctcagggcaccacttccagttcccgtaatgctggtcggaaacaagagtgacaaagcggttgagcgggcggtttcggcccaggaaggccaggcgcttgctaaagacctaggatgcgagtttgtcgaggcatccgcgaagaactgcatcaacgttgagaaggcgttttacgatgtcgtcagaatgctgcgcagacagcgcatgcaacagcaaagaccccaggacactcgccggacgactggtcttggccagatgcgtgactctggccccg

SEQ ID NO: 17984 - DNA, 720 bp, Emericella nidulans
tatccctcccactacctacagatggtcagctgactatagatggcagcgaccacatcgcagagctctacaacacaaaacccaagcagcctttcttattcctgaagccctcctcttcaatactctgccctgaagaaggtccagtcttgcgccccaaaggcacaagcctccactatgaggtggaattggctttggtaatgggcaagaaagttcgcgacctcgatccaaacgatgacaagggagcgttggatgcgatccagagtcagtggcccacattatttcttagatagagtgcgactaacataattccgtacaataggatacctcctcgccattgacatgaccgcgcgcaatgtccaagatgaagccaagaagaaaggtcttccttggactatcgcaaagggtttcgacaccttcctccccatatcgcaggagattttgaagtctcaaattcccgatccacacaacgcattccttcgtctgagcgtcaactcgcagcagcgtcaggctgattcctcagggctgatgctgtaccgtattcccaggttgctggcggagatctcgcgcgtgatgacgttggagaagggagatctggttttaacggggacgcctaagggcgttggggaggtgaagagtggtgatgtgatgaaggcgtcgattgaggttgatgggaaggagatcgagcagggacggattgaggttgaggtgcaggatcgggagggc

SEQ ID NO: 17985 - DNA, 723 bp, Emericella nidulans
ggatcggcccacgaaggaccttaacgccagaagatgggcggtgaagcccagttccgcttcattgaataagtaaaaaaacgataaaggtagtggtatttcactggcgccgaagctcccacctattctacaccccatatgtcttttcacaatgtcaaactagagtcaagctcaacagggtcttctttccccgctgattctgccaagcccgttcccttggctgtggtttcgctagatagtagatagggacagtgggaatctcgttaatccattcatgcgcgtcactaattagatgacgaggcatttggctaccttaagagagtcatagttactcccgccgtttacccgcgcttggttgaatttcttcactttgacattcagagcactgggcagaaatcacattgcgtcaacaccactttctggccatcgcaatgctatgttttaattagacagtcagattccccttgtccgtaccagttctaagttggtcgttaagcgcccgccggacggccgaagcctgccaagggcgtccccaccccggtgctggggggcgccggccggttgcccggctagtgcccccctgctccagggggttccccccaaggcccagcgagcccgacccttagagccaatccttatcccgaagttacggatccattttgccgacttcccttatctacattgttctatcaactagaggctgttcaccttggagacctgctgcgg

SEQ ID NO: 17986 - DNA, 726 bp, Emericella nidulans
tgcaagcatctacatcgcttggtacatctgggacaactatttctattccatgctcctggttgtctataatcaaaacgtcaccaaggcctcctacatcagcaacatctacaccgtcggctcctccttctggtctatcgtcatgggggtagttattcgctataacggccgcctgaaatggcaagccctatacttcggcgtccccatcaccatcctcggtgtcgcactcatgatccatttccgccacgccggcgccaatattggctacatcgtcatgtgccatatctttattgccttcggtggcggcaccttggtcatttgcgagcaaatgactgtcatggccgtctcacgacagcaggatatccccgcaattctcgcagctgagagcatgttcatctacattggttccgctgtgggttcttcaattgctgcagctatgtggactggaatcttccccgctaagttaaaggagaatcttcctgccgatgccctacccaatcttgcaacgatctatggtgatatcacggcgcagtatgggtacgctgttgggactcccgagcgcgatgctatcaacttgtcgtatagccagacacagcggctgatgctaattaccgcgacttgtttgtattctgtcactctagtgtcagtgctgctgtggaaagatgtaaatgtcaagaacatccaccaggtgaagggtcgcattttctgaacaaaaagtatagctgaaca

SEQ ID NO: 17987 - DNA, 730 bp, Emericella nidulans
ggctcaggccgtaccgggagaagtatggggaggatgcagacctaggtacgattgccaaagctgcctaccgagatagagtgaacctctcagccgccgggtactataagatgcccactattggatatgagtgggggaattattccgaaaatgtaaagcctatgtatttctattttactcaggtatggcaaggccctctcctacttctttccaggcttcccgctaacagagacagggagtggcatgcaccgaggtcgagctcgacctgcttacaggcacacacacagtcctccgtgcagacctcaagatggatattggccgcagcataaaccctgcgattgactacggacagattgagggcgcattcgtgcaagggcagggtctgttcacgatggaggagtccctctggacgcgatccggacaactggcaacccgcgggccaggcacgtacaagattccggggttcgctgatatcccgcaagtattcaatgtgagtttcctgcaggacaataaagaaaagacgatgtggaaaacgctacggagcatccagtcaagcaagggaatcggggagccaccacttttcatggggagcagtgtgctcttcgcgctgagggatgcgctcagccacgcgcggagggagaggggggtaagcgagccgttggtgctagacagcccagctacggtggaaaggctgaggcttgctgttggagacgacttggtgcacagggcgcag

SEQ ID NO: 17988 - DNA, 730 bp, Emericella nidulans
cgccccaatcgcaattacccactcagccattatttattgtcttcgctgcatgatcaatgcagacatgccgttaaaccaaggctgtctggccctgatgagcatcaaggtcccaccatcctgtctccgatcaccaacaaagaacgcagccgttgtcggtggaaatgtcgtcacttcccaacgcgtcacagatgtcgtattcaaggccttccgcgcttgtgccgcttcccaaggatgctgcaacaacctgacttcggcaaaaacgccaagaaggacccggagaacggcaacgaaatcccaggattcggctactatgagacaattgccggtggcagcggggcaggaccgacctgggatggagagtctggaatccatgtgcacatgacgaacactcggatcacggatcctgaaatattggagaaacggtacccgaccttactgcgtcagttcacactgcggtcgggctctggtgggaaaggtcagcatcctggtggagagggcgtgattagggagatagaattcctgactcccatggactgctcgatcttgtctgagcgccgagttcatcggccatatggactagaggggggcgagaatgcagagcctggaatgaacctctggatcacgaaggataaggacactggggaggaccatacagtcaatattggtgggaagaatactatccatgtcgagactcacgatcgcattgttataatgacgcctgggggtggtg

SEQ ID NO: 17989 - DNA, 732 bp, Emericella nidulans
ccgagccccacgagatcgaatgggcgaagagcaatgccgagtacaccgaattcggcattgcagtctacgacgactacgacgatatgctggcgtcccaggcagatcttcacgcggcctgggtatcgacgagcacagacgttcacgcggttcagtcattaaaggccatcgagaagggcctccatgtactgtgcgagaagccaatcagtacggatctagcgaaggtatctccctccttcacaattcttctcctccaattactcatcggaccacggcaaataactgacggggacgcttgttgtgactaggcgcaatccgtcgtcgatgccgccaaagcgaacccccaactcaaagtaatggccgggttctcgcgccgcttcgatgcctcctatagggatgccgcacagaagatccagaacggcactattggcagcccctttctcgtgcgatccaacacctgcgacctgaaagacgaaacaggcttctttgtccgttacgccgcgcgtaatggaggcatcttcgtcgactgcgcgatccacgacatcgacctgacgctttggtatatggataaccccgtccccaaggctgcatgggcagcgggcaccctacagcaccaccccgaactcgcagaaaacaatgacgtggacaatgctgttggaattgtcgagttctggggcggcaagatcgcctacttttactgctcgcggacgcaggcgcatgggcacgatgtgctga

SEQ ID NO: 17990 - DNA, 733 bp, Emericella nidulans
cctgccgcgtacaccggaactgttggctttaagccctcgtacgggctattatcccgatggggtgttatcgcgtatgccaactcactagacaccgttgggatcttggcaaagcgagtttcagtggctcgagatgtatttggtatgcagttgtcctaacctgagatacgagccatggcatttgctgaccggattttacagatgttttaaacaaacatgatccccgtgatccgacgagtatttcgccgtcgtcaaggtccaggatatcctcgaagttgaacttgcctcagctcacctctcgtctcacgtcccgcccccttcgcatcggcattccgctcgagtataacatctctgaactcgccccttcagtgcggcaggcctggtgtcactccttggaatatttgcgtcagcagggacacacaattcaacctgtatctttacctatgaccaagctagctttgtcagcgtactacgtacttgccccagccgaagcatcttcaaatctagcgaaatatgacggcgtcagatacgggactcgatcggacgacagcacagagaaccagtcagaaacctacctatatgcgaaaactagaggcgctggatttggcccagaggttaagcgacgaatcatgctaggcgcattcagtttgagcgctcaggccattgataattacttcatccaagcacagcgcattcgacgtctggttcggcatgatttcgatgccgctttccaggc

SEQ ID NO: 17991 - DNA, 733 bp, Emericella nidulans
ttgtcctcgcgcagcacgttatgcgcatgaaagccggaacggttggcatacgagcaggtcgattgttaactgcctcggacgcttttgacgtgcgtatcttcggtcgcggaggccacggctcgtcgccccatacttgtatcgatccgattgtgattggtgcgtctattattacccgtttacagaccatcgtcagtcgagagatcacaccgggcgaattagccatcgttacgtgcggcagcatccaagcaggttacgctccgaatattatcccggacgaatgtaacctacagctgagcgttcgatcctacgaccccaaggtccgcgagcgtctcaatacatctatcaaacgcatcatcgaagcagaatgtgacgcatcagacgcaccgaagaaaccagtcattaaacatacattcacggccccagccaccatcaacgacgaaaagaccgtcaagtctctcctgaggacattcggatcttactttggaagtaatctcgttgaagtcgaacctgcggctgcaagcgaggacttttcgctcctggccacggccgttggggcgccgtatgtcatgtggaatttcgggggtattgacacagaggtctgggatgatgctgtgagacagggtaaacgcgacgagctgccggggaaccactcgccgttcttcgcgcctgcagtagaaccgacgatcgttacggcggttgatgctatggctttaggggcattaacgtttctggc

SEQ ID NO: 17992 - DNA, 734 bp, Emericella nidulans
ccacatccaacaacatcccctgctaggcgacactataagccaggcggccgtccataagatcgaagcgctcatatcccagcgagagcaggatctcgcggagctgagggctcaactcgagaatccgctgctcagtcaacgaccggtcgatctattcaacacacatagtccagtatcgaccgttgactcgaagaaaccattggtcattgcgtacagctcccacatgctccacgtattctatatcttgctacacgggaaatgggatccgatatccatgatcgaggacgaagacgattggatcacctcggatagttttcaagcatgcgcctctcatgccctcagtgcgacagcagccgtgcaccaaatcctcaccttagacccagagctgaccttcatgccgtacctgtttggtatatatctactgcaagggagttttatccttctgttgttcgtcgatcgaatgcccgagctgggtttcaacaagtcggtcgaggaagtgtgtgagaccatcattcgcgcccatgaagtgagtgtcgtgacgctggacaccacattccaggtatggcttccttctcatccatgaaaaagaccagtctgatgaagccagaaaaacatccgcaaggtatttcggtcgatgctgcatgatgcgcaacagacggatccacagtttcgggaaacgcacaaggcccggagaagggagattctgtcgctctatcgctggacgcggacttcgcatg

SEQ ID NO: 17993 - DNA, 735 bp, Emericella nidulans
tggccatcacttgctgacaggcataaccgatactaccgcatctaccctgatcaactgggtcgcggcgatgtgtctgcatcctgaagcacatagaaaagctcaggaaggtaggtctttttccgctactcataattacgccacagactgaccattcagaaatcgtctgtgttattgggtgaatcggctactccaccgacgcggatatggtgattcacaatgactccgatatgtgaatccaagagtgagtttaaacgtccagttgtcatttccacatattccctagatctgattcccactagggcccagcgttggatcactgcagttccactatcgctcccccgcgctgccaacgcacccgtacattggggaaagtacaccattcccgaagaaactggactgataatgaactcgcacgccctccacaacgaccctgacatttttccagaaccagacaagtttaaaccggagcgatgggagggaaagcccaatgccagctccaacggagatgcacagcttcttttcactttcggagccggtcgtcgagtctgtcccgggcagcaccttgcagaaaggagtttgtttcttgtcatctcgcattggctctgggggtttgacacactacaagcgacagatgatgataaaaataaaatccccattgacaaggacgatttgagaccgggattcatcgtgtgtctcaacccatttccagcgaagataacgcctcgcacggctcag

SEQ ID NO: 17994 - DNA, 737 bp, Emericella nidulans
catgcttaacgaagtggtggatcgattcgactggcccaccgaatcctggtccatcgatgccacaaaccgcacagtcacgttaaccgcaggttcagcaccagcagagcgaaacctagctctagctcaggtcctcgaaagagcagttaagcaggacctttttgcagtactgcgcggatggcgcaacgaactgtatccggtttacggcccagatggggagttcctacttgagatggaacggtccgcgagtccgctgtttggcattgttgcgtacggcatccatgctactgcttacgtcgaggatgaaaacggcttgaagctgtggataccgcggcggtcgaagacgaagcagacgtatcctagtatgctggacaatacagtcgccggggggatgagtactggggagaagccgttcgagtgtcttgttcgtgaagctatggaggaggcgtcccttcctgaggacgttgtcagagccaatgccactgcggctggctgtgtgtcatatacttatacccgggatagccgtgccggtggtgagacagatctcgtgcagccggaggtggaatacgtctacgatattaagctgcctgcggatgttgttccgaagccgaacgatactgaagtggaggagttctgcttgctcacggttgaggagacgaagaaggcactggctaatggggaattcaagcccaactgtgctgttgtgttgattgatttcttcctccgccatggcattttga

SEQ ID NO: 17995 - DNA, 740 bp, Emericella nidulans
gcagcgatggtaagatcaattcttttccagcttcttaacggcttactatacctgcacacgaactgggttttgcatcgagacctgaaaccagcaaatattctggtaacgtccagtggcgcaattcgcataggagacctaggcctcgcgcgtcttttctacaagcctctcaattcgctcttttccggcgataaggtcgtcgttaccatttggtatcgtgccccagaacttctcatgggcagtcggcattacacccctgctgtggatctatgggctgttggttgcatattcgcggaattgctctcgcttcgtccaatattcaaaggtgaagaagccaagatggacagcaagaagacagttccgtttcagcgcaaccaaatgatgaaaattatcgatataatggggctacctcacagagataactggcctggcatcgtccacatgccagaatattctcagcttcaatctctggcaatgtcccgcgccccaaaccatattagccgaacctcgaatcttggaagctggtaccagaattgcttgaaaaacggcgggtactctgtcaactccagcgttggcacccctggcgatgacggcttcgacctcctttcccgattgctggattacgatccaacctcacggataacagcaaaggaagccctggaacatccatatttcaagaatggcgggccgatctcggccaattgctttgagggattcgagggcaaatacccccaccggcgcat

SEQ ID NO: 17996 - DNA, 741 bp, Emericella nidulans
gtatcccgagatcttcaagagatgtagggagtcgtactcgtgctttctgcataaatcgaacccgacctcagtcttttcagtctctgcagaagagagggagaagttctggaacgagctctacaagacgaaaggatttgagaagtggctttcgaactaccatgacatcttcacaaataaagaggcgaatgacctctactccgagttcattgcgaacaagatcagagagcgtgtgcacgaccccgttacggctgagaaacttattcccaagtgtcacggcttcggtacgaagcgtgtaccgctggaatcggggtacttcgaggccttcaatcggcctaatgttgaacttgtggatgtgaagagcgatccaattgagcggattactgcaaagggagtcaagacgcgggatagcgagtacgacttggacatcctcatctacgcaacaggttttgacgcggtcactggtgcgtttacggccgtggatttccaaggtgtcggtggcgtgaagctcaaggacaaatggaaagatggaccgcggacctttttagggctctgggtcgaatcgttcccgaacatgatgatggtgatgggtccacatcagatgttcggcaatttcccgcggtcgatcgagtatgctgtaggctgggtcagtcggttcatccagaatgcatgcgaacgaggtatatcgtatgccgagtgtacggggaagaaagttgaagaatggacagagcacgtgcatgcttg

SEQ ID NO: 17997 - DNA, 742 bp, Emericella nidulans
caatcatccagccgtcggtcaggaatgcggtcctcgaacccaaatcctccaatcaaacattcgtatacccagtagctcagttcacacctctgctgaagcccgacacctccaccgaatttcctgccgttacaacaattttacggctcctctccagttcaccagcgttttctggcgcccaatggctcttcactgcgggctacttcaacatccatcccgttctctcgtccctcctgatagcaagcacctccccatccaccgcccaagcatcctcaacaactcgcggcaccgttctaaccgcttcaccctgggcaaacggcttctacggctccccaggtatatctggcatgctcccagcagcatacacccatctctcagcccgttttctcgaccgagtcgccgccacgcaggcgacgaacttcatcgaactaaaagaatggcgccgtggcacagtcggtgaaccaggtggctggacttaccacgccaaaggactttgggtcacattaccggaagaagagaaccctagcctgacctttgttggaagcagcaattacacaaaacgcagttacggtctggatctagaggttggggcactggtagttaccggggatgaggaattgaagaggaggttgaaggctgaaacggattggttgcagaccgatgcaattgccatatcaagagatgatttgagaaggacggagaggagagttaggtggaatgttaggttggcgatgtggattgttga

SEQ ID NO: 17998 - DNA, 748 bp, Emericella nidulans
aggcttcgccaacgctctcagtcaggcaattattcgcgaggattccgcgcattctattgccagcaatgaagagtttgagcggactggtcagcttctcgaggacgaaaccttggagctcgctggtgcgccatgggccaaagagggaaacttaaaacacaagcatcatctggattctgttgataagcgggcgaaggaccgcaactggaatgattgtttcgctgtcatccaacagggttggatgcgccttttctcattcaatgcatcaaaaactataaggcaaaagtccaagcaacgttcgcccggtggtgttgtagttggtggaggtaattggaccgagaacgccgaagaaatctggaaattcctcttgcgtcaatccattgccagtgcgcttccgcctccaggctactcaaagtcccgtccgcatgtctgggctttgagtctaccaactggtgcagtacaccttttccaagcaggcacaccggaaatcgtccgggagtttgtctctagtgcaaactactggagcgccagattatccaaagagcctcttattggtggtattagcaacattgagtacggatggagcgacgcgattatcaacagtgcgttgattaatccagagtctaggtcaccaccgtcttcatctgggccaggaccgagacctagccttcaaagttctattcggagctctatcgaccaacaggttgtccggcccaagttgcccgcggatagggtgcacatcagtgactgg

SEQ ID NO: 17999 - DNA, 749 bp, Emericella nidulans
gggagctcatcctccgcatggagaaatctttcggtttttctcttgcagaatgatccccggtatatggtgttcttgctttcgacccgctccggaggcgaaggtctcaaccttgtcagctcatccatagtcatttttctggatgatgattggaaccctcaggtaatgcggcaagccgaatcgtagggttcatcgcatcggccagacacagcccgtacaaatattcaggatacacgccaagggaacagtagaagaccaaatgcgccggcgtatggataagaaggcctacttagcagacaaggtcatgggagagtttggaaacaacataacccaccatacggatctggaggagaccactgaggatgagatctgtttgatacccagcaggccgatcatccctaggtcttttgatgcaaaggacctagtaaactcggactttcattccataatgtcctcctacgctcttgatgaagtcagcatacaggggatgtctcatgcggaaaagagagcatggcttgcacgttcggaacgggtaaagacaaacatcttcaacggtgtcatggtggaaacaaagtataggcgtttttctgtttatgatgaaacagtcctcagcatctccaaagcatctcgtcggatcggaaagtctcgtgtcgtcacagttggagaatggaaggtttcgaaggagagcatggaaatggcaactcctgtcagtcctacctttccgaagcaaggggttggggataaggcgtgca

SEQ ID NO: 18000 - DNA, 750 bp, Emericella nidulans
cggcgttgacccgtccagatgtccgaagagatcgaaaacgctaccgtgatagttccccggtccattttgctcagcgttctcatcaacggcatgctgggctttggcatggccattgcgctgcttttctgcctcggtgatctcgatacagcgctggcgtctccaactggatacccgttcatggagatcttccgctctggaaccaactctgtgggcggcgcagcgacaatgacgtctatcattattgtcgtctgtatctgctcgtctacgggtatgatggccgcgacctctcgccagctctggtcgttcgctcgtgatcgaggtgtgccgggatggaagatatggagttatgtgcgtagtttccaacaaactgggcccatggaatgctgctgacagctttaggtctctccaacaactgctatccctacgtggtccgttgttctcacaacaacgatcgcggctcttctcgcgctgatccctatcggctccgccgtcgccttcaacgacctctgcgccatgtcaatctccggtctctacctgtcctatatcctcgtggcctgccttctcctctggcggcgcgtaacggggtgtatctcaaaaactgctgaggctgatgagatagtaaacacaatcggcgcaaggctggtctggggtcagttttatatccctggaatctggggtgtgattgtcaacgtctttgctatcatttatgcactgatcgtggtcttcttcagcttctggccaccctatgcg

SEQ ID NO: 18001 - DNA, 754 bp, Emericella nidulans
tcagacgataagactatccggttgtggaatgtcctaacagtacgtcttcgtctttacttgtgagaacaggtactaatccactacagggcaaagcacatccaacaccgttcatcggccaccacaactacgtctacgcgatcgccttctcccccaaaggcaatatgctggtcagcggctcctacgacgaagccgtcttcctctgggatgtgcggtccgcgcgcgtgatgaagtcgctccccgctcactccgacccggtcagcggcattgatgtggtctgggatggcactctcatcgcctcctgcgcaacggacggccttgtgcgcatctgggacacgtcgacagggcaatgcctacgcacgctcgtgcacgaagataacccgcccgtttcgtcggtcaagttttcgccgaatggcaaatacgtgcttgcatggacactggatgactgcgtccgcctgtgggactacgttgagggccgctgtttaaaaacctaccagggccactcgaacaagaagtacagtctttccggcgctttcggggtttacgggcagtcgattccaggcaggacaccggggtatgcgtttgcggttagcggcagtgaagatggggccattctctgctgggatgttgttactaagaaggtcttgcagaggatcgaggcgcatgatggggttgtgctgggtgtggatacttgctcgaccggcgaggggagattcatggttagctgtggattggatggaacggtgagggtctggga

SEQ ID NO: 18002 - DNA, 756 bp, Emericella nidulans
tgcgggcttcctctacgactggacgtagaagaatacctttgatgacaccgctgctgagcgtgaagccttgtacgaaaaggtatggaatgagggtggattccgcttttgggtctctatctacaaggacaacctgttgaatcgggaggcgaacaaggagtcgtataacttctggtgcaagaaggtcaggtctcgcatcggggacccagtccttagggagaagctggccccgaaggagatgccgcactacttcggcgtcaagaggccttgtctggagacaagctactacgagcagttcaatcgtgagtctgttgatttagtcgatatcaaggagaatccgattagccacttttcagagacggggatcgtcctccaagatgggacagagcatgaggtagatgtcgtggcggttgctactggattcgtgagtgtgccctctccttccggtccctttggccctgtctggttcgtcaatagcgaagggtgcgacgctgactgctgtgtatataggacgtcgtcaccggcgtcatgacccaactcggcctcaaaagtattgaaggcgaatcccttgaaaaagaatgggtgccaggcgcgcagacctacctcggcctcaccgtcagcgggtatcccaatatgttccacatctacggtgctcacggcccaacactgctcagtaacgggccaacgactgtcgctgtgcagggccgctggatcgcggacacgatagccaagattgaagcgaatggtgtcaagtatatc

SEQ ID NO: 18003 - DNA, 757 bp, Emericella nidulans
tgagcgcgcaagcttcacaactagcatggttggttttggtatcactgtcttctctggacctctcctggctccaacaattggcggctttatagtcatggaggagcaccttggttggcgttggacacactatctcgccggtattcttggggtagcttcgttcattttggttctcttttttctaaccgaatcctatgcccccgtcatattagtctcgaaagcaaggtgtctccgccaggaaagtaggaactggtccatccacgcagcacatgaagaaattgaattaaatttccactcaatctttcaggattacttcgccataccgctcaagctgctcgcgctcgaccctatcatcctgtgcatatgtgtctttggtgccttcgtgtacggtctgctctacctctcaatcacgacatatccaattatcttccaacagatccacggcatgaatcccggcgttggcggtctcccgttcgtagcagtcattgtgggccaagtgttcgccgggatcgtgatgtacggcagacaacgttcgcttagccgcttgattcaagaaaacaacggcgagctcgttcctgaatggctacttctgacggccatacctggttctgcggcgttctcgactggtctcttctggctcggctggacggggtaccgaagtgatgttcattggatctggcctactttgtcaggaataccacagggttcggtctcatcactatgttcccccgtctgtgcagtatgttgtcatgtcaggagg

SEQ ID NO: 18004 - DNA, 757 bp, Emericella nidulans
tcgccttcaaccagactgagacgtccgtacttgcgtctaccggcattgaccgctccattatcctatatgacctgcgcacatcttcgcctttgtctaagctcgttctgaaactagcatctaacgccgtctcttggaacccaatggaagccttcaactttgctgttgcaaatgaagaccacaatgtttacatgttcgacatgagaaagatgaaccgtgccctgaacgttctaaaggaccatgttgctgcggttatggatgtggacttcagcccaacaggcgaggagctcgttaccgcatcatatgaccggacgatccgtctttggaaccgggctactggtcactctcgcgatatctatcacacgcagagaatgcaacggtagggcacttaaacttcacacttttcttaaactctgtgactaacctattcaaagcgtcttttccgccaagtttactcctgataacaaatacgtcctatccggttcagacgatgggaacattcgattatggcgtgccaatgcctctgaccgcagtggaatcaagagcgcccgccagaggacgaagctagagtacgatcaagctcttgtccagaggtatgcgcatatgccggagatcaaacggatcaaacgccagcgtcacgtgccgcggactattaagaaggctcgtgagatcaagaatgaagagcttgcggctatcaagaggcgcgaggagaatattcgcaagcatgctaagaagagtactttgcgcgctagacagagcg

SEQ ID NO: 18005 - DNA, 757 bp, Emericella nidulans
tcggcttggagccagccttggttgaatacctcaatttcgaccctcaatccccgccagcatgggtcagcagccctgacccattacgatctcatgtgtctattggcactgatcttggtctgatcgactttaccagcgctgcaaccaccacgggctggggctggtacttcctcaccggtgacggcgctcttctagaacaagccctaattcaatactctttgtccgttgcgcgccgtcacggctggactcccatttctccgccctcaatcgtctggtcttatctcacagaagcctgcggctttcaaccgcgcgaccagaacaacgagcaacaaatatgggccattgagcaagctgagaaggacaaagcaaagcctccgcggtccctcgcggctacagctgagattcctttagctgccatgcatgcccgcaatgaactggatccggctgccctgccgattaaactagtggggcccagtcgctgctatcgtgccgaggcaggctctcgcggcgtagacaccaagggcctgtaccgcgtccacgaatttaccaaggttgagatgttcggctgggctgacagttcccctacatcgtcatcaccaacctcagacgatctcttcgagggtctcctgacagtgcaaaaggagatcttgacctctctccaacttccttgtcgcatcctggagatgcccacctcagaccttggagccagcgctactcggaaacgtgatatcgaggcattgttcccgtctcgtatgcgtgg

SEQ ID NO: 18006 - DNA, 764 bp, Emericella nidulans
aacgaaacactctttttagagtctaccacgcgcatccagaaagattccgtccagtgagtgggtcatggctcagtccagttgattctattaacacggcctatagttcattcatggacttccaggtctgggacttcccaggtcagtttgaataccttgagtcttcatttgatcttgaagagattttcggaagccacggcgctcttgtctgggtcatcgatgcgcaagatgactacctagagtcggttacccgtctcaaccggactatattggccgtccagcagtattacccaaatatcaacatcgaggtgttcatccataaagtagacgggctgtcagacgaatttcgcacagatacattccaagatatcgtccagctcatttctgatgagctcagcgacgccggttacgaaaacgctccggttcactactacttgacctcaatttacgactattcggtcttcgaagctttcagcaaagtgatccagaaactcatccctaacctgtctactctggaaaacctgataaacaccttatccaacaattgcggctttgagaagagttatctgtttgacgtcctgagcaagatttatattgcctctgatacccgccccgttgacatgtcgtgttacgagatgtgctcggattatatcgacgtgatagtggacatttccgagctctactcctgggatcaccctgaccgcaagcccaaaggcgaacaaaaccaggaagctgaaagctacgttgcacttcatgacgaaaccatg

SEQ ID NO: 18007 - DNA, 764 bp, Emericella nidulans
  unsure (1)..(764): unsure at all n locations
tactcctacctccccttctagcctccttacaatgttgaatggtgcataggctgagtataaatggcaggtgcacaatctctcgccaacgagatntccaacctcgttggcgcttccaacatccacctttcctcccgtatcgccagcattagcgaccatggttcgcacatgagcatcacaacaacaacaggccggaccttcacaggccgaaaagtcattgtctccatcccaagcaccatgtacaaagagctcaacatccagccacccctccctccgcgcctccagaccgtcacgaacgccacagtgctgggagactataacaaagccatcgtctgctacgataagccatggtggcgcgaccacggtttcaacgggtactttgcatcctacgtcggccctatcattctagcccgtgacacttctgttgatgaggtcggcaactactgcctcacctgcttcgtgaatgggaagccagggagggagtggggaaagatgcgcccccacgagcgccgcgctgtggtgctagcacaactcgcacaggtcttcgggcacgaagaggaggtgtataaaccgatcgagttcttcgaccagatctggcagcacgagacgtatagccggggcgcattagcgatatcactgccttgggccatcttacagagtataaggacgtgtacgggaagaaggtcggcaatctgcattttgtcgggacagaatatagcgacgagtggaaggggtatatggaaggggcaatctgctcgggcgaggct

SEQ ID NO: 18008 - DNA, 765 bp, Emericella nidulans
gcgcaggtgagcttgatttccctggctctgtccatgagttcctcgaaggtctcatgggccagccgtacggcggtttcaccgagcctttgcgttccaaggccctccgtgaccgccgcaagctcgacaagcgccctggtcttttcctggagcccctggacttggcgaagataaaaaatgaccttcgtgagaagtacggctccgccaccgaatacgacgtggctagttacgctatgtaccctaaggtctttgaagactacaagaagttcgtccagaagtacggagacctttctgttcttcctacccgcttcttcctggccaagcctgagattggcgaggaattccatgtcgaactcgaaaagggtaaggtactgatcctcaagctgcttgccatcggtcctctttccgaccagactggccagcgtgaggtcttctacgaagtcaacggagaggttcgtcaagtctccgtcgacgataaaaaggcgtccgtcgagaacattgcccgccctaaggccgatgtcaccgacagcagccaggtcggtgctcctatgagcggtgttgtagtcgaaatccgtgtccacgagggctccgaggtcaagaagggtgacccgattgctgttctcagcgccatgaaaatggtatgtttgtgtctttccattagagttctaggctcttcgctaatcatgcactaggaaatggtcatatccgctccgcacagcggcaaggtgtctggattgctggttaaagagggcgactctgttgatgggc

SEQ ID NO: 18009 - DNA, 771 bp, Emericella nidulans
tatgatgtgagtcctaggcctcttacagtcaaaatgaacatcactaactggctgctacgtagttcctcttcaaagtcgtcctcatcggcgatagtggaacgggaaagtcaaatctgctatcgcgttttaccaggaatgaattcaatctagattcgaagtctactattggtgtcgagttcgcgactcgttccatccaagtggactccaagacgatcaaggctcagatctgggataccgctggtcaggagcgttaccgcgcgatcacatctgcctactatcggggtgctgttggtgcgcttctcgtctatgatatcagcaagcatcaaacctacgataatgtcaaccggtggttgaaggagctccgcgaccatgccgattctaacatcgtcattatgcttgttggtaataagagcgatttgaggcatctccgagctgtcccgacggaggaagccaagcaatttgccagtgagttctccttgcacgcttgcatggattatctcttgacacttacgctcaataggcgagaacaacctttcattcatcgaaacttccgcactggacgccagcaacgtcgagcttgctttccagaacatcctcacaggtatagctccagttggaatttctaaaagacgctcactgaccgctattcttttttttgtagaaatctaccgcatcgtgtccagcaaggcgctcgaaggcgaatccggcggagcctctgtcggggagcgtcgtcagatcatcgatattgagaagacccaagacaccgagaac

SEQ ID NO: 18010 - DNA, 771 bp, Emericella nidulans
gaacggagactgacgttagttgggtaaataggaatttatcctcctctccgacgtcctcggcctctccatcctcgtcgactcaatcgaccaccccaaaccccccggcagcacagaaggcacggtcctggtcccttccacacccacgaagccgaggaactgtctcagggcggcttgatgtccaaggaccccgctggtgaaccactactggtggtctgcaccatcaaagatacagatggcaagcccatcgagggcgtcaaggtcgacatttgggaaaccgactcaacgggccactatgacgtccagcacgcagaccgctccggccccgacgggcgatgcatcatgcactccaacaaggacggagtcttctggttcaatgctattacaccggttccgtacccgatcccccacgacgggcccgtcggtaagctgctgaagaaattacaccgccacccctaccgacccagccatatgcatttcatgttcgagaagcaggggtacgaccatctgattacggcgctgtatttgcggaatgacccgtttgagacgagtgacgctgtttttggtgtgaaggatagtcttgttatcgatatcgggacggccggcaaggagattgcggagaaatatggggttgaggagggacataagttgctgacgtatgatttcgtgctggtctctgagaaggagacgagtgagctgcgcgagaggaattcgaaggaggcgttggataggctgggcaggaaggtgaagattgtgaacgggttgccgattccg

SEQ ID NO: 18011 - DNA, 774 bp, Emericella nidulans
aaggtttggccgggagcttttaaggagtcagaggagcagagcgaggacgaggatttcggcgctcaggctgggggaaagaagaagggaccggttgaggaagccagtatgttccctcgctcccatatctatcaattatttttttttctaaaggtcgataatgccaggtttatggacgcagcttgctctagcgtacgccattcacaagagcttcatctttgtgcgcgtgccgctgacagcggctatcacgccgaaagtcgtgaagcagctcagaaaatggggctgggatgtggtcaagggcaagccaaaggccaagtagtggcaatgacggcggcaaattagctctttgaatgacttccttggccgacttcctgcggcatatagtacaccatatccaattttttttattcgttgcatagcgttgtgcagctagatactgagcgcatcctcatatattacattcattgtacattagttgaatctagtcctccactctcgctttttgtcacctgtatccgccaaatgggggttcatgatgtagaaaagttatggtgatgagagtagaaaggacttgaccacgcatgcctctcgacaggtaaaccaacacgcaaaatgagacacatgctgctgatggaaatgcgaaaagcaatgatgcagcaagcctccgataacagaagaaagaaagacgccaaccatttggctcataagggccgtttcctggatataataaaaaaaaaaagcagatccaagccagaatagagattataggatatgagt

SEQ ID NO: 18012 - DNA, 775 bp, Emericella nidulans
ccaagcgcctgccgtctcatgggccgagccctacgtgatcatcctgctcatcctgggcgccctcttcatagctgccttctttgttgtcgaattcaagtacgcaaagcacccactaatccctttccacgccttctccacagacgtttccttcgtactcggctgcgtcgcaacaggctggggctgtttcggtacctggatttactactcctggcgcttcctcctcgactcccgcggcgcaacgcccctccttgcctcagcacagttcatcccgcctggtatttcagggcttctcgcctcctttgcgacggggtttctcatgtcccgcattcgcccaccattgattatgtgcatgtcgttaaccgcatttaccctcggaacgatcctcatcaccattgcaccggtgcaccaaacgtactgggctcttacgtttgtttcccttattatcatcccctggggcatggacatgtccttccccgctgccacgttgatgctcagcaacgccgttgcgcgcgagcaccagggtcttgcggcgagcctggtcacaacgattgtcaactacagtatttctctcagccttggattcgccggtacgatcgagagccagattgtgcatggtgactcacccgaagagcggttgaaagggtaccgctcagcactgtattttgcgattgggctgggtggtttaggactttgtatcagtgtgctttataccatgaagagttatttctggggtcggagaacagatgaggttgagaatagagagaaatccgtggaa

SEQ ID NO: 18013 - DNA, 776 bp, Emericella nidulans
acaagccgaagcccgagtgcctcgagactgcatccagttcttcgtcaacgcagtcaagcacaagaaacagctagataagtggcacgcccaacggatcgtgcaggtcctgctaggaatctggttcgcctctgtccaccagcctgcaatgtgtcttttctacgctctcgacgacctatgtctccacccggagtacgtggttccactgcgagaaaagatctctcaagccgtacaggtgcaggatcccatactcgaatttgacaccacacgcacctgcaagatcgacatctctaccctaccactcttagatgctttcttaaaagagtccgcccgtctccacccaacagactccatctccgtccgccgtaaggcactgcggccattcactttttccgatgggacaagtctcgcgaaaggcgatgtcgcctgtatccctttgcagccagctctgcagaacccagagagctacgcaaacccacttacgttcaatccccataggttcctaaaggataaaatgactagtacatatatcagaagcagcaggtcaaggttcactgacgcggatgtggccttcccaatctggggtttggggaaacatgcctgtccgggtagacattatgcctcccttcttctgaaactagtgctcgcgcatgtcctcctgcgttacgaaattaaattgcccgacagaaaccggaggtctgaaaaaaggtcgttttactggcgctcggatattgtgcctaggtcaggggctgttttgtattttcgggagcggggatcgt

SEQ ID NO: 18014 - DNA, 778 bp, Emericella nidulans
gtgacctggttgcccgtgccgccaaagctgcgcagattgcgctgcagggtcacgggctcagacgttctcagcagcaggcacagcaggcccagcagcagcaagcccagcagcaacaagcccagcagcaggcccagcagcaggcccagcagcagcaacaggctcggcagcaggctcagcaatatcagcagcagcagcaacagcaacagcaacagcaacaacagcaacaacaggctcagcagcaggcgccccagcagggcatccagattctacaaggatatacccccgcgcagcaaccctaccagagcagcccagctccttcaggatatcaacagtctcagacatataacttccaacagagcccaatgcagacaaacttccagcagtacaaccacccctcgccgtcgccaatacccggtcgacctaactcgtctactgccaaccacggctacatgcccggcattccccactactctcaatctcagccgacacaagttctctatgagcgggctcggatggccgcatccgccaaatcctcgcccagcagccgcaagtctggccttcccagtcaacgccgcccatggacgactgaagaagaaaacgccctcatggctggccttgaccgcgtcaagggaccccactggagtcagatcctggccatgttcggccccggcggtacgattagcgacgtctcaaggatcgcaaccaggtacaacttaaagataaagctcgaaacctgaagctcttctttcttaagagtgggattgaggtgcatactact

SEQ ID NO: 18015 - DNA, 779 bp, Emericella nidulans
agcaagggcgatgccaaaccgggccgcaagatgggccacgtcaccgtcaccgcatcgacaatgcacaaggccgaggaatatattcaaccgctcattgacgtcgtcgacgaaatccgctcccagcgccaagacatcaaaacgaatcccgctccctcgggcgttactaagcctcccccgcaggtcgcagtgatgatgggctcggacagtgacctcaaaacccttgtgcctggtctgaagttgctccgggataaattcggcattgaacctgccgttgatatcacatccgcccaccgcacgcctaccttcatggcagaatactctgcctccgctgcggcccggggtatcaaagtcatcattgctgccgctggcggcgccgcgcatctacctggtatggctgcagcgcatacggcactccctgtcatcggtgtcccagttaagggctcatcgttggatggagtggatagcttgtacagtattgtgcagatgcctagaggtatgtatttgctatcacccatggccgagtttcatttctcgttttctgtccgtcgaagacaaagtatactgatgtggtcatcataggtgtccccgttgcaacggtcggtatcaacaatagcatcaacgctgcgctcctggcagcgcggatcattggcgcgtttgacccggatgtccagcggaagttgacggagtacgccgaggatgctcggaaggagaacatggatatgaaaaatgtaaagatgcaggatttggggtgggagaagtacttcaatcagatgtaaaga

SEQ ID NO: 18016 - DNA, 781 bp, Emericella nidulans
ttgctcgacgtggtgcaggatacccaggaggattcgatgtgtcgccatgaagctgcggaggcgctgggcgcgcttggctacgagagcagcttggaggttttgaaggcgcttagggacaacgagaatgaagtggatgttgttcgggagacatgcgacattgctgtggataggattctgtgggagcaatcggaagctaggaaggctgagaaactgaagcctaggtacgctctaattctgcttttctcatgtttaattatcattctccatttccatcctaacatatcatagtgatttcacgtccattgacccggccccgcccatgcccttgactgcgaaagagccttcgattcctgacctagagaaaacactcctcgacacgaatctgccattgttcgaacgataccgtgccatgttcgggttgcgcgatcttgcctcaccacctgatcttcccactgccaagcaagccgtccaatcactcgcaaagggcatgaaagatccctccgctcttttccgtcacgagatcgcattcgttttcggtcagctttgccacccggcgtcagtaccaagccttacagaaacccttagcgacttaaacgaagttggtatggtgcgacacgaagctgcagaggcacttggcagtctaggtgacgtcgaaggcgtggaggacactttgaagaagttcttgaatgacccagaaaaggttgtgagagacagtattatcgtggctcttgacatggcagagtttgagaagaatggggagattgagtatgcgttgattcca

SEQ ID NO: 18017 - DNA, 782 bp, Emericella nidulans
ggggattgcggtcgtcgtgtatcacctcgccgcgcagacggacaagtcgacgcaggattggtggacgaagtcgtggtttgggtatagaaccagcgttgggccggacgggtcggagattgactggagtaaagtgactcggtgggagatgttgggccattactcggcggctctttacggtgcgctctgggcgtattccgggtgggataaggtatgttacctagattaaacaagtcattgctaatcctgccaggcaatctatatcactgctgaactgtcggcgccagcccgccaactcccgctagccatcaacaccgcgatcccaatcgtggtcggaagttacatcgctgtcaacgcagcatactacattctgcttccatgggacgtcgtctccaccagtgacagtgtcgccgtgaccgcgttcaaccaccttctcggcccgggcgtcggcctcctagccgccgccgtcatttgtctcgtcgtcgccggttcactgctcggaagcgccttcgtcggcagccggatgatcgtctccgcgtcgaacaagaactggctcccccgattcctcgggcgggtcggctacatcgggctgcgcccggcctctccatcagacgagtccgacgctcccatcaacgccctcatcttctcaacagcctgctcagccttgtacatcatctttggcaatttccgcgccctggtcacgttcaacggcctgggcgagtacagtttcttcttcctgacgatggtcggtgctctggtgttacggttccgcgagccaaagctgc

SEQ ID NO: 18018 - DNA, 786 bp, Emericella nidulans
tgtgcatgtcggctgggatcacaattcggagatcctccaagacttgtacccgctatgtgaactcattgaatcccgtatctcgcaaggaaagaaggtgcttgtccactgccaacttggtgcaagtcgatctgcctcgctggtgatcgcctacgggttgtacaagaatccgcaactggacttcaattcgatgtatgaaactgtcaaggaacggagtcgatgggtttctccgaatatgagcctcatctatcagctaacggactttcggtcacggctgctgcgtggctcacggccttcatccggggattggtcattgaaggggtctgcaccaccaacaccgcttcccgacgaagccatgtcctctcaaacggagccatcaacagatgcaaatggcaaccctgacactgaaaccacgtcctctacagttccaacgcaaggttctcccagctctaattccctatcggtacccttgactagccacacaactccggtgtccgccaacaacttgagtttttccaaatctctttcaaagaagcgaagtgtttcaccaaggcctctggctttacgacaaagcttcttcaacccagagagcggtaaccgtttcttggagggtgagtctggtggtgacagtgcagggcgccagtcaagagatccccttgcgaagaatgccgatgagccctcactcttttctccgcgaacaacgggcttcatgtcgatgactaggtctcgaccactgtcaggaatccttgaggatgggcgatcaaacgtggcttcaattgcggatcccgg

SEQ ID NO: 18019 - DNA, 786 bp, Emericella nidulans
gcggttgttgatcggcagggtaacctggacaggaatgagttctacaatgtcagtccgcttcgttgcttgttttcctggtatcgcctacactaaaacatttctaggtttcgaaagacgacatcatgggcatatctggaccactcccagccccagacattataaataaaaatcgccacattctcgaatcattcatcaagtactcgcactctatcgtcacactcatcctcagtatcctcaacacaagcttgggtcttcccgagtcgactttgaccaacatccaccgtcttcacgctgtaagcggcgatcaagtacgcttcgttaaagcacctccacagcctgctgatgaccgccgtactgctctaggcgagcatactgacttcgggagcgtgactattctattcaaccgcttgggagggcttcaagtgcttcctccgggtgcggacgcagagtggcagtacgtaaagcctctcccggggcacgtaattgtcaacctaggagacgccatggtgaagttcacaaacgggctgcttcggtcgaacattcaccgtgttgtctctcccccgggtgatcaagcagacaccactcggtttagcctggtctacttctcccggccggaagacgatgtcccgctgcggcgattggaagggtcctctcgcattccgaatcttgatgaaggtgtggtggaagagaatatcaacagcaaggactggatcattcgtcgagccctaggtaggagagtggatgtgcctgatattgagtatgacaagtcagcagggacggagatgc

SEQ ID NO: 18020 - DNA, 787 bp, Emericella nidulans
gctcttcgcgctgcttgggttttcgaagatgcccagaccaaagacgcattggaggggttccagcgcgctctggtcagcgacaaggcgcacacactgggctggcagttttctgagaacgacggccacatcatccaacagttcaaggctctgctgttcagcgccgccggaaatgccggagacaaaactgtggtccaggccgcccaggacatgttccagcgcttcgctgctggtgatattagcgccattcacccgaacattcgcggtagcgtcttctccattgttctgaagaacggcggtaagaaggaatacgatgtcgtgtatgatcgcttccgcaacgcccccacctctgatgaaaagactaccgctctccgctgccttggcgccgccgaagaccctgagctcatccaacgcactcttggcctggctcttggtgatgaggtcaagaaccaggacatttacatgccacttggtggccttcgcaatcacgccgccggtatcgacgcacgttgggcttggatgaaggacaactgggacaccctctaccaacgcctaccccccggactaggcatgctcggaactgttgttcagatttgcactgctagcttctgtacggaagagcaactcaagggtgtgcaaaacttcttcgcaaacaaggataccaaggtgagttcatacgtcttttttttttttttttggtgcatttgactgacaaaattatagggctacgatcgtgctattgagcaaagtctcgacgcaattcgcgccaagatcagctgggtccagcgcg

SEQ ID NO: 18021 - DNA, 788 bp, Emericella nidulans
ccggtaccccattgccgctacatccctttttttagctacaaaagtgaagaagaatgtccgaaggatgaaaaagctggtgatagccgtctgccgggttgcacagaaaaagccggatctggttgtggatgagcaatccaaagagttttggaagtggcgcgataccatccttcaccacgaagacattctgctcgaagcgctatgcttcgatctgcagctcgaacagccatataggatcctctacgattttatctgtttcttccgcgtcaacgacaacaagcatattcgcaattcatcctgggcttttctcaacgattccatgtacacggttctttgcctccagtttccagcccgcgttatcgctgctgctgccttttatgcagccgctagccactgtgatattggatttgaggatgatgaattcggccgatcctggtgggagcagatcgacgttgatatagcacaggttcgccgcgcatgcacccggatggcagagctatacgaaagcaattcgcaacatagacacagccagtactacccacccgttccattagcttggaaagaaggtgctgaaaagaccaggattccgcgtcctggtggctcactcgacgcaccaccagacccaagctccaggaagcgctcgcgggagccagaggacagttcaaaaagcagccagcaaccctcacaggacaccgcatccttgaaaaaagaggaagcctctcagaacggggcccgctcgccaaaacggccccgagtaggttcagacgcagatcaacctcgctctgccgcag

SEQ ID NO: 18022 - DNA, 790 bp, Emericella nidulans
actacacctgttgcttcttgacttcattctggctaacatgtcactagttgggacccaattgtgaaatatatcaaggaccagcactcggcatacctccgcaaagagcttactgcgcagcgtgaccgctacatccaagatacccgcattcactgctgtctgtttttcatccagccctccggccatgcgtgagtttagaagacctatcggcatgtgttgtgtacacgtagctaattacttatttgcttctgaaaagtctgaaacctattgatatcgtcgttctgaagaagctgtccgacgttgtcaatgtcgtgcctgtgatcgccaaagccgattcgctcaccctcgaagaacgccaggcgttcaaggagcgaattaaggaggagtttgccttccacaacctcaagatgtacccgtacgacaatgatgagcttgacgatgaggaacgtgctgtaaatgcccgcattaaggtatgaatttccctggcgtctaattgaggtatctcggtctaatgatattaggacatcattccttttgccgttgttggaagtgagaagactatcgtcgtgaacggccaacctgtccgtgggcgtcaaaaccgctggggtgtcatcaatgtggaggatgagagccactgcgaatttgtttcactgcggaacttccttacccgtacccatcttcaagatcttatcgaaacgacaagccagatccattacgagaccttccgtgccaagcagcttctggcattgaaggagagcagcgctgcgggcggtcacactagcggcagccggcc

SEQ ID NO: 18023 - DNA, 790 bp, Emericella nidulans
ccgtcatcaacgacggcttccacgacctaatcgacatccatatcccagagggctcaatcttgaaacctgtccggcccgctcctatctcatgccgcacacatatgatgggcagaaccatggatgtcatgcaggcgctcatcggcatgaggaacccagtctacgcagcagccgcgggtttcagcgactcccctcatttcttctactccggctacaaaccagacggcgaatggtaccagttgtaccaaattggattcggaggtgtccccgcccgcaatgcaggcgacggtctcgactgccactgtctcttccctgctattaagtccattcccacggagataatagagctgaactacctcgtccgcatcgaggcgaacgagagcgtagccgacagcggcggtgcagggttctaccgcggcggcaatgcacaacgcacaaactaccgcttcttagcccgcggagagttcagtatccacgatgaccggtggttcaccaagccgtggggtatccgtggaggaaagccaggagctcggtctcgaaagaatcctgtaccgatactccaagtcgcaggatgctccgccagtcgaggtcctcccctcgaagtgtgaccacatccgtgtcgacccgggtgacctactcgagtggattacctggggaggtggtggccttggggatccattgactcggcctgcagagaaggtagtgctggaggttcgtcgacacctggtgaccatccagggcgctcgcgacaactatggcgttgtggttaaccctgagagccttgctgttgacg

SEQ ID NO: 18024 - DNA, 797 bp, Emericella nidulans
cgccgccctccaaagtctcaaatatgtcgacagtcgcagcaaaggccctgttcactcaacgccaacgatgcttcagaaatctctatacggcctcctaacagtaggcggtcgctacgcctgggacaaatgggagagctggctcatctcccgggaaggcggctacgaggaaccgtcaccggaagtccgttcattgtcccgaatcacgaatttcctctccacaacacactccattgcggcatttttctcttttctcatcttcttagtagacggtcgctaccgaacactgatcgaccggctcctccgcatgcgccttacacccccctccgcccaagccagccgcgaggtctccttcgaatacctaaaccgccagctagtatggcacgcatttactgaattccttctatttcttcttccactcgtcggcataagccgctggcgccgctgggtatcccgcgcatggcgcaaagccatgtcggcaatccgatcgacaagcgtcgacgaagatgaggtttccgaaaagcaaggcgaactcgccttccttcctgagcgctcctgcgcaatctgctacaaagccaacaataccgcaacaacagaaactgaagtcatcgctgcagcttcgtcgggtgcaggagggatcatcggctctgcacagacggacattacgaacccgtacgaaacgataccctgcggctgcatttactgttttgtttgtattgcgcagaaactcgagggcgaggagggtgaaggctgggtctgcttgcgctgcggagagctcgtcaagaaatgcaagccttgga

SEQ ID NO: 18025 - DNA, 799 bp, Emericella nidulans
cccaacaaagtcccattcctctacaatttctctccctcagtcgtgcctccaccgttggattttccggattgggtccgtataaccgggtattggtttctgagtgaaagttccgactggacgcctccgagagcgctcgcggagttcattcagtgcgctcgacaagacgggaagaagattgtttatatcggctttggatcgattgttgtttctgacccgtcggccttaacacgaacagttgtcgagtcagtacagaaagccgatgtgcgctgcatcctttccaaagggtggtcggcccgtctcggggacccgactagcacgaaggtagaaattccgctgccacctgaaattcaccagattcaatctgccccccacgactggctcttctcgcagatcgacgccgctgctcatcacggtggtgcgggaactacaggcgcaagccttcgtgccggcgtacccaccattattaagcccttctttggtgaccaattcttcttcggcaaccgggtagaagatctgggtgtcggtatatgtatgaagaagctaaatgtcagcgtgttctctcgcgcgctctggacagctactcatgacgagcgtatgattgtgagggcgaaacaacttggggagcggatacgaagtgtaagttcataaataaatatgctaggcatgccctaatctgtagcaggaggacggtgtggcgactgccattcaggctatatatcgtgacctcgagtacgccacaaccctaacccgacagcgctcaagtatttcaagcacgccattttcgccaacgccctcaaca

SEQ ID NO: 18026 - DNA, 799 bp, Emericella nidulans
cccatccgcagcacatctaggctaacagcgtcggtgctctagccagcctctggtcgaacaagtctatcgctctcgtccaccctccgcggcgaccattcggcccctctatttcgctcatcctgcgccgcgcccgtcgctgatctacttcgcaaatacgtccccgcccgttacagtgttctctatagtcgagtcgaacttgcatttcctggcgctctcggaatccgacaccgagcccctcttcgcgttagagttcctgcatcgcgttgtcgatatccttgaggagttcgtgggagcacccttgatttcgtccaaggtacagtcgaactacgatgtggtggctcagttactacatgagatgtgcgatgctggcatcgtctgcaacaccgagctgaatgccctgcaagaggtggtggagatgccggggtggatgggtaagctgttgggcaacgttggattacctgggtaggtgctcgcttatgtttactcggcttcatggtcactaatatgctggcctgttgatatagatcatcaacgccgattttaggacaacccgggctcaagcgacaatcattaacgtccggaaacgcagccctggggccggctattccctggagacgtcctggtgtacggcatacttcaaatgagctttacgtcgatatcgtcgaatctctcacagtaacaatggctccatcaggacgcctcatatctgcgttagtctcgggcacgatcgcctttacggccaaggtatccggtgtccccgacttgattttatctctcacagcacccggagggcaacatg

SEQ ID NO: 18027 - DNA, 800 bp, Emericella nidulans
tccttgcccgcttccgatccgaatgcctataccaacttggtaatgttttccgcggcgctccaaacggcggctttgtacaagtccacccgccggtcataacgtcttccgattgcgagggcgcgggcgagaccttcgcggtcattccgcgcgagacactgataaagggtctcccaaaggaggagcacgaccacttcttccgggcgcctaagtatcttaacgtatcgtcgcaactccatctagaagcctacgcagcggaactggggaacgtctggacgttgtcgcccatgttcagggctgagaagagcgataccccgcgccatcttagcgaattttacatgctcgaagccgaggtcaattttctgtctgaccttgacgcgctgaccgacacagttgagtatcttctgcgtgacctcacgcgccgactctatgatacgccagcggcacaggagattctctccatcaagcgtgacaagggcccggaaacccaggattcaggggaacagatcgaccttcatcagcgatgggccgacctgatgtccggttccaaatggcgctgcataacctactccgacgccattgcggccctccaggaggctgtatcccaaggaaaggcagcgtttgagttttcacctacctggaccggcggcctccagctcgaacacgagcagtacattgtcaacactcttaacaacggccagcctatcttcgtcacagactacccgaaagtcatcaagccgttctacatggcgccctcgcacactcagtccaaccccaaagcggaaggggaaacagtcgcctgc

SEQ ID NO: 18028 - DNA, 811 bp, Emericella nidulans
tcccaaccggaagagactggagcgggatattgaggaggaaaacggcggtgctggtgtctacaatgtcgatctcaagaagagttacactctcgccgacgatgaatggaaacatgataagattccagaagtgtggaacggcaagaacatttacgattacgtggatcctgatatcgaggctaagctcgccgctctggaggaagaggaggagaaactggaggccgatggctactatgactcagacgagagcgtcgaagacgccgaggacgccgacgtccgcatgaaggctgatctcatccgtgagaagcgcaccctgatgcgtaacgaggccaagctccgcaagtcgctcaagaaccgcgcggcaatcccccgcagcgccaaagccaagaagctctcccagatggagcagggcttggacgcagccggctacgacccggaggctgctgtctcccgtgtccgttcccagagccaggttcgtggccgtacgacgacacgcagcgaggtcgaggacggcgacgcaatggacatcgacccctccgatccccgccaggcgatcgctcgggccaagggcgcgctcgcagccaggctgctacgaaccgtctgcaggatggtgttaccgacgagactgccagatccaaggccgaacgcctcgccaagctcggccagaagaagatgaaccgcatggccagacagggagaagccgatcgccaccagaccgtttcccttacgaagcacctggtacgtttcctcgataccctattcaaatcagatttgggccccactaactctataactaggtcgccggcaaacgtgg

SEQ ID NO: 18029 - DNA, 811 bp, Emericella nidulans
gcccaaatccgcgacaaggaaaccgctgccgtagacaggtttggtattgcggagtttccaagcctagttttgcttcctggaaacggaaaagaacatattgtttacaacggtgaacttaaaaagggtccaatcgtcgagtttttcagtcaagcagctgctcctaatgctgatccatgtcccgctactgagaaaacaaagagccactcttcaaagtcgagcgcgtccggaaaggaaccaacatcaaatgaacctttgggctctgaggattctactatagaagctaaacattccgccccaacgcctactcccccgcccgctatcgacaccctcggaacccccgatgctctagaagcagtttgcctagcacccaagtctggcacttgtgtccttgctctcataccagagtctggtgaccctgacaccgaggccagcgcttccaccaaagaggcacttgagagtctagcggaggttgcgcataaacatactcagaggaaaaccaagcttttcccgctgtatagcgtccctgcgtcgaatgccgcggccaaggctcttagagctggacttggcttgcctgaggattcgaagtctgtcgagatcgttgctttgaacgcccgaaggggttggtggagactgtacgactcttcggatcgtgcagattttagtccagtacgggtagaagcatggattgatgccattcggctgggcgaagggcctcgaaacaagctcccagagggcattgtggttacgacggatgaagctgcaaagaaggctgatgatgatgaactgtaaaatatgggcaactgtcattgaa

SEQ ID NO: 18030 - DNA, 812 bp, Emericella nidulans
tggtggccttgctgccctttacaactatcggtggactccgaagttggtcaccaagaccaatgtccaaatcatgcccggggccgagcagggtcttatccagcttgataatgactacactggcgatgacttctccctttccctcaaggctttcaacccttcgtacttggacggtggcctcaccggtatctttgttggaagctatctccagtccgttactcccaagttggctctcggatttgaagccatctggcaacgacaaggcttgaacactcgcccggaatctgctgtttcctactctgcccggtacaagagcgatgactggattgccagtgcccagctacaggctcagggcgttttcactgcctcttactggaaaaagatttctgagcgtgttgaggctggtgttgacatgaacctccagtttgcccctaacgcggctgcgatgatgatgggcggacctagcaaggacggcaccacagccatcggcgccaagtacgacttccgggcctcgacatttagggcgcaggtcgacagtgccggtaaggtcagctgtcttcttgagaaacggatagctatgcccattgcgctcacattcgctggtgaaattgaccaggccaaggtacgttgcatttctttatccattctctcttgggaaggccaatgctggcctcatcctcaccttttgcttcgtgaacagccactaacttaacatcaactatagcaatccgctaaggtcggtctcgctgtctcccttgagatcgctggcgaggaagtcatggagcagacagagaaggctgacccctcgacaatgg

SEQ ID NO: 18031 - DNA, 812 bp, Emericella nidulans
gcagttgttcatcgggtctgagggtacgatcggtatcatcactggtgtttcgattctgtgccctccccgcccgaaagccgttaatgttgcctacttcggtctcgagagctacgataaggtccgccaggcctttggcgaggctaagaagcaactgtctgaaattctttccgcatttgagcttatggacggccgcagtcagaagctcgtgcacgccagcacaggcaataaattcccattagaagaggaataccctttctactgcttgatagagactagtggatcgaatgccgagcacgatatggaaaaactggagaccttcctggagagtgtcatgggtgagggtatcgtcgcggatggtgttctggcccaagatgagactcaattccagagcatctggcgctggcgagaagggatcacggaggccctgagccaccttggcggaacctacaagtacgacgtctcgatcccccttcccgagctgtaccagctggtcgatgactgccgagagcgcttgacgaagatgggctttgttggtgatgatgactcgttccccgtccgcgcggttgtcggttatggccacatgggtgactcaaatttgcatctcaacatcgcagtccgccagtacaacaaggacgtcgagaaggcgattgaaccttgggtctatgagtggattcaaaaacgaaatggcagcatcagcgctgaacacggtcttggccttgcgaagaaggagttcattggatacagtcagaatgacaccaatcttaaactcatgaaacagctgaaggaattgtatgatccggtgagtgctccca

SEQ ID NO: 18032 - DNA, 818 bp, Emericella nidulans
gtattcggtcgatattgctaaagcgctcaagcaaagtggacaagaagtcccagaagccgtacaaaaacttgttgactcgttcttggagaaagtaaaagccggtaaagagaaggccagcaactctggcttcggtggaaagggtctggagcgattggatcaagaacgtgatgcggctcggatgcgcgagcgtcgcacatacaaaaccggagaagagggcgaagatgaggaagagaaggatgaaaagaagaacgaacaggccgaagagcaattcaacaaggttctctcggctgtccagtctacctctgcgcagctacccggcgttccaaaaggcatcgatctggatggcaagatcacagttcacaagagagaagttgatccgaatgctcctaacaatcctcttgataaggttggctcggctgttgcagatatccacgcacggctcagccgtcgtggagtcatgcgatcaggcgtgcctattgacaatcgcggtcctgatgccggtgcgttccatgcgacactggagatcaacgactttcctcgtaagttgctattctacactctcgagaaacaaatgactaacgtggttttacaatacagagaaagctcgatgggcggtcacaaaccgcacgaacgtggccaagatcctcgaagctaccggcacgtctattacgacaaagggcagtttctatcccgccggtaaagagcccggtccgggagagaacccaaagctgtacattttggtggaaggtgaaacgagctgtctgtgacgaatgcgatgcgggagttgatgcgcttgttgaaggagggcacgattgccg

SEQ ID NO: 18033 - DNA, 820 bp, Emericella nidulans
attgcgaactatgggattatcgaaagtcagatcctcatcaacgccggtggaatcctcaataatccgcagatgcctggtctccggggcatggatactttcaacggcccaatactgcatacagcggcctgggaccacacattgatctagccgggaaacgagcaacgattatcggcgccgatgcgagcgctgtccagcttctaccagaaatctgggaagttgtggaccatgtcgatatctacatacgtaccccatcgtggatatctcctcttgttgctttgccggaaggcgatgacaagagacatgtctacactgagacagagaagcggtatttcaagtctgataaggaggcctacctggcaatgcggaagggacttgaggatcagtcaacatgatgttcagcgctttaatgaaagagtcaccggggcagcagagactccgggcgcggtttgaagggtggatgaaggagctcagtcgagataaagccctccaagagaaactgatttcaaagtttgaggctggctgccaaagagtccatcccggggaagaatacctgatcgctctgcagcaggataacgtacggcctgttttcgatccaatacgtgaggtcgtgagagacggagtcgtcctggaagacggatcaatgaacccagccgagatactgaagcagcaactgggttcaatacttccttccggccacagttccctataataggcgctgatggtgtgaatatgcaggatctatggcagacaaacccagtctcgtactttggcctcgcggggtccgggtccccaattatcttatgtgcctagggccaaatac

SEQ ID NO: 18034 - DNA, 820 bp, Emericella nidulans; identical to SEQ ID NO: 18033

SEQ ID NO: 18035 - DNA, 820 bp, Emericella nidulans
gcgttcagatgtattctggactctatctctggtattgagcgcgggggtaggaaagaccggtcagcgtcttggttcctggtgcaggggcagggcgattaggctacgagatcgatgctctaggaggtatgcctatttgacccatgtagcttggagcttccattgaataacgtactaaacccagtcgtcttatctaggtttcgaagtaacgatcaacgagtggtccgcatacatgaacctgatccatcgctatgtagtccaaatcaacgctccggagagcctggtctaccacccctatatagactggtggtctcaccacgccaccacgtccgacatgcagcgcggcgtatcgttccccgattccattccgcggccgtcctccaaggcaagtatagtaatgattgaaggcgacttcactaccatctttgaagatgcggactcaagcacctacgacataatcgtgaccctcttcttcatcgataccgcacgcaatctgctaaactatctcgagacgatctaccgtcttctgaaacccggcggaaggtggataaatctgggtccattgctctacgggacaggcccatggctgcagctttcactcgatgagattgtaaagctgagtgaggcgttagggtttgagtttgaggttgatgtttcagatcaagccgggattgtctgcgggacgctgacgcagggagagggattgggcggcaaggttaggagtatgtatgtcccgtatggacagaataagagggggctcagtcggaatgcgtacgatgcgcagttctggagagcgcggaagaggtaaactgtacatatatca

SEQ ID NO: 18036 - DNA, 828 bp, Emericella nidulans
caagcttcccgatcctgcctacattgacaaagtcatgatttccgctactgaaaacgagaatcaaatcatcaaagtactcacacgccaaacacggcggcccgaagtcggcgacaagttctcttcgcgtcacgggcaaaagggtgttacaggtattattgttgaccaagccgacatgcctttcacggaccagggtatcaacccagacatcatcatgaacccccacggtttcccctctcgtatgacagtcggaaaaatgcttgaacttgttgcaggtaaagccggtgttctttccggccagcacggctatggaacatgctttagcggcacccctgtcgaacaaatgacccagaccctcattgacaaaagcttcagctacggtggcaaggactatcttacctctggcatcacaggcgaagctctccctttctacgtcttcacgggacctatctactaccagaagctgaagcatatggttcaagacaagatgcattcgcgtgcgcgcgggccccgcgccacactcacccgccagccaacagaaggtcgttctcgggatggaggtctgcgtctcggagagatggagcgtgattgtttaatcgcttacggtaccagtcagctgcttttggaacggttgatgatatcgtctgatcgccacgaggttgatgtctgcgagcagtgcgggttcatgggctacctgaactggtgccagcgctgcaagtcatccaggagtgttgtgaagatggtcattccttatgcggctaagctccttattcaggagctgatgagtatgaatgtcacggctagactaaagctcgaagacgagttccccga

SEQ ID NO: 18037 - DNA, 834 bp, Emericella nidulans
attacaccatggggtctacgcaatatctcaaagtcttcaatttcctatggcgcgtgaagcgcgtcgagttctccttgggcagcacatggcgacgttgcatgactggcgccagaggggtcctaggcagcgttgacgacaaagttggcgctgattggaagcgtgcacgatgcgtcattgcggagatgattcattttgtctgccaattacagtactatatcctcttcgaagtcattgagtccagttgggatcaactgcaggcgtctatttgcaagccggggtgtacgcttgacgacctaatagaagctcataccaagtacctcaactctatcacacacaagggtcttctaggctcatcctcaacaaagactactggcaagcaggaagaaggcttcctagctcagctacatcacattttaaaaataatgctggcctacaaggacgcggttgacggattgtactcgttttctgtcgcagaattcactcgacggcaagagctaagcgcaaagattgagacgcgcactgcccagggtcagtggggagtctcagagcgcgacctcctttcttcccgacacagccaggcacaaaggctcgcctccgcatcctcgtcattttctatcacaccaaatgtcggatctggagccgatggagtcgctacgccttcttctcttgcaaaccacgacctctccgcggacgaccatatgcttccatccctccgaactcgcctccgtgacctctcagtggagtttcgttcacggttgaacgtcctcctcggcgacctcgcctaccagcctgacgtagatatgcgatttttgggtgtcgttatgaactttaacg

SEQ ID NO: 18038 - DNA, 836 bp, Emericella nidulans
cggatgcgccgatgctgacggtgctctggtcaagccagtggttacgccgaggtttgctatttcctgctcgccggagcttctccagggtcttggcgacatagtgaagcgcgatagtactctggcggtccagactcatttcaatgaggctcagcaggagattgatgccacgactgagcttttccctcagttcaatggtcgcgaatccgatctgtacgaaagctatgggctgttgacctcgaggtcgatccttgcgcactgcacaattatgaccgattacgaaaaagagaggatctcttcgttacagtgcggcgtggcacactgtccgatcgccaacatgactgtaggcggaggcttcatggtagcgcccgtgcgagacttcctgcgtcgtgggatcaaggtcggcctaggaacagacagcggcggcggttgggcatcgcagatgctggccgttattaggcaagcgatgatcgcctcgaatgcgcgcgaggtgtcagaaggtatggacaaggcactggcattcgaagaggcgttctatctagccacgttgggtggtgcaagagtcctctgtttggatgaccggattggcaacttccaggttggcaaggagtttgacgccgtctgggtgactacgacgactggcttgaagtcggccatgactccaagagaggagggggattcgctcaggaggctgtttgagaagtacatcatgaccggcgacgatcggaacgtagcacatgtgtttgtgaaaggcagacgagtggcggggagtagatgaatgccatttaaaagaggtacctggacaggtccttatggtcagacatttctatatagataga

SEQ ID NO: 18039 - DNA, 841 bp, Emericella nidulans
ccaccaggaggccgttcaccaggtcatgcacctcttttcagaccgcggcactccctactcctaccgtcacatgaacggctactccggtcacacctacaaatgggtcaagcccgatggcactttcaactatgtccagctgcacctcataacagaccagggcaacaagacgttcacggacgccgaggccacgcgcctggccgccgagaaccctgactggcacactcaggacctcttcaatgccattgcccgcggcgaatacccctcatggacctgctagttcagaccctgtcaccagagcaagccgagaagttccgctggaacattttcgacctgaccaaggtctggccgcaatccgaagttcccctccgccgcttcggccgcttcacccttaacaagaatcccgagaactacttcgccgaagttgagcaagccgccttctctccctcccaccttgtccccggcgtcgagccctccgccgatcccgtcctccaagcccgcctcttctcttacccggacacccaccgtcaccgcctcggcacgtcgaactatcaatccattcccgtcaactgccccctgcgcgcattcacgcccttccaccgcgacggcgcaatgagcgtgaatggcaaccatggcgcgaatcccaactacccatcgaccttccggccgctgcagtacaagcccgttaaggcgtcccaggagcacgagaagtgggctggctcggtagtaaccgagcagctgcctgttactgatgaggactttgttcaggccaatgggctctggaaagtccttggtcgccagccgggatcagaggagaattttgtgggtaatgttgcgggacacc

SEQ ID NO: 18040 - DNA, 844 bp, Emericella nidulans
taccatcccgaccggccagatccccacaggcgttacgcaatccgcagaacggcgaaaggagatctacaaagtcgctcataagcacaacgtttatatcattgaggacgagccgtactacttcttgcaaatgcagccgtacacaggagccgatagtgcgccagtgccgcctcctgcgaaccacgaagaatttgtcaagtcccttattccttcatatctgagcattgatgtcgatggccgtgttcttcgtgttgagtcattctccaaagtcctggcccctggctcgcgtaccggctgggtcgtcggctctgagcaggtcattgaacgctttcttcgaaacaccgaagtttccgcccagcatccgagcggtatctcccagctgatgctcttcaagctgttggatgagcactggggacaccttgggtacttcgattggcttatcaacctgcgcatgcaatacaccaaccgcagaaatattatggttcaagcatgcgagaagcatcttcctcaggagattgctagctggatcgcccctgcagcgggcatgttcgtaagtttatatccttgccgctcttcaattgagaacaatactaagatgtcgccacagcactggattcaagtggactggaagaagcaccctgaactcacatctggtaagactcgcgactccatcgaagaggctcttttccatgccgctatcaacaacggcgtccttgtgtcgcgtggaagctggttcaaggccgctggagcaagcgaagacaagcttttcttccgtgctacattcgcggctgccagtgaggagaatatcacagaggcgatcaggagatttggtgatgcgctccgggtt

SEQ ID NO: 18041 - DNA, 845 bp, Emericella nidulans
ccccaaaccgacctcactctccgagagcgagaaattccataaactcaacgcggagacaaaaggtacactaactatcctctatatttacggcggcacctttgctttgaatacaccatcctgctatcctcgaacaacatcgttcctcgccaaagagactggtgcaaaagtgctgatggtccatcagcgactcgcaccgcagaaccccttcccagccgcccttctcgatatctttcaggcgtacctaacactgtcgcgcccccacctaattcacctcacgccgcggtcccgccaggctcggttgttctcgccggcgatagctctggcgcttgccttgctttcggcctgctttattagatcctccttcgtctgagacgcaatggccgatcaatcgtcttccatggccacaccgttgaacctgtcatgcccgccggaatagccgtggtcagtcccgcaacggatctttccgcctcgctgccctctttcgtatcgaatgcgaagacagatattttccaactgccacacgaaacgctcccgtaccttcttccgggctatcccacctgccagctctggccgacaagccctcctcgcgcgaacctctactgccagccgggtatgttgcgcatcctcatcgcagccctgctggctcaggtgactggactgggtgctgccctatctggatggcctcaggtcaggagcaaagtatcgacgcggtactattaatcgcacaggtagcccattcgcagggcgtctcggttacccttcaggaatacgaagccatgccgcatacattcttttttacattccgcgatgctccacagacaaagatggtctttgccgaatgggca

SEQ ID NO: 18042 - DNA, 850 bp, Emericella nidulans
tgggttctggcaccgcaagccgacttatcccaaccagatgtggctggatggactctacatggcgtcgaacttttacgcgcagtggaccaactggttccagccaaacaacaagactgcctgggatgatattatcctacagtacgacttgatcgaggcgcacatccgcgacaacgagactggtctgctctttcatggatacgatgccagcaaagtcgctgtttgggctggtgagtctcttgctctttcagctggtgatgatgcttacttagcttagaccccgtcaccggtgcttctccgcatatctggagccgcgcagtaggctggtactttgtctcgcttgttgagcttctggactacttccccaaatctcaccccggctacaagcgaactctgcagcgctaccaaagccttgccaaggctgtcaagaaaagccaagatgagtccggcggctggtggctcatccaggacccgccatacccaagcgatcctaggaactacattgagagcagcgccagtgccatgtttacttatgctttgttgcggggtatccgtaaaggattcatccctgccaaggaatacaagccggttgcgctggacggatattcgcttctgaagaacgagttcctctcgcacaatgcgaacggaacgctcaactgggaggggaccgtgcaggtaggaagtttgagtgggaacggaacgttcgaggtaggcgcctccttggtcttatagggactgtgctaatcctgatagtactacatctctgtcccagttgtccagaacgattacaagggtgctgggcctttcatgtacgctagctacgagttggaagcgtactgagtgggcgatggca

SEQ ID NO: 18043 - DNA, 852 bp, Emericella nidulans
cccgagcttccgcttcaccctatcaaaaaccatcaaagggcgacggccgtagcgcagcagcaaaagccggctccgcgatcttcaaattcaacaccgatctcggtcagcacatcctgaaaaatggagcgattgccgacaatatcgtcgacaaggccaatgttcagccaagccagacggtccttgaagttggtcctggtcctggtatcttgacgactcgcatcttggagaaggcgaagaaagtcgtcgcggtcgagttcgatccgcgcatggctgcagaattaacgaaacgcgtgcaggcgacgccgatggagaagaagctgcagattgtcctgggtgactttataaagacggatttgtccaagttgccgccgttccaggtctgcattagtaacacgccttatcaggtacgtcctactatttaccctcctgtatcgcgccagagcagggctaacagattcggaccgacagatctcttcccccctcatcttcaaactcctctctatgccaaacccaccgaaaatgtgcgtgctcatggttcaacgcgaatttgccctgcgcctgctcgcccgccctggcgacgccctttactcccggctctcggtcaatgtgcaattcttctcaaaggtgtcgcacatcatgaaagtcggccggaacaacttccgccctccgccgcaagtcgagtccagcgtcgttcgtatcgagccgaaacttggaaagccagagatcagctgggacgaatgggacgggatgctgcggatctgctttgtgcgcaagaacaagacgcttcgcgctgggtttatggcgaccaaaatccgccagatgattgagcgcaattggatcacttgggcggct

SEQ ID NO: 18044 - DNA, 853 bp, Emericella nidulans
tgggaggacctctcgtccattctgactctgaaggtaagcgatcaagacattcgtatattcagcgcagtgtcttatacgagttgcaatgtaggaattcccctcaggaaatagagaagacttcatccgcaatcttaaagatggaaagtacgatgacctggtcgccatctaccgatccaatacttctacaaaggtattccaattccagtggtcgtgggatggagggcgctgacaggtttcagttcactggcccgttcgacgcagaattgatctcgctgttgcccaagtcgctgaaatatatctgccacaatggagctggctacgacaatatcgacattcctgcttgctcagagaagggtgcgtcatgacggtacccatagcgggtttaaagctaatggtcgtaataggaatctccgtctctagcacgccggttgctgtgaacaatgccaccgcagacgtcggcatctttcttatgatcggcgcccttagacaggcctacgtgccattgactgcgattcgcgagggtacggccactcccaaaagctaagggttgtactggactgacgagacaggcaaatggcacggacaaaccacgctgggccacgatcccaagggaaaggtgcttggaatcctcggcatgggaggaattggtcgcgtatgtccgcgcgcccgctatgcctattattgctaacatacgctctgtgtaggaaatggccaaccgcgcgcgacgctttgggatgacaatccaataccacaatcggtcgcgactgagccctgagttggagcagggtgctaaatacgtctcgtttgacgatctgctggctacgtctgacgtgctgagtctgaacctggctct

SEQ ID NO: 18045 - DNA, 853 bp, Emericella nidulans
cggagcaggcacaatatgcagtcgcaagtgcgcgcacttgttcatctcggagcggacgcatgtatcgtcgggcgaaatgtcgagaaaacggagaagatggcgcaggatattgccacggctcggccaggtgcgaaggtggtaggaattggtgctgtggatgtgcgctcgttcggtagtttgcagagcgcagtcgatcgttgtgtcaaggagtttggggcgattgactatgtaatgtatgcggcactccggctgtccttgggcttcgctcgctgaccatctctcgtctacgctggcgcggcgggtaactttctcgcgtctattaaccagatttccgtgaacgctttcaggtctgtgatggagattgacgtgttggggtcatataatacgctcaaggcgacgattccacatcttgtggagtcggcaaagaaacacagggtagactcgaattcatgtatgttggccactcttttccatcatccatcttgctcacaatgagctcttgcagtgaagccatctccagcaggaactggaggccgcatcatttttgtcagcgctacgctccactacacaggaaccccattccaagcccatgttgccgtggccaaagcgggcattgacgccttatcccacactgtcgcgctggaattcgggccattgggtgtgacatcgaacgtcattgctccgggtccgatcgcctcaacagaggtgagtttgccgctgtttttttttttttttttggtgactgatgctaactacacaagggcctggaccgtctcctcccaagcgatcagcttgagaaggctcagagagcgcaacctctgggacgcttcggctccgttcgtgatatcgctga

SEQ ID NO: 18046 - DNA, 854 bp, Emericella nidulans
ctgctgctgcaggcgacgacatattcctcgcagtgccgcctattgctgatcccgagacagagaaagccagtcttgacctactggacgctggctggggttatgctgcctcgaagcccgccccaaagcccgcagacgaggagaagaagagcacacctcctcagtggatacggccttcagcagccctggcagactccggtgtatgtgtggttattcctcttcgttacatcgccaaaacaatttcatggcaccgccgcggagattatttcgtcacagtctgttccggcgcctcgacgcccgcctcggttgctatcgcgatccacaccgtctccaagcatcttacccagtatcccttccgtcgacgtattaagggtggtggccccccacaaacagcccatttccacccgtctaagccaatcctcttcgtcgccaaccagcgtacaatccgtgcctatgatctttcccgccaactcctcgtcaagatcgtccagcccggtgcccgctggatctcctcattcgacattcacccgacatccgctaccgccgcgggaggtgacaacctcattgtcggttcttacgaccgccgcctcctctggcacgatctcgagctctctcaacgtccctataaaaccctccgctaccaccgcaaggccatccgtgccgtcaaatttcaccccggtggccgctatcctctctttgctgatgctagtgatgacggttctctccaaatatttcacggcaatgtcactggtgatatgcttagcaatgctaccattgttccgctgaaagtgctgagaggtcacaagatcacgggtgaattaggtgttctggatatcgattggcacccacgggaagca

SEQ ID NO: 18047 - DNA, 855 bp, Emericella nidulans
ggatggggacagcggattatggaatttaaggagtttgttgataaatacatttggagaaatccgtcgacatcgacggcgagactgcggtcacccgcggctgaggttggcgaccaagtcgagggtcaggaccttgatgaacgggaagacgccaataaaaccgggtatttagcgcagcatgatcttctcagtcagatccccgccttgcgcaaggatatctccgttccagacttctgctatattgacccgccagcaccagatccgggcacaccagtatacttgaagaagtgccaggaacaggaagaggaacggaagagaaaggcgacaaccgtcgggtcgaacactgacgaagcacacgacaatgcaacgggtgactttgtcaccgacgacattcttacaccacccagcgacccaattataaacacgtggatcggcccatcttggacaatctcccctctgcaccacgatccctaccacaacattctcgtccaagtcactggtgccaagtatattcggctctactcgcctcataccccacgttcgcagattcacccccggggcatggaagctgttgcctctgacaaagaaaggagaaatagtcattcctctccaggaaacggtgcaggccgtgttggctcagatggcgatgatacttctacagcacgcatgattgatatgtcgaatacgtcacaggtcgatgtcgccgctattgagctctccccggcggagtcggagcagtgggaggccatgtggccgggatttcagcaggcggagtattttgaaacgatcttgagagaaggagagtcactttatatcccggtgggatggtggcattatgtgaggggattgaaggcgggc

SEQ ID NO: 18048 - DNA, 856 bp, Emericella nidulans
actctttgctcagtatgacgcccattactcatggagtttttgcaaaccagcacctcgtattcattcgacgtagcggtgacaatttgcgagcaataccgcttcacaccagaactcatctacctgctatccaagatggggcaaacaaagcgcgctttaaatttgatcctctccgacttgaaagatgtgtcacaggctattgcgtttgcgaagtctcaagatgacccagatctctgggaggaccttgttgactactccatggacaagccccgttttatacatggcctacttgttgaagcagggacgtccattgatcctattaagcttgtccgacgtatccccagtggattggaaatagagggcctcagggagggtctcactggcttgctaagggaacacgacctccaggcgagcattagccaaggcgcggccaaggttctacaaagcgaagtagcagtcgggatgaataccttgcgtgatggccagcgtcgtggaattaagttcaacattatccaagaatcttccaaatccgaccaggtgaacgatgaggcaaaggctgagactgattctgagaagactccaacgccatcgcgaggttcatttacgcagcaagccggaagatgcgcgggttgtcatcgacctttccacgcgaacggtaagcaaaatcataatcgattgtctttgttcccacacctaacgctacaaaccttcagagaaagagatactcgtcgcttttgcttgcgccatgccttccacctgtcccatgtccaccaatccgagccttcgtcgccagcacatactcccgggcttgaatcaggcgtccagaccccccggccgtacccaccacgtaccccgaacc

SEQ ID NO: 18049 - DNA, 857 bp, Emericella nidulans
tgcgttcaatccctggcaacgctagactgtctggtgtcattggccaccttagccagccagccggggtacgtgaaacctgaatatacggaagagacgtgcatccatgtcgagcaagggcgtcacccgatggtggagcaactccttctagacagctatgtgcccaatgacatcaacctggatagcagcaagacgcgcgctcttcttgtgactggccctaatatgggtgggaagtccagctacgtgcgccaggtggcacttattgcaataatggggcagattggctcatatgtcccagcacaggccgcaaagcttggtatgctggacgcggtgttcacccggatgggcgcattcgacaatatgctcgcaggcgagtctaccttcatggttgagctttccgagacggcagatatactgaagcaagcaacgccccgctctttagtaatactagacgagctgggccgaggcacgtctacccatgatggagtcgccattgcacaggccgttctcgactacatggtgcggtctatccgcagtctcaccctcttcatcacacattaccagcatctttctgccatggtgcattcgtttcctgatggcgagctgcgaaatgtgcacatgcgattcagcgagtcggggactggcgcggacgaagacattacctttctttatgagattggagaaggtgtcgcgcatcgtagctatgggcttaatgttgcgcggctggcaaacttgcctgcgccacttttggagatggccaagcagaagagtgccgagctggaggagaaaattcgtcgccgaagacttgctggttttgttgctgcggttggagcggtagtgcagtcgaatcaggccgatga

SEQ ID NO: 18050 - DNA, 857 bp, Emericella nidulans
tgttgactttcgctttcaccagcaagtatcagatcttaaggcctatcctgaaggcggacccaccacgatttctgaaattgaggttatgacagaagccggaaatcaggaactcatcacgcttgatccgcaagatatccttattgtaactcttggttcaactacttcaggggctgccatggggtcagataccacgccgcctgaagggctcacttccaactgggaagaggtgctggatggcgactggaagctctgggagaaactggcccagaagtcctccaaattcggcaaccctatgaactttttgcctcgtattccagagtcgaccgtcgaaaccttcacaacaacattcacaggccctggttttgccaacatctacgagaggcttactcaggagaagccaggaacaggggccttcctctccctaagcggaagcaactggggtgtgacgatcagcgttccgcatcaacccgtcttctcgactcagtccgaaaatgtgaccataatgctgggatatgcactgaatcccggcgtcgagggcaattttgtcaaaagagaaatgtggcaatgcacggggcaagagattttaaaggaggttctcttccatcttggctgttgcagtgaggattccaccgaagctaccaccatcctcgctgaagccagaaccatcccatgcggcctgccgctgggcacagctcctcttcttacccgcagctgcaatgaccgtccccctgtcattccgaggtggacgacgaacattggctgcgtgggtcagtttgtcgagattcccgcagattccacattggatatcgagtacagcgtgcatagtgcacagattgctgttgctgagttgatgggtc

SEQ ID NO: 18051 - DNA, 863 bp, Emericella nidulans
caatggcacaaagcacaaacaaaagaatcctgtgactaatcgggacggccatacgaagaaagccggtaatgcgcctcatccttctgaccagccatactacttctatcaagctctacctcattattatctttcgcccctggacattcgcattctcaaagccgcatttggcgagtattcctcgtttcctgcaaccatcctaccgcgtgttgagcacatcacttccggtcacattgtcgatgatgagctacgcaaacgcgtcaagtacctcggccatctccctcaaggctgtgaagtcaatttcctcgagtgtgattggagaggcgttgtcttgccggaagtcttggaacagtttagtacagagatttcgaaaagacgaaagcgacataaggacaaagagcttcgcgaagagaagagtcgtatcagggcagagaaggaagaggatgagaagcgctgggccgcagcgcgtcagagaaggccgagcgtcggcaccagcaatcggccgttctcagatcatgatttcctgccattggcaagtgatagcgccaatatcgatcttgcttcgtcggcgtccccccctcggccatcatcccatttcagtgcattggccagtccttcgagtagtccacccggagcccgcactgtctggggaactgccgctgttacatcacatctaggggcgccgccagatcatatgaggcctactcctcacgatggatggcgtgaagggtgggaagaggagctctttgctcagcaggagtccgatctgatcgcccggaccgccgtggacgagaatagtaacccctctcaaacgaaaaagaaggggaagaagaacaaaaagatcacgctcatgtccacgaacatcc

SEQ ID NO: 18052 - DNA, 868 bp, Emericella nidulans
cagcccgaagcgcaccaaaaaaccgcgtgatatgcctggagactccagactagctcgatttgactatgttgacgctccaaccggagaactggctataattttcacggatatcaagcagtccacaggtctttgggagacgtgccccgacgcaatgcgctcagctatccagatccacaatgatatcctccgccgccaattaggtattattggtggttatgaggtgaagactgaaggtgacgctttcatggtcgcgttttcaacaacaacagctgctttgctctggtgtttcaactgccaataccaacttttggaagctgaatggccgacggaaattcttgagcagcctcagtgccaagttcaattcgacatggaaaataacataatcttccgaggtctgtcagttcggatgggaattcactggggtgagcctgtctgcgaaaaggatcccattactaaccgcatggattactttggaccaatggtaaaccgcgcatcacgaatctcggccgttgctgacggcgggcaaatatttgtttcgtcggatttcatgaacgacatgcagcgtaacctcgagctcttcgccgacagtgaacgtgctgcttctactggttcggaagaaagttatgcactcgatttgggggacaatatccggcgcgaacttcaacaactaaatagccagggatttgtgataaaagatcaaggcgagcggaagttgaaaggccttgagaatcccgaacctctatatctgatttaccctcatgctctatcgggacgcttgtcgacccaggaccaaatgtccggtgaagaaagcacccccaccactattagtcaacactctcaactccagatccaaacagaagctatatgg

SEQ ID NO: 18053 - DNA, 868 bp, Emericella nidulans
cgcatggaatacggacagaaaccgttttttccctctcaccctgcgacgtcccaagaacacgggtaaaagccagcaaggaaatcaggcagctaaatctcggaacaggggaaagctactgaagaggagctattgcaaaatctgaaggcgctggaggctaagaaagggatacgcgttgacgaaaacgacgacgataatgagttcctacctaaagaggacgaagaacccgtgcagccggaaaagccggctattgtccgcttcgagatgccccatatgcgtttcaacgcgcagctcgcagtgcaggaagacacgcttttcatcttcggcgggacatacgagaagggagaccgcgagttcacgttcaacgacatgtactcaattgatctgggcaagatggacggagtcaaggagatcttctacaacgagccgggtaattggcatctgctcaacgaggcggacagcgatgaagagatggatgaagatgatgaagagggagaggaggaagaagaggcggaagaagaggacgcgatgtctcttgatactgcctcggctgcacccactgagaccaccgatgtaaccgtgccttccgtaacccgagacctggagcagctcgatattgaagagcaagacgccgagccgtcaattcaggatagcagaccgtgccgcgcccgtttgagactttacgtgaattctttagccgcacgagtgaggagtggcagcagatcttgcttgagacgttgaatgagaggggagtggcagtggagaagaatataaaggaactccgcaaggatgcgtttaatttggcggaggagaagtggtgggatagtagggaggagattatggcgctggaagatgagcaggaggcggctgg

SEQ ID NO: 18054 - DNA, 872 bp, Emericella nidulans
cagtgttaacttctggcaggatacttcttgggcattcatttgattggtgctgtgtgtctagctgcctggattcagaatgcggatatgaaatatcgaaactatcttgatgagtgcgcattgaatcctgtttggtggtttgtatcatctgctacaatgtttctggttcaattctgactcaccatagggccttctactcggcacaaacaatgtcgaataacttagggcttaccttgacgccagactcaatggtatcatttcaggaagcgacatttccactgttcgtcatgagcttccttgcatacgccgggaacactttgtacccgtgctttctgcgacttgtgatctggaccatgttcaagcttgttcctggggagtcatctctcagagaacctctcaactttctcctgaagtacccgcgtcgttgctacgtgctgcttttccgcagccggccaacctgggccttagctggaatcattttcatcctgaacttcgtcgacattcttctaattctcctgttggacttggataaccctgctgtgaacagcgtccctgctggaccacgagttatagcggccatctttcaggcagcatcggctcggcatactgggactgcctcgttcagtctagcggacgtgaacccagcagttcagtttagtctgcttgttatgatgtatattgcggtttaccctatcgcgattaccgttcgagcttcaaatacatacgaggagaaatctctcggaatttattcccagagccagagacggacgagaacggcaaggggtatatcttgacccatatgcgaaaccagctgagcttcgacctatggtacattttcctaggcattttttgcatttgcgtcgcggaatccaaaa

SEQ ID NO: 18055 - DNA, 874 bp, Emericella nidulans
tgccacctcgtcagcgtcgtcctaccgaaatccataagaaggatccaggaggctgtcagacagcctctgtcgcgactgcagtccttgaagatccccctcgggctatcaggtcactcgttcactgggatgagttgccccattggcagcgagataatcagcatatccatacagggtatcgaccggcgtcgtattcgtttcgcggctcgttccagtccctgacatatattcacaacgagactgttaatatatacacgcatttattgccatctgtcctggcaatccctgccgccattcaactttatcgggcccttgccccacgctatgaaaccgccacggatggcgatattcgcgcttttggctgcttcttcgtgggagcagcgttttgcctagggatgtcggcgttttaccatactatctcgaaccattccccgacggtggcgcgcattggaaacacgtttgactacattggcattgtaggactgattgtgggtagttttgttcctagcgtctactacggcttctactgcgttcctgaattgcagaggctgtattggtccatgatatgcacgattggccttggctgcattgtggtatcgatcttccccaagttccggaccccccgctggcgtccattccgtgcagccatgtttgtcggcatgggcctgtcagcagtgtttcccgtcgtccacgggctgcaactgtacgggcgtgaccagatgatgcgacagattggcctcggctggcttctgctccagggatttttgtacatcctgggtgcggggatatatgcagcccgagtccccgaacggttgcgaccaggggggttcgatctttggggaagtcgcatcagatctttcatgtgcttgtagtttgc

SEQ ID NO: 18056 - DNA, 875 bp, Emericella nidulans
cccgctcaactcccacggattttgacaattgactgattcttgtcgcgtacagttagtacactattctcgaatgatgccccctaccggcggcaaacgataccttacatcgactgccgtgttctttaacgaggttgtgaaactcgccatttccctgacgctggcgctttatgaagtctccaaatccgcacctccgtcggtgcccgcgacatccctcctctccactttagctgcggctattttctccggtgacagctggaaattagccattccggctgctctatatacgctggccaattcgctacaatatattgcgctatcgaatttacctgcggcgacattccagacctcgtaccagttaaaaatcgtcgtgacttctgtgtttagcctcgtactgctgcagagaagtgttcctctgcgcaaatggggactgatacttctactgattgcaggcgtcgcccttgttaatgttcctgttatcacctcggatgagctctcgctcgataatggagcgacgcatttcgacttcccgcggtctcttgaggagtggaagtcggttaaactccaaggtcagggtttgcgcaagcgctctgcgacgtatgagggaatcgaagaggatattttgactgcgactccgtctatggatcggattgtcggcatccttgctactctcggatcctgtgctgcttctggtttgtccggagtatacttcgagaaggttatgcgggatagtgcaaagtctacgtcgctctgggttcgcaacgtgcagattgcggtctattctatttttccggcgctgttcattggtgtagtgttcctggatggcgagaaaatcgctaatggtggagtgtttgaggggtacaactgggtggtttggg

SEQ ID NO: 18057 - DNA, 875 bp, Emericella nidulans
tcgcggagaaagatgaggacgaggagattgccgatgcggattcttattcatcttctcactgcttattctgcaacaacgagtcgacaagcattgaagaaaatatcgaacacatgttcaagagccacggcatgttcatcccagaacgcacataccttgcagatctagaaggtctcattcgatacctttaccggaaaataaacgagaacagcgagtgtatctattgccatgtcatccgaaacagccccgccggcatcaagacacacatgaaagacaaaggtcactgcatgatagcatttgagagcgaggcggaacaaattgagatcgggcagttctacgattttagaagcacctattcagatgaagagaacgacgacgattcggtcgaaatggtcgacggcggcgtcaaagtctccggctcagacgctgaagacgacggatgggaaacagacgcctcatcgttggacgatgatgacgaagaaggaaacgcgaagagcgctcctgcagtctatagaaccgaatacgagctccacctcccatccggccggaccgcaggtcaccgctcgctcgcacgatactaccgccagaatctgcacaactatccgactgcggaggagcgctacgcccgccaacttgccattgagaatggcgagatccaagaggaagagaagccccgtggccgcaacgccaaccgtgcccttgttactcgtgctaacggcggtacgggcatgattggagtcgcggacatcgacaagcgcaacgttgtcgagagcgagcgaaaggaacggactcgtgctatccgtcaagaacagcggtacacagctcgtgtgaacagagccgctaacaaccaaaagcacttcagggtatgccatttttct

SEQ ID NO: 18058 - DNA, 883 bp, Emericella nidulans
ccaccgcagctctcccctgacgaagctgcgccgctattatgtggtatgctgactataaaaccaagtgtgttgaggtgctaagagagagtgatgtagccggaatcgccatgtattcgtccatcatgaaaacaaagactcgtcccggggattggattgtttttcccggtgccggaggtggtctgggacacatgtacggtttaatttactcgcttcttctttgcacttcgaaaaggctgattttctttttgctaggggtgttcaaattgcagtcaagaaagggctcagagttatagccattgacaggtaagtgtcaacacatctaaatcaaagacacatcattctagggcaagtacaagtcgctaaccctaacgcaacagtggtgaaaagaaacagaagctctgcctttcccttggagccacagccttcctagactacaagaccgacgacgtcgaaagcgctgtgaaacaactaacctctggccttggtgcccacgcagtaatctgcacagcgaatggagaggccgcctacgagcaaagtatgcgcttactccggcggctaggtgtccttgtttgtgtggggataccaaatctcgcgttccggctgccggcaacaccatttgacatgatcgttaaaggtgcgtcgctcactacacttcagtgttccttgttctggctttgatactcttcgggttggaaggtaacagtgtgcaggtttgactatcgtgggcagatctcggccgcacggccgaggagatggaagagttgatggagatggctgtagctggggatttgaaggcccatattgagtgttttgaatttgatcagattgatgacgttatacagcgacttgggagatcagagattgaggggagggctgtcatgcg

SEQ ID NO: 18059 - DNA, 884 bp, Emericella nidulans
gcaggagaacgcagcgagcccagcattgtgcgcgcgtaccaagaccttctaaccaagcatgccgctcggggggccctagtcgtagacaattggtggtcgtccgagtctgggtctccaatctcgggattggcgttacggagcgccgtgggacgagtaccgccacgatcagacgagtacgatgttgcgcctctggcgatccgaccagggtcggctggtttaccgatgccgggcttcgatgtgcgggttgtagatgacgagggcaatgaagtcgcgcagggaacgatggggaacatcgtcatggcgacgccgctggcgcccacggcgttcacgcgcctcttcaacgacgacgagagattctataagggctacctcaaacggtttggcggacgttggttagataccggggatgcaggcatgatcgatcaagatgggtacatccatgtaatgtcgcggtctgacgatatcatcaatgtcgcggcgcatagattcagcacaggtattcaccccagcttcaaccgacttcaatataccacagggactaacaggtcaaggctcgatcgaacaagcaatcctctcgcacccggcaatcggcgaagccagcgttgtcggcatccctgacgcactcaaaggccatctccctttcgcattcataacgttaaagcaaagtgggggtaacagccctgcgcgcccgagtgctgaactcttcaactcagtcaaccgtcttgtgcgcgagcagatcggcgccattgcgtcgctgggcgggatgatccagggtcagggaatgattccgaagacgaggagcgggaaaacgctcaggcgggtgttgcgggagctggtggagaatggagcgcgaggggagttcgagaaagaggttgcggtgccgc

SEQ ID NO: 18060 - DNA, 885 bp, Emericella nidulans
  unsure (1)..(885): unsure at all n locations
gccttgtttagtgcctggtccgattccgatcttaagagattcctcgacgagcacggtattcatcttccacagggctccaaacgcaatgagctcattgccttggcacgaaagcantgcgctgctctcgttgaccaagcctcttccgcttcctcttccgtgtcctcaacggcttccgaatacatcggcgctgctacatccagagctggcaacgagtacgcacgtgctactgataacgcaagcttgaagtctcaggaagctttcgatactgccatcaactcctggtctgattcacgcctcaaggccttccttgatgccagaggcgttcccgttccccagaagaacaagcgcgatgagctcctcgctcaagtcagactcaacaagcataaggctgccactggctggtccgcttggacctttgacacctgggacactgaacacctgaagtatgtcactctattttaaaaattggacatgatactaacacaacataggaagtacctctcttctgtaaactcgaaagtcgctcatcgcgccggggttacccgcgacgaactcgttaaggaagcccaagacacgtacgaaaaggccaccaaagccggaggctctcagctcgcttccgcaacttcctacctcaaacaagccaccgccagcgcaaaggacgctacatttgacacctggagtgactcagatcttaagcagtatctcgattcctacggcgtcccagtctaccagggcactgagctgaacgagctccgcgctgcggctcggcgcaacgcccattggttcagatacggcacttccacaccccagggagcactgtacgccaaattcaccggcgctgcacaatggttgttagaccagttgaagattggtgcagcgagcggc

SEQ ID NO: 18061 - DNA, 885 bp, Emericella nidulans
taccgggagcaccccgactgggccctgcaccgtggcgcctacgcacgcacggagagacgcaaccagctcgtcttgaacctggcgctccccgaagtccaagaatatatcatcgatttcatgacagacttgctcaacagcgcggacatctcctacatcaagtgggataacaaccgcggcatccacgaggccccgtctcctagtaccgaccacgagtatatgctgggtgtataccgagtctttgacaccttgacagcgcgattccccgatgtgctatgggagggatgtgcctctggtgggggccgcttcgacgcgggtgttttgcattacttcccgcaaatctggacgtcggataacaccgacggcgtggaccgagtcactatccaattcggcacgagtctggcctatccaccttccgccatgggtgcacatctctccgccgtcccgaatcaccagacgggccgcacggtgccactggagttcagagcgcacgtcgcaatgatgggcgggtcgttcggactggagttggatcccgccacacttcaggatgatccagacgtccctgaacttattcaaatggcagagaaggtgaatcctctggtcctgaacggggatctctaccgcctgcgtttgcctgaggagagccagtggccggcggcactgtttgtggctgaagatggaagccaggctgtactcttctacttccagctgtcgccaaacgtcaatcacgcagcgccctgggtcaggctccagggccttgatccggaggcgagctacactgtcgatggggataagacatatactggtgcgacccttatgaacctgggtctgcagtacacatttgatacggagtacgggagcaaagtggtcttcttagaaaggcagtga

SEQ ID NO: 18062 - DNA, 885 bp, Emericella nidulans
tgacgacgtcccttcaaggcttgatagcctccaatcagttgaagctcccaagcccaccgcaggtcctggcgaggtacttgtgcgcatttccgccgtgtcacttaactaccgcgactatgaaggtgcgtcgaagctcaggagcaagatacaaaaagtctcaggctaattgaatgaaccacagtttgctgcggactatatggccaccacaaatccgtcagccaggacaaggcatcactcgtaccatgctcggatatgtgcggagaaattgttgaggtaggggaaggtgtgacaggttggcagaagggcgacagggtactctcgactttcctccctgaccaccagactggccaggtcgttgagaagatgatggccagtggtcttggtcttccccaacccggggtcttggcggagtatcgtgcgtttcccgcccacggtctcgtccgggcaccgagctacctctccgatgaagaggcggccactcttcccatcgcggcggtgacggcttggatgtcaatcaacggtatgcgccctaagggtcagaatggcggcgagggggagtatatccttcttcaagggactggcggagtatctgtttcgggtttgcagattgccaaagcttcaggagcaaagagtaagttcctcacttcgttctggtgggcagatggaaactaaccactatgtttctagcaatcatcacctcgtcgtcggacgacaagctgaagcaggctaaggagctcggcgccgactacacgatcaactaccgcaagactcctaactgggaggaagaagtattaaagctgactgacaaccacggagctgatattattattgaggtcggtggtgcgggtacattgaagaagagctttaactgcattgcctggggcg

SEQ ID NO: 18063 - DNA, 886 bp, Emericella nidulans
tcaatgcgggcgagaacaagcttgaggtccaacgctccatcaatgcgatcaaggagctaggataccgcggcgtgctcttgggctatgcccgtgaaagtcctagtgggggagtccaagacagacccgcgcgatgagcaggctagccggcaggagatccagacgtggctggacgggaccctccagaccgtggacatggcccaggagggtgactttgtagccttgaagtgagtcctctattgcttgagttgcgacgttagctaaccagtcagattcacgggcatgggtatccaagcgctcgaatacctccagaaccaggcgccgccttcaccgtttatggacgaagcaatcaaacaggtctgcgatcttgcgatctcccggaacgtgcgactactggtagacgcggaggaacaggcggtccagccagggatcgaagagtgggcgacaatgtaccagaaatactgcaactctcgcacccctggccgcgccatcttctacaacacctaccaagcatacctgtgctctactccggccacactcgcgcgccatctcgagatctctcgcaaggaaggatacacgcttggagtcaagctggtccgcggagcatacttgaagaccgaaccccgccatctgatctgggccaagaaggaacagacagatgagtgctacgacgggattgtagaagcccttcttacccggcgatacaaccacatgctaaagcccgcttcggctgaacacaccaccgagcttccccccgtcagtgtgatcgtcgccacgcacaaccgggactctgtccgtaaggcccacgctctgcgtctcgaacaggcaagccggggagagaaatcagatgtcgagcttagctacgctcagctccagggaatggcagatg

SEQ ID NO: 18064 - DNA, 886 bp, Emericella nidulans
cgaacccggccagagcagaagacgctcgagcgttcatgaagcagctccggatcggcaaggggtttgtgcacggcgtcgaccggtcgagccgaccggtcctcattatccggatacgccttcatcgcccaggggaccagagcgaggcggctctcagtcagttcatcacgcacctcatcgagtcggcccggttggtgctgtcgccgccagtcgaaactgcagtaggtccctccccgttgttccagttccggctgacaaggccagacagtgattttcgacctgacggggttctcgctcgcaaacatggtacgttcgatccacaggcaagtttctcgctaacaggtccaggactactccgccgtcaagttcattatccgctgtgtcgaggtctactatcccatgagcgtcggcctcatcctgatccataacgcgccccgaatcttcaacggtttgtggctctcgttgcttccggctgtctcttagagacgagactaacaggagcaggtgcttggaagattatcaagccctggattgacccgaggctggttgagaggatccacttcactcgctctgtggaagacctggagaaatttatggaccgcgaccaaatcatcaccgaactcggcggcgacgaggattgggaatatgagtatatcgagcctgagccagacgagaaccaagctatggatgacttggctgcccgggataccctgctcgcagagcggcagtctctcggggaggacttcattgcggctacctcgcgctgggtctctgcagcccagactggagatccagtacagattgacgaggccaccgcacaccgcgaggagatcattgagcaaatccggctgaattactggaatctagacccgtatgtccgagcccgcaa

SEQ ID NO: 18065 - DNA, 893 bp, Emericella nidulans
ttcgctgcatccctccgacaagcactcacgggtgcgaaagaaacccagtcctttggttgcttcaccacataccggacgaccagactgttcccattcacgatcttgatgagtacgcgcgccgacagtgggagggtgttctcggctacatggttggaaccagtgggctagggattcaacgcgatgtgaatttgagcaaaggcgtgaagcagcttctgcaagccggacatctggtggagatcagggatcgccgtgttgagataactcaagatgggttcgcattcgtcctccaggatgtgggcacgcaggtctggcatatcttgattctttacgtcgaaagtgctgaggccatcgggatggatagcgtcgaagtgctgtctttcatattcctcctcagtagcttggaactgggcaaatcctacgaaaagaagcacttgacatcgaatcacgtccgcactctaaccgatttagcagactttggtattgtctatcaggattctcctgaggcgagccatttctaccctactcgtcttgcaaccactcttacgtccgactcaagcgccctcagcaaccccatctctggcgcactctccgatccggacggcggggattccaaccaaccgggttctggattcattatcattgaaacgaattatcgactttacgcttacacttcttcgccgcttcagatttcgcttattgcgctcttcacgacactcaagtaccgcttccctaacctggtcacgggaaaagtgacccggcagtctatccgccgggcgattgaaatgggcatcacagccgatcaaattatctcttaccttgctacccacgcacacccgcagatgcgcaaacacaatgtcgctcgctcgacatccaaccaggctggaatgccaccg

SEQ ID NO: 18066 - DNA, 896 bp, Emericella nidulans
aagagcaaatttgtataattcgaagtagagggatatattaaagatcgacgaaaattcacaggggcgaatgaagaatcagccctgactgaccaggcttacacatggctcgggcccgaccgctggagcttctttggagagaatgacccactcaccttaagcctcggcctgcgtttagccatcgccgcaccgtatcgcccgtcacgcatcttcatctctccgcaactccagtaactcgaccccagtcactcaactcccgctcactacgttcttatcatatcttcgatgtacacctattcagtctagatcgcatttcacttctatccgcttcccactaccggcttcgaaccgatagtccacaataatgcccccctcacaaactaccacacgcctcctccgcgaattaaaagagtacaccgcgtcccccaatgaagctctccttcacctcggtccaacgaatgaagacgacctttttcactgggaagccgtgctcaaaggcgtaaaaggaacaccctacgaaggtactctctcctagatctccagtttcagattaagaccacccctgctaacctttatggctgcccacagatggcctctggtccctttccatccaaataccgtcgaactatcccctcgccccgcccaagatccacttcaccacgaaaatcagccatcccaacatctccttcacgacgggtgagatctgtctcactctgctgacgaccgaacactggagtcccgtgtacaccttatccagcacgctgacggcgattcaccagctgctgactgatccgcagccggactcgccgctgaatgtggatgttgcggcattgttgagggagggagatactccggcctgggagagtattgtgcggtactggacgagggaggagaggtgg

SEQ ID NO: 18067 - DNA, 898 bp, Emericella nidulans
cgaagcgacgtcccaaaagaagcgaattgcggagttggaacaaaacgtgaaaaaccggttccacgttttagagcgcgcaaaggcgcgcgcggaatgggtcaaataccaggagcaacagaagcaaaagaaggaggaggaggaagagaaggagcggatagagtatgctcaaattgattggcatgacttcgtggttgtggaaacagttcttttcacagaagcggatgatcaagttgaccttcctcctccaacctctctcaacgacttgcagtccgcctcactggagcagaaagcaatgatgtcgctgaaccctctccgtatcgaagaagccatgccaaccgacatggaaactccaacatactacaacgcctaccccgcccagcctgaaccacaacccttcgctcaacctgttggtccggtatattccccacagccgccacctcaaggcattcctactccaccagttgccgcaactgctgcagctcaggaagaagaacagcgcattcgggagcgcatggaagcccgcgaacaagccgccgccgtcaaagcagcccccagtcaacaaccgatgcggatccgctccgattacgtccccggtgcgcaagcacgccgtcagaatgcagcaggcgctatggcactctgtccaaactgtaagcagcagattcccgaagccgaattgcagcagcacatgcgtatcgaaatgctcgaccctcgctggagagagcaacaggccaaggcgcaagcccgaactgcaacaaccaacctctctacagcagacgtggtcaataatcttaagcgcctcgccagccaacgcagcgacgtttttgattccaccgccgttcaatccgcccctaacccggaggaagaggctaggaagaagcgcatggcgtttgaagggccc

SEQ ID NO: 18068 - DNA, 901 bp, Emericella nidulans
tcctcgcatccagaagctcctcagcgactttttcgatggcaagaagctcgagaaggtcagtttcttgtgccactgttaatttgttcaaagcttacattttgcagagcatcaaccccgatgacggtgtcgcctatggtgccgccgttcaggccggtatcctctccgggaaggcaacttcagccgagactcaggatctcctccttctggatgttgttcctctatctcttggtgtcgcgatggaaggtaacatcttcgctccagtcgttcctcgcggccagaccgtccccactattaagaagcgtaccttcactactgtggttgacaaccaaaccactgtgcagttccctgtctatcagggtgagcgtaccaactgcgccgacaacacttctcttggagagttcactttggctcccatcccacctatgagagctggagaggctgctctggagtgtgtcttcgaggttgatgtcaatggtatcctcaaggtcaccgccactgagaaatcttctggccgcagcgccaatatcactatctcaaacgctgtcggcaagctttctaccactgagattgaacagatgattgacggtaataaacccccattggagttttgtgcttcctatactaatcagaaacagatgctgccaagttcaagaccagtgatgaggccttcaccaaacgatttgagtcccgtcaacagctcgagtcctacatctctcgcgttgaggaaatcatctccgaccctacaatgtctatgaaactcaagcgtggcaacagggagaagatcgagtctgccctccagtgatgccatggcacagctcgagattgaggattccactcccgaggatctcaagaagaaggagctggctctcaagagactcatcactaaggccatggcacgcgg

SEQ ID NO: 18069 - DNA, 905 bp, Emericella nidulans
tcaccggcggccaagtcatttcttatggtatcggagcagcgttcgcgcacgttccgcatggctggcggtatatggttgggcttggaggcgtcccctcaatcatcctggcatgcctcctccccttctgccctgaatccccgcgccagctcgtctaccacggcaagacacaagaggccgaaactgtgatccgcaaaatctacaagggtgcctcggatgcccaggttgcagcaaaagttcggttgattgttagggcatgcgatgaatcacgagaactcaacaaagactccacgcgctgggccaagatcaagctcctgcattcgaacccggcgtacttccgcgcgctggtgtgcgcctgcggctttgctgtcattgcccagatgtccgggttcaatactctgatgtactactccgccacgctgtttgatcttgttggcttctcagaccccgttgcagtgggaatagttgttgcgggaaccaatttcgtcatgacgtgggtgaacatgatgcttgtcgacccccttggccgccggcgcgtcgtcctcctaaccgcctggggcatgtctgcgggcctgattgctgtagctatcgcattcaagtttatccctgtagacacctcaactctcgaactcgaaaccgataccgtcagcccacctgccattgtcgtgctcatctttatcatttggttcgttttcttctacggcgcgtccatggggaacacagcctggatgaacacagatttcttccccatggaagtccgcgcaatcgggacgatgttccagacttgctgtacctggggctcgaatataattgtatccagcacgtttctgagcatgatgcaggggataacgccgtctggcgcgttcgggttttatgccgctatctgtgggtttgggtatatcctgatt

SEQ ID NO: 18070 - DNA, 906 bp, Emericella nidulans
gtccgccgtcaagctgctccccattatcgccgccgccgtcgtcttcaccacgctatgcgggattctgacgccagtcattggccactatgtcccctttatgatcatcgccaccatgctcctctccgttggaatgggtctgctgtccacattggaatatacctcacccatccgccatgtgctcggcttccaggtccctgccggtgttggtcttggatgcgcccttcagcagactctcgtcgcagcgcagaccatcctcccaatgaacgatatccccatcggcgtctccttgatcgtgctcgcccagaccctgggcgggaccatagcgctctcggccgcggacacgatctatactggcacgctctcctcgagcatcagcagccgattccctcagatcaacagggaaaccgtgctgactactggaaaccgcgagatccgcaacttggtgcccgccgagtccctgagtgtcattatggacttgtgcaataaggccatcgtcaaaacttggtacctttcgatcggattggccgcagcgtccatcattggcgttctggggatggaatggagaccgggtaacgccgccaaagaagtaaatcttactcgataccttattattacttaaactgcaatggtactttgcatagattaagcgcaataaaactacccatctacatgctgaaatagttaaaacaacacgtttgtcagaccttcgtcagccaacctcagctgcaattagcgcttaccctagtccaagccgcgacctgattccatcatgagtgccagatgagctgatggatcggtgaagaatgaagaaagggtacccactgatggtcttaaaagctccagcctgcagatccggcgatgtgatgaccttcagcttctgccaacggtctataagagccaaaagcg

SEQ ID NO: 18071 - DNA, 907 bp, Emericella nidulans
gaatcatatttttcccagagagccctcgctatgacttcaggcacgggcgcgcggacaaagcccgacaaaccatgtcaaaactttatggcgtgccccagaaccaccgggctatcatagaggaacttactgagattagggaacaactcgaggctgaaactcctccagaggtggttttcatgggtggatagagatgttccaggggcctcggatgttttatcgcataaccctaggcattgtactgcaggcactacaacagctgactggagctaactatttcttctattacggtacgtctacatcagtttttaaggcgtatagtcacgtagtgccatgtggttacaccatgtagtgatatttcacatatatggatgtggctttctggtccctggaccagattcaaatcgaagatgcttcgggaaaacggactgatccattattctaggtacaactgtcttcaatggagcgggtatctcaaacgtgtttgtcacgcagatgatcttgggcggagtgaacttcggcactactttcttcggcctttatgttgtcgagcattttggaagacgaaaaagtttggtgacaggaggaatatggatgtttgtgaatttcatggtttttgcctcagttggccacttttctctgaatgtggaagatccttctgctactcctggcgctggcaaggcaatggttgtcttcgcctgtttgtttattactggtgagatataccccatactttctgggtggatactccactgcggggacacaacgcttatctgtaattttaggtttcgcgactacgtggggccccatgatttgggctatcgtggcagagctttacccatcccgctatcgagctaaggctatggccatggccacggcttcgaactggctgtggaatttcttattgggc

SEQ ID NO: 18072 - DNA, 908 bp, Emericella nidulans
ccaccaacctgatcacttttccaagccattatgctaccgccattgttggcaacctctttatcctcaacaacatcagcctcactgacgcccgtcctgccatcgtcgtacgtcaccccatggacgccgcgaatgagcaaagcgccaacctttacgctacaaagctcgctgaggccggcttcgtcactgtctcgcttgacctccccttctggggcggcagcgaaggcgagccacgcaatgtcgtctcgccggaaccctacgccgaagccttcagcgcggcagtcgactatctggctcggatgcccagcagttcgtctctgtcgaccgcgaacgtatcggtgccgtcggcatctgcggcagcgggggattcctcatcagcgccgcgaagatcgacccgcgcatcaaggctgtcgcggcagcaagcatgcacgacatgggtgctgtaaaccgccatggtctgcagcactctcagttcctcgcggcgcggaaacgggtcatggcatccgcagctcaacagcgatgggttgaagtggacggcggagccacccagtacaccagcggcacgcttgaagtccttacggccaattcgacggacatcgagcgcggtacgacttttaccgcaccccgcggggcgagttcacgcccgagggcacaacgcggaatctgacaacgcacccaactctgtcgagtaattccaagttcatgaacttctatccgttcgacgatatcgagtccatctcgccgcgaccactgcttttcatctcggggggccgggcgcattcgcgcgaattcagtgaggatgcgtgtaggcgcgcggcgaagccgaaagagctgtattaatgctggtcacgtcgatctctacgatcgcgtagagcttatcccgtttggcaaactggcgcgtttcttccggg

SEQ ID NO: 18073 - DNA, 908 bp, Emericella nidulans
tgacccatgtcgggaacccaaactggtaaagcttaccatcgctggctcagtctatttccaatccatataaacaacggatccccaaggtttcttaccagactcaacataacatatcgctctcgcatccgcattctagaatatgtccctccagactcgctctctaggctccggccccgacgctccgcaagtaccctgcatgggccttggctttggcagcctcagcggcttctacggaccagccgggtcccctgaatccagactatcccttctggataacgcatacgcggccggccttcgcttctgggaccttgcagacatctacggcgatgcagaggacctcgtcagcgaatgggtgaaacgatccgacccggccaagcgggatgatgtcttcatcgcaacaaagttcggcctccagcggcaagctgacgggatgcatagatttcgctctgatcctgattatgtaaaagaggcgtgcgagaggagcctgaagaggctcggtgtcaatactattgatctttattactgtcatcgcgtggatggggtcacgccggttgagaggacggtggaggctatggttgatttaaagaagtatgcatccccttttgtcagacctcaatgtatcatcaatttaaagaaagcgactcatgagacgggataaagacaaggaaaaatccggcacctcggcctctcagacatctcggcgtcaaccctccgccgggcgcacgcggtgcaccccatcgctgcgctgcaggtcgaatacagcctattcacactggacatcgaatcatctgagtcagatgtcctacaaacagcccgtgagcttggcgtgactgtcatcgcgttcagccccatcggacgcgggattctgtctggcaaatttacctcctacacatctatccccgagggcg

SEQ ID NO: 18074 - DNA, 916 bp, Emericella nidulans
ccgctctcccacgcttccagactcgaggagtgcacaatgttcccaacctagtgcacaacgcatacttccaaaaacatggcattccagaattcctatctccagaggcatacgacttttcctggacacaatatcaggggctcatggttgataaactgaacttgttgacacagggtaaggctcagaccctgttgttgaaatgggcttccattggacaaatcatagaagccaaagggcacaggactgactatatttctgaagataccgttgatgcggatttgaagcctggagatttgctggtcaagtactcccgtcgtccagaaatggcttcggttttcaactacgcctcgatggcccacaacaaccacttcttcttcaactgccttgtcagtattgacttcacttggcagcgtcagcgacacttttctaacatgacttctgcagtctcctactcccacccagattcccgaaaccttcgcgaacgagatcagcaaatcctgctcgtccgtcgaatccctcaagctcgacttcctcgcgacggcaaacgccatgttcggcccaggtttcgtctggctcgctaagaacctggaacgcgagggtatgatgcacattttctgcacctacaatgctgggtccccctacccggccgcccacgcgcgccgccagcccgtcgacatggccacgcacacgcccgacaccgccctcggcaaccagtacgccggcgcgatgggcgccactcgactaaccagaagaacatcgctcccggtgccgtggatgtccagcccattctctgcgttaacacgtgggagcacgtgtggatgatggattatggtattgcaggcaaggcggagtacttggagcgatggtgggaccggatcaactgggatgtggtcgttgacaactacaacgccgtccgcgc

SEQ ID NO: 18075 - DNA, 916 bp, Emericella nidulans
cgctgaagacacaggccgtcataatgcgtcttatgcgagagcttttcttcacattcgctgttgtgctgctgcttgtgcagttggtgctcgcggccgaggactactataaaatcctgggtttggataagggtgcttcagagaaggacattagacgcgcatatcgcacactgagcaagaagttccatccggataagaatccgtgagtccgcgcatgtctcaggtggaaaaggaatgctataactgaccgagtgtagcggcgacgataccgcacgcgagaaattcgttgagatcgccgaggcgtacgaagtcctgtctacaccatccacgcgcaaaatctacgatcagtatggacgagagggggttgagcagcaccgacagggcgggcaggcaggcggccacacacacgacccgttcgatctattctcccgcttcttcgggggcggcggacactttggacatgcgccgggtcatcgacgcgggccggatatggagttccgcattggactgccgctgcgcgatttctacactggtcggtcgtttgagttaaatattgagcggcacgagatttgcgagacgtgtcagggaacagggtccgcggatcgcgaggtcataacgtgtgataagtgctcgggacggggagtggttattcagaaacatatgcttgcgcccgggatgttccagcaggtgcagatgcagtgtgataagtgtcgcgggcaggggaagactatcaagaaaccttgtcctgtctgtcatgggcatcgagtcgttcggaaggatgttgagacatctgtcacgattgagccgggtatggacaagggcacgcgccttgtgtttgagaatgagggagatgagagtcccgactatatcgcgggtgatttggtcttgattcttgaagagaaagagccggagctgggca

SEQ ID NO: 18076 - DNA, 916 bp, Emericella nidulans; identical to SEQ ID NO: 18074

SEQ ID NO: 18077 - DNA, 917 bp, Emericella nidulans
ctcgcccctggaatcaccgtcatgggccgtcccttgccgcaccttgggggaaagcagctgccatactactgctcggctctctggtctttctggactaccctcgccgtcgcttgcacacttcacttcaccggtgttttcaagctctacacaattattgatgagttcggttcgctcatgagcgtggctattctgtctggctttttggtctcttttgtcgcctacttttcggcattggctcgtggcgcgcagcaccgcatgactggttaccctatctacgacttcttcatgggggctgagctcaacccgcgcatgtttggcatcttggatttcaagatgttcttcgaagtccgcctgccttggtacatccttctccttgtcactatgggcaccgctgcacgccagtatgaggtgtatggatacgtgtctggagaggttggattcctgttcatggcgcacttcctctacgcaaatgcctgctccaaaggcgaggaatgcattgtgtctacatggtgagtttgccctgaagtttgaagaactctgctaattgattagggatatgtactatgaaaaatggggcttcatgctgattttctggaatctggctggtgtacccttgagttactgccactgcaccatttacctcgccaaccacgacccggccacttaccattggaatcgctatttcttggttttcctctacgtcgcctatttgtttgtgtactgggtctgggacacgaccaacagccagaagaaccgctaccgccagatggagcgtggcacgcgagtgttccgcaaggccttcccccaattaccctggcagacactccacaaccctaagactattacggccgctgacggctccaagatccttgttgacggatggtgtatgttttcccctagaaatcttatgaagtata

SEQ ID NO: 18078 - DNA, 919 bp, Emericella nidulans
ccaccacctcctcccaagcctggccagttatcgagccctacaggctgcagcaacagattgctccagcacagcacaacactccgccaccgctacctccattaccaccgaagacgcagagttctcgacagcacatatctccagcacaagcctctataagcaatcaacaaaccagagatcctcactgtttacctcatcatattcctgggggcgcatatcctccgccacaacagctcccacagcagcgcaacggtcctcatccagggcccgcattcgctccagcaccacctgctcactatcaggctgcgaatgagactcatggtatacctctacaacaccagccccctcaattccagggtccaacacatgcggctcctcacccagcatatcaccgacaacctccaccagctcaagtgcatctccaattaccacatcacggaccaactcaagctgctccaaccagccaaccgccagccccgcgaccaaagcccgaaaccgaagatctactcacatcccccttcgagctcgagctcccgtctttcacacccacgggccccgcgcctccaatcccgccaaaccctgaaaaagatgcccttctccaggccgtctccaaagctctcaccgaaacacttcatgcaaacaatgcccactccgagtccgctgcgcactctctagcatcccagtcccactccctccacgccaccattgcaacgctgcaagccgaaatatcctctctgaaaaacttgaactcaactctcgaatccaacacctcaatcctcacgcaatctctccaccgcgctgacgccgtcattgcagacgctcaatcccgtgtctcaaccgctcagtcatcctccagctcagattcctcatcctcctcaggccttccacccatcgacgacattcttgtcgcgcccacagtcgt

SEQ ID NO: 18079 - DNA, 920 bp, Emericella nidulans
ccccttctcgggttgcatgcttttgcattctttctgcttacttgctgattcaatagggtttggtcccaaatttcgtcttctgtcggcaatttacggtctgtcttctcacagaacgaagaggtggctgagggcctcaagaagtttgctcgtgaactttcggcccccgccgcgaatatgatcggctgggagttcaagcccactgatgattatctcactctgcagttgcggaagcttctgatcgcgatgtcggggcttgcgggcaatgagaggtgctgtcattctgtcaccttttgtcttcctttcgaatgtgactaattgttctcagtattgtggctgaagctaagaatcgctttggtctgtgggcaaccgcaaaggacaagagcgctatccacacaaatctccgctctgcaatcttcagtattgctgtctcggaaggtactagagaagagtacgactctgtgaaggacgaatatctcaagaccgattctgttgatggcaaggaaatctgccttggggctctgggacgtacgaaggatgctgcacttgtcaatgagtatctggacttcgtgttctcggataaagttgctattcaggacgtgcataacggtgcagtttccttggcggccaactccaaagttcgtcatttgctatgggagtatatgaagaacaactgggactccgtagaagcacgtctttccgcaaacaacgtcgttttcgagcgtttcgtgcggatgggactctcgaaatttgctgatcatagcattggcgatgatattgctgcattcttccaggacaaggatacaactgcgtatgatcgcgcactagtgattgtggccgacagtatccggaccagtgccaactacaaagaaagggatgaaaagcaagtcttgaaatggctaaaagagcatggttatgcttga

SEQ ID NO: 18080 - DNA, 926 bp, Emericella nidulans
ggtccaactaggccactgctaacaagaattgcgctgtatagttcgcttgactgttattgatacccctggatttggtgactatgtcaacaaccgcgattcctggcaaccgatcatcgagtttctcgacgaccagcacgagtcgtacatgttgcaggagcagcagcctcggcgtacagacaagatcgatatgcgtgtacacgcctgcttgtatttcatccgcccaaccggacacaccctgaagccgctggatattgaggttatgaagcgcctgagctctcgtgtcaacctcattcccgtcattgccaaggccgatactcttagccccgctgatctctctcgttttaagcaaagggtacgccgtcttgcgccgtattaacaaatccgaaggtgtaaagctaatcgcatatcatggttaacagattcaagcggttattgaagcccagggcatcaaaatttacacacctcccattgaagaggacgacgagactgccgccgctcacgctcgcagcctgatggcggccatgccgtttgccgtgatcggttccgagaaagatgtgaagacgaacgatggccgcgtagtcaagggtcgccaatatgcttggggtgttgccgaagtcgaggatgaggagcactgcgacttcaagaagttgcgctcaattctgatccgtactcacatgctcgaccttatccacacaaccgaggagcagcactacgaagcataccgtgcccaacaaatggagacccggaaattcggcgaggcttcggcccaggaaactcgacaaccccaagttcaaggaagaggaagagaacctgcgcaagcgcttcaccgatcaagtcaagctggaggagtcacggttccgacagtgggagcagaagcttatttgcggagcgagatcgcctcacaaggatctggaggctacccatgc

SEQ ID NO: 18081 - DNA, 927 bp, Emericella nidulans
tcttgctcccagcgcgttcaacccagatgttgggatctgtcgtcgctgatatcaatgccccctgatgtcggaaatttgtttgatcagtcatggatcgcccctattcgatacctgcgatattgactcactaccagctcaggcaatcggggaatctgtgtcggtcaccgagcatccgttgtttccgacgccagcgctttcggatccgaaatcagaagacacttcagaaaccacatcaaatcacgtgaagtcctgtctgatctctgtattggatgtcttcagggacgtgtttgctgacacgccgacgccgtgcaagaaagccgatagacagcagagttccagcagggccccaacgatagagtccgttgtgtcagataatagagaggctatcgacacgctcagcgctgttatggattgcccttgctctcacgacggatacatactatccattgtctcacttgctgttttgaaagtgatgggtaggtatatcgccgcagcgaggggacaaatacccgctacggaggacaccaggggctggggacaggaggtctctatgcattcagatagatctaggcaattccttccattcgacgagcagttaccgggctcgccaggcccggtaggcagttactctattgaaggaagaaaccaaaatcgtatggcagcgcagcttgtcttgagcgaattacaccgcgtacagcggcttgtcaacgtccttgcatcacggctagaaaatgttcgcctaaggtcgtgtctttcgccggcttctactttcggccccaacagcacagatagcatcattgagaacccgttgcttgctgcgagacgcatattgccgttatcaggttccacgttctccaaaatggaggatgaccttcgtaaacgccttcgcgccgtatcttctgaaacaatcgaaattctccggcgggc

SEQ ID NO: 18082 - DNA, 927 bp, Emericella nidulans
ccgcaggtgctggatttggaggtcagattggatttgagttgaccgatttcgtcttcatcttgaacgatgctgccgccgtccgcacattctctcaagccggaacccttacgctaggaggtaatgtttcgattgccgctgggccggttggtcgaaacgctgaagccgctggtgctgctagtacgaagggtgtggccgctgtattctcatattccaaaaccaagggacttttcgccggtgtcagcttagaaggaagcatgctggtcgaacgtagggacgccaatgagagactctacaatagccgagtatctgctcgccagctcctcagtggtactatcccgcctccacccgccgccgaacctctaatgcgtgtgctgaactcccgcgctttctacggcgtgcgcacaaacggcgactctatgtacaacgatatccccgtctacgatgatcgtcatgatgatgtggtctgggagggtcgcaggggagaggcatatggcgaggggatcagacgtgatcggacaggataccatggaccttcagatgactacgaataccacgaccggccgcgccgtgcaacgacgtgggctgacgatatatatgatcgtcctgctggaggcttgagtcgttcctccaccgcccgatttagcagccgcaacgacacctttgatacctacaatagacagcggagcaacacctatgatgatgattatgtgtactctgaccgcaaacccagtcgtcctacagcacccaagcccgttttcggacagcgcactgggcaggccgctccgttacgcgaggaccaggccattgcgctgtacacattcgacgcggatcaggacggtgacttgggtttcaagaagggggagattatcacaatcatcaaacgcaccgaaaagaaggaggattggtggactgggcggatcggtgacc

SEQ ID NO: 18083 - DNA, 929 bp, Emericella nidulans
  unsure (1)..(929): unsure at all n locations
tcgctctttcacagcaacgggaccacattctccccggactccgtaataaactcccagggaacgatcgactacgtcaagcttgagcaggtcggcctcccgagtctcacctcgagcaccgtttggggtaccttacccagaacctcgccatcggcgccctgatctcacacgtcctcattttctactggaaggacatggagactgcatggaaacaagcacggagcaggacacagcccgaccctcactaccagggcatgctcaagtacaaggaggtgcccatgtggtggtactatgcctcctttgtgctcgccttctttgctggcctgatcgtcacaataaaaggagagaccacgctcccagcctgggggtacatcatatccctcattctcgggtcttttattgcccctttctcctgcgtgctatacggtctgtacggcactggtgtctcgactaatcagctctcaaaaatggtcgctggtgctctgcacccaggccgacccctggctggtctgtactttgccagctggtcgcaccaggtaattctgctctcagtcaatctcgcaaactggctcaagataggccaatacaccaaggttcctcatcgaatcatgttcgcaacccaagtctatggtaccctcctcggcgcagccctcaactacgtcgtcatgatcaccatcgtcaccagccaacgcgagattctccttgatccgatcggaaacaacgtggttagtggttcgttggttcagagtctcaacagtcaggccatcacctggtcgcttgcaaaagaaatctacgggacacatggttcggtacctcattgtcccactaggtctgattatcggcctcgtcttcccagccatccactgnggactgagcaaaatcttcccacggatccgcaactggccactcaacacgacaatcatcctcgcgca

SEQ ID NO: 18084 - DNA, 930 bp, Emericella nidulans
gccttgttcgagcgtccagtcccaacaatgctctagatcgagttctttccaatttacgttcgcgatcgttaccgatggtaaatgtctggaaaattcgtgctctgccttcccagctcggttctgaagatcttggactgtccccttcattccttagcgacattcgtacttctatgaccaaagtcatacattcggcctgggccgtgaatttcacacttggcgtatgcagtttcgaagcgcagcacattcgaggcgtgcacaatctgatcaatctatgtctcgccagccaacggccctcgccggcggaattctacttctgttcgtctgtgtctgcagctgctgggacacccctccctgccactatcgccgaatcccctgtccctgagctggcgcacgctcagagcatgggctatgcaagatccaagctggtcgcggaacggattgttcaagctgcagcagaaaaaactggcatggttgctaaagttctcagggtgggtcaaattgtaggcgacacggtcaatgggagatggaacaccaccgaagcaattcctctcatgcttcagacagccctcacgctaaaggctctaccagaacttgacgaaacgccgtcttggcttcctgttgatattgtcgcagatgcagttctagacttgagtggtctcaataagacttccgcctcggtttccgccgtcctacgacaattctcgtatgatccgaacaccatctaccacgtgcagaacccaaggaccttcagctggacgaaagagctcctgccggctctaaaagaagctggtcttgactttgaggttctgccaaagagggagtgggttcagcgtctacgtgaaggcgaacaagatccgaagaggaaccccgctgttaagctgttagacttctttaccgagaagtatgacaatgataacccgggtcgatcgg

SEQ ID NO: 18085 - DNA, 931 bp, Emericella nidulans
tagactgtggtcttgcaaaataagtaccctttgtcgaaatggcggacggtggtcagtcaacaccacagcaggttccgcaacaagctgcccagcagacacagaaggtgtcggatgttatccgtagttatcggtccacaaaggttggataggttttcctcttaaggtcgcaggtctaatggaaccatttgctaggtgttcaaatcgaccaagcaagacagctttgtaacgtctcttgatttcgacgaccaaggagagttcgtcgtctcttgcggcgacgatgagattatccaaatattcgacgtcaaggccggtaaaatgacgaagtctatccctagcaagaagtatggcgcacatctggctaggttcacccatcattctcgccaggtcctccacgcaagtaccaaagtcgatggtacgttgaagagtatagctaggattgatacatgctaactgggatagattctctacgtttgcttgatttacacagcgaatcatatatacgctacttctcgggtcataccgataaagtgacgtgtttggctctatcgcccggaagcgactcggtgatctcatgctccaaggatgatacggtttccatctgggatttgggctctagatacgcgcaagggaaactaaagctctcaactccatacctcgtggcttttgatccgagcgcatcggtcattgcaattgcctcccaatcgacatcatctatcctcctctatgacttccgcaattacgacaaatctcccttttcgacctttgatcttgctaagtacgaggagagatatacgccttcgacgcgcggcagagcatggactcgccttgagttctcaaacgacggaaaatacctacttgtcgggaccgattaccatggacatttcgtgactcgacgccttcgagggcgagctcaaggcttttctggttggaa

SEQ ID NO: 18086 - DNA, 935 bp, Emericella nidulans
ccagcatcctctactgctacggatggaccagaaactaccgagcagaaaatatcaaaaagacagctgagacgtcaggccaagctggaacaatgggaagccaaacgggaagagcgcaagatcatacggaagcaaaagaccgctgcgcgaaaagagcgcagacgtgaactttgggaagaagcaaagcgagagggcaaggacccaaacgaggagttgaataaattattccctatgacgacgcggacacggcaccgcaaatcaacacgccttccgctcacactgatcatcgactgcggatttgacgacctgatgcaggataaagagagagtctccctgggtcaacagcttactcggtcgtactctgaaaacaacaagtctgcatttaacggtcatttgatcatttcgtctttcaataaaaagctgaaggagcgcttcgagacggtgcttcacaagacgcacgagggatggaaaggtgtacgctttacgggtgaggattggctacaggctgcgaaggaagcaagtgaggtgatgcagggacctaatggcgggaagctagttggtccatttgaggacaagactgatgcgaagcggaagatggggaaattgtctatctcactagtgacagctcagagacgctgacagaactcaagccgtacagcacatatataatcggtggactggtagacaagaaccggcataaagggatttgccacaagcgggcaacggaattggggatccgaacggctaaattaccaatcggacagtacatccagatgaactcacgccctgtccttgccacaaaccatgtcgtggagatcatggtccgttggctgcaattacgggattgggcagaagcatttatgcagactcttccgccgcgaaaaggtggcgcactaaaagattctgtcaaggggcagagggattcacaccccgggatg

SEQ ID NO: 18087 - DNA, 942 bp, Emericella nidulans
ttttgtctctccctcgtgtaaagcaataacaggcttcgacaagccccaccttgagcacgattacatcacgcgcttcatccacgacgaggacaagcccgtcttcgcgcgcgagttgcacgagtctgtcgccatggccaggccgtttcattgtcacttccggatgtaccaggctgataattcgacctgtctactagaggcgcatgggcacccgcattttgagcagctcaacaatgacgccactggcgctgcaaacttcaaccagtcgcagcaccagcaacaacagcaacagcaccagcagcaacagcaccagcagagactctgtcaaggcgtcttccttgtctgccggccgtaccataacgaaagcaggcacctcctcgactcgttcctcgaacataaacttgagaacgtcagattaaaagaacgcattgcgcagctgaaacgcgaagaagagcgtgaccttcaaaccgccgcgcagcagacaaggtcattgcaagtcccgtcctcacatgctcaacggcctattccgcagacgcacaaggcgtttgcttcgaatctggatccgtcgttgctatccagcggtgcggcggatgataatgagtcctcagatacgctggataattttaatgatatggacgttgggtttggccagggccaggcaagggctgcccgcggacagaaacagggcggcgaagaaacatctgtatcccaccttaacgatgtcgagcttcttacaggtctgcatttcaccaagggcgaaagagcccagggcataagcacgggtactagagacggccgactctattactcgacgacaactaacgccaaaccatcacgggaacagcgtgtgcccccagaaaatgagtccaggaaaaggctgaagactgaatataaatgcgcggactgtggcacatcagactcgcctgagtggaggaaggggccgga

SEQ ID NO: 18088 - DNA, 203 bp, Emericella nidulans
tgacctttgacgctaacctacaaatttatcactacccgtgcccatgtggcgaccgcttcgaaatcgcaattgacgaccttcgatatggcgaggacattgcagtttgtccgagctgcagcttgatgatcaaggttatattcgatcaggttggtctttagaaatactattatatgtttatgagatcagaactgacttctatagtc

SEQ ID NO: 18089 - DNA, 228 bp, Emericella nidulans
gtatccgagcctttggacctcgtccgcctctccctcgacgagatcgtttttgtcaagctgcggggtgatcgcgagctcaagggtcgtttacacgtgggtctatcgtctagccagctggcttcaggacttttgctaatgccaattgtgctcttaggcttacgacagtcattgcaatctggttctaggtgatgttgaggagacaatctacgttgtggaggaggacgagaa

SEQ ID NO: 18090 - DNA, 309 bp, Emericella nidulans
acctggcatcaacctaccagaaacaaggacgatggaataaggccgagaagctctttatgcatgtgacagagacaaggaagatcatgctaggtgttgagcatcctgatactctgagcagcatggcgaacctcgcatcaacctaccggaaccagggacgatgggacaaggcggaaaagttatctatgcaagtcatggagacaagaaagagagtactgggccctgagcatcctgatactctaaccagcatggcgaaccttgcctatacctggaaagctcggggaaagcttcaagactcattggccctaatgc

SEQ ID NO: 18091 - DNA, 353 bp, Emericella nidulans
acagactgcggttctttgcttgaaggctccgtcggggatccaacaaggatcttggtttgtgacgtctgcggaacccgcaacaaaggtgagtttccaaagagcaaatggatgatggaaacctaagaaaagatactgatatgctgcccgccagatactgtaccgaaaacgattgtctctgagtccaaaccgagctctttcccgtcatgctgcgcgcgaagcggtccgcgatccaaactttgacacaagcggacaaaagaacggaagctttaattgagaaggactgccccaagtgtgggaggaaggaaatgtacttcactacagtacaactgcgcagtgccgatgaaggaagtacc

SEQ ID NO: 18092 - DNA, 386 bp, Emericella nidulans
ggcaccgtcagtatcagctcagcctcgccgagcgatccgcccctcgtcgattccaactactacgatacggaaacagaccgggcagtgcttacttacggttctcgccgtacagcaaaagctctgttggaaacctcagctctcaaaaattacgtggaatgcgaggtgcccccaccggacatgccagctctgacgtcgcagtcctctgacgaggagttcgacgctcgtattagagctacgggaatggctcatcaccatcctgcgggcacagccgccatgggtaaggttgtcgacacggagctgcgcgtgattggggttcggaatctgcgggtggtggacgctagtatccttcccgtcagcatagggggtcatccgcaggcgactttata

SEQ ID NO: 18093 - DNA, 390 bp, Emericella nidulans
ccattatcgcgactcgatttttctccgcattaatgatacgggatagctcgcaatatggatggccaaagacaacaaccttacgtaccggcaccgcctccttcggcgtctcagccttcacaggctcatatcatgcccttaccaccgcctcctcctcgataccctcctgcgcaaccacagaatgttatgcctcccccaccacctgggccgccgcccggatctgcatacggtacctcaaaactcaccaaccctcagctccagtcacagagcacccttgggtggtctaactggggtggacgtgggataccgcagtaccttccccctcctccgccgcctcccatgacacatgccaatcagtcatcttttgctcgcccgtctgcggtacagaacaac

SEQ ID NO: 18094 - DNA, 408 bp, Emericella nidulans
tccctgtggagaacctgatcggccttgaaggcgacggcatgaagatgatcatgaacaacttcaaccacgagcggctcaccatcgccgttggggtcacacggcaagcacgtgttgcgctctcgactgcattttcttactgcctcaagcgcgaggcgtttgggaagacgctcatggaccagcctgtggtgcgacaccggctggcaaaagcaggcgcggagcttgagacgatgtgggcgtttgtcgagcagctactctaccaactgacgaacctgcccaaggaagaggcggaccgtcagcttggtgggatcacggcaatggccaaggcaaagggggcaatggtgttgaacgagtgtgcgcagacggcagtcctgctcttcggcggtgccggctttaccaaacaaggacagg

SEQ ID NO: 18095 - DNA, 409 bp, Emericella nidulans
ggtgcacaacctgcgatacgttgcgcaacagcagcaaccttgtggtgttgacctcactctccgccaggtctcgagatggacttcaccggcagcaattgacttcaacaatacaaagcgccagggagctaggacttctgtcctacctttcaacagtagccagcaagcgatcacgctacagccaggtaattacctgatcgatttcaacgaaaccgtccgcgttccacggaattgcatggctagcatctatccgagatcttcgctctggcggtctggggtcgggattaccgctggtgtagtggatgctgggtatgagggggcgctaggaggtttgatggaggtgagaatccgcgtgggatagtacttttcagggatgcgaacttgcgcaaatcgtgtttgaggagttgcggga

SEQ ID NO: 18096 - DNA, 418 bp, Emericella nidulans
agttgccggtaaatgaatgggttcgacctgcgctgacttcgattttcatagatctctctaccggcgttcgctgaagctcgccctggactgggctgtccacagacatatctggaggggacaggcagtttatatccgatcccttttcgaggccaataagaacattcgcgacccccggcaacagaaggtacgtgacatgaccttcgcagccgctgaccgctccgtcgaggagcactcgctcaccagcactgttaggtcctactccgagagaccgaaaaattactcgaaacatggaagcatcctgatccctaccgtgcaccaacggcccctggtggtatgtttacaacaatctaagtatccgagcaaaggactaacccgcgaaacaggaagcaaatacgagagaaaccttcctgctcgtcaa

SEQ ID NO: 18097 - DNA, 421 bp, Emericella nidulans
ggcatctctcgatctgttaggaggcgccggcgctccagtctctacaccttcccttcgacatccactgcgtacacagcatacaacaagaacgaattggtgctttctctgcaggtacagcgaggcaacaacaatacagcgcagatccaagctcggttccgaaaccagtcgagcttcagccaatttaccagcgttggtctccaggctgctgtgccaaagagccaacgcctgcaactcagcgccatcaacaaggcagagcttgaagccggagacgagggtgttcagatgctgaaagtcactgcgctcaatggggtaagtttttccctacctaaacttattcgtccctgcgtgttaactaacttttttagccactcccatcaaaactccgccttcgtctccgcgtcacatacgcaaaggatggctc

SEQ ID NO: 18098 - DNA, 422 bp, Emericella nidulans
cagactgacttgagtaccgttatagattaggcgagctcgtctagcgcaactccaacaaagcgtggaccaccaagagctccatcagaaggtaaccaagacgagcaaagaaagtacgtacctctctggtgacacaaatttcgcatgtcggaaacatcactgacgcttgatactcttcagacaagttgaaggtaagcattaagactactcgtgccatccaatcagcaccaactcataccacccccacagctgagcgccgcgctacaatcctcaaccaaatccttgaacccgaagccgcagatcggctgggccgaattcgacttgtgaaagagtcgcgtgccacagatattgaaaacaggctcatcatcgttgcgcagacaggacagttgcggcagaaggtcacagaggagcaactcaagcagctc

SEQ ID NO: 18099 - DNA, 429 bp, Emericella nidulans
tccgagtccctcttcctccagcgcaagaaccctcgccggatagcttggactgtcctttaccgtcgccagcacaagaagggtatctctgaggtccgtaccgccttttctttaccactggattcgattttcgcagttggaatgatacatctggggactgcgaatggtttacccctcggccgatactatgggtcgtgaagagatggaacattccgaaagtgttttgcggataacattggtggcatcgaaaacagaatgctgaccattgatttcaacacgaacaggaggttgccaagaagcgtacccgccgtgtcgtcaagtcccagcgtgccatcgtcggtgcttccctcgacgtgatcaaggagcgccgctcccagcgccccgaggcccgtgccgccgcccgccagcaggccatcaaggacgccaaggaga

SEQ ID NO: 18100 - DNA, 432 bp, Emericella nidulans
agacgctccagatcttccctccgcgctcagccgtattcccccgccgagtccctctagggggtgattggatccttggtggtaccaaagtgggaagcgtgcactgctgcatcagttgttgccgctggaactttgtcgatccagacaagttcattcctgaacgatggcttagtgcccccgcgtactagaacgacgatcgccgcgccatgcaggcgtttaaatcctcaagcctgcatttctcgtaatctctccggctgaagatgcgtctcgtcctggctcggctgatctgcgagtttgatttggagttagctcctggatcggagtgatgggaaggggcgttggtcttcaatgtctggggtacgaagccattcaagatcaattcaccccagtattatgctgaagtgaggagatagaaaaagggcgaggcaatttaac

SEQ ID NO: 18101 - DNA, 438 bp, Emericella nidulans
tgaatgggtggcatacgtttatctcgatgcagaattaccataatttgctttcgcgcgaggaggagcgcgagatgatcccgtattgcctggatgcggggattggatcgattccctggagtccgatggcaagagggttgcttacacggccatggaagagcgcgccgtcgttgcgggagagcacggataaggcgatgaatgtgctgctgaaaagccgggagacagaagcggatgacaagattgtgagaagggtcgaggaggtcgcgaagaagaagggggttactatggcgcaagtggtcattgcgtggacgcttgggaataagaacgagaatccaattctggggctgaatagtaaggacaggattgatgaggcttttgccgcgattaaggtcaagttgaccgaggaggagagagcgtatctcgaggagccgtatatgccga

SEQ ID NO: 18102 - DNA, 438 bp, Emericella nidulans
cagacattacgggctgtcaagctgccctgttcgaatgggcagagagctacgacagcaaagactgggatcgcttaaaacaatgcatcgcccctttccttcgcgtcagcttcccagtctcgtcctatataatcagtgctgacggtaccagatcgattacagagccttcttggacaagctctgggagaagatgccggccgaagaattcgtggctatggtctctcatccccacttcttgggtaacccactcctcaaaacgcagcactttgtgggaacaatgaaatgggagaaggtcgacgactcgaaaatagttgggtatcatcagatgagagtcgcccatcagaaacaccttgattctcagatgaaagaagtcgttgcaaaaggtcacggtcatggctcagcgacggtgacgtaccgcaagatcaatggcgagtggaagtt

SEQ ID NO: 18103 - DNA, 439 bp, Emericella nidulans
atcttgcccgcatgatacagtcgggagaggatcctctctatattgcccggcgcctgatagttgtcgcgtctgaagatataggcttggctgataatagcatgttgactcttgccatctcaacgcattccgcggtggagaagataggtcttcccgaagcgcggatcaatctcgcacatgctacagtagctatggcgctgtctcctaagagcactcgtgcatatcgaggcctcaataacgcctttgcggctctgtccgagcctggaattgcaggtcttcccattccgattcatttgcgcaatgcacctacgcggttgatgaaggaactggggtacggaaaggagtataagtacaacccgaacttcaaggatggcaaggtggtgcaggactatcttccagagaagttacaagacagaaagttcttggaagacttggaccttgg

SEQ ID NO: 18104 - DNA, 441 bp, Emericella nidulans
atctcggcaagctccttttcttctatgacgcccgcgggcagtgggatgttgtcggcgatacgttccctgtcgggtgcgcatttgacgatcgcatcatctacgggaccgagtccttcaaagacaacgaggatttcaatcaccccatctattcaactgagaacggcatctacaccccgggctgcggtctcgacaacgtcatgctcagctggggccacgacgaatacttgtaccatgttgtcaaggaccagagcacgctgcctgatgaggcgctcgccatgatccggtaccactctttctacccctggcacaacgctggggcgtaccggcacctaatgaacgagaaggatgaggcgatgctgaaggccgtcaaggcgttcaacccatatgacctgtacagcaaaagtgatgaggtgccgagtgtggaggagctgaagccgtact

SEQ ID NO: 18105 - DNA, 448 bp, Emericella nidulans
ttggtaataaggtctggcttgacctgtataatatctagatagactatcctagcaagaagcttgatacacagcatgctaagtttactattcttgagaaaattaggtcttatgtctactagttggatacccctgcagggatctataatatcttctatgtatccctactgcaccctgctgctaatgacctgtttcctagtcagcagaataatgactatcaaccaccaccagttcttgttgacggcgaaacagaatatcaggtggaggagatccttgacgaacgcatatgacgagttggacgaggccaacggagggagtttcttgttaaatggactggatatcagcgtcctacatgggaaccagcccagaaccttgaagactcagcagcgttagacaagtgggaagcccgcagcgatcaccagcggcccgtcccaactacaccatctcaacg

SEQ ID NO: 18106 - DNA, 448 bp, Emericella nidulans
agcacggaaatttcatcgaccgcgagacggcagagtactgcagggacatgggggtcacattcaccccgacgctcgtgacatactacggcatggtgcagccagcattctcgcacttcctagacgatgccagccagaggaagaaccaggaggtcctccgaggcggcctggatgctctggcggtcctccgtgacgccggcgtggcaatgtgctacggatccgatctcctggcaggcttgcatcccctgcagaaccaggagttccggatcagggctggtgtgttgactgcccgtgagattctacaatctgccaccgtggacgcggccaggtatctggggatggaggggaagctgggcagtatcaggagcgggggtattgcggacctgcttgtcctcaaggcaaatcctctggaggatatcacagtcctggatcgcattggagagaatttggt

SEQ ID NO: 18107 - DNA, 453 bp, Emericella nidulans
aacccaacagctaccaccagtattggaccaatacagcatctgacaatgcgatcctcagtgcactaaagtccgtcaaccttcatacgaaagtcattgaaaacggtggactagacgccgacatcgacgacctgcatctctcgcaaggtcagaagcagctcttctgcttggctagggcaattcttcggtcagggaatatccttgttttggacgaggccaccagcaagtacgttctgcgtttatcccttgctaccttagcatgatactaagaatacttctttccagcattgattccaagacagacgagatcatgcagcgcgtcatccgcgaaaatttcagctctcataccgtcctgactgttgctcacaagctcgagtccattctagactatgataaagtcattgtccttgaggatggacgggttatcgaggctggggtcccgtatgaccttcttgc

SEQ ID NO: 18108 - DNA, 454 bp, Emericella nidulans
gtaatgcaccagccgggagtcgaacccgggccgttcgcttggaaggcgaatatcctaccgttggaccactagtgccacttgatgattaatggttcatcaaaagaatatatcagccatactttacgagtaatgacaataaaatactgcttcgattgtgtcaactctattcccagctatgtagatgtactcatatatcccgctgtaataacggctcttccacggggggctatataataaccggatgtctttccggactcctacgcaaacaggcttctggaaggggtacggtatgcgtcgtattcaagatagtagacacacattaggacactagtcattggaccgcaaagaattaattcgaccatggaaggcagacataatataatcctaccattttccgactcgcttccttcttatttctaggcatgaccagcgcaattgctctgcgatttcaagc

SEQ ID NO: 18109 - DNA, 461 bp, Emericella nidulans
catggttttcgctctgttgaacaggtccgcaaggctattcgtcccaccaagctcagggagagcctccagcccggtaccgtcctcatcctcctcgccggtcgcttccgtggcaagcgcgttgtcctcctcaagcaccttgaccagggtgtcctcctcgttaccggtcccttcaagatcaacggtgtccccctccgacgggtgaacgctcgctacgtcatcgctaccagcacgcgcatcgacatcagcggtgttgacagccagaccatcgagaaggtttccgcccccggctacttcaccaaggagaagaagaacgagaagaagaccgaggaggctttcttcaagcagggagaaaagcctgaggtacgttatcctaatccgccttggatagacgacaattgagctctgcgtgatcaatgtccgctctttagttaactaatcaactaactttgctgtcatctaca

SEQ ID NO: 18110 - DNA, 471 bp, Emericella nidulans
gatctcgggaccagataaaccagagctgaccctggttgacctaccaggcctgtattattcaaccagtcgagagcaggggctggcgggtatagggatcgtccgcagcctgacagagaaatatatgcagaattccaggagcatcattcttgccgtcatcagtgcaaagaccgactatcatctacaggaggtgttgaatatcgccgcgagattcgacccggggggcaagcgtacgctgggaatcatcactcaaccagacattcttgaggcgaattctgaggaggaagacacataccttcaattcatgaagaacgagaaggtccgcctacatctgggatggcacgcactgcgcaatcggtccttcgaaacccgggacgtatcggacaacgcccgcgatgagcaggagaaggagtttttcagccagggacgctggacgtctctgccgcgcgaggttcttggagtagacaccctgcg

SEQ ID NO: 18111 - DNA, 472 bp, Emericella nidulans
atcccatactcattctcactaactctctagccatcgcgtatcgtgtgaacgccgcagtcgacagtgatctcgccaattcactaaaacccgccatgatcccaggctcaacatccacattctggcgctccttcggcagtgccttccgctggagcagctccacagcgtctgtgcccgagcgtccctccgtaatagcaaagctaccatcaaacgtggaaatggaaacacacgatttcacacgcgaggagatagccgaaaaacgaatgctcctgctgaacgataacggccaagttgactacttcctgactggaggcggtggtgccttgaatattcaatacctcaacatgcttagcgcgcatagcagctactggacgctcacggacttcgtgcgattcctcgttatagagatcgctcggaagcagagtcgcgacgcagtcttgccggcattgagggcggagaagaagaagggatggaa

SEQ ID NO: 18112 - DNA, 482 bp, Emericella nidulans
gcatccatgatgatgctctgggcaatcgccggtgtcccgctcggtgtgtacaacatcgtctcagagctgaacatcgcccttcgcgtgcaagcccagattctcacgttcttgagcctggtcacatgggcgcagtgtttgtactatgggaaagtatgcgaatttcataccattaagttgaaacgcaacgggatgtcacgcttttaccagaaacactcaatccgaaagtgcatcggtgccgtcctctccctgcttctcttgcttggggccattgaaaccggcctggtattcgctctgcgcagcgccaaagacaggaacctgaaatggccgctaaccattatggccgtcctcagctcctgctttctagccgcaggcgtgctgcgccactactgggacatctacgtgcatcggaccgtccgaggtatcagttttatcttcgtggcgatcgacgcggccggagatctgttctcactcgtttctgttgg

SEQ ID NO: 18113 - DNA, 490 bp, Emericella nidulans
cacatcgatgcggcctatgctgggttttttttggttgcagacgagtggcagtacattgcgagggatttcgctgagggcgtagatagcttcaatctaaacatgcacaagtggctgctcgttaactttgacgcaaggtttgtcctacgttttctatacatcgaggatttggatattaacagtgccatgacagtctcctctacgtccgcaaccgccatgacctcaccgacttcttggatatcaccccggcatacctgcgcaacccctactctgaatcaggccaggtcatcgactaccgcaactggtctatcccgcttggccgacggttccgcgcgctcaagatctggttcgtcatgcgcagctacggcctcaacgggctgaaggagttcgtgcgcaagggtatcaagctgggagatacctttgcagatctcatccgcagccgcggtgatctctttgagattgtgaccaagccggcatttgggctgactgtgtt

SEQ ID NO: 18114 - DNA, 491 bp, Emericella nidulans
tggcacgatgagtaacatccttgactgtctggcggaaggagaagaggtcgagatcaagggccccgcaggtgaaattgtgtacaagggtaacgggacgttcaagatcgaccacaaggagcgtacttttgagcggatcacgcttgttctgggagggtctggagttacaccggggtaccaggtcattgcaaagatcctgttatctgatggaagggataagaccaagatccgtgttattgatgggaacaggacggagaacgatatactacttcgcaaggagttgcaggatttcgcgaaggagcatccggagcagttccagattgttcatgttctgagtcatgctggagatgactggaagggcgagaggggacacgtcagtgcagaaattctccataagttcgggtttgaaccgacgagaagagtgttgcgttgctgtgtggcccgccagcgatgatacaaaaggcagtactccccgcactggtcgactggggata

SEQ ID NO: 18115 - DNA, 495 bp, Emericella nidulans
aaatcccagatgccagacctcgcccaccacatctctctagttcagctccggccgccagatcaattatggaactcacttgtgtccgaggcggtagcagtagtgcaactctgcgattacgagggaatcccggagatgcttctgggtgctgttcacatgggtaaatatttaatcgtcagcagggagttcagagactacccatttctgcgaaactgggatcggaccctattcctggacgatgatgaagttcagggcatatcgcaatacctattagatctcggaacagactcgtatatcaaaagcgaaagacagaccaaaaggctcagtaaacaggtgcttggggacagggcgacgacggtcggcaatgctttgaactggttcttcctggcttcgaagttgtcaaaaagggaggttgttgagccgtctggagaggacatttttgctctggctgagcaagaaactcgggctatttagttgaacccttcacgtgctagctgt

SEQ ID NO: 18116 - DNA, 503 bp, Emericella nidulans
atttacgcaatgcagccttttctttggcaagactaaagtcatggccgtcgcccttggccataaccccgagacggaagctgctgaaaacctccacctcctcactccctatcttaccggcgccgtcggtctcctcttcacctcaagagaccccgcctctgtcaccgactactttgacgctttccgccccctggactttgctcgcgccggaacagaagctacccgttctttctccatacctgcaggccttgtttactcacgtgccggcgagatccctacctcagaagacgaacccgtcagccatacgattgagccggagctgcgcaagctgggcgtacccactcgtcttgttaaggggaaggtaatgcttgagttgacagatggacaagaggggtatcctgtttgcaagaaaggggagattctggattcgaggcagacaactttgctgaagatgtttggtgtgcagacgtcggagttcagagtcggactgaaggctcactgggcta

SEQ ID NO: 18117 - DNA, 506 bp, Emericella nidulans
attgctgcccagctcaaacgccttgcagacgcaaacgttccagtcctcttccgcccgcttcacgagcctgaagggggttggttctggtggggagctcatggcccggctcctttcaagcaactctgggaccttatatacgaccgcattactcgtgttcacgatatccacaacctcgtctgggtctgtaatactgcagatccgagctggtaccccgggaacaacaagtgtgatatcgctactatcgaccactatggggaagcgggcgaccatgatgtcgtcaagggcaaattccaggccttgcagaacgttactaggggcgaacgagttcttgcactggctgaggttggctctataccagatccggaacttcaggctaaggagaatgtcacttgggcctactggatggcctggaacgatgaattcatcaaggatgggaaccataactctcaaaagttcttgcaaaacatactcaacagcagcaggatcataagcctgaatggtgccac

SEQ ID NO: 18118 - DNA, 509 bp, Emericella nidulans
cggccaaagaagttccagcgcactactcagaccaaaaagtgggataagtgccaatttatcgagaccatgaaggacgtcaagacatggtggttcttgctcttctcctttgtaatctgcgtgccaaacggtggtaccaccagcgtaggcctcccatttcctccaccttctacatacttcgaactgactcagctggctactatagttgaataccattattatcaacagcttcggctacgatgaacttcagacaatcctcatgggcatgccagccgctgccttccagctcacaacagtcatactcgccgcccttttcacaacttacatccgcaagtccaggttggctgctatggttgcaatcttcctgatggccatggctggaattcttatggtcaagcttctcccctatgacaggaagattcctcgccttgcgggatattggctcgtcacagctgtggcccccgcgttccctctaatgatgtccttgtttgcaagcaatactgccggattca

SEQ ID NO: 18119 - DNA, 512 bp, Emericella nidulans
cttctggtcgtcgccttcttcggagtcgcctgggttctcatcctctgtatcttcgcccggctttccaaatcccacagttggatcctccccgtttttgcctgcggtcttggtgccccgcgatgggcacagatctggtggggggtctcgggaatgggcttattcctcccttgggcaggaagctacacgaccggcgcactagtatctcgctctctctggctatggctgggtattctcgactccctgcaaggcttaggctttggtatgattctattacaaacactcacacggatgcatatctgcttcacgcttttggcgagtcaagtcctaggctctattgcgacgatctgcgccagggcttttgcgccgaataatatcgggccagggcccatctctcctgatattacggatggagcgggcgccgttgcaaacgcgtggttctggattgcgttgttcttccagttgttgatttggtatgtcttcctactatataattggagcctagtgggacgtaa

SEQ ID NO: 18120 - DNA, 525 bp, Emericella nidulans
aggtcaagcaggtcaaggtcctcggcgtgatggctcttctcgatgaggaagagactgactggaaggtcatcgtcatcgatgtcaacgacccccttgctcctaagctcaacgacattgaggacgttgagcgccacctgcccggtctcctccgtgcaaccaacgagtggttccgtatctacaagatccccgacggaaagccagagaaccagttcgctttctccggcgaggccaagaacaagaagtaagtcttcctggataatcctgcaatatcacatcatctaacgggtgcaggtacgctgaggaggtcatccacgagtgtgccgatgcctgggagaagcttgtcagcggaaagtcggaccgtggggacatcagcctgtaagtttgatttactgagaagcaacaacacaatgctaacatgagcagtgccaactccacccttggcaactctgacagtgtcgactcctctaagcttgccagcattcctcgcggcgagaacctcccccctgctcctattgatggcaccat

SEQ ID NO: 18121 - DNA, 535 bp, Emericella nidulans
gatcgatgaggatgactcccgcagctggcattgggttatatatgatactgaagccgcaaatccgggggcacagggagcagaaatagagccaaaaaccattaagctccctgttggtacactccggcttgtcccgccgcctcatgcatcgcatgagagttttgtcgcggtctatgcgccggggacgtcagataccgggcgcgatataacagcggatgggtatgacttagagcacgagccctatatcaagttcgggcgggttgcggttttggcgtcgtatcgggggtgtgggcttgcgaggcggttgatggagacggcaatggcgtgggcagaggagaatgctggggacattaatgagtcgtttttggagatctataagcgggaagggggggatccttcaaaagctccgctgtggaagggtttgactctggtccatgcgcaagttgatgtggagaagttttacgagcgactgggcttcgttacggatgaaagtctggggaggtgggttgaggagggaattgaacatgttgggatgtgg

SEQ ID NO: 18122 - DNA, 540 bp, Emericella nidulans
cgtaaccgctagtgccaactctcaagtctgacaatacatggcgtggtaggtctgacctcgagtactgattgtcggtcaatgtagttggagcgcataacgtgcttagacagtgcataccactgatgcagaacagtgccgtgaaggaaatcatcaacatgagagtccagtttcgaattcccgttgttatgtactactgacacagcatcttctcttctctcaagctcaagtggctttggatccataacatcagcacaggattacatatatgcactgtgtccagcctacaagatcagcaaggccgcgttaaatgcacttactgtacagtatgcactgtcgtatcgagatgagggcttcactattgttgctgtaatccaggagtgagttctgcttctcgtgaagccgattcacgttgcagtcccgactgacgccttatagtggattcagagtgatatgggtgggaagaatgccgatctgactctctctcatggcgcagaggccgtgttggatatcgtggcagttcttgagaccaaggataacggg

SEQ ID NO: 18123 - DNA, 543 bp, Emericella nidulans
ccagcagcttacaaggaagtctttataatagagaatattcaaagcagattcagagcaacagggatagtccccttcaaccccaatacagtgttggataagttgaatataagactatcaactccaaccccccctccgagcagagggagtgcttcaatcccttcctcccagctctgtacgcctcatacagtccgccaaatacatcgaaaagcttgctcagttgaaaagctgctaaagaatggctctaagagtccttcatccccttccaaacgagcatttgatgagcttgtaaaggggtgtgagttggccatgtacaatgctgccttgttagccaaagaaaactctgatctccgcgcagctattaagaataacaagcaaaaaaagagtcgctctaaaagccaaataactcctatacatgggatttcagttcaggaagctagggatcttattttgttgagaaatgagcaattggaggcagaggggggtggtgctagtagaagtactatcccaacttcaacagctcctaaacgtgccctaccaacatgt

SEQ ID NO: 18124 - DNA, 545 bp, Emericella nidulans
ccgtcgtgctacaaatcaagtctgcttgcccgccttgcagctacaccaaagatacatttgcttgtaaccgcagacaccccaaacttcctgctaatgtgggatatcagtctccgggatcaattcaattttgtgttccatgactgcacgacattcacaccattcgatgctgagtttgatgtggtcgaagaagtgcatagccttcttggccggaagggacggcgtgtgggcggtaaagagggtgtggagtttgtgttgaagagtctccctgagaacgcgcagaacctgtaccgagtgctgcttacggagctgctgtcgatgatggacgaatatttgaatggggaggatgatatggacaacggtgatggggcagctgacgggccgaaggatgagcctgggattgagttccgagcattataccagaaggcctccgaagaattcatcgcatcttccgagatgatgttccgcacgctgttgaaggagtttcatgaccaccagatgattacctcgcggatggatgcgagtgggatggaaatactgagcgtccc

SEQ ID NO: 18125 - DNA, 545 bp, Emericella nidulans; identical to SEQ ID NO: 18124

SEQ ID NO: 18126 - DNA, 545 bp, Emericella nidulans
atacccaccttcctgtatgcctgaagggtgtaatgtctgcagacgacgccatcttggcaatggaagctggtctggacggtatcctactcagcaatcactgcggacgcaacctcgacactagccccccgtcgattatcaccctccttgagctccacaaacgctgcccggagatatttgacagaatggagatttatgtggacagcggcattcggcggggaactgatatcttgaaagccatctgcctaggcgcaacagcggtcggaatgggacgcagcatgctctttgctaccaattatggccaagcgggagtcgagcatctgatcgacagtaagtttttgtttactgcatctctcgaatgtatgctaaaatacgtagttatgcgagacgaattggaaactgctatgcgaaacattgggatcacctcgctcgatgaagctgggcctcatcttgtccacactggggatgttgaccacctggtgccagagggtcctctgcacccctatgctcgaaagatcgccaagggccgaaagtcgagggtgtcaagg

SEQ ID NO: 18127 - DNA, 545 bp, Emericella nidulans
caaactggtcccatcgttctctttgattgccttaataaactaaactgactgttcctaggacaaatatgtccggtctgttgcagacttcctgaacctccaggaacgcactaagcgggacatggagaacgcccgcaacttcgccattcaacgatttgccgtcgacctccttgagagtatcgacaattttgatcgtgctcttctagctgtcccaaaggagaagcttaatgctccgaagaccgaggagaacaaggacctcttggatctcgtcgatggtctgaagatgacccagaacatccttttgaacactctgcagaagcacggcctggaacgatttgaccccggagagcctggcgaggacggaaaaccccagaagttcgaccccaagatccacgaagctaccttcatgaccaaggtcgagggcaaggagaatggcgagatcatgtacacccagagcaagggtttcacactgaacggccgtgtcctgagggtgagtttgctgcgtattgactggaaacctttgaccgctaatcatttgtgcaggctgc

SEQ ID NO: 18128 - DNA, 547 bp, Emericella nidulans
ccgttctggtggcaaatgccgaaagcatcgagattcacagggatggccagaaagtcggcgatttcaaaccaaacttctctgtcactgctgtagcggctcacggcagtatagcagcaattggaggagacgattcgactgttcagatttgcgacattgctggaacttccttaacgcccaaacatgatttcaaggcgtcgcgcgacgtggtatcggctatggcattttcgccagatggttccaaattagctattggtgactcgcgcggtcgcgtgctagtctacaaggtggcggacggcagcttggtgaatgatcgttggactgcacacacgtctcggataacctctattgcatggaacgacaacggcgctcacatcgtcagcggagcgttagataccaatattttcgtttggagcttgacaaatccaggcgactggctgcaagtgtccaatgctcacaaagagggtgttaatggcgtggcatggattgctgggggctccaaggttgcctccgctggggccgatgcggcggtcaaggtatggaaggttga

SEQ ID NO: 18129 - DNA, 548 bp, Emericella nidulans
cccattacaaaattaacattcatccagtggtcgcctgggaatctatccacaaagcatgtttaacttcttcctcgcagtcggcctcttgttcaccaggagacaccggaagcgcctcaacattcccagaacagaatggcacgcctgggatatcgtcgtctacttcgcaattcttgccaacctctatctgctcgtagcgccctggtacccgccagcaggaggtgcaaatggaggggacgtgagcttctggtatggcacgtacgtcgtcgttggaatttctctgtaaggacttttgcctccgttcttttctccttcccttcaggatacgcgactaatattatcgctagtatcggtctctgcggtgtctactattgggtctacatgaaggtattaccgcacttcgggggctaccaattccgccaaacaatcataactgggccagcgggcgagacatctcataaaatggttaaggtgcctaatgatgaacttgcgaggtgggatgaggagcatgatgctgcagggaggcttcggagaagggctaacgctcacaa

SEQ ID NO: 18130 - DNA, 553 bp, Emericella nidulans
ctcacgaatctagcttctcatcctgattcagcggctgcagaggctatcgtccgtcatgcttggccgcaagtggaagaattactcctttccaagaaccctttaattcagcgagccgcttgcgagttggtttgtaacctgatggcctgcgaatccggggtcatcaaaatggccgacggcaccaagcgagctgcccaacgtctacatatcttgctcgctctcacagataccgatgaccttaccacgcgacaggctgctggcggtgctttagctatgctgacagagtttgatcctgtcattgctggggtactcaatcgaccgcgcggtgttgagctcttgctcaacctttgccaggaagaagacgatggccttatccaccgcggaatcacctgcgtacgcaatctgacttgtgccgcctctggcgacaataggcgtcgcgccatagaagccgtgaaacaagccaaaggcgtcgagattctaagcaacatgctgaagaagacgcggaaccagttgatcctccagattggcgttgaggcattaaagcccctggtggagt

SEQ ID NO: 18131 - DNA, 556 bp, Emericella nidulans
taatttttggcggcaacagcgtggcttcaatacgtttgtcctaagaccacactgtggcgaagccggagccaccgaccatcttgcagtcggattcctttgctgccatagcatcagtcatggtattttactccgaaaggttcctttactgcaatatttgttctatctcgaccaaatcggcattgctatgtcaccgcttagcaataatgccctattcctcacatatgacaagaatccattcgcccacttcttcaaaagaggcctgaatgtttcactgtcaacagatgatcctctgcaatttgcgttcacaaaggagcctttgatcgaggaatactctgttgcggcacagatctacaagttcagcgcagttgatatgtgcgagcttgcgaagcattctgttgagcagagtggttttgaactctcgttaaaggaaagatggcttggttcaaactgctccttggctggtgtcgcagggaacaatgttgcaaagagtaacgtgcctgatataagggaggcatttcggcacgaaacacttattggggagttggcattgtgagtt

SEQ ID NO: 18132 - DNA, 572 bp, Emericella nidulans
tctgtggcttcaacagcttgatgtatttctcagcaacaattttctcccttctgtcattctcgtcgcctacgcttacctcgttatccgtggccctgacgaacttcctcttcacactgcttgcgtttgtctatattgaccggattgggcgccgtcgcatcttgctatattcgatacccgtgatgatcatctcgctcttcgtctgtgctgtgacattctcctttgtggagttgccgaaagatacatcagaggcgcaacgtcgtcaagccgcgacggatagttccgttatcccactgttaatccttctatgtctcacagtgtatacagcagcgtacgcctttggcctcggcaatgtcccttggcagcaatcagagctctttcctctgaatgtgcggtcgcttgggtctgcccttgcaaccgcaacaaactggggctcgaactttgttgtcgggcttactttcctcccgatgatggagttgttatctccgagtctggtttttgcgctctacggggtcgtttgtattgccggatggtttggcgtacgaactttctaccctgaaatgagcgggctcaat

SEQ ID NO: 18133 - DNA, 572 bp, Emericella nidulans
tcagtcagacatgacgcacagggctctcgaactccttgacctcaaggcgccgtctttaatcctcgatgttggttgtggctctggcctgtctggtgaaatactctctcaagaaccacgtgagcaaggaggtccgcacacctggattggaatggatatttcacctagcatgcttgatatagcactacagcgaggagtggagggggatttgttccttgcggatattggacagggtgtaccgttccgacccggaacgttcgacgcggcaattagcatcagtgccatccagtggttatgcaatgcggaaacaagcgatgttagcccggaaggtcgccttcggagatttttcgaaggcctttttgctagtcttcgacgaggtgggcgtgctgtttgtcagttttaccccaaaaatgatgcccaacgcacaatgatcagcggcgccgccatcaaggccgggtttggggctggtatcttggaggatgatcctggtacaaaaaatagcaagttataccttgttctcacagtcggtggtggaggtttgcagggtgatattactggtgttgtggatgggatga

SEQ ID NO: 18134 - DNA, 592 bp, Emericella nidulans
gtcttcggggtccttggatgcaccagcgccatcgtgttcacgacctttggagcagcctatgggacggctaaggccggcgtcggcgtctgctcgtcgggggtcctgcgacctgaactgatcgtcaaacgtcctctacccctgccctctggctgaccatatcagatatctataagctaatacgttccagatatcgtgcctgtcgttatggccggaatcctcgcatctacggtctggtggtctcggtccagattgccaacaatcttgcccaagaggtcgctctctatacgagtctgctccagctgggtgctggtctggcggtagggctttgcgggctggctgcagggtaattaaggtcgagtctttcctgggtgatcgtgtctaatggatgttaggcttgcgattggaattgtcagtgatgcaggcgtcagaggagcagcccagcagccgagactctacgtgggcatgatcctcgttttgatctttgctgaggttttaggtaagtaaattcagttgcatcaatacgaggagggctgataaagctgccgtggcatggcaggcttgtacggcttgattgtcgctcttctgatgaacg

SEQ ID NO: 18135 - DNA, 594 bp, Emericella nidulans
ggatccttgccatcactcatttcgttttcgccgtgatttatgccattgcgagcttgtctattacaccggaagcggcaggcattttgatactgttcattgagcttcctctcgcggctacattgactgcattttatgtgtggactctgagctcattgaatgcgacaatgaaagaccttattgaccgaaagcaaaagacgaaggccatgatgtacaagaagctatggtactgtctattgggtagcattatagtgctctttggcttcattttcattaatgcgcttgccttcgcaagccgcagtgaagaggacttcctgcctgagcattggaagaaccgatggtttgtgttggatggatggctgagcattgtttatcttgccgatttggcattcatcgcctatctgtggcgacccactgccaataatcggcgattcgcaatgagtgatgaggtgagtcaccgaagacagacgaaagtggcattgccgctaacatgactttagcttgctcaagacgatgacgggtttgagattcgttctttcaatggagctttggacgaagaagacgccctcggtggacttgatgaacactccgcttctg

SEQ ID NO: 18136 - DNA, 597 bp, Emericella nidulans
gggactagtcacaaatacacctttgacactgtctctaaactaggcagtttctaccagaattagggccggctgagtaaagccgaggccatgtaccagcgagcacttgcaggctataacacgacgctatcccaaaatcatctttctgttctaaaagcgaagaataacctcggaagggtctaccataaccaggggaagctccaccaagcgggggaattgcttcaagaagcactgactggcaagaccatgatccttggtcttgcgcacatctccaccctcagaactctcaacaatctaggatccctgttccaagaccagggcaaactgccagaagcagagagacgttgaagcaagcactggtaggcaaagcggtgcttctgggctccgacaatccatccactctcagagccaagaacgatctcatgaaattataccgtgaccagagtaggacggagaaggcaagagatctcctcaatcagcattgaatatcccgaaggcggaggattaaaaaccatgctagaaaggagacgctgttatcaaatgggataatgctgagttcatgcaacaacagaggttagccacgaattgggtgcttcttga

SEQ ID NO: 18137 - DNA, 603 bp, Emericella nidulans
tgaagacaagggtgaggtcaccgcgtgcggcattccaatcaaatacgatgcctccaaggagtgggcagacaagaaagtcgttctgttctcggttcctggtgagcttgtcattcccctctaaatgcgaggtttttcttggtttatgctgactcgtgctcataggcgcgttcactcctacctgctccgtgaaccacctccccggctacatcaagaaccttcccgagctgaagaaaaagggcatccagatcgttgcggtggtagcgtccaatgaccccttcgtgatgagtgcctggggaaaggcaaaccaggttaccggtgatgacattgtactgcaccttttctagccgtttgttaaggcgcggttcatgctaatgtggtgtctgtcttgctacagttgttcctctccgaccccgacgcgaaattctccgattccattggatgggccagcggtggtcgaactgggcggtatgcgatcatcattgatcatgggaaggtcacgtatgcggatatcgagactaagaagggtgccgttgaggtgcgtctttttttatttcggcttttggcgttcgatggctgaagctaactgtttgcgataggtctccg

SEQ ID NO: 18138 - DNA, 608 bp, Emericella nidulans
ggagtttgcgttgcctattctctgcgatatggcacactctgggaaagttggccgtcgggagttgtggcggaacaagggactcgcattctatatctcattactttctgacccttactggcaggtgaccgctttggatgcaatattcatatggtatgtcacattctctctggctggtatgtgcctagctaataaccattgacaggcttcaggaagagaccgctaaggtggaagagcatctattggaaaatcgttacgatcagccatcattcacagacgcgatcgtgagatgcttgacattgtccaaggcgaatgcgttcgagaacatccttgagccgctgcaaaagcttctgaggctcagtcctccaatagcctcgaccctggcgcgcccagacttgttcagccggctcggacagaaactccatcattccaaggctgcggtccgtctgaatctcctgcgcataatttctagcatttgcgactctagtgagcaacagggcggactacttgcaagctacgggctcctggactcaattcgcgagttagagcatgatcctgcgattcttgttcgggatatggctggaaaattaatccagtccagcgagagaaat

SEQ ID NO: 18139 - DNA, 619 bp, Emericella nidulans
cgagcagaccaagtccattaagcttcctcttttccctaccaccaccatcggatctttccctcagaccaaggagatccgtatccagcgaaacaagttcaccaagggcgagatcactgctgaggagtacgagaagttcattgagaaggagattgccgaagttgtcaagatccaggaggagctcggccttgacgttctggttcatggtgagcccgagcgtaacgacatggttcagtacttcggtgagcgtcttaccggttacgttttcactacccacgcttgggttcagagttacggatcccgttgcgtgcgtcccccgattatcgtcggtgacatctctcgtccagctcccatgactgtcaaggagtccaagtacgctgtctcgatttcatccaagcccatgaagggtatgcttactggacccatcacctgtctccgctggtccttccctcgtgacgatgtccaccagtctgtgcaggctcagcagctggctctggctctgcgcgacgaagttgttgacctcgaggcggccggtgtcaaggttatccaggtcgacgagcccgctcttcgtgagggtcttcctctccgtgctggcaaggagcgtgaggactacctccagtgg

SEQ ID NO: 18140 - DNA, 621 bp, Emericella nidulans
tttctcccatgatgctcctccacggagagcagtacatggagattcgcaagttccccattcccactgaggccaagaccaagacctaccccaagctcattgatgtcatcgacaaaggcgccgctgcgctcgtcgtcgctggctacaccaccaaggacgtcgccaccggcgaagacctcttctacaacgaatccaccgttttcatccgcggtagcggtggctttggcggctctcccaagcccactgctcctcgccccaaggccgctgtcgccgcctacaaacctcccaagcgcaaggctgacgtcgtcgtcgaggagaagacatctgaagaccaggccgcgctgtaccgcctgaacggcgaccgcaacccgctccacatcgaccccgagttcagcaaggtcggcggcttcaagatccccattctgcacggcctctgctcgctcggtgtctcgggcaagcacgttttccagaaatttggccccatcaagaacttgaaggttcgctttgctggtgttgttctgcccggccagactctcaggacggagatgtggaaggagggcaacactgtcctcttccagactaccgttgttgagacgggcaagcctgctatctcaggtgctggtg

SEQ ID NO: 18141 - DNA, 621 bp, Emericella nidulans
ttcattgttgagaagacacccccggattctctattgcgaagaaggagaagaagctcggcatcaaggccagcacgacctgcgtgctcaacttcgatgacgttgtcatccctaagggtaaccttcttggtgaggaaggccagggttataaatatgccattggtttactcaacgaaggacgtatcggcattgctgctcagatgaccggtttggcactaggggcatgggaaaatgctgcaaagtaagtctgctacaatcaccacatattcactccaaatggctgcgaaagacaaagccgctaacaaaatttacagatacgtctggaacgaccgccgacaatttgggcaacttgttggagagttccaaggcatgcagcaccagatcgcgcaagcctacactgagattgccgccgcccgcgccctcgtctacaatgcggctcgcaagaaggaagcgggtcaggatttcgttcaggacgccgctatggccaagctttacgcctcacaggtagccggccgcgttgctggctcggctgtcgagtggatgggcggcatgggcttcgtccgcgagggcatcgcggagaagatgttccgtgatagcaagatcggagcaatttacgagggaacg

SEQ ID NO: 18142 - DNA, 625 bp, Emericella nidulans
gagaacatcatttccgggtctaactgtatgtccggttaaacagtccagggtctcccgtactgattctcttcagtcgacaaggatgaagtggaccgactccgcaagagatttatgaagctcgacaaggtgcctacgcaacccgtacaaacagagaagacctttctaaacaatggcctaggacaactccggcacaatcgatcgcgacgaattcctctcccttccacaagtctcaactaacccccttgctacaaggtgcgctgcctcgaactccatctcagttcaatatcatctaacgagataacttgagtcaacagaatgatcgcaatattcgacgaagacggcggcggtgacgtcgacttccaagagttcgtctcgggcttatccgctttcagctcaaagggcaacaaggaagagaagctgcggttcgcattcaaggtctacgacatcgatcgcgacgggtacatatccaatggcgagttgttcatcgtgctgaagatgatggtcggcaataatctgaaggatgtgcagctacaacagattgttgacaagacaatcatggaggctgataaagatcacgatggcaagatcagctttgaggagtttacagatatggtggagagcacgg

SEQ ID NO: 18143 - DNA, 627 bp, Emericella nidulans
ctcctgtcatcttccataagctaacggggacagattccctgaatgttcgtgcctgcttcttcacaccccaggtctagggttgatggctttgctgaccactacagtactacgcaccgcaaatattcgaactcatcggtgtcaaggacaactcctccttgttaactaccggtgtctacggtgccgtcaaagtagcggcaacgatcttctatgtcacatatctagtagaccgcgtcggccgtcgtctccctctactgatgggagcaaccattcaggctacagccatgctctatctagccctttaccttcgcttcgctggaacagacaacacggatatgggcggcacgccggccggtggtatcgtcggcataatctggatctacctgtatgcctttggttggtccttcggtcacagcgttgcttgctacattgtagctgcggagatcttcccaacgcgaatcgtaagtacccttctcattttctctcttctttaactcttgcggaaatatcattaactcaatgcatgctgcagcgctcggcctgcatgggcttttgcttcttcaccaattggataatcgattacggtatcacgcgggcgacaccaaatatgctgacgaatatgggttatgg

SEQ ID NO: 18144 - DNA, 631 bp, Emericella nidulans
ggaacaatgaccggctaaagaaaaaaatgaagaaaagagaacgagaagagcttcgtgtccaaggactactgggtcgccgcaggaatgacccggatctgaaaatcaagtatgcggatggtataaatattgaagagctaaaatctgagatacgtttgttcctgctgtccccgaagaataggtaggtactctcacctgcttatggacgattctggatctaaatagggtacagcttatcacttcccccgatgacaaagcaccgcagaatacttgtccacgacatggcacatgctttgcatctgtcctcccaatcgcggggaaagggctcttctcgcttccctgtcttgtcaaagacatcacggacaccaaagtatactaacaagacaatctcacagttagaccgggtattctcaaaggagaggttcagttctcgcgcattgaaggcatgggacaaagcaagcggtcgatcaggcaaaaataagcgcggcaaaggcaatgtttcctacatggacggcgatgtagttggcgcttcagcaccggaaataggcgctgagaacaaaggcagggcaatgctagagaaaatggggtggagtacgggcacgacacttgcgctgccaacaacaaaggcattctt

SEQ ID NO: 18145 - DNA, 633 bp, Emericella nidulans
tgcaactttaaacagattctttgcattacatttcttattaccttttgtattagctgctttagcattaatgcatttaatagctatgcatgatacagtaggatcaggtaatcctttaggtatttctgctaattacgatagattaccttttgctccttattttatatttaaagatttaataactatatttatattctttattgtattatcaatatttgttttctttatgcctaatgctttaggtgatagtgaaaattatgttatggctaatcctatgcaaactccacctgctatagttccagaatgatatcttttacctttctatgctattttaagatctatacctaataaattattaggtgttatagctatgtttgctgctatattagcattaatggttatgcctataactgatttatctaaattaagaggagtacaatttagacctttaagtaaagtagtattctatatttttgtagctaacttcttaatattaatgcaaataggtgcaaaacacgttgaaactccatttattgaatttggacaaatttctactattatttattttgcatatttctttgtaatagttcctgttgttagtttaattgaaaatactttagtagaattaggaactaa

SEQ ID NO: 18146 - DNA, 638 bp, Emericella nidulans
cgcacagcaatcgtgaccggctccgcacgcggaatgtacgccaggcctgccccatatggggtccccatacctcactcagcatcaccatgggactaacacgaattcacagaggcaaggcaatcgcctcccgacttgcccgcgatggctactccgtctgcgttaacgatatacccagctcccaggcggcaatcgaggcaactgtctctgaaatcaaatcacaatcccaggcaaatgttatcggtatcccagcggacgtctcgtccgcgtcgtccgtctcctctctcgtcagagacactaccgagaagctcggccctttgacgctcatgatcgccaacgccggggtctcgcaggtcaagccgctgctatccgttactgatgaggacatcagcagcgtgatgtccgtcaacttcaacggcgttttcaactgctatacggccgcggcgcgacagatgatcgctcaaggcgaccccaaggcggccgcgggtgtcgaggtgtacaagatcctcggcgcggcgagtatcgtcgccacaagccgtttccaacaatggggatctactcagccagcaagtgggcggtgcgtgggctgacgcaggcaatggccatggagatggcgacgacaagatcacggtgaatgcgta

SEQ ID NO: 18147 - DNA, 642 bp, Emericella nidulans
cttttgtgagatcgacgaagaatacctgaccgaccgcttcaaccttaccggcttgaacaccgaggttccctactatcagtacgcgctcgatctggtgacggatgttttcgacctcgatgccgacgacgacctccgagaacaaattgagaaatcggcgcgccacttgtatggccttgtccatgctcgctacattgtcaccacccgtggcctcgcgaagatggtacgtatcgagtgtcactttttgaggtgttactgacgaattcgtcattaggtcgagaaatacaagaaaggcgactttggaaagtgcccacgcgttatgtgtgaaggccaccctctcctcccgaccggtcaaaatgatgtgcccaacatgagcaccgtccgcctctactgctccaagtgcgaggacatctacaaccccaaatcgtcgcgacatgcatcgattgacggcgcatatttcggaacctcttttactagcatgctctttcaggtataccctgctctcctgccggagaagagcatccgccgctacgagccccgcatatacggtttccgtgtccacgctagtgctgctcttgcgcgctggcaggaccgctaccgcgaagagaccaggaaccgacttcgcgatgctggggtggaggttag

SEQ ID NO: 18148 - DNA, 643 bp, Emericella nidulans
ctttttcaagggcagcctaagccaccaggacttggacgaactcaacattgagattgtgcggaacacactgtacaagaactacctggaagacttctacaaatttgtcaccacacatccagacttcaagggaacgccaacacaagaagtaatggcggaaattcttgaattcgaggcggatcgacgtgctattaacatcacactgaactctttcggcacggagctctctaagcctgagcggaggaagctctaccccgaattcggcaaattatatcccgaagggtcactgatgctttctcgggccgacgatattgaagctgtctcgctggccgtcagtatatccgcggactacaaggcattcttcgatgccgtcggtctcacccaaggcggaggtggtcttggcggcatgggtggctctgatggaaagagcctggaggatttattctatcaaaaggaaatggagatgagcaagctcgttttcacccgacagtttactcctgctatagtatacgcctggatgcggctaaaggaacaggtgagggatccagctattctagaagcttgcttaactaacaagttcaggaaattcgcaatgtcacctggatctctgagtgtattgcccaaaaccagaaggagagaatcggaa

SEQ ID NO: 18149 - DNA, 649 bp, Emericella nidulans
ctcgacgccaccaaaaaggctgaacagcgcgccctcctcgaggctgaattggatgctgttggcatccggcttaacaaggaaccaccgtgagaataccaaacagtagcccttcgcaatctggcatagcttttcactaacgtcagcccaggaacatctacctgaaagcaaagaaagcaggtggcatgaaaatcaccttccagacaccacccaaatacctcgacgaaaagatgatctacaacgtcctccgagactataaaatgcttaactgcgaggtccttgtccgtgacgaaaatggtgcgcctacttctcccgtttctagttttccgtcttgatcatcatcatattttaacatctataccagctacaatcgacgatttcatcgacgtgatcatgaaggaccacaggaaatacatcccttggtaattccacaatcccgagcttgttaattctggcagaagaaagctgattagcccagtctctacgtctacaacaaaatagacagcgtcagcatcgaatttctcgaccaacttgctcgcgagccacacacagcggtcatgagctgcgagctcgatctcgctgtacaagacgtcgtagagcgcatctggaaggaactccgcctgatgcggatatacactaaacggtacgtcaa

SEQ ID NO: 18150 - DNA, 659 bp, Emericella nidulans
cttcactgaccgcagctttccctggcatataggcgtgcccaagcccagttcatctgattctcatagcaagcgcgatgtcacccttcccagtacctgggatcctccttctgaccttgtcactcctttgcaagaggtaaaccgctgaatccatcacagctgctgatccagcgcatctaacaaaatcaggtctgggaccacgaagtcgagacatatagcgatgcactcggcttccaaaactatggcttcgaccaagtcatcgccgctggaggcaagatcaactactgtgtccgctgggattcctctcaatccgtcactgccgagcagcgttcgcagatcgcccaggccgccagccgctcctataacaagtggattgctggacttgccggattcgatggttggccttatgacactgtcgaggtcaacgttgtcggctgggctgtgacgaaagagtccctgctcgagggagacacctccggcattgatatttacaccgacaccgatgctgatggcattccacagtgtgctgaagcttgtggaaggtttttccaccaggacggcgattacagcggttgcgccgctggggaggatcgtcattatggtactgcgattataaaatagatagcgtgatagtagactgacattctatagacaacagcctc

SEQ ID NO: 18151 - DNA, 659 bp, Emericella nidulans
tcaacggagcagatgacttggccattgagtccaatggcgacatctggttcacagacgacggtaagtcaagtctcctattcacctgaatgcggcactcgctgatccgaatatgcaaatcaaaacagactacggctggctggacaagacgtcgactaatgcgccgtcactgaacccggccatctatcgattccgacctagcactggaatggtgcaggtggccagcacagctctgagacaacccaacggcactcgcttttctccgtctggcaaaatcttgtacgtgaccgacacaggcgcggcttcagggtctctatcggtaccctttgatgagatttcttatacgttggactacagaggtccgcagacgatttatgtctttgatgtggtgcaatatagcacgaagaccagctccattatcaatcaacgcccaatctaccaggctgtggagtgggcgggctgatggactgcagatcgcgcgcaacggatatctcgtcgccgcttctggatatcccatcgacattatggatgggaccggtatcctgttagtgcagatccaggcgccgtttcgcgtcaatagcattgcgtttgcagggaagaacatgaatgagctctggcttgtgggtctgggcaacattgctcgagtggattaggccttgcag

SEQ ID NO: 18152 - DNA, 662 bp, Emericella nidulans
atggcaaggttgctctcatcaccgggggtgtcaagaatctcggtgcccaaattgcgcgagagctcgctgcttccggggctaaccttgcgctccattatcattcgtccagcagccagtcagatgccgctaaggtcgaagctgagctgcagcaatctgtcaaggttgtgacctaccaaggtaacctgacctccgccgcggccgtcaccaagctgtttgaggacgtcaatcgcgattttggcaagattgatattgttgtgaacactgttggcaaggtcttgaagaaacctatcactgagatcacggaggaggaatacgatacgatgtttgcgtatgtaccttcgtcctcaatctcttcatttacctgacattggaacaggatcaactcaaagaccgcattctttgtcctgaaggaagccgccaagcacgtttccgacgatgggaagataatcaccattgtcacggctttgctgggtgcattcaccggatactatacttcatatgctggcagtaaagcgcccgtcgagcactttactcggtaagcgtccatggattccacttatgaccactactaacattctgtagtggcgtctgcaaagaactccagtcccgccgtatcagcgttaacaacatcgcccctgggccgatggatacccgtacgaaca

SEQ ID NO: 18153 - DNA, 662 bp, Emericella nidulans
acctccatgcccgtaatcgtgggcaccggtgccccctccactcgcgaaaccatcaacctctgcaaagacgcctgcggccgccggcggtgactatgtcctcgtcctcccgccgagctattacaagagtcttgtgtcatccgctgccttactcgaccacttccgcgccgtcgcagacgcttctccgatccccgtcctcatctacaatttccccggcgcgtctgcggggctcgacctctcttccgacgacatcctcgcgctttcttctcaccctaatatcatcggcacaaagctcacctgcggcaatacgggcaagctgacccgtatcgttgcgcaggctggaccctcgttcctcaccttcgggggctcgtgcgatttcactcttcagactcttatcgggggcggcgcaggggttattgccggtactgccaatatcatccctcgtgcctgtgtccggatcatggaactctaccgtgccggccgtgtcgaagaggcgcaaaaagtgcaggctatagtggcccgtgcggactggctcgcaattaagggcgggtttgtggctgttaagagtgcactgcaatcctatcgcggatatggacagcagccgcggcggccgtgcgttgcgccttcatcggaggaagcagcggcattgaaggaagctttcagcg

SEQ ID NO: 18154 - DNA, 665 bp, Emericella nidulans
tctgggattctgccacttgtggcctcaagcacactttagggggccattcaaattgggttctgccattggtcttctcaccagacggtcggctactggcatctggctctaatgatgcaaccatcaagctctgggatcctcccagcggtagcctcaagcataccctagagggccattcgaataaaatcgagtccttggcattctcaccaaatggccagctgctggcatctggctctagtgacgcaaccattaagctctgggatactgccactggtagcttcaggcacactctaaagggccattcagatatggttttatcagtggtcttctcaccagacagccagctcctggaatctggctctggtgataatactatcaagctctgggatcctgccactggcattctcaaacatagtatgagaactcctggcattgttaggagcattgaattctccatagagctgcctcagcttattaccaacctgggaacttttagtattcaagcctggcatacaggctacccatcaagatcttctggaaaaaagactgcagtctctgtacagcgaaatcgttgggttgctattcaaggccaaaaggaattatggatccctcccgaatatcaacctatctcttcagcagtccaagacagttctatagcgcttggctgc

SEQ ID NO: 18155 - DNA, 666 bp, Emericella nidulans
catgagccactacgagaaggaggaaaatctgcgctaacgcgcgaactggtcgcgtactgccacgagcagcgggatcgccaccgaggccgagcctggccggatcgaaggcggcgaggatggagtcgctgatacggcggagctcgaggggctgctgacgacgccagaggagagcgaggagtttgtcgacacggggatcgatctgctcgcgcccgcgtttggcaacgtccatggcgagtatggcccgcgaggtatccagctggagtatgagcggctgaagagcatcaatgagaaagtgggcgaccgcgtcagacttgtgctgcacggggcggatccgttcaccgaggagatcttccggaaatgtatcgagtgcggcgtgtccaaggtcaacatcaacaaggtcttgaacaatgagtatgtgaaggtacaaagagagaaggccgggagggtgccgcttacgcagctgctggaggaggcaacggacgagatgcaaaaggccgtggagaagtgtatggatatgctggggagcacggggaggtactagtctgagttctagggtagtctggaccagtctttttgttctttttgtatcttctttgcatctaatgaagtgtaccctagccctgagtataaatctagccgatcagccacggtttaagagaagcgcaa

SEQ ID NO: 18156 - DNA, 670 bp, Emericella nidulans
cttgcgctaagactcccaactctaccactaccccaaacacccagtgcatcggcgcattcatgctcctgcacctgacggaaaagtcaaccgcttacctcgagaacgtttggtcttggaccgccgaccacgaactcgaccttgatgatcacaaccaaatcaacatctacaacggccgtggcatccttgttgaatcccaaggtcccgtctggatgtacggcaccgccgccgaacacaaccagctgtacaactaccaagtctctaacgcgaagaacattttcatgggcttaatccagaccgaaacaccatactaccaggcgaatcccaacgcgctcgtacccttcacgccacaggattcctggaacgatccagacttctcctactgcacgacggatgcatgcaggaaagcctggggtctgcgcgttatcaactcgtccagcgtgtatgtctacggtgcgggattgtacagtttctttgaaaactacggccaggagtgcttgggtgactcgtgccaggagaatatggtgcaggtagactgctccgacgtgcatatcttcggtctcagcacgattgcatcagaaaatatgatcaccaactccgatgggtcgagtctcgtgccgcaggagggaaacaagagtacgtattgttcaacaattgcgttgtttgagcagac

SEQ ID NO: 18157 - DNA, 679 bp, Emericella nidulans
tcttcgcagtccctaagagcaagtcccccaagccaattcgtccaactcgcgcttgactcgttcgtttgggacgcaaacctccaggagaaattgaacgactaacaaactcgcgaggggtacagaaggacgtcttcaacaatcgaccctcgacctcctttccggctgcgacatccaattccgccgtgaaaaccgcctcgacatcgccttggtcaagaacctgcctatcgccctcatcttcctccccgccgctgacatcccgacgtttgttggagagggccgcgtcgatctcggtatcaccggccgcgatcaggtcgccgagcacgatgcccagctcggcctcccagagggcgaagtttctggtgtgcaagaaatccttgatctagggtttggcgggtgcaaactgcaggtccaggttccggagaagggagacgtccagaaagtcgagcagctgattgggaaaaacgttgtgacaagcttcactgcgctgagcgagcaattcttttcccgcttggagaaggagcatggccctgcggagaagaagacgaacatcaagtatgtggggggcagtgtggaagctgcttgtgcgctcggcgttgccgatgggattgtcgaccttgttggtatgtttctccctccagttacttgttaataactatgaagctaaggaaggcagaatccg

SEQ ID NO: 18158 - DNA, 680 bp, Emericella nidulans
ggtggtggtgttggaaagtcatgcttgacgattcaattgatccagagccacttcgtggacgaatatgacccaacaattgaaggttagctcgtcacttcacaatcgtatcgaactgtcgctcatcaaggatccccaaaatagattcataccgcaagcagtgtgtcattgacgatgaggtcgctctgttggatgtcctcgataccgccggacaggaagaatactctgccatgcgcgaacaatatatgcgaacgggcgaaggcttcctcctggtctactccatcacatcgcgtcaatcctttgaagaaatcatgacattccaacaacaaatcctccgcgttaaggacaaggactacttccctatcattgtcgtcggcaacaaatgcgatctcgacaaggagcgagtggtatccgaacaaggtgggtttaatacgtcgcttcaggtcatttcgttatcacagttggctaataatcaacctcagagggcgaatccttggcacgacagttcggctgcaagttcatcgaaacatcccgaaatcgcgcatcaatgtcgaaaacgctttttacgaccttgtgcgtgagatccgccggtacaacaaggagatgtccaacccatctggatccggtgcattcggcgcccgcgcccccgacagcaaaatggacgtaagcgagcctggtgagag

SEQ ID NO: 18159 - DNA, 690 bp, Emericella nidulans
accgcagtctgaccctgagtgcgttgccagactgaaagcatggtcgaggtgcgaatcggcttacctagatccgaaggcgttctccgatatgataaacgaggtaggctttcttgagtctgtcgtgcgaggtcgctgacaatgataggtacatacggtgatggcattcgcagcctcgatgacaagtcgaagccaacattttcccgacacatctttcgtctggagatcagcggcccaaatgaggaccatctggctgtcattgacgttccaggaatcttcaaaagtgtgacacctggtgtgacaaccaagcacgatatcgatatggtccgcggtatggtgcaggagcacatgggcaacccacgttcaattatcctggctgtcgttcccgccaacgtcgacgctgcaacgcaggaagtaattgaaagagctcgcgaagtcgatcctgaaggacaacgcacccttggcgtgctcacaaagcctgatctggtcgatcgcggagctgagcacaatgtgttggacttgattacgggcaagaccatgcctctcagacacggctgggttctagtccgcagtcttgggaagagcgagctcgctactggagacaagactcgcgcggacatagaggcagagctcagatcgagaccgggatggggccttgtgcccgcagatcgatttggtattgaatcgctcagg

SEQ ID NO: 18160 - DNA, 697 bp, Emericella nidulans
ttctccgcgagaaacttcataaaggaagcgcgcgagaacgacgccacggtcatccagtacgtgggtgagaccttgcgatatctgctcgccacccccggtgaaaccgatccagttactggcgaagacctggacaaaaagcacaatattcgagcagtatacggcaacgggctacggccggatatctggaaccgcttcaaggagcgcttcaacgtgccgacggttgccgaattttatgctgcaaccgagagcccaggcggaacatggaactattcaacaaatgacttcactgccggagccattggacgactggcgtgcttagtggatggcttcttggacgcggccttactattgtcgaggtggaccaggaatcacaggaaccatggcgcgatccccaaaccgggttctgcaagccggtcccgcgaggcgaagcaggcgagctcctgtatgccattgatccggccgacccgggcgagaccttccagggctactaccgcaactcgaaagcgagtgacagcaaggtggttcgcgacgttctgcgtaaaggcgatgcttatttccgaacgggcgacatgatgcgatgggataccgaaggccgctggtacttctctgaccgtctaggcgacaccttccggtggaagagcgagaacgtgtcgacaagcgaagtggcagaggtgctggggactcacccagaagtgca

SEQ ID NO: 18161 - DNA, 697 bp, Emericella nidulans
gatccccacattcaccactccctggagaagcgggcatccttccccataccttcctcgaagggcaacgtgaccttctcttcgcccaagaccatcagcggcacttttgatggaggcatgaagacctatggccgtggcgtcaagtgtaccggtcaagacgaaggtggtgacgaggacgccgtcttcattctcaaggacggtgccactcttaagaacgccatcatcggcgccgatcaaattgagggtgtccactgtgagggctcctgcactatcgagaacgtctggtggacggatgtctgtgaaggttagttccctgtttccgactgcataaccgcaatcccccgctgactttaatcctagatgccctatccctcaagggcagcggcagtggcacccacaagatcattggtggtggtgcccgcaatgctgacgacaaggtcatccagcacaactctggcggcaaggtgatcatccaggacttcactgtgcagaacttcggtaagctctaccggcgctgcggcaactgcaagaagcagttcaagcgcactgtgaagatcagcggtgtcaaggcttctagcggcaaggcccttgtcggcatcaactccaactacggtgataccgcttccatcaaaggtgcgcgaccagtgttaaggagatttgtgttgagtatgagggtaccaacaacaacagcaaggagcct

SEQ ID NO: 18162 - DNA, 702 bp, Emericella nidulans
aaaagcgctcgatacaggtgaaactcctgtaggctgcgttctggtgtacgagaacgaaatagttggtcgtgggatgaacgacaccaacagatcaatgaacgtgggtccattatatattttttttcattagacacctcgaagttcggaatacactacttcaaatatcaatccttctggtttcttttctagcagggaacaacttttgaactaggcaacgatctattgaaacttgccctctgacatgtcagcatagggaacaagacacgccgaattccttgcaatccaggaaatgcttcgcacatacccgaaatctgcattacgctcgacggacctatatgtgaccgttgagccttgcgtcatgtgtgccgcggctcttcgccaatatcgaatacggcgtgtgtattatggttgtgggaatgagagatttggaggaactggaagcatcctgtccttacattccgagtttgttgcccattcatgaagtactgttagcttttcagatgctgacctgcttcagttctgccattgatccgccttaccctgtccatggtgggctgcagcgcaaagaagccattatgcttttaaggcgcttttacattcaagaaaatgaaaagggtatggtgattatatgcgttgctatactcaaagaaactgctgctgaccttgacagctcccaagcctcgtcccaagaaacaccgagag

SEQ ID NO: 18163 - DNA, 703 bp, Emericella nidulans
ctccacctccaccattcatcctccttcctctactggaccgcctaatgcttatgccgccctgtcccgactccagccatgcccggcccgtacgtccctccaggctactcgccgccattccaggtggttgacgatctccaccacggtgcctgggttattatcgtcgttgcgctgggactcgttctctcgctggtcagcttcttgatccgactctatgtgaggctcgccctgcacccgccgttggggaaggacgactacgtcctgctgggagcaacggtatatcgacccttccgcccccacaagcctaatcatagctgtgagcctaatagagagaatgatctgacaatcacctacccaccttttcagattattgccgtcgttcaagcaacgctcatctttgaagcctgtgcaaaaggcctcgggacgtcgattgatttgcttgacgagggagacgtaaatattatccaggttgtgagtggcccgtccctaccgagaccgaccaatccaccaatccacaacaccactcccaaaggctgtagagaagaaggcaggtcctaacagtggtgcaccagctcatcatcacgagcgacatcctctatctcattaccctctacacgacaaaatgctgcgtcgtcgggatatacctccgcctcacgcctcagaagacccataaccgggcctcgtgggctacattactcctctgcac

SEQ ID NO: 18164 - DNA, 711 bp, Emericella nidulans
acaacagcgtgacaggttcaaccaacaaaatctctacgaccccacgcctatgcccgatggcatccccaaggtagctgagattggagcgacctctgcgccgctaaccagcgccgcttacttcattggagaccggtgcaaggcattcaacgatgattatatgaagtgcaaggaagaggccaatgggcggggggagattgagtgcttgagagaggggaggaaggttacccgctgtgcgccagtgtgtatgtttcttcaacgttgttgtactttgacattgagaggggaatcgctgggctgagcggaatggttcaatggatgcactgctgacgaagtttctcgggcagaatcaaggatatcaacacccactgcttaaagcagttcaacacccactgggagtgtctcgagaataacaaccaccggttgtgggagtgccgcaagcaggagatggacttgaataagtgtgtcttcgataagttggtgcgttaccccaatatgtccttctcgctctccacggtggcggtgacgaacgatttaacaaatttatttttaaacagggcctcaagaagaccatccccggcgcccccgaaaaccagaccccggtgcacctccgacccaagcagctgtacgcttcattccccggtccgcaatactaaccaaccaacaactacaaatgaacgtcttattatacatcttttagagaaaacgaatgca

SEQ ID NO: 18165 - DNA, 715 bp, Emericella nidulans
tccttctttcgaaaaatagctaggctaactataactagttctcatgatggtaatatcattagcaaaatattgcgtgcttcagctaaccttgtctagtatgtatcgccattccccgtgctaattacgatgaggtaagtcgtactattagtttcagctggacctgccgttctaatagcacgcaggcacacaaacgtctacgaagaacgctctcttggtatctatgccgaggatgaaaccctctacggtcacgacaagcgccccccaaacacggtcaccaattttctgcgccgtcacctcttcctcaacaaggaaggcacccggaggcatttcctccgcgaacaattaaaagaccagctcagccacgacctttggtggatcgcgcttgccgtcttcttaatctctatcatggagtccagcaactacaccaaagatcccgtaggatattcgaccttcaacattctcttcgaagtcatctctgcctatggctgcgtcggcattagcaccggctaccctggccgggatctgtcattctgtggagtatggcattcgcttagcaagcttatcttagcagcggttgcgcttagggggagacatcgagggctgccggttgctattgataatgcgattatgctgccaagtgagtcaaacgcccaggcgtgggctgaagaggagaatgtggtttcgggaagagagcatcagcaggttggacatcttg

SEQ ID NO: 18166 - DNA, 716 bp, Emericella nidulans
tctgcatgatgctccagttcttccagcaaatgtgcggaggcaacctgatttctgtatacgcttccaccatcttcgaagagaacctgggcatgagtgagagcctgtccaagatcctggcctcttgcgccttgacgtggaagttcctttgctgcttcatctctttctgggcaatcgatcgtctcggccgtcgtatttgcttcatcgttagtggttcaggaatggcctgctgcatgatggccatggccatcaccaatagtatgggcgaagacaacaagggagcctccatcgcctctgccgtcttcatcttcctcttcaactgcttttatcccatcggtttcctcggaggcaatttcttgtacgcttccgaggtggctccagcccgtctccgtgtcgccatgtctgccttctccgcggccaaccattggctgtggaattttgttgtcgtgatggtgaccccggtcgccctcgacacgatcgggtacaagtactacgtcatgtacactgtcttgtcggcctgcattccgatctccgtgtacttcttctaccctgagacgatgaaccgcaacctagagctgatcaaccaggtcttccgtgatgcgtcgtcgccgtgggagatcgtctcgatggcccgcaagctgccgcaaggagaagtcgctgaggcgcagctcgcggccatccacaagaaggacggcaccgagctggaaatgaaggaagag

SEQ ID NO: 18167 - DNA, 733 bp, Emericella nidulans
atgcatccacaaatcgcatactttcggcttcggcggaccacaacgttggtttctggtcgaccaagaaatcagacgctccagccgctcctgaaagtctacttccatcagctgcctcgagaacctcaaaaaggaggaagttaaatgcttccgtgagcgtctcacaacgcgggcccctggccctcctatctggccatactgcacctgtgtccgatgcaatattcgacgccagagactcgacagtcggatattcagtgtcttgggatcactcgctgcgtacttgggatcttgttaccgccgctttagtagatacgcgcacaacgtcccactcgcttctttcgctccagcacctgcccgatcacaacctcctcgccactggaacatctgcccgtcacatcactctcatagatccccgtgcgtcagcagcaacaatttcggccatgactctccggggtcatacaaatgccgtggtttcgttagctcgggacccgcacagcatatatggccttattagtggtagtcacgatggtacatgtcgaatctgggatttgcgtgctacgaaaacagataaaggcggtgccgtgggtgaaagcgtatattctatctcacggaagagcttggaggaagagggcaaggcgaacagcaagcgcgtgggaggtgagggtgtcaaagtctttagcgtgtgctgggatcgtgaggtgggcattgtgagcgccggtgaagacaagcgaattca

SEQ ID NO: 18168 - DNA, 740 bp, Emericella nidulans
ttcgaccctgtatcgacctccactctgggcaagtcaagcagattgttggcggcactttaagcaacgttgagtcggatctgaagacaaattacgtttccaaacttccagcaagccactttgcaggactctacaagcaacataacctccggggtggtcatgtcgtgaaactaggtcccggtaatgacgacgcagcaaaggaagcgctgaggacatggcccgggggcgtgcagattgcagggggaatcacagatgagaatgcacaatattggatagagcaaggtgctgagaaggtgagcttagctgcttagctagtgcggcatgttagtgtcagatttatccaatgccagcgagtagggaagccagctgtttggcagtaccgatgctacattggcttttaaccgtgtccaatccgtcacaatcttcattaactagtatatacaggtaatcatcacatcattcctctttccagaaggtcggttttctctggaacgactacagtctgtcctcactgccctagacggcgacaagtcaaaactagtccttgacctgagctgtcggcgaaagggcgacacgtggtttgtggccatgaaccgctggcagactatcacagagatggagattaaccaaggtaagcggatcggttttcctccattctgacaaagcttcatcatggaggctattgagaagccagcgcactgatcgcaccagaatccatttctctcctcgaaccatattgttca

SEQ ID NO: 18169 - DNA, 746 bp, Emericella nidulans
cgaattcaacaggctagaggggagcagatactttgatgtggaaagccagacgtcctttgaagtcgaccacattacgcaagtgaggatcgccggtattgcggggttgggtcggagtgctgacattgtattgtggcggacagagcacttccgcggcgcagtcatatgttttggaatcacagaatgcggatttgatgtaagtggctgagaggaacctttgcagccatatgctgatggtttttagcaaatcgctcctcaaaacactgggagcacatgctagggaacactacccttcgtcctcgtacggcgtatacccgatcgaaaaagattcggctattgctattttactggtcgcgaaccgttactctcccaacaacttctggtaagtcagcattagggagacagaagctttcggctcagcctctgacattttgaatgttggctcccaggaacggccggtaccgctctatctaccagttccctgtgggtgactccaccacgataacgggcaagatccacgtcgacgtgcattactatgaagacggaaacgtcgccctgaacacaactaagccgctgaacatttctgtaccgaacgccagcgccgagagcattatttcgcgcattgcgtctgccgagcgtaactaccaggaagagctcaacaaggcctttggtcagatggcggagggtgccttcaaatccctgcgaagacagcttcccatcacgaggcagaaggtcgagtgggagaaggt

SEQ ID NO: 18170 - DNA, 762 bp, Emericella nidulans
taattaagactattcaaacaactggaagagttctacctctacttgttattctaccaggcaagcaacaccaaggcgcttggtatctggatctaccaggtaactggactattggagttagtgataatggatggaccaacaacaaactaggagaattatggcttaagcaagtctttgattgacatactaagtcttctaccctgggtatataccggcttctaattctagatgggcatggaagtcatgcaactgtagcatttgactattactgtacacagaatcagattatacctctttatctaccacctcacgcctcccatctacttcaacctcttgatgtggcttgctttgggccactaaaaaaggtatatggccagcaagttcaagaccttatgcgaaatggaatcaaccatgtggataagagtaatttcttgcagatttataggcagatacagccttaagtcttcttaacaggtaatataggcagtagcttctctgcaagcggcctggtcctatacaaccctcattgtgtgctggagggtcttttaatctattttacaccaacaccagcacgcagttcttatagccaaaaatcatccagttggactgcagaaacatccaagactgcttgagatttacaaaaacaatctgccttaatacaacaactctggagacagcctttaacaaccccacctagtcccataactcgtacagttaatcaggttgtcaaaggctgtcagctggcgatgggcaatgccttacttc

SEQ ID NO: 18171 - DNA, 768 bp, Emericella nidulans
cgtcccaaaactaacccagactctgctccaatatctcgacccgcagccttccgacagcgtcttggacatcggatgcggcgatggaaaattcaccgagctcttcctaccctatgtttccaaggttcttggcgtggattcctcgccggcgatgatcgaggctgcgaggaagggctacggcagtgagaaggccgagttccaagttctggattgttgcttcttggagcagaatagcgacgttgcggatggaacatgggataaagtgtgagtcttttcctggaattgtctgctctagtttgaaaggatgtattgcaggcggctaatttgggtgtgcagtgtttccaacgcggccttgcactggatcctccggaatgaaaaaacacgcctctcgacattaaagggcatccacgcgtctctgaaaaagggaggcgcattcgtctttgaaatgggcgggcacggtaacgtcgccgagattcaggctgcaatgcagtacgcccttctccgacagggaatctccatagagaaagcccgcgaatcgtatccgtggttctttccgtctgtaccctggatgtcgagcaccctggaaagtcttgggttcaaagtagtgaagatggagagcgagtatcggccgacaaagctgactagtgacactaatggggggttggcagggtgggtgaggctcatgggggcggcatttctggacgttgtggataccgagaagagagaagaggtgatacgggaagtctgcgaggtgttgcagacggtgacaac

SEQ ID NO: 18172 - DNA, 773 bp, Emericella nidulans
tggtatgcactctccccttctgcaacctagactggatgccagtcaacccagcaaacgacgtctaaccgcttcgcctcgcaacagaaacaacagcagcagcaagctgaaaatgctgaaggcgctgcaggaaagaagaagaagaaggttacagctgctcagctgcgtgttcagcgaggtatgtctgcatctgcacctgcatgcgcttctatcctgtccaccccgcaagtgcttacacgactttaccacgcctagaccttcaagaactcaccctcggaagcacaatgaaaatggcgtttccaaaccctgacgacatcttgaatttcacactgaccattgagccggacgagggcatgtacaagggtggctcattcatcttcaccttcgccgtcaaccagaacttcccgcatgacccgccgaaagtcaagtgcacgcaaaagatttaccatccaaatattgacctggaggggaatgtttgtctgaatattctgcgtgaagactggaaacccgtgctgaatctgaatgcagtcatcgtgggcatgcaggttagttaacgtcctccatgactttcgtcttctacgcggcgcttggctgcttgggaagcttactttaatcatgatactgacatactttggatggccggcagttccttttccttgagccgaacgcttccgatccgttaaataaagaggctgctgaggacctgcgacagaaccgcgacctatttaagcgcaacgtccgcaattcaatggctggtggaaacgttcgtggtgtta

SEQ ID NO: 18173 - DNA, 779 bp, Emericella nidulans
gacgactgggaccaactagggtttaacattccacttctgctcaatatgcaaccagcaggagaatttcttggcgaggagtactaccgagcgggaggccttccggctatcatggcggagctgttagatgctgggaagttgcacccagacattcttacatgcaacggacataccgtcgctgagaatgtgaaagggcatcacagctgggaccgacgggtcatcaagccgtacagcgagccccttatgaaagacgcaggattcgtgcacctccagggtaccctattcgagtctgccattatgaaaacttgcgtcatatcagagcagttccggcagcatttcctggaaaacccagacgaccccaatgcctttgaaggggccgttgtcgttttcgacgggccagaggactaccatcgccgattggaggaggctcctatcaatgacaagagtatcttagtgatgcgcgggactgggccactaggttatcctggcgccgcagaggtggtcaatatgcaccctcctgggcatttgttgcgacaggggatcaagtcgctgccatgcataggggatggtcgacaatcgggaacttccggatcgccgtccatcctgaacgccagccctgaagccgctgctggaggcaatcttgcactcgttcgcgacggagacaggctccgcgtcgacctcaacaaacgccgcgtggatatccttgtctcgcgaaaagaactagacgagagacgagcggcattggaggccgcagggggttacagtatcccggagagccaaac

SEQ ID NO: 18174 - DNA, 780 bp, Emericella nidulans
tccgtctacgataacaatgtcacggtcggaccgcgaggctctcgttcgctggcgcgcgagttcgatgccctcgtggtcacagatgatgtctacgatttcctgcaatggccgtccgatcccgagaagccgctcgacgggcccgcgaccgccttacaccctcgtctcgtagacgtcgaccggtatctggacggcggcccgaaagacgaatggggcaacgtcgtgagcaacggcagtttcagcaagctcatcggaccggggatccgtacaggatgggcagagggttcaggaaaggtcgcctacggtatctcacaagcgtacggaccgctcccccgattatccaagcaaagctaacagaatgtagaggctgccagcgctccggcggcgccccgtcccagttctcatcgactgcggtcgaccagctcgtctcctccggtttcctccaaaagcacatcgacgaagtcctacgccccgcatacgcatcacgatactaccgcctgatgtccgctatcaaaacccacctttacccccttggtgtaacggtccccttcacgggaccatccgtcgcaggcggctacttcatctgggctgcattgccggggtccttgcgcgcgagtgacctggtcccggtcgcactgcaggatcaccgtgtgagagtcgctgcaggaactctgttccgagtccagggcgaccaggcggaggacaagaacgagtttgggtcatttatccgtctgtgcttcgcgtgggaaccggaggagaagctggcagaaggagtgcgacggt

SEQ ID NO: 18175 - DNA, 789 bp, Emericella nidulans
tcgacaatgacacaagctccatggtctctggcacgcaaaaccgctattgttaccggcggatcgcgaggcatcggccgagtatcgcaatccatctaacgtgcaaggggctcagcaagctggcgatcacatacatcagcaacctcgcagcagcggaatcaacgctagacgaatgccgaaaaaacggacttgggatgggtatcgcgattaaagccgacctccttgatccaaacattggccatggtctcgttcagcaagcgttagctggcctcgaaacaccaaccatcgacattcttgtcaacaacgccgcctatctcgatccaagcgaggcggcttctgttgaagaactaacgctccccgtcttccagaaggtgatgcaggcgaacgctttcgcgccaatttctataattagcgccacaatgccccatctgcctgtctccggtgggcgcgttatcaatatttccagcgcggcagctaagttggcgaacccaggtcctgttatgacttacggcgcaagtaaagccgcgttggatagctttactcgctctctagctgccgaattcgctacggacaaggcggccacatttaatacggtttgtgttggtccgactgttacagatgggtttcatgtcgttgggaagttgtaccctgagggttttatggaggagctggcgaaggcgttcactgcggcacagagagttggcatgccccaagatattgcgttcattgttgggttccttgcgggggaggaggcaagatgggtgaatggggcgtgtatgagcgctaatgggg

SEQ ID NO: 18176 - DNA, 793 bp, Emericella nidulans
aacaagcgaaaccatcaagcgcaaatgacgtccgattcgcactttcaccctccgcacgcaataccacccaggattagctccaaccgaatgtcaggtgcatctactcgagacaaggcagcactaatgggaaacttcgagaaggactggctgtcaaaaggtgacaagcttcagacaaacaccgatttgtctaaaagacacacgcgaaatcagtcaagtctcgacgggacaaaatacaaagatgggaaatggtcccaagagaatgaggaggtgatcatgggtccgtacgactacatgctgcaacacccggggaaggacctgcgacggcagatgatcaacgcttttaacgtatggttgaaggtgccatctgagagcctggccatcatcaccaaagtagtggctatgctccataccgcttcattattgatcgacgacgtcgaagacaactctcttctccggcgaggaattccggtcgcacatagcatctatggcaccgcgcagacgatcaattcggcaaactacgtttacttcctcgccctccaggaggtgcaaaaactgaagagtccggcagctatcgacatatacgtccaggagctgctgaatttacacagagggcaaggcatggatctgttctggcgagacacgctcacttgtccaagcgaagatgaatacttggagatggtgggcaacaagactggaggtttgttccggctagctgtgaaattgatgcaagctgaaagcagcactggaaaggactgtgtggcccttgtgaatgttttgggactggtctttcaga

SEQ ID NO: 18177 - DNA, 794 bp, Emericella nidulans
ctcctttccagcacctcctaccccacccctaacacctgctctggagactgctgggcccatgacccgggtttataccaacgcatctccgatgaaaaatacttccgcttctcaaccggctctggcatttagatccggctctggcatttagatccacaacgctgataccctctctggcccttgaaaagcagtgggcgatgccctgtccagcggcactattataaatcatccaggtcgaactaaattataggctccaaatgtccactacgatcaggccacaaaaacctaccacatgtactataccgtctcaacactcggctctcgcaacagcgtgatagggcttacatctcacccagtttaatgcccgagagctggacggatcacggcgcagttatttactctacaaatgaggacagatacaatgccattgatgggaactgggtcgagattgatggtgtatcatatctgaactttgggtcgtaatgggatgggctgtttcaagccccatcgtcatttacacgggatgaaggttcaaaggaggagaggcatgctatgcatgtcgccaaagatacactgagccatctagcctacaatgcaacggggcatcatcgtatcgaagcgacgtttatctttcaacataggagctggtattacttgctcttctcgtctgggagggcatccaagtatgacacgacacttcccgcgcagggcgaggagtataaattcatggtttgcaggtccaggactgggagagatgattttgtaatttgaccttcttcttgctatatctatgtcga

SEQ ID NO: 18178 - DNA, 796 bp, Emericella nidulans
ccgcaagacctttacgtgtaacgtgtcgctgcgggaagaacaagtcagccggccgtccaggcccgccgctgaccgagcacacgcgggagaatgggattaccgtcaggaagaacaggatcgagaggcgttagaggccaagacacaggacggcgggcgtacgatgcgtgtcatcaaacatccattattccgtccgttcaactccacgcaggcagtggagttcctcgggtctcagagtcgcggcgacgtggttatccgaccgtcttcaaagggacccgaccacttggccgtcacctggaaggtggcagacggcatcttccagcatattgatgtgctagagctggacaaggagaatgagttctccgtcgggcgtacactcaaggttgggggtcgatttacgtacagtgatctggatgatctgatcttcaaccacgtcaaagctatggccaagaaggtggatgagatgatgctgcatgagaaataccaggagggcagcaaagattcgacctgtacgtcactttcctacattctacattcaattgagtactaacggcagttcagaccagtggctggagacctatactaaggctaacccgcgccggacggtgtacgccttctgcatagaccccaagcatgccgggtacttcttcctttgcttcaaggccggagagcacgcgcaggtgcatagctggccggtcaaggtgattccccaagggtacgagctgcagcgcaatccttatccagacatgcgggcattgtgcaatggattcaagctgttgttcactaacatgcaaagcgg

SEQ ID NO: 18179 - DNA, 800 bp, Emericella nidulans
ttgaatgcatcaatactagggggtggccaattccctctaccattatcttcaaaggaaaagtccatatggagggatggtttgatgaaggcacaatccctggcaattggaggattgaaatgagtgccaatggatggactacagatataattggccttcgctggcttcaaaaagtctttatcccggctacaactgagcgtacaaggggggggtatcgacttcttattctggatggacatggaagccacctaacgcctgagtttgaccgtacatgcaaggagaataatattatacctctttgcatgcctgcccattcatctcacctcctccagcctttggatgttggttgtttcggacctttaaaaagggcgtatggcaagcttattgaggagaaagggcgcctgggatacaactatattgacaagctagattttttgaaagcttatccagcagctcatcaggaagtctttacagcagagaatattcaaagcagattcaaagcaactgggatacttccttcaactcccaaggcagtacttgaaaaattaaatatcaacctgggtactccaaccccccctccaagccatgggggtgcttcaatcccttcatcacagcttggtacgccttatactgtgcgccatgtgcatcgaaaaggctcttcagttaaaaagctactttggagaaggtctaaaagtcctccaactcctaccaaaaaagtcctagatgagttggtgaaagggtgtgagttggcgatctataatgccagcttactagcaaaggaaaattgtgatctccgctcagct

SEQ ID NO: 18180 - DNA, 800 bp, Emericella nidulans
agctacccagccagcactccctagtcgccaaactagctcgcaaagactcccccctcaatcatacacaagtcgcggcagaatgcaaagatcatatggcggctggtatcgacacaacgggagatgggctatgttttctgatgtggaagttgtcccagccgcataacatccgctttcaggagcgactatgggaggaattgagaactgcccgcccagatatcccgttagataagttaccgtacttagatgcggtcgttaaagagggtttgcggtgtgcgccgcctatccccatgtcgtttccgcgttacgtaccgaccggaggacggtcaatcgacgggcactttgtcccggagaagacaatcgtcagttgtcagccgtacacggtacacagactggacgagaatgtcttcccggagcccgacagttttaatccggatagatggatggtcgagaagggagcggttgagcgtaaccggctgttctttgccttttcgaccggtggcaggggttgtacggggcggaagtaagtcctcctcttttctttttgaatcaggcatctcgtatcatgtattgtgatctaggttgcgttactgatggtcgagcaaatcgtgcagtctggcgctggtggagatgaagatcctcctgcgcgaggtgtactcgcgctttcggacgacggtggcaaaggatatgcatgggtgcatggatattgatgaccaaatcatctcttcgaggccattggggcagacttgcaagttgaggttcagtgagacatgacattgagatctgctgctctgctttgattg

SEQ ID NO: 18181 - DNA, 805 bp, Emericella nidulans
ggctggacacagataagatcgatctcttgcagtttcattggcagtttatgggttttttttttctttcctccctcacctcacaggttagactagacggactgacccacagggatagtacgaagacgaccagtatatcatggccctacaatatctccagcaggacccacgggcccagctcctcggcctctgcaactttgacacgaagcatatgcgacgagttatcgagagtggcgtcaagatcgtcagcaaccaggttcaggttcgtaccgatactaggtatacttctatcgaagcgagcgcagctgactacgaccagttctctctcatcgattctcgcccaatcgttaaaatggcaggtttctgctcagagcacaacatcaaacttttgacttacggaaccctctgcggcggcctcctagccgaaaagtggctcgatcaggcgccaccggatctctacagcgagaagataacgcctagtcagcgcaaggtacactcccgcggttcaatccactgacacgtagctaactgcgtggtagtactacgcctctattcgcacatggggtgcgtggccgcttttccaagagctgctgcgtgttttaaaggtgaccgcgtataagcacagtgtgaccatctcgaaagtcgtcacgcggtgggttcttgatttcccgtatgtcggcgcggtaattgtgggatgcaggatgggtgtcagcgaacagtcagctgagaacctggcgagtttggggtggtgtctagacgaggaggataggcagatgattgagggtgtgatgcagaggagccagagaaa

SEQ ID NO: 18182 - DNA, 810 bp, Emericella nidulans
tttggggcacttatagcctcctatatgggccagggcacgctttcttggcgatggacgaattggatcatgctgatcatgtctggcctcgttatggcgctgatcgtcctgttgcaaccagagacctacgggcctctcttgctgaaatggaaagctaagcactaccgcaaacttaccggcgacaatcgctaccgatctgagatggatatgcaaaagattgcgctcttttcgcgcattaccaatgcctgtatacgccagtttacgcttaccgtccacgaacccatcattctgttcatcgcgctctacatgactgtgatatacatcgtgttgtttacattctttgacggttacccgttcatcttcgaagaggtctacggggtaagtcaggggattacgaatgtcatttggattgcgatgtatgtaggtattgcactggcctcgttatgggtgcctgttgtctattcgtggaccaagaaggagtttgctgccgtcagtacctgtcccatgacggaaggctctttggaaggcaatgcgactgagactgagggttcaagctccgacgacgaaagcagcaggaaatctcaccccacccgacctgaaaatagactttggtttgcaatgcttggtgctccattgattccaattggtttattctggatgggttggactgactatgtaagaaccaacccaccaactttagagtttgcacgtactaaccagcctttgcgagaaatcaatctcaatctggtccccattatcgcctcggccatcttcggcttcggaactatcaccgtcttcatatcgagctacatg

SEQ ID NO: 18183 - DNA, 812 bp, Emericella nidulans
cgagggagcatactcttccaatgcatatttgacggcaaacgacgcgatgtctttgcagccggtggtcgttatgactccttggtgcaggatttccgctcaggcgtcacgacaaaccgtgttcagcctcatgcagtaggctttaatctaagttgggacaggctcagttctgcgatgatcgactacgtcaaagctccgactaaggcatcccttaagcatccggaaaccgacgttggggcgttctggaagacgagaagggtgagtgggtaccgacgaacatcctactgtaccgtgtttaacgatatttctagtgtgatgtacttgtggctagctttgacccaacaatcctacgcgagatgggtgtgcagttgactcaagatctctggtccaacagtattagtgccgaattggcagtggatgcatcctctttagaagagcttcttacgaagtacaaagaacacaatcatagctggattgtcattgcaaagcaggacagcaaagagcgaggtttcaaagtcaggtgtcttgtgccgaaggaagaattagatatacgcggctctgagcttataccttggcttcgaagcgagatacgtgcgcggaaccaacgggagggagctccagagaatccgcggtttgctcggctcccaagtcagtctgaagtgaacacgcctgcaaacgatcgatccaatgatgtgcgcattctcgtatcacaacatagaagcaaaaagacaaaccggaggaatattgtcgagcaaggtaagcgttacctcagcgtaccccaaatactgggctaaccagactccagctcttacccg

SEQ ID NO: 18184 - DNA, 815 bp, Emericella nidulans
tcagctggactgcctatgtgcaggttatgaagcccgaagatgccgatccggagaaactgggttttgatccttttgatgtgacgaaggtttggccgaagaagcagtttccggtatgacccctacttgacaataacgaactcggactaatacggcgcagctgcaagaattcgggaaacttacccttaacaaaaatccagagaacttccaccgcgatgtcgagcaagccgctttctcgcccggcagcatggtccctggcattgaagacagtcccgaccccctcctccaattccgcatgtttttctaccgcgacgcgcagtaccaccgaatcggtgtcaacctgcatcaggtcccaggtacgagcactgtttttaccctgcaacaagcatgactgactgattgatagtgaactgcccctttatggcctcctcctactcctccctcaatttcgacggccagctgcgtgttgacgcaaaccacgccatgaatccacaatacgctcccaacagcttcgtgcacaaattccgcaccgatacggccgaggcaccctaccagctcgctgacgggaccgtcagccgcaagtcgcacttcttccacgagggcaaagcgagcgagtacgaccagccgcgggagctctacgaaagggtcatggatgagaaggcaagacagcacttacataccaacacggccagactcctgaagctggtcgagtatcctaagatccaggccaagtatctaggacagctgttgcggatcacggagaagtatgcgcgcggcgtgtatgacttgcttcctgagaagaagtttggatttgatga

SEQ ID NO: 18185 - DNA, 819 bp, Emericella nidulans
cgggtccaaaacaatcaagtaacatcgggggcagtctcaacatacagcttctatgccttcacctatctccagtctaaccgagccgctcttgaagcgctagacgttgaagtcgagtaggccgcaccattacttacaccctatccacgaccagaagtcctgacaagccaggttcatccccgtctttctcggcggaatcaacgtcggtagcggttcgtctgagcccactgtcgcccttattacttgagttcatttggagctgacagagttctaatcaaaaggaaataaacccccatggactctccctgccaaagccgcatacagtcgatacgacgtcaaacgagctcagcgctacttcgggcacgattttgaggtcccgagtttcttcccgatcttgtcgctgctcgtcagtgtcctctctgttcacgactacagtgaaacgttctcttgtgtgaagtgagtactgacggagagatagccacaacgcgccctcacatatataaaacaaatgtacccaaaggacaaatacgaagcgacctttaactcctgttttgagtcgttctggtaccgacatattgacatctcgaatcccgaaaacctcgccatcgcactgggaaacgtctttgataagacccagatccaagagatcctagctggtgcgaacaagccagagacaaaacaggcgcttaccgacgtaacgaccaaagctgtcaaggagcttggagcgttcgggtgtccgtggttcatggtgcatgatgggaaaggcaatgtggagccgttctttggaagcgaccggtttcattttatgtgggattatcttgg

SEQ ID NO: 18186 - DNA, 820 bp, Emericella nidulans
agtgcactggtccccatccttgacaaccttgggtatacagacatccacttcgactacttcacagctccgcagtctgagaccgtcacactccccgatggccgagtcattcacggcatacccagcataaattcgggagaagactcagttgtatccgcactccactgccggccatttgtggaaccgctagtcgaaaagtacgatgggttcctagtcgcatgctattcagcgcatccacttgtcggaatgctcagagaagctattgaaaagctggaagatgcagctttactagagctcgggccgacggcaaacacaaagaagaagttcgtgaccgggatcttcgaaggaagcattgtaacctctctatcactggttagctctttccaacttacctgggacggagggttcggcaagtcgcaagccaaggacacttttggtatcgttactactgggagtagttggaaggtcgagctcagcaatgctgtttcggatatgcttgttaattccggtaatcataagggctcttccagtcggttcgccggcgtggaaaccacaggactcacggctgttgaattgcatactactcctcctgaagaagtacgaaggaggattattgaggctaccgaaagattaatcaaagcaaattcacgacctgtcagtgcgatttgcctgggatgtgctggtatggccggcatggaggaagcggtacgagaaggttgcatcaaagcatacggccgcaagcaaggtagtcgggtaaagatagttgatggcgtcgtgtctggtgcagggatgctcgtcacagcatgcaaagctggcttctgag

SEQ ID NO: 18187 - DNA, 821 bp, Emericella nidulans
cgccatggaatacttgaaggatatctcgtcgtccctttcgggctgggagttcaactttgctcctggttggcagagcgtgacagcctcagtgctgctcgtggctggaggctggtttgttgtctccagggtttggaccttcctcagggtcttgaccagtctgttcgttcttcccggaaaatcggtatgttatcaatgctaatccgtttgtctatacgaaaatagtactgatgatttagctccgctcatttggccctaagggtagctgggcaattgttacaggtgcctcggatggtttgggcaaagaattcgccctccagatcgctcgcgctggctacaacatcgtcctcgtttcacgaactgcttccaagctaaccgccttgaccgatgagattacgtctaaatacccctcggtccagaccaagatgctggcgatggattttgctcgcaacttggacgaggactacgaaaagctaaaggccctcattcaagacctagacgtagctatcttgatcaacaatgttggaaagagtcacagcatcccggttcctttcgccctgaccccggaggacgagttggcggacatcatcaccatcaactgcatgggtactttgcgggttacgcaactggttgttccaggcatgacccaacgcaagcgaggattgattctgaccatgggttcttttggtggtctcgttccatctcctctccttgctacctactccggaagcaaggctttccttcagcagtggtccacagctcttggttcagaactccagccgtacggcattactgttgagctggtgcaggcctatctcattacc

SEQ ID NO: 18188 - DNA, 827 bp, Emericella nidulans
ctgtaaagaccaaccgagactacctgcggaaccgaagcacaggatcatggatgtatatgtcgcgcctggccgcgatcaaggaattcgccttcatgaaagcgctacgggagaacggcttctcggtaccagagccgatcgcgcagaacagacacacgattgtaatgagtttgatcgatgcctttccactccgacagatttcgaaggtcccaaaaccagccctcctttacgctgagttaatggatacaatcatgcgattggcccgctatggcctgattcatggtgacttcaacgagtttaacattctcatcaaggaggaagtgaatccggaagcaaaggggaaaggacgtgaaggagaagatgacgacgaaaacctcaaattgaccccagtgatcattgatttcccacaaatggtatctgtcgaccatccaaacgccgaaatgtactttgaccgcgacgtgaactgtatcaagcgctactttcagcgaaaattccacttcgtcagtgatgtaccgggacctttcttcgctgatgccaagaagcagttaaagaaaaatccaggcaaacggctcgatgttgaggttgaggcttcaggtttctcaagaaaaatggcacgcgagcttgagaagtatatgaaggaggttggcgttgatggggacaatggggaagctgataaggaaggtgccgagagtgacaatgaagatggttcaggctcagaagatgacactgcaggtcagagcgagacagatacaaaagaggaaaactcgaatcgctcacttgaagagagttctcagaaactcgaacagttgcatgtgtcgtgaatacgccag

SEQ ID NO: 18189 - DNA, 830 bp, Emericella nidulans
aacatggtcagatacgattacctcttcaaacttctccttatcggagactccggcgttggaaagtcctgcttgctccttcgattcgccgatgatacctatacagaaagctacatctccactatcggcgtggattttgtacgtttaccctgctgtcgatcggttatcggttgtcaggcaatcattctgcggacagggattaactaacagcctctatgaaagaaaatccgcactattgaacttgatggcaagactgtgaagcttcagattgtatggaaagctgatagttttcttttagtgcatcggataaagctgacggcttacatagtgggacaccgcaggccaagagcgcttccgaaccattacgtcctcttactaccgtggcgctcatggtatctgcgttgtatacgatgttaccgatatggactcttttaacaacgtgaagcagtggcttcaggagattgaccgctatgcgactgaaggtgtcaacaagcttctcgtgggcaacaagagcgatatggaggacaaaaaagtcgtggaatacactgtcgcaaaggttggttgctatatccctgtcacgacatcacaacatcgatcggtggtcttcttcagctgttatttccggaaaccctctaacttctgtgtctacctataggaattcgccgatagtcttggaatcccatttttggagacatctgccaagaatgcttcgaacgttgaacaagctttcttaaccatggctcgacagatcaaggaacgcatgggcactgcaaccgtgaataacaagccaactgtgcaagtcggccagggtcagggtgtccagtctggatctg

SEQ ID NO: 18190 - DNA, 848 bp, Emericella nidulans
cttacgaacgcgaacgctacatcgccgagcttgccgtccagcgcgcaaccatcctcacgcagaaggtgttcaatgagaaggccaaaggcaccgtctcgaaggatgataagtcgcctgtcaccattggtgattttggggcccaggctctgatcattcaagccatccgcaagaattttcctaatgatgaaatcgttgccgaagaagaagctagcactcttcgtgaggataaagccttgagcgccgagatctggagactggtcaaggacatcaagctagaagatgcggagagcaacgagcttctcggtggttccctccccagtgaagaggccatgcttgatatcatcgatgaaggaaagagtgccggtggtcccaagggccgcatttgggctttggatccgatcgacggcaccaagggctttctccggggtggacagtacgctgtctgcctcggtcttcttgaagatggcgacgtcaaggtgggagccatcggctgtcctaacctcccagtcgatgacgctgctaccatctcttcctctatcggtgtcgatcagaacagcggcgcgggcaacggagtgctgttctctgccatcaagggtgctggatcagttagcaggcctctaacgagcggtgctcgggccgaaagcaaatcaatctctatgcgcccggttcctgatatcgctcaggctgttttctgcgagggtgtggaggctggacactctgctcagggcgacaacgctgccgttgcccagctccttgggattacctcccccagtgtgcggttggactcacaggcaaagtactgctcaattgcgcggggagcgggggatatctacctcagacttcccgtc

SEQ ID NO: 18191 - DNA, 859 bp, Emericella nidulans
agcttggcctgacgactatggcgaggtgcagtggaacagcgatcgcgtcgccgtaattggctctggtgcttcttccatccaggccgtggctgggatacaacctcatgtcggtcatctcgatatctttgtgcggacgggtgtgtggtttggagtccttgcaggaaacaccggcgcgccaaccaaaatctacagcgaggccgagcgcgcgcaattcaggtccaatccttcagcactagtcgagcatacaaagagtatcgaggcagaagtaaacggcatgtggggggccttctaccgggattctatggcgcagaagggcgcatcggccttctttcgacagcgtatggcgagcattatcaaagatgatagactggccaagggcttcacgccgacttttggtttcggatgccgtcgcatcacaccaggagacccgtatatgcacgccattcagcaggcgaacgtcgatgtacatttcactgccgtagccagctgcactgaagatggcatcgttggcgctgatgggattgagcgattggtcgacaccatcgtctgtgcgtcaggattcgacaatacatatcgtccgcaatttcccatcatcggccgacggggcgtcgatctgcgagataaatggaagacaaatcccgaagcatacctgggtctggccgtgccagatatgcccaactacatcaccttcattgggccctcgtggccgattcaaaacggtagtgtgatggcgccgctgcattcggtatctgaatatgcgattcagttcctcaaaaagatgcagaacgagaatatccgggcctgggcgcctcgccagcagattacggaccgcttcaacgagcatgtacaggagtgggtg

SEQ ID NO: 18192 - DNA, 874 bp, Emericella nidulans
ggagggggctcattaattgttgcatggcaagtaaaagaaaaaaatattctagtagtaggtggtggtgaagtcagtttgttccctattctgccaagctatatatatgttgcagctctcttacaatatccgcaggtagctgctggacgtatccttcatgctcttaatgcagacgccaaagtcactgtcgtatgtccggcatcaggattaaacgacgaggtggcctaccgtgtgctggaaggccaagtcacacatattgaccggaacttcgagccctccgatctggatggcgccgacatggtactctgtgccattgacgatcctgaagcttcaacaaaaatctggaaactctgcaaggagaagcggataccagctaacatagccgatgtcccttctgagtgtgacttttactttggcagcgttcaccgggatgggccgttgcaggttatggtcagtacgaacgggaacggaccgaagcttgcaagtatggttcgaaagaagatcgcagacacccttcccaccaacatgggggccgcaatcgagaatgttggaaagctgagacaaaagttgcgggaggtggcgccaagtccccaggaaggtcgtaaacgtatgaaatggtgcgtataatgtcttgtgatttctgctcatggactgataggtagtctaggatgtccgccatttgcgaatcatggcgactggaagatctggttcatatgactgaggaggatatggaaactctattgacacattaccagcacggcgggattcctactcttggtgaaattcgatccagccttccgccgccgtcgactgattgagactcagcatgctgcatagctctgaagattgtgtatttaagctattttatagaagctca

SEQ ID NO: 18193 - DNA, 888 bp, Emericella nidulans
gttggccaagctcaatgttccagaaaagtgaccaaggaatctccaattgttcctgccacagactgctcagacggcatggtagtaaactagtggtgaacttactttttgagaagctaaaggatagtctgaagtctcctgcgaaaatgtggtactggaactggagcacaggtagatcccttcctcaacagatcctatagcagccacatactgatatctggtcactcacaggccccagcaatttctgtaagagctcccgcaaggcgctcgccgacgaactgggtcttacgaacccgccgattacctggcatgttgcacgcgacggcgtggcggaaataaccaacttccttgcgctccttggcgggtctttgggcaagctcgcgttggacgtcatcatcatgtcctccaacgagctcggcgaagtgtctgaacctttcgtgccccatcgcggagcgtccagcacaatgcctcagaagcgcaacccgatttcatcagaagtcatactcgccgcatcaaaacggctccgctcgaacgcctctctcgttctcgacggcatggttgcggactttgagcgcgccagtgggccgtggcatcttgagtgggttgctattcccgagagttttgtccttgctgtgggggctttggagcaaacgaaattcgctctgggcggactggttgtgcatgagcaggccatgctgaagaacttacattctacgaaggggctgattgtggctgaggctgttatgatggggctcgccccgtttgtggggaggcagagggcccatgatattgtgtatgaggcgtgccaagggacaatcgagagtggagggagtctcgaggaggagttgctaaagaatcaggaggtcttggagaagatggggaaggacagaa

SEQ ID NO: 18194 - DNA, 895 bp, Emericella nidulans
aacaggagtcgtcaccaaaatcggcatccatattaccccagccccagaacgttacgcaacggtcacggtcagtgttccgcaggaagagaatctcatccccttggtgggcgtcctctctgacctcatgcggcgctctgtcatcctaaactcgccgtccatcgccaatatcttccgcattgcgctattctcccaagcgccggaagtgcaggccaagctggcacagcacacgaagcccaactcccacgttccgtacccggttctggaggagatccgcaagcagcaaggctggggcttctggaaggcgtacttctcgctttatggatccgtggagatgctgcccgccctgctgagcaccgtccagcgctcattcagcgtcatccctggcgtccagatccagtggcgagagttccctggcactcccggacgcgctatcaccgccgctgagattggcagcgaagaaatccctcacagtggaatcccaaccctgtcacctctgaaccttgtcaatagtcgtgcagacgccggcggcgggcacatcgactactcacccattcttcccccctccggccgtgagttgtacaactggtacctcacggcaaagcagcacaccatcgacgccaactttgactttttcgcggatttccatgtttacccgcgctatgtggtagccattgaattagttgtctatacccttgctgaagaaccgcgcgtccacgagctgtacaaaactctggcgcgagatggagtgaagcagggatatatcgtgtatcgtactcatgtgagtcatatggataatctagcagggaaattggacttcaatggccatgtcttctcgaaggttactggcgcgctaaaggacttgttcgatccgagcggcatcctttcaccaggaaag

SEQ ID NO: 18195 - DNA, 895 bp, Emericella nidulans
gacctagctatcatgttggtgactgaggtatatgtcaaagcaggctgggagattgtggggggtgatgatgatgcggaggggcgtgctcgtaagagtgagttcgaagctgtttcacatagtgattagtctccgttaggagccagaatgtgcaatgctaacagcgtgcgatccacagagcgtttgattgaacttctacgtgaatttccgtcagaggagcctacacgaaagaggtttatccaggaagcgattgggtggagtggaaggttcggatcagtggagcgaggagaccccgagttgcaccatgctgtcggatctgtatacgcggaaggtatggcgggcatcgcgccttgaaaatgggaaatgacattctctaacgatgaatccagaccaagagccctatgaagctgaaaagcatcttgtgctgggcacctccgagtcagctgagacgttggcgaaacttgagtacgagtggtatacgagcgacgagccgcatacagcaggcatttatgcagcacgtgcagtaatcccttttctactaattggcaacctgcgcagtgccaacaaggcgttcttaatctttacgtcccgcctcacgtccgcaaacccgagccttggagtgcaagatgtcagcagtgccacctctgatgttcgggtgttgcctgcgctcccattattaaactttctcaacatgctgctgctcgctattcaacgaggaacagcggatttgttcaagcagttgaccgcgcactatgctacgcatatcaaagaggccgggatcctcgatgatgcgcttccccaaatcggcgagcagtacttcgggatcaatatccctaggcagggaaatccgctgttggatatgatgggcagcatgttgtttggaggtggacaggatagc

SEQ ID NO: 18196 - DNA, 899 bp, Emericella nidulans
ctgtatcctgggctgtggttcgttgtcatattcacttagaaagcatgtctagctgaccaataacaaggaaatctcggcaccgccatcctcaaatccgtcctggccaccccagagccggaccggctcttcacccactatattgcctgtataggtagcccctcatctaaagagcgtctcgaatttcagtttaaagatcaagcaaacctcacaattgcactcgatgacaacattgccgccatcagagctgcagacgtggttattctcgctcttgatcctgctctcattccagccggattggcccagccgggcttccgcgacgctctaggacagaaattgttgattagcgtcgcagcggggtggaccgtgaagaagcttacagagacgatctacggcgatgggctagctgaagaggggaaggccagagcaacgattatccgcaccctccccaacatctgcgcccttgtgggacagtccctcacagccatcgaagtcgatcctgcggccaaaacagccgaagaagcgctctccctgacgacctccatcttctccagagtcggcaaaacgctcatcattccaccgagtctcatcgacgccacgactgccgtcgcgggatcgactcctgcaatgttcgctgtcattgtcgactccatgattgatgcgtctgtcgccgtcggtgtaccgagatccatggcgcaggcgatgatctatcagtccatgcgggggtctgcggagatgctgcagagcgggctgcagcctggggacttgagggaccaggggaccagtcccgaaggatgtacgatcggggggctgatggtgatggaggagagaggtgtgagggggggcgtgggcagggcagttcgcgaggcggttagtgttgccaggaggatggatggaaggtt

SEQ ID NO: 18197 - DNA, 901 bp, Emericella nidulans
gtctggcgacggttactgatgttgttgaagcactgcgcctcccaatgccgccaacttcgcgaccctgcgtgaaatcgaaggccgtctcaagtccatcaagaacatcaagaagatcaccaataccatgaaggtcattgcctctacccgtttgacccgcgcccagaaggccatggacgactcccgtgcctacggtcagacctccaacaccctcttcgaacaggctgagaccaaggcccttgaggacaagaagaccctgctcgtggttgctagctccgacaagggtctctgcggtggtattcactccggtcttagcaaggccgctcgccgcgctctcgaggccaaccccaactctgaccttgtggttctcggcgagaaggccaaggcccaactttctcgtaccaaccccaacgccatcgtcctcagctttgccaacgtctgcaaggatatccccaccttcgctgacgcccaggctgttgccgaccaaattgctctgctccctaccgactatgccagcgttaaggtcatctacaacaagttcgtcaacgctcagagctacgagcccgatactgtcgaggcttactctgaggaggccatcactcagtcccgttagttccggtttccattccagaagctcttcagtactgattgttgtagccaacttctctgcgtacgaggctgatgaggaaacactctccaacctccgcgagtacgctcttgctaacagcctgttctgggctatggctgaaggccacgcctgtgaaatctcggtaagtttgtgtttacgatacgtttagccaataatactaattcaataacaggctcgtcgcaatgctatggaggcaagtattctcgaagaacgtgtggtggagatataattaaactaacccttttccagaacgcc

SEQ ID NO: 18198 - DNA, 905 bp, Emericella nidulans
gattcagccaattgagggactggatttgggccacttcctcggtgcgctggggatgacggctgtcactgcatactatgggatcaaggaggtggctggcacgaccaaggatgatacagttgttgtctcaggggccgcgggtgccactggaagcatggttgtccagatcgcgaagaagatcattggctgcaagcgggtgagtctcttaacccggataacacgtatacgccgaacggaagctgattgatgcacgagtaggtcatcggtattgccggtacagacgacaagtgccgctgggttgagacgctgggtgcggacgtctgcatcaactacaagaaggactcgtttgagcaggatctcatcaaggagaccgagggcttcgtcgaggtttacttcggtgtgtaccctgctgaactgactgtgtttgaacgttgctgatagcgaatagacaatgttggtggcaacatcctagatctgatgctgacccgtatgaagcgccacggccgcattgctgcttggtaggcttcccccccgatatcccggtgttgtgactccactaacaatttcatcagcggcactatctccgactacaaccgccccgaccctataggccttaagaatttctttgtactgttccctaacccaacttcttctggaatgcaagtgctgacgacaagcaggaagtgatctcaatgcgcctgcatatccgcggcttcatcgtgctcgactactatcacaaattctctgacgttattgctgagctgacccaggcctggaaagaaggcaagatcgtggttgacgagtcgatgcagacggttgtcgaggccaagtttgaggacatcccgaatgtgtggatgaaactctttgaaggcggtaacacgggcaaactttgcacgaagattgtctcg

SEQ ID NO: 18199 - DNA, 921 bp, Emericella nidulans
ctaacatctactcatcatgggataccagtactatatgtacgatccgtccaagggcgcagcaattcccttcgctgcccttttcggtctcaccacagttgtgcatatgtggcaaacgattcaaaaccggacatggtacatgactccattcattatcggagggatctgtatgttttcccttcaatgggtacagaaatgagggcagccactgatgctttccagtcgaagcgatcggctacctctgcaggttcatcagcgcgacccagacccccaactggactatgtacccttatatcgggcaaagcctgttgatcctcctaggtccagcgctcttcgcagcttccgtctacatgctactcggacgtatcatccgcacgctgaacgccggttcactgtcgcctattagaccgaattggcttacgaagatcttcgtggcgggtgatgtaatttctttctttatgcagagcggcggtacgtctatactcatcacctttagcttgtcgaaataactgcaagggccgagtattgacgagatatcaaggaggcggaatgcaagccagtgccaaaacccaagatcgcgctgaaatgggcgagaatatgatcctgggcggcctcttcgtccagattctcttcttcagcatcttcattgttgtctcgatcattttccaccgccgaatgttgtcgaccccaatgcaccatatgggcatagatgtgccctggaacaaatacctcaagatcttatatctcgtcagcttcctgattttaatcagatccttgtatcgcgttgccgagtacattcaggggaaggaaggggttctgcagagcaaagaggtgtttatatacgtgttagatgcatctctcatgcttgtttgctgtgtaatcctaaacgtttggcacccaagtaatgttgtgtcggggaaacag

SEQ ID NO: 18200 - DNA, 921 bp, Emericella nidulans
ctgccatgttcaaggatcagtctgaggaagagatcaggcgtcttctgcacatggttgtcgttggtggcggcccgaccggtgttgaattcgctggtgagctgcaagacttcttcgagcacgatctgaggaagtgggttcctgagatccaggagaacttccgcgtcacccttgttgaagctctgcccaacgtgcttcctatgttctccaaacagctgattgactacacggaatcgacgttcaaggaggaatccatcacgatccgcaccaagacgatggtcaagaacgtcacagacaagtatatcgaagccgaggtcaccaagcccgacgggaccaaggagctcgagaccattccatacggtctgcttgtttgggctaccggtaacgctatccgtcccatcgttcgcgatcttatgagccagctccccgcccagaagaactcgcgtcgtggtcttgctgtcaacgaataccttgttgtgaacggtactgagaatgtctgggctgtcggagactgtgccatcaccaactacgcccctaccgcccaggttgccagtcaggagggcgctttcctcgcccgccttttcaacaccatggccaagaccgaggccatcgagaaagagttacagagactatctgaagctcaatcagccgccaagagcgaagaagagcgcaacaagatcttcgacgaaatccgtgatcaccagcgccaactgcggcgaaccaagcaaatcggcccgttccaatactcccaccagggaagcctggcctacattggaaaggagcgtgcggttgcagatatcagctggctgagcggcaacatcgcaagtggtggaactatgacctatctcttctggcgtagtgcttatcttagcatgtgcttcagcagtaagtatccagtttgcttcagttggtctcgatcccatt

SEQ ID NO: 18201 - DNA, 931 bp, Emericella nidulans
attcgcaacctgtacctcgtccgactaccccgttaccagcttccccagccgcagaaatcccaagcaatggtgcgaaaggacgatatgtacgcttgctactccggctgtccgcgggctgcttaaacaattgaatgtgaacatcgaggatgtgaagggaacaggcaaggacgggcgagtgctcaaggaggatatccaccggtttgtcgcgatgcgggacgcaccgagcgcaactccatcactgtcacaggacgccgacacagcggttaacctgacacacatccaaacccagatgttcaagacaatgacacggtcacttacgattccgcatttcgggtacgccgacgagctcaatatcaacaacatcacagccctgcggaagaaaattgccaatgacaaaagcgatccgaggaagatcacattcctctcatttgtagtcaaagcggtgtcccttgctctaaacgactaccccattctcaacgcaaagctcgacaccagcaatgctgacaagccgcaactcatcatgcgcccaagacacaatattgggattgcaatggatacaccgcagggcctgatagtccccaacattaaggatgtcggcagtcgttccatcctagatgttgcccaagagatctcgcgtcttagcgcgctcgggaaggaaggcaaactcacccctgccgacctcagcggcggtacgatcacggtctcgaatattggaaacattggaggcacctacgttagtccagtgcttgtccccaacgagctggccattcttggaatcgggagggcaagaacgattcctgtttttgatgatgctgggcaggtaacaaaaggcgaggttgtgaactttagttggagtgcagatcatcgagttgtggacggtgcaacaatggcaaggatggcgagcaaggtcaaggagcttattgagtcgccg

SEQ ID NO: 18202 - DNA, 938 bp, Emericella nidulans
aaaacaacgtccaagaccgtctcgctcatccacgctgctgctcgcaacaaggcccagatcatcgtcttccccgagacgttcattcccgcatttcctatctggagcgccctgcgtccacccacagataatcacgagctcttccaacggatggtggctgaatcagtcttcgctgacggcaacgaaatcgccgccatccgtaccgcagccagagaaaccaacacgatcgtcagtattggcatttccgaaaaatctcgcttcagcactgcgactctgtacaactccaatctgttgatagataccaacggggctgtcctcaaccatcaccggaaactgatgccgaccttcttcgagaaactcacctgggcggccggcgatgggcacggtctgcgcgtctcaaagacggcgcacgggaacatcggcaacctgatctgcggcgagaatacgaatcccctcgcgcgatatacgctcatggcgcaggcagagcagatccatatctcgacgtggcctgcgatctggccgacgagagccccgactgattcagggggtgccaactacgacaacgtcgcggcaaatcgtacgcgcgccgctgcgcactgcttcgaggcgaaatgtttcggcgtactctgtgcggggtttctggctcccgacaccgatagcgccgcagtcaagatgatcgctgagggcgcaagtgcgcctcaggccgtaaagcatgtgttgcagaattcgtcgcggggagcgtcgatgttccttgatcccacgggagcggtgcatccggcgtttgtcttttcggaagacggaaagaaagaaaagagagagtttcttcaagacgaggaggggattatctatgcggactttgagctggataggtgtgtcgaagggaagcagtatcatgatgttgtgggtgggtaccagcggttggatgtcttccagctgcaggt

SEQ ID NO: 18203 - DNA, 941 bp, Emericella nidulans
gagtacctagtttctaaaaatacccacggcaccgggtgctctcttgcatctgccatagcggcgaatctggcgcttgggaaagacttgaagagagccgtgcgtaatggtgtccgtttcgttgaagcgggaatcaagactagttatgacatcgggaaaggaagtgggcctattaaccattttcactccgtgtacagcttgcccttcgcgccgtatgcttccccgctcgctaatctgagttgcttgcatgtccgctaacttgtccacagagggcggttcctagagtacgttctagatcggcccgacgtacaatcggtttggaagcgattcacagagcatgaattcgtcttaggtctgggcagcggtacacttcccgttgaacgttttaaggaatacctagttcaggactacttgtacctcgtatgcgtcacttgttaacgttactgttccactcatcgtttacgatctaacctatctaccaggtccaattcgctcgaagcaacgcacttgcgtcctataaggcaaaggacatggagtcaatagctgcggtaagttatcaagacgtcagtcctctgcttcgccaactctaagaacctggtttatatagtctgccaaaattgttctccacatccaacaagaaaccgcgctacatatcgattactgcgcgtcttttgggctatccaaagaagagatggagaaggttccagagacgacaggtagatgatccttcctaagatctccctacaataaactctcaattactaactgctccattatcagcttgcacggcgtacagcagatacattctcgacgtaggccaatcggaagactggcttgcactacaggtcgccctagctccttgtctgattggatatggggcaattgcacagaggctccacgcggaagaaaagacccttcgagagggcaaccgatattggaagtgg

SEQ ID NO: 18204 - DNA, 943 bp, Emericella nidulans
accaaagcaagcgagcagcactcccactccaccgtcaacggtcatatccacgatggcatccatctcccccaaagaagcccgttcagtggtgataaccatcgacgacgatgccaccccactcggcgaaacggacctcgcaatccgcgagctccacggccgtggcaaaagaaggcgtcgccctcggcgccggcctcgccgcaatcctgctccagattgcccaccccctggtcggccaaggcgtggcggaccacagcaccttcgcctcccgcacaatcagccggacgcaatatacgcagatgtacatcttcacgatgatatttgggagcgacgaagagaaagccgcgatgaagaagtgggtcgatgaggcgcattctcgcgttaagggagaagttgcgagtggacaacgaaagagtgaggcgtacgatgcgatgaatcccgagttacagttgtgggttgcagcgacgatctacgcgagtatggtggggatgtacgagaaggtctatggagagctgccgccgctgaaggcggagcttgtgtatcaagcatttgcatgcatggggacctcactgcaggttccaagggagatgtggccggctgaccgaagggcgttcaagacctactgggaggatgttgtgaccaaccagttggaggtcacggcggatgcgcgcggcgtactgaatgagctcttccatccaaagggactgccgctgtggcgaagccatttgcttggatgctgctgccaattgtccggccggtgacgattgagcagttgccgccgaatgtgcgcgaggggttcgggctcaagtctacaaggaggacgagggcggttacggcgctttttatgagtacagttgcagtaacctatcccgtgacgcccagttttatcaggcactggcagaagagttattccttaaggttgctgaagaagagaatgaggaagcgg

SEQ ID NO: 18205 - DNA, 945 bp, Emericella nidulans
cttggcgattgcttacggtgttagtgatgagtataggttcgacctcacaaactcaaggcgcagtaattgatggatactaatgtgatgcaagttttgtcttccatcccacctgtgagctctttgagcggcggagcgcgtatgtccttttctgtctctatttctgattcaccgtggcaggagcgatgcgcaagctaacactaggtcgacagaaaactggtgacaacaattgtctcaaccttcacagcacactacatctatctatggggtaactacttccctgatacgccgttgcagccgccgcacctgccgtcgttcgacgggcgggcagttgtatatccgacgatcagaaatctgagagattatatgagttggaggcaggttgattgtaagctcgccatttgggtttggattgctgcctgatattgactggtggtctttttttgcgtttttgcctaggccatatcaataatctgtacaacacgacgttctggatgatggttttaaaaggcgggatgagcaatactgatgctgagaatgagctaaaggttagttgcagtattcttctgcttcgtgtttcggggatcggatgggcagggaggtgacgatactgacggttgaagggaacactctcctcggacaagaatgagatcctgttcaagaggttcgggatcaactataacaatgaggaggagatatacaaaaaagggagtgtggtatatcggcaggtatgtcatgtccaatctggaccctcggtggagtctgctttgctgagtctaaatagtatcaacttgaggagaggaagccgctgaaggctccagaggaagaaggccctactgtacaagaaagcatctcgaagagtcaacaggagaagctccgtaaactacggcgcaaggcgcaggtcatcgttgagcatgtggatatcatcaaggatgaattctgggagcg

SEQ ID NO: 18206 - DNA, 949 bp, Emericella nidulans
tcctaattcaggatgacgagattgtattgtttgttgaaagcgacttcggatatagtcccgttgttcgcatgaagcaacccgcgacaggtgttcggaggaaagttttgaagcaatttgcacctcctcctgacgacacgccggagctgcaaaatgcgcgccctgtcgtcaagatgttttatctgggtactatggatgcgagccataaagttgatcgtgtagtcaaggctcgacgaggtatgttgtaactcttcctttcacattagccatgaggttctcactgctatttaggcctgggtctcgcggagtcagattttggcgttaaggttggacagatgcatgtccaggagacgcaccctggtctttcaaatgcctaccgcaagctggggaaggtaattcaagccgtgggagactatcatgcggttcaggcaactgcagaggcaactactcttggggatccccttagttaccactcatcggacgccttcattgtcaaggaaacacttaccaaccgtcatattctgcttcgggaactgctacaagctcagcaagctactcgcagcaaacgcgctgcggcggaccggctgaaagtcagttcatctgttcgccccgaaaaggtagacgaggccatcagtgcacttgatgaagcacagagtcaagaggactatttgaccaaaaagacgcaacgagtaacatcaaaccttctgaatgaaaagcgccgctggtttgaacgaacctccaacgatgtgtggctggccctgcgtgaatatacgctgcgccagattgaggctgaacggaggactctcgcaaccctggagagcgtaaggccggatatccgttcaattgacgcctccgggggcctcagccgtctcggtcgtgaaagccacccaactgggcggcgtccaaatttggcttcaagccaaggccccaagggcgatgcttggagcggtat

SEQ ID NO: 18207 - DNA, 951 bp, Emericella nidulans
cccgtattccgagtatccctcttacaactcaacgacggcgacatcgggaactgctgggaacactgattggctaggtcgattcgatcctcgaggtcaacagcaatcccaacaaccatcctcggctcctccgccgcccagcagccgtccacctacaactctggcctcacaacccccatactcaccttttgcctctggtcaaatctcgtctagtcagctatcaaatctcaatgctccgtcccctgtgccaacaccgcctccggtgccggcttctcagcggcagccataccctgcttctgtttacgcgccatcaccagcgccacatccccaggctacgagcgcgggatcacgtgatgtgtcttctcagggatccatgtacaggtctggcattaactccccaacattgcggagtaatcatgtcacatacccatcgcgttcggggctctcctcgacatcatcgtatggttcggcaacacagacagtgccgacttctggacatatgccaggcacgcctcaacaacattcaagtgggcctccggcatatcagcacatgcaacccctggtcgcacatcagcctcagcctcatcgaccgcacatgggcctagccggagcacactacggtcgcagcacgccgccgccgcaatcacaagcgtccagaatgccgcctctagcgggtcccggatcccaacagataggtcgttcctacacccctccggtaatgctgcagccgaactcgtcaggtgggatggcctatgcaccaagtgggcctgtgggttcccaccctcttggagcacggccggcgggacctggctctctgagtgaatcgatgtctgggccgcatggaggctcggctcataatcgggtttacagtcaaggatcgaatccgtttcccggaccgttaccgtctcagcattccagtcggtgacatggaaatctataccgccatatgttggg

SEQ ID NO: 18208 - DNA, 952 bp, Emericella nidulans
cgttctcacgacagacaagcgcctctggtacctcaggaggttacctgcataatgtgctcctgtctttccaagctcgcaaccccggcagcgagattgtcactcagcggggtcggaacgcggatgttgtggactacaccttgatgtcccctgaaggtgaaccgatactgaaagcagcccgttactacggcttcagaaatattcagaatttagtccgaaaactcaagcccgcgcgggtatcccgcctgccgggggccaaggtagcgaccggacaaacggccggaggtcgacggcaaccaatatcacgaaacggagcctctgccgggtcgagcatggactatgcttatgtagaggtcatggcatgccctggtggctgtaccaatggaggaggtcagatacgcattggtgatgcgagggaattcaacgcgcagcacgatgcttcagtgacgtccgaaacctcaaagcccttaccacatgagcagcgctcctggcttgctcgcgtcgatgaggcttactactcagctgattcagatatggatgacgcggtagaggatgtacgaacagtttcagtcacagataacgaagatagagtccacaagaccctgcagcactggtctgctatcacggatattccacttgaaaagctggcctatacgacgtaccgcgaggtggagagcgatgtcggcaagccaagtgcaccgaatgatacctcgcgggttgtggagttggcagggaaaattggtggtggttggtaggtcggagtcgaatggtcatcacgctttacgatcgatatataccctttgtactacgtttcgcattggtatactgcatgggatggtttgcataagcatagatttagagcgataccaaaatattcttgggtcttgcttttatctcgtgatcctacagtattgatgtaaagtgattccaaaatagagttgaggctacagggctg

SEQ ID NO: 18209 - DNA, 959 bp, Emericella nidulans
ttcacccctgacttggctactcccatctctcagttcaaggaggctgtcaaggccaacggctggcccgaggagctcaaggtcggtttgattggctcttgcaccaactcttcttacgaggacatgtctcgtgctgcttccatcgcccaggatgctctcgaccacggtctgaaggccaagtctatcttcactgttactcctggttccgagcagattcgcgctaccattgagcgtgacggtcagctcaagacccttgaggagttcggtggtgtcatcctggccaacgcctgcggtccttgcattggacagtgggaccgcaaggatgtcaagaagggtactcccaactccattgtctcttcttacaaccgtaacttcactggtcgtaacgatgccaaccctgctactcacgctttcgtcacttcccccgaccttgtcgttgctctgagcattgctggtactctcaacttcaaccccctcaccgacactctcaaggacaaggatggcaaggagttcaatgttgaggcctctactggtgacggtctccccagccgtggctacgaccccggccgcgacacctaccaggctcctcccaccgaccgcagcagtgtcgatgttgctgtttccccctccagtgaccgtcttcagctcctcgctggattccagccttgggacggcaaggatgccactggcattcctatcctgatcaagtgccagggcaagactactactgatcacatctccatggctggcccatggctcaagtaccgtggtcaccttgacaacatctctaacaacatgctgatcggtgccgtcaacgctgagaacggcgaggccaacaagatcaagaacgttttcactggcgagtatggtgctgtccccgccacggctcgtgactacaaggctcgtggtgttaagtgggttgttatcggtgactggaactacggtgagggtagctctcgtga

SEQ ID NO: 18210 - DNA, 960 bp, Emericella nidulans
tggaagtgaagaccacgtctccagattacaaggggcaggaccccgaagttgcagcgctagacttccggaaccggattcgaaactatgagaaagtttatgaggggattggcgacgacgagaatcattacacctacgtaaagctgattaacgtcggctctaccgtgatcataaaccagatcaaagattacctatcaagtcggttggtctattatatccaaaatcttcatataaagccacgatccatatggctttctcgtgtacgttctctggttcgcatccggattcacactaatctaactgctttagcacggagaatcggaatataatctgactgggaagattggtggagattccagcatctctgagcggggggaagcttatgctcgagctctgcctggcctactgaagaaatcaggtgtgccacctaatacgaagattgttatttggacgtcgaccctcaagcgcacaatccaaacagctcgccaccttgccgccgaaacgggctatgagaagctagaatggaaggccctcgatgagcttgactcgggtgtttgcgatggtctcacatatgaggagattgcagagaaataccctgaggactttgcggcccgagatgaggacaaatataactaccgttatcgcggaggcgagtcttaccgagacgtcgtgattcgccttgagccgatcatcatggagctggaacggagtgagaatgtcattatcgtcacacatcaagcagtcttgcgctgcatctactcatactttctcaacgtcgcccaggagcaaagcccatggatggaggtgcccttacacactctgatcaagctcacgcctcgcgcatacggaactgaagaacagcgtttcaaggccgacattcccgctgtatccacgtggcgggctaaaggaacatctgcaaagcaccaagactttcccactgagatgaaggcgtaagagcctgtt

SEQ ID NO: 18211 - DNA, 960 bp, Emericella nidulans
gaagcggctaaaaatcatggattattcgcttcttgtgggtatacatgatctggaaaaaggaaacgaggaaaaactgcgtgataagactcttcaggttttccaacctggagccgatcgcgaagaggatatccaccctaatatgctgatgcgcactccatccaagctagagaacgaacgcaaggcgcgcgagcttcgaatgctaatccagaaggagcgtcccgtgccgctcgacaaggcgactgcaaagatgccagacgagatcctcgacgagcgcaaatttcatgttttttactccgacgatggtggatttcgggccacgcgtgaaaacggccagcctggtcaagagatttactatcttgggattattgattgtttgacacatgtgcgtttatcatgcgagatccatgaatatatcagctaaccatgcgtgtagtacggcaccgtcaaaaggatagagcatttcgttaaaggcctaacgcatgatcggacacaaatctcgcccattcccccggaaggctacggtgatcgcttcgtcaactttattagaagaataacgatgtccaaggaagaagcagaacgtacccgggatcaagaagtgccagaaaagcataacagtcaaccaatatcgtcaacggagaataacacatcagatcatatctcgcaaggccccacatccggccaccaaccagcagtcgctgctctcgggccaagtacattgcctattgttgacgaagctggcgaggctagcagtgttggtggacacagtcaatgtagtccgcagtctctatcgcttcaccaaaaccaagttctaccatcaccgccgaatcgtcttaacccggggccgtcagaaaagcgaaacggcacccttcaaaatggacaaaatccctcaatttcagtctgatgaacaggatttccgtttgtctcctgcgcatactctaccctcctgctctcatttttggc

SEQ ID NO: 18212 - DNA, 980 bp, Emericella nidulans
gcaaaaagctgaccttgaaagtacaatcgcataatcaatatcatgtcggccgaacagaatcacggacttgagaaggacgtcggtggccctgctgcccctgcggctgccgcccctaacgcgccggctgctgcgcccggcgctcctcctgctggtatgtctgctgaggagcaccgatcgcgctttggctacggtcctctgtcgcatgtcaacaccaaggaggcgatcctcccatgcccttcggtggtgagttccagcctggtctgtacaagtcggtcgaggcgcgcaagtttgccaaccctgctccccttggcctgagcgtttcgccctcaccactttcgtgctgagctgtatcaacatgggtgcgcgtgacatcacccaccctaacattgtcattgctctggcttcggttacggtggtctggttcagttgcttgctggcatgtggtaagtgctgccattgcggtctctgttagtctcgcgggttcagccaggaagctaatcatgagcagggaaatggccgttggaaacacttttggtgccactgctctgtcctcttatggtggtttctggattgcgttcgccattgtccttactcccggtggtttcaacattcagaccgcgctcacggctgaaaatggtgatgaggccatgttctacaactcgttcggtttgttcctcatggtgagtgtttcatcaatacgatcatgaccgttcggcgctgacaatgtccccagggctggttcatcttcaccaccatcatgcttttctgcaccctgaggtctaccgtcgccttcttcttgctgttcttgttcctcgacctcgcgttcctgcttctcggtgtcggttacatccagcgtgatgatgctggccagcccaaccctcctgtcatcaaggccggtggtttctttggtctgctggctgcctttgctgcttggtacaacgcccttgccggtattgccgacagcagcaacagcttcttca

SEQ ID NO: 18213 - DNA, 983 bp, Emericella nidulans
  unsure (1)..(983): unsure at all n locations
tctacctaggtcggctgttcattagccttaaagacaagactgctgcagaaatggcaggtcctgttcgccaaggaattgacatcccttctctagaaaggtatatcaataacaatgtcccgcatatatcaacacctatagnaaaaccaccgaaacgcgccaacactctcttcttccagtttacgctcacaattaaacgagatagttcggtttcggccagtccaatccgacctacctcctgacccctcagagcgaagtccgtcgctacgtcctccgcaagaaaccccccgggcagctcctctccaagacagcacatcaggtcgagcgcgagtaccgcattctccatgcgctgagggatacaaatgtcccgattcccagggtatacgtcttatgcgaagacgagagtgttattgggaccgcattctacatcatggaattcctggatggccgggtttttacggacccgttgatgccgggggtttctgcccgtgagagaggcgcgatgtatgtcctttcctatacgtttcatatgctcgcatgcaaaaaaaaaaaaaaggagaggagaaaccaaaaaagttgatgtggaatgctaatgaaagatgcaggtggcgctccgcaatcaccacgctcatgaatctacataccctctcttacagcgcccttggcctggagaacctgggcaagaactcgggcttctaccggcggcaagtcagaacatttacttcgttgagcagacaccaagctacgacgacagacgtcgagaccggcgtccccatcggccctctctcccacctagaagagatggcctccttttttgcagaaccagcaaaccagccaaaggacaggacgaccatcgtccatggcgactacaagattgacaaccttatcttccacaagacggaaccccgcgttatcggtgtcttagactgggagatggcgacgctaggccatcccctttcggatgttgtcagtctcgtcgcaccttt

SEQ ID NO: 18214 - DNA, 989 bp, Emericella nidulans
cgcccacaaattagacgacaagaattccgccgcggcgcaacaaggctttcagggcctggaaatcgtttacgccgatctcaacggctacagtagagcccacagcctccccattctcactggcgcgaagcaaattcgccagttagccgatgatctaggcgtggttctcatttcgctcgccccgttagagaacttcgaaggcgcaaagactccgctgaaggagcgcctccgtgtcgccgcgcactggcttgatcttgcccgcgttcttggcgcatcgtacctccagatcccgtcgcagtatgacgctgacagtatcggcgacgaagctgtgattgtctcggagatgcagcagcttgcggacctagctagctcctcgtcgcctgttgtcagcattgcctatgagccgctgtcatggggtgtctggtactcgacatgggatgacgcgctgaggctcacgcagctggtggacagggacaatttcggattatgtctggatacattccatgagattacaaagttctgggcgaatccgttcttggaaacaggtgtttgtccggacggtgctgaggaattggctgcctcgctgcgtcgcttcgtagagcaggctcctatcagcaagatcttctacgtgcaattgtccgatgcagagcggttcaatccacctttctcgaagagtcacccttggtatattgagggcgagccggcggaattcacatggtcgaagcatgcacggcctttcccgttggaaagggagttcggaggctatacgcctgtaacggatgtcgtaagggcctggattgttgacagcggttttaagggatgggtgtcgatggaaatcttcgatcgacggatgcgagatgaggcgtatgcgattgatactgcggcgaggagggcctggaagtcatgggagaaggtccaggctgagtttaaaaggcagaaggcatgaagttggttgggatatatatattttggctccatagactgttgatatc

SEQ ID NO: 18215 - DNA, 990 bp, Emericella nidulans
gacccgtttttagctataatccaatataactaatcgtcgatagtcttcattaacggttcgtgtgaactacgaaaagctggacgttgcgcttcgaaaccggcgttttctcgaactcgccgaacgcggcgcacccccagaatcagctcaaatatacgactacctcctccggcgaattgaatatcaaaccagcaagtgccgggacgcctccgagatcccccgcgaaggtgaagaaggcgaacagtactcggttcctattcccctcagtgctcttgctcgagacatcgatccttatctcgacctcgcaggttcccttgggccaacaaacacccccgccaataaccgactgggcaaacgcacatttgacgacacagttgatgacaacgacgatgaccacggagctactggcaaccgcacctatgaaatagaccaacacctctcactcctcgcccaacccccactcaatcttacttccaaacgtcttaatggtggcataataaattggaccgtcgaattccgacatttagcccgtaaacttcgccaccttgaactcgaacgcatcgtcgaggcccggtacggcgacgttgccctccgggtgctccgcgtcctgcaggcgaaagggaaactagacgaaaagcgcctacaggaaatcagcctccttcccttcaaagacctgcgtcaggtcctcgcatccatgcagacaggcggcttcgtcgacctccaagaagttccgcgtgacgcgcagcgtcaaccttcgcgcacgatttacctctggtattacgaccccgaccgtgcccgggacagcatgctacaggatacatacaaagctatgtcgcggtgtctgcagcggttaaaattcgagcgcggccggttaaaggactttctcgagaaaacagagcgcagtgatgtcaaggggaacgaggagctctatctttcggaaggagagcttgatagactgcgggaatggagagccaaggaagcgttgttgattgg

SEQ ID NO: 18216 - DNA, 993 bp, Emericella nidulans
agtgagcttgttagcctatcctgaccaatacaaatgacgctgaactgacatattagggcggtgatgaccgatgttattctcggtgtaccgcaaatcctctcccccttcctcatgatcatccctggtaaatttgctgcttgaatatggcaatcccagtccactgccggaaacaattgtttaactgactgcgccggagcgaccgctctctcctttgagaagccggaatcagaccttcttcttcgtccaccaagaaacccgaagaaggaccacctcgtcgacaccaagctcctcggccatgcatatctcttcatcggtctgtacgagtgttctctttcatacgttgtagcatttggcatatggaggtcagtttcctgttaccacttctaactacaataaatcagctggaaactaatagcaactacgattggccattatagagaaggggtgtccccttcagcgcgatgggcccttaaagacggtgcttggcccaggcatacgatcctgactttgtcgtgcaagttgcaaatgaagcttcatcgatctactttattaacctggtttttttgcaattcttcaacctcctggctgtgagaactcatcggttgagatcttccgacagccgccaatcttcaataatgaggcgcaaaatctgtttcttttcctcccggctatgatatttgcgttgggggtcgcttttatatgtaagttcttttgtttttactggtgcttttcgctggagaatcccctatagtaaaccagctcaatgacaccttgaagccaatggtgtactgaagctatgctgatggacatgaactaatgttacccacagtctgttatatccccgagatacaccgttcaatcggcacgacaacagtgccagtcgaacacttcttccttcctattgccttcggtctcggccctcttttccttgatgaggccaaaaagtactctgttcgccggtggccgcatggaattgctgtaaagattgctgaa

SEQ ID NO: 18217 - DNA, 1000 bp, Emericella nidulans
gctcattgaaatgggctttgatagagagcgcgctgaactagcagtgaagaaaagtagcggacgtgcgtttcctcttgaccctcgtcccaaagctacatactaattttcattctccataaatgcagtgcaaggagccctcgaatggctcgaagaaaaccaagacaagtcactcgaggagattaagtcggcaaacgcgggagctgatgaggaagatgaagaaggggcgcctgcactcaaacccggggaggaagcacggagcttgacctgcaatgaatgtgggaggaagttccgaagccatgcacaagccgtgttccatgcttccaaaacccagcatgttgatttctccgagtcaacggaagagattgccccgctgacggaggaggaaaagaaagtcaggctacaggaactcagggagaagctggcagctaagcgcgccgtacaatcagagcaagacaaaattgacaagaagcgaaatgaggtacgcggaggctacggttgtgattatcgacctttgctaatagttgtcattgctccaggaaatccggagaaaggccactaaagagtctcaggatgctaaagaggaactcgagagaaagcagagattaaaggaagcggcaaggaagaagcaggagaaattagatgacattgaagccaaacgccaggtcaaggccagaatcgaagcggataaggcggagcgtcgactgagagctgaacgtgaaaaggctgaacgtgctgggcttgcaccccctgttcaaccggccgctacgcctgcagctacgacatccggacctgtcgcttctaaaccagcttctgcttacacagaaacccgcctccggttccagacaccgaaggggaatgttatgaaaacattgccagtagagacaacactccttgaagtggtatcggctctcaagacagaggacggaattgacgtcaacagctttcgccagaactttccaaggaaggtgttcaattctgagttctttggcgagtcactcaa

SEQ ID NO: 18218 - DNA, 1007 bp, Emericella nidulans
ccagttctggaagaagaatgcctctttttaaataagtatatgattgttctggtatatattgataatattattattatcaacctaacaataccagcagccagagaggcagctaagtgcttcaaagatgaactggcaaagcaatacaagcttcagtatataggaaaagtaggatggttcttaggggtaagagtgctcagagataggcccaacaagaagctctggctctgccaggacttctatattaagtatcttgcagcatattttcacctaaacagccttataaaatggccagaaacactattggcaagcttatataacctctctctaaacaaacaccaagcaacagaagctcagatcaaagaatattaaacaaaaattggctctatatagtaccctgcagttctaatataagcagatattatatatactgttagctgattatctgaagccttaacaaatcttttactagactatattcaggctgcaaacagggttattatatacctatatacaacatattttctggcaattaaatactcaggcaataatactggcaaggaagtgtcatgttagcctctgatatagtatttgctgactgacctgaccagcaaagctctgcaggatacctttgtaagctatataatagcctgattaaatagaaatctagaaaacaacacacagttacaacttcaacaactaaagctgaatatctagctttatctaatgcagcaaaggcaatacactggtagaaaagggtattcagaaccatgggttttgatctgcaacatcagatagcagtatactgtaacaaccaacagaccattaacttgcttacctccaaaaatatcaagcaacaatctaagctctgttatgtcaatatatatagatcctggctttgtcatgaggttctggaagtccaactccatattaaatagttacctaccaacctgatgattgctgatggccttactaagagccttataatccaaaaacaccaagaatttgtt

SEQ ID NO: 18219 - DNA, 1019 bp, Emericella nidulans
  unsure (1)..(1019): unsure at all n locations
tagaaggcgagggaaggattgccgagcgggtggacctactctggaaactactcctcaactggatggaagaaatcaggagcgctgacttcattctncccgcgtgtcatagtcagggcgttccagtgggaatcatgctggtcgctaagctaatactgttcggctgtatcaatgcgaaccgagtaggagtctgcgcgatggctggtgtaaacctcgggccgttcgctgattacaagtctcggtggattagcggatctgctggggagctgttcgaattcgccttgccttacagcaaggtctctaaagattacgagtctgccttgaggacgtgtatagactttggggtacgaatttcttatatcggaagtatcgacgatcaactcgtctctctggaggtaaaagtcctgaatgcattccaagaatccaagaactaactcagacagtcatccctgttctccccagtatcccacccatacatctaccgcgcagcctttgttgacggaagagtccatgctccaagtttgtatgtcagaccttaactgtataagccatagcactaacaagttatctccgttagtgtatctcacctagtcggatttgccctcaaactccgcaatctcggcatctcagatcacggcctaattcgagaactaagttctcccttggcgggcagcctctacactggagaaggccactctagactctacgacgaggaggccgtatatcggtatgtaaacaacattatctcatgtagattcatgctaatgatctaacccgtagactcgccatcgagttcgccctcgaaacgtcccctgtctccaatgcacccctccacatcaaacggagctacccgccaccagtaccaaatccttatattctcccgtttgccatgcgtggtctcctggaagaagaatatgtgcggcacgagctatacaatgagaccatggaactcctgaaacagtttgatgagtggaagccgacaagtaaagttcttaaagatgtgaagtttcgtttagaaggca

SEQ ID NO: 18220 - DNA, 1022 bp, Emericella nidulans
acttctgatatatcagtttttaccatatttcctagtctgactcgtgctctccgtcgaatcgttgccttgtaaaaatgcgccttacgtctttgtttccagccttgagtctggcagctgagcttgccagtgctgcctatgtgctgcaggacgactacagccccgatgtgtttttcgacaagtttacattctttacagatgctgatccgacccacggccatgtcgactacgttgatcgaggcacggcgcagagcgcaggcctaatctcctcaggctcttccgtctacatgggcgttgaccacaccaacatcgccagctcgggccgccaaagcgtgcgtctttcaagcacgcagacctaccaccacggcctcttcatcatcgacctttcacacatgctacaggctgcggtacctggccggccttgtaagtccatccgacactaacctatcaaatccatttcaacagaaacaagggcactgatagactacagctggattctcggcccggactggcccaacggcggtgagattgacgttattgaaaacgtcaacgtcgcaacgaacaaccacatgaccttgcacaccagtgatggctgcacaatcgactcttccggtttcacaggaaccctgctcacctcaaactgcttcgtcaatgctcccggccaagccaacaatgccggctgcggcattcaatcccccgacagcaactcctacggcgctgggttcaattccaactccggcggcgtctatgccaccgaatggacgagtgaccatatctcaatttggtttttcccgcgcagttctattccctctgatatcacggctgggaatccagatccgagtacatggggcacacctgcagcacgatttgcagggaactgcgacattgagtcccacttcacagatatgcagattatctttgatatcacgttttgcggggactgggcagggaatgtctgggaaagcagtacttgcgcttcgttgggtagctgcactgattatgtgtcgaacaatccagaggcattt

SEQ ID NO: 18221 - DNA, 1023 bp, Emericella nidulans
aacatgtcgacgaggtcaggtctgtgctttctcgtcggagggcaaattatggcctccgcggacagcttgggtgagattagggtttgaatatggagaataatggttcctccaccgatgaaaagacgatgaggctgagatctcgagcattgcgttctcccctgatgggaaacagctcctagccgctgatgcttataccggcaaaatatttcttcttgatgtatcaacgccagaaaaatagttgaatttgctggtcatgcatcagatactgacagtgttgcctttgcacccgatggtaacagatttgcttctggatctgcagacgagtctgtccggttctgggatatcaaaacacaaagctcaaaggaattgaaggggcatacagacaaggtatcatcggttgcattctcctctaacggcaaataccttgcttctgagatatccaatagtatgattcgaatctgggatggagaaactggacaatacctgcggcagatcacaggacacaccggcgcggttagggcagtggccttcctgcagcacggcaatgacaacattctcgcatctgcatcgaacgataggtcaattaagatgtagggatgctgtgacagcaagccttcatcgaggactcaagcgtcacacaaatacaatagtcggtcatgcgttttctgcagacagcagacaaatcgcttcagcgtcatacgatagaaacgtccaaatctgggcgctcacgagagacatcatcgttcactcagcaaccagcaatgtcaagctgtggcattttcaccaactggactgcattggctgcgggatacgctaatggttcgatcagggtatgggttaaggtctaaagccgagccagaaggctggtctttggcaatgaaaatggttgcagagagtggaacacctgactttggatattcaaccatatcatatctgatttgatactctagaatgatagtttttggatgagacttttctttcccaagacatttggtgtttgaaaatttttaaaccccggcaaca

SEQ ID NO: 18222 - DNA, 1027 bp, Emericella nidulans
acaaacgtccacgtctaccaggtctcgcctgcgttatccgttatcgagaagcatactggtaagcggctgcgtgcgctgtttgggctcaatggaccgcgagccggcggaatctctgtacagggcgggtctgcttcgaatacaacatccattgtcattgcgcgcaacaatctataccccaatacgaagacagacggtaacggtgactacaagtttgtcctcttcactagcgcgcacgggcactatagcattgaaaaagcggctcagatgctagggctgggaagcagcgcggcctggtcagttccaatcgataaggaaggacgcatgattccatctgagctggagaagctggtccagaaggcattgagcgagaatcggactcctttttatgtcaatgcaacagccggaactacggtcttgggatcctttgatcccttcgatgacattgcagcaatctgtaaaaaatacaacctgtggctgcatatcgacggttcctggggcggctcattcgccttctcccggcgtcaaagacacaagcttgccggtgcggagaaggcaaacagtattgccatcaatcctcacaagatgcttggagttccagtgacttgttccttcctactagcctcggacctgcgccagttccaccgcgccaacactcttcctgctggctatcttttccacaacaacgatgatgaagacgcagttccagttgaaaatggcattggaggattctcagaattaaactccgattcccctgaaatctgggacctcgctgatctaaccctccaatgtggccggcgcgccgactctcttaaacttttcctcagctggacatattacggcacagctggctacgagcgccaaatcgataacgcctgcgacactgccgcgtacctcgcaaccataatccaggaccacccggacttcatcctcgtcagccagaaccccactccctgcttgcaggtctgcttttactacgagcctaacgggaagctcttgcaccctcgcggagacagcatcgtctcggatg

SEQ ID NO: 18223 - DNA, 1038 bp, Emericella nidulans
cgtctgttcgtgtacaacctgccgccgaacgcgactgtagaaaacttggtttctttcttcaaccttcaactcaacggtttgaatgttatccaaagcgtggacccatgtatctcagcccagatctccgacgaccactcttttgcactgctggagttcaagtcacccaatgataccacagtggcgcttgctttggatggcataactatgggagagcatgagagtaacggggaaaatggtgcagctaagggattggaagtgcgacgacccaaggactacattgtccccaacctcgctgagcaggatctggaaggagcgtctggcatgaaggatgttccagactcacccaacaagatctgtgtctcaaatattccgcaatacattccagaagagccggtaacaatgctgctgaagtccttcggcgagctcaagtcttttgttctggtgaaagactcttcgacggaggaatctcgggtaagttcttgaagtcttgatgacgtgcatagctaatcgtggcagggaattgctttctgcgagtacgctgatcctaacactactaccatcgccgtccaaggtctcaacggcatggagttgggagaccggcacctcaaggttgtccgggctagtatcggaatgactcaggcagctgggttggacatgggggtcaatgcgatgtcaatgttcgccaaaaccacgtctcaggatctggagagcagccgtgtgttgcagctgttgaacatggtgactccggaggaactcatggacaacgaggattacgagggtaagttccgtctctttctcattgattagtggtgttctgacgagacagaaatctgcgacgatgtacgcgacgagtgttccaagttcggccgtgttcttgaactaaagatcccacgcccgaccggcggcacgagcagtctccaggcgtgggcaagatctttgtcaagtttgaaaccattgaagcgacaacagcggcattgaaatcgctcgcgggcaggaagttttccgaccggacaggcgtcacgacttacttctccgagg

SEQ ID NO: 18224 - DNA, 1041 bp, Emericella nidulans
gcggtcaaaatcagtttcaagacatgcatacattccatccttcttatatgttcaacgcgccggaggttacgaacgaatacaatcttctgggagacttcctcagcaacagtctgttggacgatggcagtatttttcagaacgaagatatgcagagaatgtattcggacccgacgttgataaattccatggccgtactcggaggccccagtacatcactgctccagcaatcacaaactctacaaccacagcagagtcagcaaaatcaaggtgacactgcttcgggcgctacgattggaaatgataaagcaagggaaacgtattatatgacggcggcagaccccgctgggtcagatccaccggaagagcgcatgaacaaactccttaaagcgaaatatgacgccggtcttctgcgacctttcaactacgttaagggttatgcaaggcttagcgcatacatggagaagaatctacaagtatcgtcgcgacaaaagatcgctcgacaactggacaaattccgacccaagttccgagacaggatgcaaaagctgacggatattgaactcatactggtggagatgtggtttgagcgaagtttgatggagtatgaccgtgtctttgccagtatggcgatacctgcttgctgctggaggcggacgggtgaaattttccgcggtaacaaagagatggctgaattaatcggcgttccaatcgagcttctcagagacgtgagttgttgttactaatacccgctcaggatggttctaacgcttgtacgctatagggtaagctggctatccatgagattatcgtggaagaccagctcgtgagctactgggagaaattcggtgccatcgccttcgataacacccagaaagcaatgctcacgagctgtaccttaaagaacccgaatgccacctcgccgacggaagggataccgtgctgcttttcattcactatccgaagagataatcataacatgtaagtgacctataactaccacgatctatgtcagatttttgactcccctgattctagtccgtc

SEQ ID NO: 18225 - DNA, 1042 bp, Emericella nidulans
cattgccatgttcgtctttgaggtcggaagtcttgtttgcgcagtggcccagaatcccaccactttaatcgttggccgagccattgcaggcgtaggaggggctggcgtcgccgtcggagtcttcactatgctcgcattcgcagggccgcctgaaaaacgcccggtgctgctagggtttacgggagccacctatggtatcgccgctgtgatggggccgcttattgggggcgctttcacggacaaagtgacttggcggtggtatttctatatcaacttgcctattggagggctggctgcagcggttgttcttcttttctttaaggctcctgccagtgcggtgcctgcgaaggccacgctgatggagaagatgatacagatggactttgctggcgcaggcctgatgatggcgttgatcatttcgtacattctcgctctacaatatggtggccaaacacattcttggaagagcagcgaggtgattgggctgttggttggcgttgtgctcatctctgtggcttttgtattttgggagaggtaccaacaggaacgcgcaatgatcgttccccgactggtgagtcaaattctagctaggcatatgtgactttgctaatgagagaatgccacagtttctgaagcgatatgtctgggttggctccatctatatgtttttcttcgccggcgcgtactttatcactctctactacctcccgatatacttccagagtgtcttcaactccagcccgattgggtccggtgtccgaatgctcgccctgattattcccctaacaatcgcagccattgtgcaaggaatggcgcttgtcaagattggtattgttccattgttctggatcatcgggggaatactcggcacagttggagccgggctcttctacactatggatgtcgacacctccacgggccagtggatcggtttccagattatcgtcggcttcacagtaggctggacatttcaggtcgctttgtcgaatgggcaagtgcatgcctcaccggaggacatgtcccaggtcactgcgatcatcaa

SEQ ID NO: 18226 - DNA, 1054 bp, Emericella nidulans
ccagttctggaagaagaatgcctctttttaaataagtatatgattgttctggtatatattgataatattattattatcaacctaacaataccagcagccagagaggcagctaagtgcttcaaagatgaactggcaaagcaatacaagcttcagtatataggaaaagtaggatggttcttaggggtaagagtgctcagagataggcccaacaagaagctctggctctgccaggacttctatattaagtatcttgcagcatattttcacctaaacagccttataaaatggccagaaacactattggcaagcttatataacctctctctaaacaaacaccaagcaacagaagctcagatcaaagaatattaaacaaaaattggctctatatagtaccctgcagttctaatataagcagatattatatatactgttagctgattatctgaagccttaacaaatcttttactagactatattcaggctgcaaacagggttattatatacctatatacaacatattttctggcaattaaatactcaggcaataatactggcaaggaagtgtcatgttagcctctgatatagtatttgctgactgacctgaccagcaaagctctgcaggatacctttgtaagctatataatagcctgattaaatagaaatctagaaaacaacacacagttacaacttcaacaactaaagctgaatatctagctttatctaatgcagcaaaggcaatacactggtagaaaagggtattcagaaccatgggttttgatctgcaacatcagatagcagtatactgtaacaaccaacagaccattaacttgcttacctccaaaaatatcaagcaacaatctaagctctgttatgtcaatatatatagatcctggctttgtcatgaggttctggaagtccaactccatattaaatagttacctaccaacctgatgattgctgatggccttactaagagccttataatccaaaaacaccaagaatttgttaggatgctcaacctagtagacgtgaaagacctcatccaatcccaaga

SEQ ID NO: 18227 - DNA, 1055 bp, Emericella nidulans
tgactgactgactgacaaaaggagtaatccttgaatctatggccaaaatgacttctcaagaggttgcttggaccctcgtacgaaccctgatacgacgccacggaataccgcagacaatggtctctgataggggcagtcaatttgttagtagagtatagaagcagatctgccagctgttagggattaaacaattgctatcaactgccttctatccccagacagacagggctacagagcaagcaaatactgtagtagagacatacctttgcttgtatatttgctatgatcagggagattaggacaagctcatccctattgcagaactggctatcaatactcgtacaagctctgctactggggtgtcccctttttacctaacccatggctatgacctctcactatttggccttactgaggacttaccagagcaatctgccgatcagagccccatccagatcagggaaaatattgcttgtatgatcaaagaagccatggactgggccaaagcatctctagcttactcacaacaagaagctgaacaccaggcaaataagaagtgagccccagcacctacctataagccaggtgacaaagtatggctgaacctttggaatattcgtacggaaagacccagcaagaaactagactggaagaatacaaaatatacagttacaaagttgataggcatacatgccctacagttgaatactccaccaggaatacacccagtattttatgttgaccttgtacaactggcagataataacaagctccccttgcaagtccaggatgactcccaacccccacctatcttggtaaataacaaagaagaatattatattgactccgtactagataaacagtggaagaagataggaagaggaggctgttgggaatatctggttaaatagactggatgggctaaacccacatgggaaccagcccatgaacttgaagaaatagaggctgtacaagcctatgaattacaacaggaacaacagaaagaagaccatcccaacctagaacctacagaacaagaaaagagaacaggctcg

SEQ ID NO: 18228 - DNA, 1059 bp, Emericella nidulans
atgggatcctaagctgcaaaaggtggtggtaaatcgagtacctatccgaaccccgggcccaaaccagatcctggtcaaactggcctcggcgtctctctgtcactcagatatcctggccatcaaccagcccaacatggccgagcctttcacgcttggccatgaaggtgccggctacgttgctgagctgggaacgaaatgcactgacaaggggtttcgagaaggggatccagtcggattcctgcatatcaacggctgctgcttcgaatgtgaagggtgcatggtgcacaacaataactgtacacaaggcacccccgtagtctctgggttcgggggcatcagggatttcgggttcttccaagagtacgctgccgttgattggcagaacatcatccaccttccgtaccagctggattcgaagcgcagctctgcgattttctgtgcagggataacaggtatgttggggacagccatgtctgacagatctgttgctgaccggacgccagcctttcatgccgtagacagctgcaacctgacggctggccagtggttcgccgcgatcggggctggaggcctgggccagctcgcagtccaatacgccaacgcgatgggctaccgggtcatcgcgaccgatatcaacgacggggctctcgagacatgcaagagacaaggtgccgatgttatcatcaattctctctctcgaccagactacgccaacgaggtcaagaaactcacccccggcggcgtccacccgacggcggtcttcagcggtgctccagctgcctataggggcgcaccgtctatcgtccggccagggggttgttgatggtgattggaatcagctccagcctgctcgagctgtcgacgtttgacctcgccattggcacctatgttgtcaagtcggagagcacaagcatccctcagcgtatggccaaggctgtggatttcacagccaagcatggcattacacctgagatcaaggtccggtctgggttggaagatgtcgacgagatggtctgtgatatgcaagcgggaaggtctagtaaacggatggcagtcgtt

SEQ ID NO: 18229 - DNA, 1063 bp, Emericella nidulans
ctacagccatttccgctttacaagacatattcaagaacctgagtgcagaagatataaaaccaacttttcacccccgaatagaaactcagctgcccgtggacgatgccgatgacgcggatgctgaagagttcgaagagctatgtctcgggtgcccgcattatcaaagaaacgtcaaactccagtgtttcgaatgcaagaagtggtacacttgtcgattttgccatgacgaggttgaagaccataatcttaatcgccccaaaacagagaacatgctatgtatgctatgcggccatgcccagccagccgcccaatactgtaagtggtgcggcggactagcagcgcaatattattgtgtcgagtgcaaactctgggacaatgatgctagtaaaagcatatatcattgcaacgactgtggcatttgccgtatcggcaagggtataggtaaagacttttttcattgcaaggtaagtaatagcccaaatgaggtaattcaatggatctatatcttaactatttccagacttgcagtgtctgtctccctatatcaatcgaaacaacacataagtgtatcgagcgttcgactcagtgcgattgtccaatatgcggggattatatgttcacttcaccagagacagttgtgttcatgcggtgcggtcacagcattcaccagcggtgtctttctgaatattccaaatcatcttaccgctgtccaatatgtagcaagaccataacaaatatggaggctacattccgaaatttggatagggccattcaaagccaaccgatgccagctgacttcaaagatatcaaagctattataacctgcaatgactgtggcactaaatcgattgtcaaatatcactggctgggcctaagatgtgatatgtaagtgtaatccaagtttcgaccagaaaagctgctgatagccagcttaggtgtgaatcatacaataccactcagcttagtgtccttcaagggaatcctccaggttcttcagagcacgaccttgaacatgaaagttctccaatttccagattaaggtcgtcttcccacggtatggatg

SEQ ID NO: 18230 - DNA, 1066 bp, Emericella nidulans
gatcctcctccttgatggtggcctggggacaacactcgagtcttaccctttcaatatcaccttcacctccgagacccctctctggtcgtcgcacctcctgatctcctccccatccaccctccaatccgcccaccgcgccttctacgacgctggagcagacatcctgctgacagcaacctaccagtccagcattgaaggtttcgcaaggacagacgcaagccacacgattaatgatgcgggagactacatgcgatctgccattccgctcgtccgaggcgccattccctcctctgcgaggcaacgtccacagcagtgtcgcgttgcgctgtcattaggcccctatggtgcaacgatgtccccagttgcggcggagtacacgggggcttatccgcctgagatggatggggaggatgcgttgagacaatggcatgcgggacggctgaatgtgtttgttgacgatcgtgaatcgtgggaccaggtcgactttgtcgcatttgaaacactcatcagggcggacgaggtttgtgctgtacgtggagcgatgaaggacgtttgcgtaggacctgaaatacacagaaggcgaaaaccctggtggatatgtggtgtctttcccgcggaggaagtggacagaacccaggttagacagtgggtggatgcggcggttggacagcgcccggggctgccgcgaccatggggcattgggctgaactgtacgcggattgaaaacgtcgcaaaaattgttgcgatcatgcgcgacgagttgcattgcttgctgagcaggggcaaggaagatggcttcgtggatgagtgggacgcagcgtcgggtaaaccatggctggtgttgtatccggatggcacgaagggcgagaagtacgaccctgtcaccaagacatgggtggcgcgggaaacggttgtgcgatgcccgtgggatgagagcctttgggatgtggtacaagggcagtcagaaggggactgggagggcatcattgtcggagggtgctgtcgcgccgggccagctgacattgcggcattgcgtcggagaattgattcatcccttcactgaccg

SEQ ID NO: 18231 - DNA, 1067 bp, Emericella nidulans
gaatcgctattgcgggacggtcctcagcaggggaatgtccaagaagcactccaggagttgcggtatttggtcctatcaacgagagtagaagcggacggtgatggcatggtatgatccctcagcaaatattcagcgtaccttagcctccatttgcctcgttatcaactgaccccttacatccagtcaacgtaccgagtctatttatggctgatcctcctggacattcctccccttcccaccgatcgctatctatccctcattcatcggggtcgttctcctgcgtatacgaaaatccgcaacgataccttccgcactctagccacagatccgcttttcaaacgccgcgtcacggaagccagtctcatccggttgctcaacgcagtcgcatggaagatccacgatgcgaaaaacagaaacaacctcaagactcgttcgtcctctcggaggcgtgaaatggaactcctcatcaacaccccgccgagcatcgctgaagaagagccgtctgcggacgatatgactcccgacagcatgatcagcagcaacagtagcacgtcagcagtcagccctggtatcaccaacgagactgcaatatatgtgcagggcatgaatgtcctctgtgcaccttttctttacgcggcccgtagcgaagttgaggccttcgcactctttcatactttcatcacccgcgagtgccctggctacatccgcggcgctatggatggtgttcatagaggcctcaacctcgtcgaccgatgcctggagattgtcgagcccaaactcgcggcctacctcttctccaaaggactacaagcgaagctatacgcattcccgtccgttctgaccctctgcgcctgtacacctcccttaccggaggtccttcatctttgggactttctgttcgcttacgggccccacctgaacatcctctgcatcgtggcacaactaatcttgatgagggacaccctcctcaaaagccaaaagtacgtagagtctcccgttatgcttttcccccttcacctttggccggccagccaagaagtctcaagaggctcgatttttcagtcgat

SEQ ID NO: 18232 - DNA, 1081 bp, Emericella nidulans
tcttcacataggcaaacccataaagtaccatcagcacttctacagcaatgactttctggctcgattccacgtcatccagaacgacgttctcgatattccttcattcattcaagctctgaaagagaaacggtccgttgcataagcccttcaccttgcttgtaccttgctgacctctgcagctacggcgatttcgtcgtcaccttccggccgcactttcagtcgggaggagagatgggtaagtgggatgatgaactcatcgagttgctgccatcttcagttcgcatttttgcatctgtcgggctggattcaactgggcggacgtcgaggcccttggacgccgagggatctggtacgcgaatggcgccagcgcgtccgatgaagcagtctcagatacaactctctacatgatcctgtcggtctttaggaacttcactcggacgcagctggctgcacgaacagccgaccccgagatttttacggcatctcacaagctcatcgcatcgatctcgcataatccgcgcggacatattctcggcctcgtgggactcggcaatatcagcaagaaggtagcagtgaaagcgcaacctctgggaatgtctgtgcattactacgacgtggtcaccagagccagaacgtcgaacgggctctagatgtcacttaccatgatacgcgggagagcctcctggaggtgtcggactgcgtgtcgctacatataccgttgaatcagtacgcaaagcacctaatcaaccgcgatactctgaagattatgaagcccggtgctagctgatcaataccgctcttggctaggtcgttgacgaagaggctctgattgaggccctcgagactggttcgccatccgctgctggcctcgacgttcactaccatgagccgcaggtctccccgaggctcgcggccatggacgccgtcaccctgatcacccatattgccggaggtgcgttgaacacccgcatcaactttgagctcaattccatggagaacattctcgcgactgtgggagcccagggagagctcattggtcagccgtttaccccagtcaatagtaaacaagtgttagagtatc

SEQ ID NO: 18233 - DNA, 1083 bp, Emericella nidulans
agagctcgggtttcgtgtctcgattctactaggcatgtctcctatcgccaattgctttgccagctcactcgcctacggcgttacgcatatcagacactcgacccttgaatcatggcggtttctcttcatcattggtaagtccagctatcacttgtcactgcttcggagtcataccgtgcaggggactaatccaaacagagggcgctcccactgtgctattcgctatagtcgtcttcttcttcctccccgactcccccggcaccgcgaagttcctctccgaatcagagcaaaccacggccgcggacgcctgcatacggtcgatcgcacagccaaaaacaaactcgacagacaccaggtcttcgccggattgaccgactacaagaactatgtacataccctaatccacttctgctgcaacttctcgtttgcaggcctctcgaacttcctcccaacaatcatccagcacatggggtatacgtccatcaacgcccagggtctctcggcacccccttactttgtctcgttcttgttttgcgtggtagccgcattactttccgacagatatggacggagagggcttgttatagtgttcttttcgacaatcgggatgatcggctacttgatccttgcggcggtccaagatgagaacaaggtctggccacggtacctcggcgtctggctggcaacatgcggcgtctttcctgcactatgcatcaatatcacctggttgctcaacaaccaaggtggcgattcgaagaaaggcgccggcatggctttactggccgtgtttggacagtgttcgagtttcgtcagtagcactgtctttcctgattccgaagggtaagtagccctgccgcggttaattagttatttaatctagctgaccattccacagtccaatctatatccgcggctgtgctatcgggtgcgctttgacgggttgcattgcgctaatggcaggggggctgtatctgaagttgagctatgagaacaagatacgagacaggctttatgggccggttactgacgatgtccgcattgatgtgacagcagagggtgatgcgaatccccgttttcggtatt

SEQ ID NO: 18234 - DNA, 1083 bp, Emericella nidulans
acctgccataacaatgcacattccaaccccaaccctttcccgccctttcggcgttcagctctggccgcacttcagcagggcattcactgcactgtcaggcaaatcccccgctgatttccagctcgtccctggcgagacgccgatgacgacgctgcagggcacgcttctgtctctggcgacttactacgtcgttgtcctgggcggccggcagctcatgaagagtcaggccccgtttaaactacgaatcccgttcatcatccataatttcatcttaaccgtgataagtggtgtgttgttggcacttttcctggagcagattctcccaacgctctcaaatgatggcgttctccatgcaatttgcgatgcgcgcggtgggtggacggacgagttggtgcttctttactacgtacgttttacaccagctaagaaaaccaacgaaattgaaagctggcctatgctaaagagactcgcagctgaactacctgaccaagtatctcgaactggcagatacagtcttcctcgttctgaagaagaaaccactgacattcctgcacacctaccaccacggtgccacagcgctgctatgctacgttgagctcgtcggccgtacttctgtctcatgggttcctatcacgctgaacctgatggttcacgtcgtgatgtactggtactatttccagagcgcgcgcggcatccgcatctggtggaagcggtacatcacgctgctgcaaattgcgcagtttgtcattgatatcggtattgcaccagtctccaactcacagttataccctttgctgattgtggttgacagggtttatctacttcgcctcctatacgtactttgcctcaacgtatttcccctgggtaccgaatgcgggctactgcatgggtgaggagtatgcggctggcttcggcgtgttcattatcagctcttatctgttgctcttcatctcattctatcttacaacgtacagggaaaaggcgccgcggtttttgagtcaggcgagggccctaggcgcaaagaaggggctctgagcgtggccgtccaaatctgtatggaggtagtgagatgcccttttgcac

SEQ ID NO: 18235 - DNA, 1084 bp, Emericella nidulans
acggatctgcagtcaaaagcattttcgtgctttttggtactgatgttggtgcctgagttcatcaacgcaatcagcgctagatttatcatgaatcgtgatctgtggaaggctcgtgaagggcccagcggagcatacggatgggttgctttttgtacagcccaaatcatttctgaaatcccgtacgccattatcagtgcggtcgtcttcttcgtcctgtactatttctccgtgggtcttcctttgggattcgctgcgggatacagcttcctcatgtttttcttgttctttttgttcgcaacgtcctggggccagtggattgccgccttgaggtaagttaccatcatggatcattctcggccattgccacgtcttatgctcgagtccagtggactcgctcgtgtaactccatgctaacttggaaatgcagtgccgactcggtggtggcagcaaccttgatgcccttcttcatcatcatgtgtgagacaatgaacgggatcttgcagcctcataaatacatgcctgcattctgggcatacacgatgtactacgttaccccttttacatattggattggaggtgtcctgacatccgttctccgtggcgtgccagtcatttgtgatgagaacgaattgaccgttttccaaagccctcctaatataacctgcagcgaatatgcgggatcctggctggccgaaaagggtgttggatatctatccaatcccgatggttcaggggagtgcggatactgcgagtatagttatggagatgatgtgagattctttcctttcaggttttgcgatatccagcacgtcgctaatacttatactagtacctctccacaattggccttgattcgtccaagatttggccgtactttggcattttcgtagcgtttgtggtgagcaattacttgatggtatatctgcttgtttacattcggtcggtgatgaagccgtttcggcgacgtacttaacgtccatataccaaggataaataatgctgagataatcatacatcattaaacatttgattaatcaatcagatattgataccatgtatactatcgttttatttgattggtggg

SEQ ID NO: 18236 - DNA, 1108 bp, Emericella nidulans
tgatgggtcatcttctggtacaaagactttcgaagacctgccacagggtgtccgtccaccgaaagagggcgagaaatcgcaaatggaagttgttccactccttcttaattgcatccaagctatctcccacgtgcggatgattgtgcccaaggatttgcaatccaaggattcgcggacggatatgggaaagaaggtagagcaaatcaagaagcgattccctgatggtattgcagtcctcgaccccattgaagacatgggcatcaaggatgacgaattcaaaaagactttgagggtaagtggcgtgttccatggtatgtacagcaggatgctaaatgtaataagaaaattgaagttctcgagtcgcgcttggttacgaaccctttgcacaattcgccgcgcctagaggagctttatgaacaatacgcagagaaattggatttagggaataagatcaaagcgaccaagaagaagatatctgagggcatggcgatccaacagttggacgaactgaaatgccgaaaacgcgtcctccgtcgcttcggtttcatcaatgaggccgaagttgtgcagttgaaggcacgcgtggcgtgtgaaattagcactggggacgagttaatgctcagcgagctcctcttcaacggtttcttcaataaactgactccagaacaagcagcggccgttctgagtgtcttcgtattcgaagaaaagacaaaagaaacaccgccgctgtcaaaagaagagctcgcaaagccgcttaaagagatacaagcacaagcacggattattgctaaagtcgcgcaagagtcgaagctggctgtcagcgaggaagactacgtccaaagtttccattgggaactaatggaggtgatctacgaatgggccaacgggaagtcatttgctgatatttggtaagtctctgtcttaattactccttgataatgaactgggattaacgatctccttccagtggtatgacagatgtctatgaaggcagcttgatccgtgtcttccgtcgcttggaagaatgtctacggcaaatggctcaggcagcgaaggttatgggaagcgaagagcttgaaagcaaatttgagaccgcattgacaaaggt

SEQ ID NO: 18237 - DNA, 1109 bp, Emericella nidulans
tctgtagagtagatataagagatagtcatactaaagctgttcagcctaggaataaaaagtagactactataattattatagtaaatatatctagataggctctactattatatattatcctggctgcagagaactattagtcttagtagtataataatataccaagcaactatcaactcagtattagcaaaaataggtagataaataataaattaggcttggactggcttcaaaattacttcaagatttatacagctctataaatagttagaagatattacctattaattctagatagctatagcagttatactactgcaggatttgataagttctgtatagaaaggataattattctattatatatacctccttatttatcttattatctttaactacttgatataacctgcttcttactattaaagtatttttatagcaactagactgtaagaatagtagaaaataagatcttcttaattaagaagaaagatttcctatatatcttcccctctatttttaaatgctctatatttttatcaagtatccagagtagttttatagcaactggtcttatcctacttatacctaagaaagtcctatcaaggttaccaaagcctaaaataccaacaccaccatctacttctaaaagtaactaattatttggtataggcaagactccagcaaatctatattagttagaaaagtagaagcagcaaattaaatacctttaaagctgctaattaatatctcctagtataataaagtaggcagtagataagattatcaaaagtatagaaattactatgcagaatactgttctagtatagcaagagatctagtaactttatataggtataatatactaaaaaaagaagtagaagatattaaggtattttatctagactagtggcagtctgacaggcagtgaagggcagcaaaaggctcaagaatataaagaacttgcccaacagataccaaagcaatataggccactaacctgcagcaactataatcagaccagacataatagattgtcatgtactaatagatagtactgttctatctgataggaaaatataataattatattgcctgaagcctgcagt

SEQ ID NO: 18238 - DNA, 1122 bp, Emericella nidulans
tcactccattactttcagaaaagcattgattttacgccgccagacatgtcaacgcggttcgcaaactccacacccagctatgatccgacagtcttagcaagcggcggtcctctttccctcacgcacccaaactacgctcagcctttcagtagctggcttgctgaggccatgcctgaggtcgatattgggcatattccggggtttcggagcggaaggcttgtgggctcgggatggttggtgcacactatcgaccaagcaaccggaaaacgagcctcgtctgagaccgcgttctgaggccattcttaggaagggaagaacttggtcgtgttttatcagacaatggcagagaggatatcgttccaggaaattgcggctagaggtgtgattgtcagtgatatggtcagcaaccgaacctttgacctgctcgctcgacgagaagtcattatttctgcgggggccttccagtcacctcagatgctgatggtctctggtgtcggccctgctggcttactcgcagagcacgagattcctcttgtagcagacagacccggtgttggacagaatatgcacgatcatgtcttgtttggggtttcatatggggtggatgtcgacaccgcgtatgcactgggagaacccgaggccgccgctgaggctgcaacactctaccacgaagatcaagcaggaccgctgtcaaaccgctggagattatgctgccttcgaaagactcccgccggactttcgtggtggcttgtcggccgaagcagagcaaggtataggcctccacaaacacaaccatctatcctgctaaacagagtgttcctgcaacaattgcatctctaccaagcgactggcccgggatacagggtctcttcccggcctacgccggaaatttctacaatccctacgtcggcggcccaagggaaggaaactacgtgaccctcctcgcaattcttatgagccctcagtcccgcgggaacgctcactctcctcgcccagtatgctggatcccccactcattaatccagcctgactcgcccatcccgtcgacgtggagctcgctgttgcggcgttcaagcggctgcggagtatcttccgtgcgccggtattggaaggcgcattgac

SEQ ID NO: 18239 - DNA, 1127 bp, Emericella nidulans
ccaggggacatctagcttgaacacgcccggccaccttaacatgaccgtcaagcagccgtatggcgtcgttgcttgcattatcccctggaacgtgcccatggcatttttcgcattcaaggttgcgccggctctggcggctggaaacacggtcgttctgaagagcagcgagaaggcgccattgactgtaagacatcttaaaacccatgccgtctgctcttatctaacacactaagtccgccctggcagccacgctgatcgccgaagccggcttcccacctggcgtcatcaacattctgtccggcttcggtacccccgccggcagcacgctagcatcacacatggacgtgcgttgcctcagctttacaggctcctcgttcacaggccaaaggattcaagcagcggccgccgcatcgaacatgaagattgtgcacatggaactcggcggaaagtcacctgctctcatcttcgaggacgccgacctagaaaacgccgcccaagcgacacagttcagtatccagtgcctgagcggacagacctgcatggcgaactcccggatatacgtccaggagtctgtggctgacgagttcttggccttgttcaaggaaaagttcggaagcgcggtccttggtaacccgctcgaatcaggcacaacacacggtccacaggtcgatgggctgcagtacgagcgtgtaaagtcttatatcactatcggtgaacaggacggaaaacttagcatgggtggtgatgcaggcaatgggtactttgtcaagccaactgtctttgagggtgtccctgaggactcgcgcatcgtgaaagaggaggtttttggtccagttgttgtgatcaacaccttcaaaacagaggaggaggccattaagaaggctaatgcatcggagtttgggctgtatgcatccgtcttcacaaaggatctagaccgcgcagtgcgtacctcgaagctcctggaagctggtactgttggcgtcaacactacaagtcctaatgtcgccaaggacatgccgtttggtgggtacaagatgagtggtgttgggcgtgagggcttcatgcacagtcttgacaacttccttgagaccaagacgattttgatcaagatgagctcttgagcggat

SEQ ID NO: 18240 - DNA, 1133 bp, Emericella nidulans
acgagcgcatggtctatgacgagctggatctgctgcaaaagctgaaccaccctcacattgttcacttcgtcgattggtttgagtctaaagtgtgtatctgtgcttgctttcgatgaagaggcccgagactgacggctactaggataaattctacattgtcacacaattagccactggtggcgagcttttcgatagaatttgcgagtacggcaagttcacagagaaggatgcgtcacaaaccatccgccaggtgctcgatgccgtcaactacctacatcaacgcaatatcgtccaccgaggtttgtttctcccatgattcccttttcagtcaaagggttttgaccaatgttcgtcatcagacttaaaaccagaaaaccttctttaccttacccgtgatctggactcgcaactagtcctcgccgactttggaatcgcaaagatgttggataacccagccgaagtgctgaccagcatggcggggtcattcggttatgccgctcccgaggtcatgctcaagcaagtacatggcaaagctgtggacatctggtcgctcggtgtcatcacatacaccctgctatgcggatactcgcccttccgatccgagaacctggccgatctcatcgaggagtgccgctccgggcgcgttgtcttccacgagcgctactggaaggatgtctccaaagatgctaaggatttcattctcagcttgctgcaggtggatccggcgcagcggcccacgtccgaggaagccctgaagcacccctggttgaagggtgaatctgccagcgaccgcgacttgctacccgagatccgcgcgtacattgctcgctctcgcctcaagcgaggtattgagatcatcaagcttgcgaaccgcatcgaagcgctcaagatgcaagaagaagatgaagaagacattcccagtgcagttgacgtacaggcttcggaagcgtctgacaagtccggtctatcaccgttccctgctctttcaacagagaacagcaacacacaccctgcatcaaccggtaatggagaatcaggcggtactaagaagcgcagcttaagcaagattgcgcgaggtgctatcttccgtgaggtcgtcctcgccaaggtgcgcgagatgaaggaaaacgagg

SEQ ID NO: 18241 - DNA, 1135 bp, Emericella nidulans
cggttgagcagtggtgtatgttccctccttactatccacttcagctaccgacagtgtgtagcccttgcaagttgcacttgccaaaatcgccatcgacctggaccttttccgcaccctcaaggagagtgaagctccgctatctctggcacagttggcagagaagacgggggcttcccccaagctgcttggtaagtatgcagcgttggctatgttggattgccctcactaagtcacaacagggcgcattctccgcacgcaggctgcatttggcctcatcaaggagactgggccccaggaatacacttcgagtgcattcactgatgtcttttccaaccccgatgctgctggtgccattgcacagctgtatgtctcattcctccacgtcaaaggcacagtaataaatttcttctcagattcgacatctccggcccttgcactcagcttctgcccgactacctcgcggagactgggtatcaggagatcgtctccaacaaagaatgccccttccaaaaggcgtttcacaccagccagaccctatttgaatggatgccccagcacccaaagcacatgaagtctctcggccacttaatggcccttcaacggcccacggtctgggttgaccactttcctgttctcgagcagctaggcgagttccctaacccagacaaaacactcatggtcgatatcggcggcggcttcgggcagcaatccaaagcgctccgttccagatgccccaatgttgaaggcaaaatcattgtccaggacatgcctcagacgctagccagcgctgagccagcagaaggcgtagaattctccgaacacgatttcttccagccgcagcccgtaaagggggccaaattctactatctccgccacgtccttcacgactggcccgacgagcagtgtgttcaaatcctgcagcaggtcattccggctatggcacctgagtcgcgcattctgattgacgaagtggtaatcccggtgaccggagtgccatggcaggcagcgtttatggacttgctgatgatggagtcgtttgcgagtatcgagcgcacgcgagcagaatgggaggccttaatggacaaggctgggctgaagattatcgaggagtattactatgatgggaaggagcagg

SEQ ID NO: 18242 - DNA, 1142 bp, Emericella nidulans
tggaaaattccgtaccaagcctttcccacttcgcttgagaatccgccaactcctggaagtcctcgccggtcagcagttatgggcccgcgcacccaacccaggcccgcacgcaatagctatcaatcgctgattccgtctggggataccaacaaaccatcctctccgccatcaatccgccctactcgcaataataccgtgaaggatacacgcagaaagcagtccccctcaccaagacgagccaagagtgaagcaaaagagcgaatatcaccgtccagccacactcagaacggcaaacggtctagtcacgccccgaccagtgacatatctagtaacactcagtcaaagattgcaggaacacaagttagcgccatcgtcccaatttgggaagatcgaaacaagagtgaagtacagaagacgccgcgacggtcaacggtctctctcgtctatgatcctctcagcctaaacgagaagagtgatatctcccccaagcgcagtcaagctgataggctagcgcgcatgtctagcttcaagaactccaagcgtggctgtacgactccagcgagaaagactgtcgggttgggtattggtgcggcaacgccggggagtctgtacgacggggatggcttcttgaaggagtaacagcttggatggatggtatttagcttctgaattggcgtcgttttattattccccgtcttatttattctcacgaggagcactttcgactagttagtaattggacaatatctctcttcaacttgaatgcccatgaatctctacatatgacgaccaagtcaacttcagctccaggtcttttttttgtgacaaagtgatcaatctgtccgcctccacttcgtctcttccccatccacaccagcatccccatcagcaccatcatgctcatccctctcttcctctctcgtcctcacactccccgccccgggacctagcccactccccatacccggaaaactcggcccttctccctctccaatccaatttccttcttcgtcaaagaactcatgcatattatccgccgtaatccacccagagctcccatccacaggaggaggtaaccctccctcctggcctgcaccaggaaagacaagccccgaagcaaacgcaccgctatcctgatcttc

SEQ ID NO: 18243 - DNA, 1168 bp, Emericella nidulans
ggaggagatggcagaaagccggcctcgccggctgtcaatctgatcggtacgtctttgtgtctgtattttgatgtacctcagtactaattctgtttagctggtggtggagccggtatgatggaggctcttgtatgccatcctttgggtacggaacatccaatccagtcgcacaagcgtaaacattaacaaatagtctagacaccattaaggtccgcatgcaactctcgcggcggtccacggcacctggtgtaagttcccaaactctttatgggtcggagcgcagttactcatttgattgcaggtcaagcctcgtggtttcgtgaaaaccggtgtcgagattgtcacgaaggaaaccgcactcggtctgtacaagggtctcggagccgtcttgggcggtatcatccccaagatggccatccgattcacctcctacgagcaatacaagcagttgcttgcggataagaacaccggtgctgtctccagcaaagctacattcctcggtacgccaacactagtcctaatcgcgcattatacagttcgcgtagatgcagttcgatactaacgagtaatgaacagccggtctcgccgcaggtgtaacggaagccgtcgccgtcgtgaaccccatggaagtcattaagatccgcctgcaagcgcaacaccactccctcgccgacccccttgacgctcccaaataccgctccgcccctcacgctctcttcaccgtcatcaaggaagaaggatttatggccctctaccgcggtgtctccctgactgctctccgccagggtacaaaccaagccgccaacttcacagcctacacggaacttaaggccttcctgcaacgcagccagcccgaatacagcaactctcagctccctagctatcagacaaccgttatcggtctgatttctggtgctgtcggccccttctccaatgcacccatcgacactatcaagactcgtctgcagaagacgagagctgagcctggtcagagcgccgtgaacagaattatgacgatcgccaaggacatgttcaagcaggagggtgctagtgcgttctacaagggtatcacgcctcgtgtcatgcgtgttgcacccggacaggccgtcacgttcacagtgtacgaattcttgaaggggaagctggaggcgtcgaactgggcgtttgt

SEQ ID NO: 18244 - DNA, 1170 bp, Emericella nidulans
gggtatatttttgggtatatcaatctaccaaagttattcccatacctggggaacacgcgatttcagattctttgtgctttggcatcaatatccctcgctgtgacgcttttgatcagctgctcgtacattcaggaacgtgatccccgccttgatgggcccccgccatcaggaagcatgggcgttgtgggcttcttcaagcaagtcttcaaatcaattaaacacctgccgcctcaagccgccaaggtctgcgaagtgcagattgctgcgtggatagcgtggtttccatttctcttttacgcaacaacctacattggtcaactctacgtcaacccaatcttcgaaaaaaatccgggcctttcggactctgatatcgacaaagcgtgggaagatgcgacaagggtggggacattggctcttcttatatacgccttagtctcgtttgttgctaatataaccctccctattttcgttgtcccgacatacaaacctgtcctttctagtgactccagcgaagtggacattcgacaagaagcagagccgtgtctgagagtcgagaggcaatcgagctcggatatcgaagtagggcttgtcgcggaactccacccagaagtcttgcgcgacaaggcacggggctcagcggaaagcaagtcgtggtcgtcgaagttgcagattcccggtcttaccttgcgccgaacttggcttctgtcgcagatcctgtttgccttgtgcatgtttagcacattcttcatcacctctgttactgctgcgacggtagtagttggcctaatcggtataccctgggctttgtcactatgggcaccgtttgctctaatctctgctgaggtggcgactttagaagaacagcgccgaagccgacgtcagcggtcagaattgacgacctttgatgagcagatgtcacctcaaattgatcgcgatgcagctgatgataatgatgatgatgacgacgacgacgataatgatgacaatgacgcagagaccggctcttcaaggtctcctaaaacaccgggagacgagaactcagcacaggcgggtatcgtcttggggcttcataatgtagccgtgtctgcgccacaggttctatcgagcttgatatgcagtgctatatttagggcatctcagaaaccacggggggagccgtatgatgaaagt

SEQ ID NO: 18245 - DNA, 1179 bp, Emericella nidulans
acagtcagagggaccaccaacgctggataacgtgttgattaacggaactaacgtatacggctctgatgagggtaacaaaactggacggagatggaacactacgttcgtcaaaagcacaagctacaggctccgcttagtgaatgaagctgtcgacacacactccaagttcatggttgataactacacactcactgtgattgcgaatgatcttgtgcccacccaaccgtatgagacaaccgttcttgatattgcaatgggtgagtcgacccattcctgcaaaccctctgggcttcccgtcttcatgctagtcatatattgtggtacaggccaacgctacgatgtcatcatcaccgccgatcaagcctctgtggcagacagtttctggctccgagcaatcccgcaagaagcctgctctgaaaacgagtcgtccgataacatcagaggtataatatactacgactcttctacctcgaccccaaagacgtcggcctacgactacacggactcctgctccggcgaagacccctcaaacctcacaccgatggtgaacccgctaagcgtctcaagcagcgccttctatacaagtcagaatcagtgacactcggaacgaacacagagaatctcttccgttggaagctaaatagtacctcgatgcacgttgactggacagatcctatcctactggagatatatcgcaaccattcggtatcgacgtttgcgaatactagtggcgtcgtggagctccccaaagcaaacgaatgggtctatgtcgttatcgaaacggagctcaccgttccctatcccatccatctgcacggacatgtctccgtcattattgcccagggcacgggaacttacaatagtagcagtgacaacctgatcgacacactgggtgcggcaaacctgccacgtcgcgacacagccatgctcaaggaaactgtgtaccttatagttggattttacactgataaccctggtgcgtggcttatgcattgccatattggatggcataccgaggagggcttcgcgatgcagtttattgagtggtacagcgagattcaagacttattgaagactaagtattctgaaggactggaggagaactgtcactcttgggaacagtaccaggaggagtatatggtagtcgaggatgattcgggggtttgatctgccattcag

SEQ ID NO: 18246 - DNA, 1181 bp, Emericella nidulans
agactcacaaccacgctcagcctaagcccaaggacaaaaagcacggccatgatctcaacatgcgaggagtctttctccacgtcatgggggacgccctaggcaacattggcgtcatcctgtctgctcttgttatctggctgaccgattattcttggagattttatgtggaccctggtatatcgctcgttatcacggtgattattctggcgtcagcaattcctctctgcaaagctgcctctcgcatcctgttgcaggccgtgccacatggattaagcattgaccacatcaaggaagatattgagagccttcctggtgtcaaagggtctcaccatctccatgtatggcagctcagtgacactaagactgtcgcttcgatccatatccaagtggacaccgagatcaaaggcgagggttctgagcgttacatgcaccttgccaagcaagtaagacaatgcttacacgcctatggcatccagtcatcaaccatccagccagagtttcctcgcgacagtgatacagaagacaaccaggtgggctcagctcacctgccatcgggcagtcccagccgcaccccaagtattcgagacggcgatcctcaggcctgcctgttagaatgcggcgatgagtgcgccggcggtcactgctgtcccacaaagcccacctagagtcctctacatccgttatcttttggcctatttatactcttgtcttattactagctgtttccaaaagagcctgccccgaccttgcattgtttataccccattcctcaactgtgtcaaattactcctgttgcgtcatatgactacttatagatagcctaatgctacgcatgatacctactctgagatattctgcaccgtcaccattgcttttaggccgtcgaggatagttgacttgcgcttggattgggaccgtgatcagttttgaccgcaccatggaatagtgagcaaaccgtatggaaattttggatatgtctgataatctaaagtcagttcacaaattcagaaccggtcttccctaacagagtacaagtgttggttaaccaagcgtagataaatagtctcacgtgactaggccctgtcgatcgttgaggctccctccctgaatcccagctatttcggggtcgagacctggaggcttccccgtgccacgactcatcttttatggctccgtcctca

SEQ ID NO: 18247 - DNA, 1191 bp, Emericella nidulans
ctattttcgacattccgatgtctgcaacatgataatccgctggtatgtctaaattattcttctttctggaacttatctgataacacgtttcaggcctcccacgctccggcaccccgccctcattcccccgtcgccgcggtctcccggagaagcgcaagatacgcgatgtgaaaaaggtcattgccgtgtcctctgcgaagggtggtgtagggaaatcaacaattgcgggtacagcttttgtcacgtttcaacctcgtactggtttccttgaaaatataatctaacgaaacggacgaacagtgaacctagctctcgccttcgcgcgccgcgcatacgcaccgggattcttgacacagatatctttggcccttccattccaacactactgaatctctcgggggagccgagacttgatgaacgtatgtctcaacaaaacataacttcactgccatacacatttgttaaccctttcctgtccaacagacgaccgccttattccactaacaaactacggcctcaaatccatgtcaatgggctatctcctccctccccccccatctcttaccccagaaacaccacaacatcactcgcgagtcccaatggacacgactccgatatcctggcgtggattgatggtcacaaaagccatgcagcagcttctgcactccgtttcctggggtccccttgacgtgttatttctggacctcccacccggcacgggagacgtgcaattaacaatcggtcaggagatcatcctcgacggcgccgtgattgtcaccacaccacaggacatcgctccgcgatgctgtgagaggattcggcatgttccagcgcatgaatgtccccgtgctcggcatggtgaggaacatggcgttctttgcgtgcccggagtgtgggaccaagacgaagatcttctcggcggggttgcatcatcatggtcctggtgatcaaggcggcgaaggggactggggtgttcttgcagagtgtaagcggcttggagtcgagtttctgggtgatatccgcttgatgcacgggtttgcgaggatgcggatcgcggaatgccgactgttgtttcggaggagggggatcggagtgcgaggagggaggcgtttatgggtgttgcggagaaggtcgcgaagaaggttggggttgagtggtagatttcttgccagcgtatcacattcggtaaaa

SEQ ID NO: 18248 - DNA, 1204 bp, Emericella nidulans
gtggctgttgaaatgggactcgctcatccgtgaggccagatccgacctggcgaagatcctcacccatgaaacaggcaagccaatcgccgaatcctatggcgagatcgactacgcgaccggtttcacctggtggtttgcgggtgaggcagaacgtatacaagggtcaatcgccgtgcctgccgcgcctaaccggcgcgtcttcactgtcaagcaaccgatcggtgtcgctgctgcccttgtgccgtggaatttccctattgctatggtgttacggaaggccggtgcagctctcgctgccggttgcacgatgattgtcaagcccagtcccgagactcccctcacagccttggtattagcgcacctagcggagaaggcaggcttccccgccggagtgttcaatgtgcttacgacggatctggaaaacacgccgccgctaagcgaagcgctgtgcaagcacccgctcgtgaagaaggttacgttcactggctcaactcgggttggcaagctgattgcctctcactgtgcacacgggttgaagaaggtcacattggaactgggcggaaattgtccattccttgtgtttgacgacgcggaccttgaccaagcgctggaccagctgatggctctcaaatggcgccacgctggtcaggcttgtattactgcaaaccggatttacgtgcaggctggaatctacgacaaattcgcgcagtgctcaaggagcgcacggccaaattggtgatcggccatggtgctaaagaaggcacgactctgggaccgctcacgaccccgcgcagtatcgacaaggccattagccaagtcgaagacgcgcgacggctgggcgcagacgtgattcttggcgggagccgtgtccaaggaacacagggttacttcttcgagccgacaatcttaaaaaacatgaccaaggacatgttggtgtcgcgcgaggagtcctttgctccgatcgctgctctctatcgctttgagactgaggaagaagccgtcaagctggcgaacgacaccagcatgggcctggctagttatgcgttctcgaagaacattgaccgtatgtggcgactgctggagaacttggaagcgggcatgatcggcatgaacacaggaaactcgtctgcggctgagtcgccgtttggaggaatcaaggaatcgggttatggaaaggagagcggaaaggaagttgccgtgaatg

SEQ ID NO: 18249 - DNA, 1208 bp, Emericella nidulans
aaatttcgaaagctcagcagccgtcagatgacacagattatcccacggctacaagttctcgccagatccagtcccgatgacaaaaagattcttgtttcccagctcaagaaactcggcgagacagttgcagtgaccggagacggaacaaacgatgctcaagctctgaaaactgctgatgttgggttctccatgggaattacgggcacggaggttgccaaggaggcatcagatattatcttaatggacgacaactttgcttctatcgtgaaggctatggcctggggcaggaccgtcaacgatgccgtgaagaagttcttgcaagtaggttatggccaactctatatatgcctatatactaactggcacagttccaaatcacggtcaacatcacggccgttcttctcacgtttatctccgcagtggctagtggcgatgaggaatccgtgttgactgcagttcagcttctgtgggtcaacttgattatggacacttttgccgcgctcgctcttggtacgttcgacttctccgaccctaaacataatctaacaacaaatagcaacggatcctccatcgccttatgttcttaatcgtcgacctgagccaaaatccgcacccctcatcaatttgacaatgtggaaaatgatgatcggacaaagcatttatcaactggtggtgacgctcgtcctcaacttctctggaagatctattttgaaatctataatcgacttttctggtgatgccaatgcaaacaatgtcctcacaacggtggtgttcaacacgttcgtctggatgcagattttcaaccaatggaagtgagtattatgatcccgagggaagttcagtataatctaacaaggatcagctctcgtcgtttggacaacggactcaacatcttcgatggtctttttcgtaataggtggtttattggcattcagtttattatcgttggagggcagattttgatcatattcgtcggtggacatgccttctccgttacgcgccttactggagctcaatgggcagtgtgccttatcttgggcgtcatctcgatcccggttggtgtgatcattcgactcattccggatgagttcattcgcaagctcatcccgaccttccatcgcaagaaagggccggagctcattgtatccgacgaagacaggcgttttgagtggaatcctgcccttgaggagattcgcgaccagctaaaa

SEQ ID NO: 18250 - DNA, 1215 bp, Emericella nidulans
tcacgcaacttatcgtgcatcaacttttgcgctgcggaagtacctgagagagccggtagtgagcgatgatggttctaggcttgcaccgccaatcctcgaaaaaggaaaggcaatgatatgtattgatggatttttgaagctgttttgcgaggaggatcactgaactggctggaccaggtcacgagtctacgatattacgaagtatataggctatttgcatacggaggagtttagaaatgtatatctgacaggagaccaccaatctcttaaatgagcttaactaataaaaaattcaaactggaaacataagtttaaaggaatcttgacagtcacggtgtgaactcgaagtgtgggtgcttcattatatactccggaatgagattttccgaaccgaatagctgcacccgtcatccggcctccaagtcgaatcaagcatatagtcgacgacgatcgtgaacattaccggcgcattctccgtatcctgacgatatcgaactacaaataacctacgacaatcaacacctcaggatggacggctcggagaaccgcttgttccgcttctccaaaccagaatggctcaacaactcgacagtgcgtaacgcgggcgtctacacatcaggcgcacttgtaagatacccttccatgtcccgcactacatctcactgtaccgcgtgaccatttgtacatgactgacactatattgtagttctcgctgggcttttttttccttattgatgccgccgccttttcacatagctatcgtaacgcctcgactgtacacgtcaagttcgtcgactggatccctggaatctgctctgcactgggtatgcttgtcatcaactcgattgagaagtcgcggttacaggccgatagcttcagttacagtgggaacggcgttgcgtggaaggcgcgctttgttctgtttcttgggtttgcgttgcttgctggaggtttggcgggaagtgtggtatgtttatccaacggtgcaggctttcttaagcttgtttctgtgctggattcagtgccggacagactgctaatgatgttgctagacggtcatggttctcaagtacctcatcaagaattatccgctaccgacgctgtacttcggaatcgcgaatgtcattgccaatgggctggttatgttgaggtgagttgggtgttaacagctggctttacgcttttgctaactatagcagttcggttgttctttgg

SEQ ID NO: 18251 - DNA, 1216 bp, Emericella nidulans
tagatacccgccatgtccttcaagccccccagaatcgccatcgtcggcggcgccctgcaggcctaactctcggccgtctcctgtacaagaaccacattcccttcacaatctacgacgtgcgccaaaaaccgtcaaaggcagacctcgccaaaccatcaggcatgctcgatctccacgaagagtccggcctcgccgcactcagagcatgcggcctgtatgaaacattcctcacacttacgggcgaatgttcccaggcgcaacgagtggccgataaagacggcaatatcatctacgccgacggtggtgaactgagccagcggccagagatctcacggcatgcgctcaccaatatgttgaccgaacacctgccgccggactctatcagatacgggcataagctcctctccgtttcagcgtcaaccaaggaactcgatttcggcccccatgggaagcaaccattcgaccttctcattggcgcggatggggcctggttttttttgcgccgagctctgacagacgtaaaaccattctataccggcatgcagagcatcacagggacaatttacaacatccgctcaaagtacccacacttatcatctctggttggagacgggagtttctcagcccttggactgcgtcatggcgtgatggcgcaacgcggggctgcagattcagcacgtatatacacatttctctctataccagacgagcacttcgcctcgacatccggacttaacaagcttgatctgcagggcgccaaggagcgtcttctcacagatgatcaacttctcggctcattcgggaagtcaattaaagaactagtctccgcctcttgcgacgaagagtccaacatgaacacggatatcaataaacttcctatcaagcctctctacaccctccccatagacagcgccttttcacacgatacgaatcccgccgtagcgataacggtcatcggcgacgctgcgcacttgatgcccccttgggcaggtgagggcgtaaacctcgctatgtgggactcacttctgctttccaaagctataatccgtgcttttcgagacagtaacggccagtctgcatcttttctcgctacgctcgacccgttactacagacctttgaattagaaatgttctctcgcacgagggaaaaggctgaagagacggaaggtaatgggaagatgttatttggggaggatggtgctctggcgtttaagag

SEQ ID NO: 18252 - DNA, 1225 bp, Emericella nidulans
tccttagtgccctataccttgttaaagaatgtgatccgcatcgccaaccccgccgctgtaatgactggcgttttggacctcttccttgcccagcctttcggctcccggtctcttctgcagcgaatattctccatgacattgcatgatggcattaaaggattccagcgatcgatcgatgccatggctgctaaagttgacgatcctatcatctcgcagaagctgaaagcgttcaccgaggcagacgaggctatcaagaacgagattcgtcttgaggctgccgaggacgatgtggacgttgctgtggctattctgcgatcagattatctgccatttgagctgtcgaccgagcaaattggcaaggtctttaattcatacgtcgcctggaatcacgctgtagaaaatgtggacgaggaaatgcgggagggcgcgcagtggttcgctaatgtgaagcagttgctcaaactatacacgcgacagacagacaaggcgaagatgctcagcatcatcgaagaaccagtgacgctccaactgttccgcgatcttttcaccatcttctatgagcctttggttcgagtgtacaagtcagcgaatgtttacagcagtatcaccgatttcgccaagtttgctgacgacgcaatcgctgtgattgaaaagtgccagaggcaggatatttccgccgacccaaaccaaactgttcaagcctttattgatctctgcgaacggcaccagagtagtctctacaagttcgtccacgaggtccacctgcacgataacggactgtttgggtccctgatggcatggattgaagatattcttcaattcctgcgtaacgggccaaaaggcggcaaactcgacatgaacgcgctgtttagcggtgccaaggacatgggtcagattgacccagccctcgctcgtgaggagatagataaactcataaagtggcatgaggatcgcaagcagtggcacctcaacaagactcgccagaagatggccgctgaaggaacggctagttctccattccagaccaagttcaaatcgagcgactttggtttggatgaggtatgtataggacctttaaagtaagtcacagataaactaacaagaaacaggccgaccttgaacatctcgccatttccgacgaggattctgatcactccgatgacatcgacgccgaagacgaggcagaagaattagacccgatagctgttgaacgaaaacgacggtc

SEQ ID NO: 18253 - DNA, 1227 bp, Emericella nidulans
tagcatcatctctctcgtgttaaaattctcgtgttaaggtgactagatactgactactatcgtaggctctcctctgaaccggctgtcattccttcgatcagatcaccccttcctctccgccgctttcaagcacccgtcgacccgattcgttattctcaaggacctagcgccactcacaaggtctcctacggaattatactatgcaaagtacgatgaagtacgcaagctgcttccagcatcgatctacgacaagtcggaggaagagataatcaaggagcatgattcgcgcaagacggagccgcaccttatcttcttgggtgtggatgagaccgacaagcagcaggacggattcagctggaagatctacagcgggacgccgtatttcgcgcttgatgtttcggagaaaggatcggaggagcaacaacacaatgcgaaggaagtggttaatggatttgaggctcaaggattgagttttctgcaggcaagagtagccatgacgttctctgctaatgagggtatgtttctcgaccctaaccatgaagaatgacggctaattctggtatagcggctatttacgctcaagctcgggcgcttattgactggaacacccgcaacagctactgcggcacttgcggcagccgcaccatttccgtaaactcgggcacaaaacgcgcctgcccacccaccgacgcagcgcgcgtcgccgagggcaagcccgccgagaaaccagcctgcagcactcgcaccaccatttcaaacctctccttcccgcgtacagaccctacaatcatcgtggccgtcatctcgtccgacgcgaagcgcatcctccttggccgctcaaagcgctttccgcctaactggtactccacgctcgcaggcttcattgaacccgccgagtccgtcgaggatgcagtgcgtcgcgaagtatgggaagaggccggtgtgacactatcccgtgtcattatccattcgacccagccgtggccgtacccggctaatttgatgattggggcaattgcgcaagttagtgaccctgcgcatgagaagatcaacctcgagcatgatcctgagctggaagatgcgcggtggtttgaaatcgaggaggtagaggaggctttgagggttggcacgagcaacctagatcaagctgctgggccggggtataaggaggggtcgttaaggttgccgcctccaacggcgattgcgaaccagttgatacaagcggct

SEQ ID NO: 18254 - DNA, 1236 bp, Emericella nidulans
tatccgaaaactgggctacgggtccttctcgacggtgtggttggcgagagacacgaagtaagtcacacggtcaacacatatgccatggtatcggcaatagctaaggctccagacttggccgctatgttgcattaaaagtcggtcaagctgaggatcaaagctcgagtgcaccaattgaggagactcgaatatatcagctgttggcgaagaccaagtttccatcacatcctggccgtgaccactatcttcccttgctggatcaatttcggtacactggtccaaatggtacgcatcaagctcttgtttatgagcctatgagcgccagcgtcaccgaggtgaaggaggctctgttccctaacggtccgtttccgtttcagatggccaaggccatcctctggcagacgctcttagggctagatttcctgctagccaatggtgtcgtccatggcgatgtacaaccaaggaacctgctgtttaccctagaagaccttaaggacgtaccagaggatcagctggtgcaggataaggacaaatccattactctctgcgtcgacactgagctgaaggggggtgtgaaggggccggagtaccttgttccagcgcactcgttgatgcagtacctcaatatttcaaagccatttaccgtcaaagtgtctgatctaggcggctgtacgtgcccacctccctccagaaaagataggagctgaccctacagccttcctcacttcccacccgccctcagcaccgtcgccgccccttcacctccgtggtccagagacgctctttcaacgttgtatctctgctaatcaggatatgtggagctttgggtgccttatttttgagttcatcaccgggttcgcgttgttcgaccttagcgatcaccctgtgacgggtataacggacgacatgcactttatcgacatgtacaacatcctcgggtttccaaaagatgaggcattgcggaaccaacactggccaaactggcggagatttttcagatctaatggcgagccaatcgaccattttattcggagacgagaccgtgactttgatataaccggaaggccgacctcgcatacattggaagaactgctcgaagaagcggttggagaggggctctcgccagaggaaattaacataacgaagcagttgttaagaggcctgctcgagtttgaagtcgaaaagaggttcacgacgaaggatgtgctaaggcatcaatggtttgtggagcagagg

SEQ ID NO: 18255 - DNA, 1236 bp, Emericella nidulans
cgaggatcatgccaaagattcagtccgcatgcattgtgactaatgttggcctcgtcgttgccaccgttctcgcactgcccattggtaaagcagtaaatggcggaacgatcaactcaggttcatatgtctttgggcagttggaaaactatacaacttggccaagcggatgggcgtttgtgcttgcctggctctcacctatctggacaattggggcttttgactcctgtgttcatatgagtgaggaggccacgaatgctgcacgtgcggttccattaggtatactatggtctagtggactatgtggtatcttagggtttctttccctagccgtaattgcggcagttataaatacagacctagaggctgtgatgggcactgcatttggccagccgatggctcaagtaggtaatgcatacgctaattgatccttgtcacactgaaccatctctacagatctactacgactgcttggggaaagctggtgccctcggctttatggccgtagtagcagcggtccagttcttcatggggctgagcttggtatctccctccccgtcccaatcacttcctcaatttgatcccagcaaaaatagaccgctaaccgcatatttgtaggttgttgccgcctcccgccaaagctgggccttctctcgtgacggcgccctccctttctcctccttcttccgccatgtcagcaaacgcattcgttaccagcctgtccgcatggtatggggcgtcgtcgcggcagccataaccatcggccttctctgcctcatcaatgcggccgccagcaatgccctcttctctctcgcagtcgccggcaatgatctggcttggctgatgcccatattgtgccggctagtttggggcgaggacaggttccacccgggtgtgttctatactgggagactcagcaagccaattgcggtcacggcggtggtttacttgtcttttgcaattcttctttgcatgtttccgacactgggcccgaaccctaatcgtacgtatccctgactagctccctgctctgtagcaagtgtgagctaactgatcgttcagcggacgatatgaactataccgtcgtcattaatggggctctttggggcggcgcgctgctgtattacatgctgtatgcgcgcaagacgtataagggtccccaaacgacagtgcacggctcatcgtcgccatcctctgcagcttccacgaacctcgagcgcaaggagttagaatcggagg

SEQ ID NO: 18256 - DNA, 1243 bp, Emericella nidulans
acgcattgccttgtttatcctccatcaatggctcattattggcatcggtgtcgcctgcctgctgggatacttcttccccaacgtcgccaaacatggcggcataattcgttcggaatacagcatcctttatggcgccgtcgccatcgtctttttgatatcgggccttagtattcctcaggataagctcgtgcggcagctcttcaactggcgccttcacctcctcgtccaagttacctcgttcctctttattccagcgcttgtcctcgctgtcgtacatgctattctcgctagcgacaagactgaacgcattgatcgcgctgtgctggcgggatacatattcaccgcttgtatcccgacgacgatcgcgtcgaatgtggtgatgacaaggtcggctggaggggacgatgcggctgcgttggccgaggtgcttattgctaacattctgggtccgtttgtaacggctggatggacggtgacgctgctaccggcttcaaaagagttcgatgtttggagagaccaggatgaggatctcacagccatgtatcgtgacgtattcaagcaactgggcctggccgtgctgctgcctctcgctgttggacaatttgtgaggttcttgtggcccaagaaaacagggcatatattgcagaagtataaacttgcgaaacttgggtctttctgtttgcttcttatgatctggtaagtttgttagaggtgggaaagaagattagaatgagttcctcacacttacaccaggtcaacattctcctcttgcttcgcaacaggggcgctccagggtctttcgaccgaaagcatcgtcttcgtcgtactattcaatattgccctttacctgttcctaacagccgtgtgtttttctatatctcgaccgcctcaaggcctctgcgttcgaacaacctttgcgcgctggcaggtcctgaagcagatgtccgttgaagagaccatcgccgtatgcttctgcggaccggcgaagagtacagctctgggtattccgctactatacgcgatgtggacgcccgtcgacttgtacataaaagcgaagacgtctgtgcctgttttgctgtatacgacagagcagctattcgtagcacattttttcgttcatgcgttcaggtggtggaaacgaagaatttgtgaacgtcgtgaatgcgaagaggatggagggagtgagccgccatctgcttctccctcagaaataacagataagtcaaaagagcagaggtgaacg

SEQ ID NO: 18257 - DNA, 1249 bp, Emericella nidulans
gaatcagatggggatggttttcctgatagtgatgaagaagaggacgctcagccttcctctcgtggccgtaacgtgcgccacggtacgaccaggaccttccttttccaatctactggaccgaggtagtatctccaatcacgcatcaagtcatctccgtcgatcctctggtgctctccaatgccgtggcagctacccaagagctccaagcagcttttgaaccgcgcggcgctaaagctgagaaggctaagcaggtaatttgttacgtcattgcattctcagccgacaagaccgcaaaggatgtcacaactcggtatctgcggaggcggacctggcctggaaagaccaagggtttccgactggggaagaaagggcctgacgacgatctgttagattggtttcgggtccttctacgcaattatgaacgtccatataaggaccgcactgccgtggacgacattgaagatgctaaagatctggttcccaaccggccgacaaaaagcaagccaactaatgaaacagttgacactctacagagcttacgtacatcctccgagttcgttctggagcgctttctccgccgtgaggaagctctcaggccaggcgctctgcctgtccgcacctttaccccagggggcaagaagaaaaatgccaatggcaacggtgcatctacgccaacagaaagccccaaagctgaaaatgtctatcgccgctctgatgtagtcaaatgtcaaaccgccgaaagctggcacaaagaaggccgcgagccactaccctcagcgaagcccctcaaacacgtccccatccgcgccgtcaccctcctccgtaagcgcgaagtcgacgaagaagcccgccgcacaggccagaaaccccttcagggtctttactcctttgaacaaacgcaggaaatcatacctcctcccatcgtagatggcattataccaaaaaatgagtacggcaacatcgactgcttcgtcccgcgaatggtccctaagggtgcagtacacatccccttctccggtaccgcgcgtatttgcaagaaactaggcatcgactacgccgaggctgtgacggggtttgaattcggcagccagatggccgtccctgttatcgagggcgttgttgtcgcggccgagaataaggatctcgttgtggatgcatggcgcgctgataacgaggaaaaacgacgcaaggaagcgcgaaaagctgaagcgaagattctcgcgacctggcgtaagttcttgttcgggct

SEQ ID NO: 18258 - DNA, 1255 bp, Emericella nidulans
aacatcggtgcaatgatccgctggctcgattacaatgactgctggctcgctgctgagtggggtcatccttccgacaacttgggcggtattctcgcagtcgctgactgggtctctcgtaccaaccgcgccggtggaaacatcgccggtggtaagatcttcaccatcaaggaagtcttggaggcaatgatcaaggcccacgaaatccagggtgttctcgccttggagaactcctacaacaaggtcggtctggaccacgttgttttggtcaaggttgccaccaccgctgttgtgtccaagatgcttggtctcagcgagaagcagaccgccgacgccatcacccaggcgtgggttgacggtcagagtctccgcacctacagacactcccccaacaccatgtctaggaagtcctgggctgccggtgacgcctgccagcgcgccgttaaccttgttctcaaggttcaaaagggtgagggcggtctcaagaccgtcctctctgcccccgtctggggtttctatgatgtcctgttcaagggcaacaagttcaagttccagcgcccatacggcagctacgttatggagaacgttcttttcaaggtttcctatcccggtatgtgtcccttgcctcgctcgtgcctagggggttgctaatgtgtgtaaagccgaattccactctcagactgctattgaggctgccgagatcatcaacaagaagctcgccgccctcggcaagagcgccaaagatatcaaggaggtcactaaccgcacccacgaggcgtgcatccgcatcatcgacaagcagttcaaggctatggacaactttgcggaccgtgaccactgcgttcaggtatgacatcttaaacacgaatgagaagttggcaaatactgattgcactcagtacatggtggctactatgctcgtcttcaaccgcctgactgccaatgattacgccgatggctccgaagccgccacctctcctctcctcgaggacctccgcaagcgcattcgctgcgttgaggaccctaagttcaccctggactaccacgaccccagcaagcgtaccatccccaacgctctcaccgtcaccctgaacgacggaactgtgctcgacgaggttgtcgtcgaggcacccctcggccaccgtctccgccgcgacgaggccaagcccgagattctcgacaagtacaagcgccacctccaagcccactttgaccaggctcgtctccaggaactcgtcgaccttggaaacaacaaggc

SEQ ID NO: 18259 - DNA, 1260 bp, Emericella nidulans
cgcacataccacataatcagctggtcatattcgtgacgacataatcatcccaacatcctgcctggaacaggctttcatctcccaacatacacaaacttgcatatcaaaaattagattagattctgtatgtatcattttaatagaagaggatccgtgatgctgaatacttgactaaatccgtcatgactgctctcgtccagcaccaactcactcaggagatacttagatggcccgttaccgagatgcaatgcatgtcacgacgagctagctatataggtcccacccgggcaggccacgcattagggtctaatcaaagtgaccatttggcccacttgggagtatggttgtctatctatttcatcgaggatagatctcttcttggttgctattaaccagtatcattgcgggcactggtgcctgtataccccggtgctctggatagatgctgcatggcatttacatatgaacagctcctgaagagacggaaaatctaacggaacacggccgtggagtgcattgtataccatgcgactgctgctgatgaccatcaaattgaatccttcactcatcgtttctgtacaccagctcaagagggcaagatgcctgcgatattgcacatgagtacaggcgttttggactacggtagtgtgaggcagatagggctttgcacgagaagaatcattggcgcaatcggggcaccgatttatgttgttgaataccaactcgcaccgggacacccattccctactccgaagaagattactatgctgccttcttatagctgtacgctcgcgctgtggagtggacaatacctgcattggcgtcatgggtacgagcgctggtggtgggcttgctgcaagtgcagcccttatggcgagagataggtggcagaagacgccacttgcggagtagatactggtccaccctatgctgggcaaccacaaaataaacccattgagacgttaggcgagcttacaaccttgacggctgccgataatcagaccgcttggaacacgttgttaggtttagaggctcgaggggacaatgtgtgaagctacgtcacccctgctagggcctcaaacttgcaaggcctacccaggacgtacattgatgttgggatgttgaatacttttcgcaatgaatacttgagccatgccacccacctactacaagcaaacgttccgaccgagtttcacctctagccccctctagccgggcgtgtcttctcgtggctttaagatggaggtcaactcggatacc

SEQ ID NO: 18260 - DNA, 1264 bp, Emericella nidulans
ggcccatgtgctgattagagcttacacgaatcctgggctggaaacctggaccataccttgtctttatgtagttggaaagtacctgcgggtcttcgcgtccaaggccgacgcggaatcttcgtcccagggatctgtggagttctcagaggatgatatggtcaccgactttgggaagaacgcgaaaactgaggaagctgcccgtgtactgaaccgaatgtttaccctgtgtctcaatgacaggtgagacgaagtcatgtctcggtacgttcccatctctaacaaaatattgtagagcgccaaaagaagaatcgcgaaaatggggcgtctattatatgtcaaatctcctattcaaaacatattttaaggtgtgagagatacgatgttttacttttccgaagagcaacaactaattgaagtcccagatcaatgctgtcggactttccaaaaatctcctgcgtgctcttaatgcccagtcacacgatttaccagataaggaactctatcccagatcgcacatagtgacgtttaactactttgtgggtgtcattttttttctggatgagaactatgccgaggtaggaggtcattcatagtcatctcgtttttgagagcttacccgaacaaggcagaggagcaccttgcatatgcttggaactactgtcagaaaagttctgtcaagaacagggagtcagttgtatcgtctccccattgagacctctatcgctgactatttggaaggttgatcttaacgtatcttgtgccctgccatatcgtcaacactcatacattaccgagcaagaagcttcttcaagactttccacgtcttgaaacgctgtttcgcccattatgcgactgcatccgaaagggtgatctccatggctttgacgccgctatgtctgcgggcgaagaagactttgtcaggagacgcatctacctaccacttgagcgaggccgagacatagcgttgcgcaatctgttccgaaaagttttcatagctggtggattcgaagaacctaaagacggacagccactgatccgacgtacaagaatacccgttgccgaatttgcagcagcgctgcggatcgggacccatgcagacgcgcgagcccgagttgatattgatgaagttgaatgcctgctatcgaatctaatctacaaagtgagtgctggggagactttccgaatcggagtgcttgctaattatcatttctagggccttatgaaaggctatattgctcgtgagcgtggcatgatcgtccttagc

SEQ ID NO: 18261 - DNA, 1265 bp, Emericella nidulans
attaggccttccatgaccaagttccagacagacgaccaggtaaacgtggaaatttgtggctcaggatcaaaacctatccctctgttcttgaatagacaagtgatcaagatcctggaggatatgggcgttgatagagagtggtttatgacgctacaggagctgcgcatagaacagctgcgaaaggccactgcaaccaccaagaacacagcaacctttgttaaaggccagagtgtcgccgactgcgtcaagctatatcgattatttctgttgtttcataacctaaagctggactacaagaaaatcccttttctccgagcggtcgttgaagccatggtccttcgggaactccgccttctgaaacataaagcacgaatcccagtgcacaagggtattacgctgtatggtgtcatggatgagactggattcctaaacgaaaacgaggtctttgtgacctatcaagccatggacaggcttgcagctcctccccaaaactgccgtctgcttgtcacccggtctccggctttacacaacggggatatccaatacccctacaatgtcgttccgcctaagggtcacccacttcagcaacagcggaattgtatcgtcttcagccaaaaaggtactcgagatcttcccagtcagctcagcgggggagatctggatggggacttgtacaacatcatttgggacccagcagccgctccgaaacgcgtctttaccccggccaactacccccgtaacccgcctctggatatcaagcgtgtggtagagagagaggacatggccaacttctttgtcgagtttatgcaatccgatagacttggtgttattgcgaccaaacacatgatcttagccgaccagatggaactcggtacttcacactccgactgtaagaagcttgcgcagctgcactctacagcagtagacttctcaaagactggaattcctgtcaggcttaaggaaatgccgttcgttaatcgtagtagaccagacttgtaagcccccgggttcctacataagcacagaatccccagctaatacctacaagcctcgccccgggacccctagccaagatccacgacaggcagaacattcaacttgaggcccgctacgttcacccctatccagatgacgatattgacttcagcccggtgcacaagtactatcgatctgagaagatactgggcaagctctatcgcgccatcaatgagcatgagatctggacgaaggatattcacacgacagtcaattctaatccgaccgcc

SEQ ID NO: 18262 - DNA, 1266 bp, Emericella nidulans
cagccaacaggactctagcctccttcgttgtctccatccacctcatcggaccgctgtttctcgcgccattctccgaaatgttcggtcgactgcgcatctatcaggtgggcacgttgacatttacgatctgtaatatcgccggtgtctcgcccctaacatcggcgcgctgctggtctttcgcctgtttgccgggatttctgggagcagtccggtcacactgggggcaggctctgttgcggatatgtttgctcgacaggagcgtggagtcgccatgtccatctatgggctgggccccctacttgaccctgtcgtcgggccgatcgcaggtggatacctctctgaagcacagggctggcgttagattttctagctgctggccattgtggttcgtatccccttcaatccgcctctcctgtgccccaagctcactagtttaccatcgtagtccgggatcgcggtcattcttgttttctctgtcctatctgaatcctatgaaccagttctattgcgacgaaaagcgaatcgcatcagacacgagactagatcccaggtgaacgctgcacaagccctaaagccagactcaaggaaggtttccacccaagcaataaccagaccgacgaagcttctcctcttcacctcaaatgtcgccttgttctcgctatacaggtaagtagctctccaatcttgggtaagacacgattgtaacaattgtttgtcaataataggagtggtttctggatacccctacttactcttcaccaccgtcaccgaattatacgaagccacctattatttctggcaaagtgccaccggattcgtttccatcggcattggcgtcggagccctcattggtatatcttgctttggtgctctctccgacaaaatccagaaccggcttattgcaagaaataacggccaggcagagcccgaatttcgacttccgccactcattccaggaagcctcctgatcccgataggtctcttttagtacggctggtccgcccagatgcgggttcattggatgatgcccatcatcagactgggctgggttggctgtgggatgattgccacccttctccccattcaagcgtacctctttgacgcttttggcatatatgccgcctcggccatagcggccaatacagtggtacggtccattgtcggagccttcttgccgcttgctggtccttcaatgtatgctacactagggttgggatgggggaatccattgcttgggtctgtcgccttggtttgttaccagtgcca

SEQ ID NO: 18263 - DNA, 1275 bp, Emericella nidulans
ccgtcaacctcgctatctctagccgtaacttcaaccttgcttatcttcggtcgactcacggatatgttcggtggttatgcaatctacattgccggagccggatggctgacgatatcgtcaattttatgcggagtctcacagtcttggctcatgctagtcattttccgagctctgcaaggcctgggtctcgcggcatttctcccctccggtgtcatgattttagggaaaacgtatcgacccggccctcggaaaaactttgttttcagtctctatggcgcctgtgctgcgctggggttctttatcggtatcttcttctctgggctctgcagccagtatcttagctggcggtggtatttcttcattggcgctatcctatccgccatcactacgttgtcatcgatattttacatccctcgtgacttcaaagaaacgaggggcaatggtgcaactatggactggaccggattggcattatcagtgtcaggctcagtcctcttcgtcttcgctatcgcccacagttcctatgccccggagggatggcgcaccccatatatccccgtctgccttgtactcggcgttttgcttcttgcggcgttgacctacgtggaaggctgggtagtcaagaatccgcttctgccaggggacatatttgccgtaaagtacatgaagccacttgcaattgccctgctcttcttgtacggaagtctcggtgtatttctcctctacgccgttttatagtaagttcttactctcgccgtctccctagacctcactaactcgtatccagcatgtctgacttcatgggcgccacccccttccaaatggtcgcctggaccgtgcccatggccgtcggcgggctaatactctcctgcgttggcgggcttatattccaccgtgtttcgggtacgatcctcctcatgatatcctgcctcggctacgttggttcaggcttgttcttcgctgtcgtcccgcaaggcggcaattactgggcgttcatatttccctcgatgatttgcgggacaattgggattgatatctcttttaacctcgcaaacattttcattacgactaatatgccgaaatcgaaacagggcctcgcgggggcactcatcaattgtactcttcatatggggattgcggtgatgctgggtttcgcggatattgtgcataccgagaccgggtacctgggagctaggaagagctacaaagcagtcttttggtacgaggttggattggcggcttttggactagtcgttgtagcgctttttgttagga

SEQ ID NO: 18264 - DNA, 1283 bp, Emericella nidulans
tcttggggttggttaggaaagtctggcataaccctgttcatgaacgtaacgagaagaacgagacggagacgcagaaggcctgcttcaagtttctggacctcacaagtcggagtttcagtgctgtgatcaaggaattacatccagagctgcttttgccggtctgtgttttctatttggcacttcgtgggcttgatacaatagaggatgatacctcaattccccttgaaaccaaggaacctctactgcgcaacttcaaagacttcctagagcaagatggttggacttttgatgggaaccgcccggaggagaaggaccgtgagctgctggttcagttccacaacgtcgttactgagttcaggaacatgaagcctgcctaccaagtcatcatcaaggatatcaccgacaagatgggtaacggtatggctgactacgcgcgcaaggctacctttgaagatgcgagtgtaaagactgtcgaggagtacgatctttactgctattacgtggctgggttagtgggtgaaggcttgactcgtctctttgtggaggcagagtttggcaaccctgctttgctgaagcgcacacgtcttcacaagtctatgggtcttttcctccaaaagacaaacatcattcgtgatatccgcgaagatgaggacgatggtcgacgattttggccaaagtccatctggtcgaagcacgtcgataattttgaagacctgtttaagcccgagaaccgggaggcggctctcaattgcaattctgagatggtcctaaacgcactggaacatgtcgaggactgtctcttctaccttgccggtctgcgcgagcagagtgttttcaacttctgcgctattccccaggccatggcaattgctacattggaactttgcttccgtaactacactatgtttgaacggaacatcaagataaccaagggtgatgcctgccagctcatgacagagagtacacaaaatctccgagttctgtgcgacgttttccggcgctatgtgcgacggatacacaagaagaacacacccaaggatcccaatttcctaaaaatcagtatcgtctgcggcaaggtctgtaccccgtcttctatatctgtaccgtcactcactggcacagattgagaaatttatcgagacaatcttcccttcgcaggatgctgatgcggccaagcgtcgggttgaaggcactctgtcggaggctgaggctgagaaggctcgacaggatgcggagacacgcaaagacgttttgtttatgatgggtcttatgggagtaatggc

SEQ ID NO: 18265 - DNA, 1293 bp, Emericella nidulans
ccctaaatacctgcaacctcccccggaggagtttatcgcaaccgacaaagcgattgacccacgcaaaatcgctgcggggaagccgcacgcgattcaaaacaaaatcagtcaggtcgccatctccaagctggagaggagcatgggttatggtcgcgaggatattgaagatgcactcagacaccctgagcctagtgctatcaaggacgcattcttcatcatcgtggagaatgagatgatgcagacaaattcacccacggacgagactatgctgagtccatcagctaccccgctaccgccttccgcaggccgtactgctgtaacacccggcgccagggcactccattcagcacaagcacttccatcacggacccggtccggctcccgccggcagtcgggccctatggcgctgcctagtgagtcggataatgcagatgtgccgcgggtcagccacgtccgaattctgccgaccagcttgccgtacgtccatgatcagctcatggagcagcgagagcgagagcgtgaacgggtgcgggaagactcaggggagcaaacccaagctgccttggatgaagaggaccctggtcgaactgctcgctcgccagaagagcaggaagcgacggctagggccctgaaaccgcattcgcggagtatcgtcgaccttgagaagctcaaattggaaccaccagaggcccgcagcgctccgcatcagcccaccaaacggtccaggagatggcaatttggtattcgctcccgtaaccagccatatgaggccatcctctatctttacagggcaataaaagcgcagggaggaatctgggagatgcagcccgccgactcgggtaagttatattcctactatactaggagaagctgactggtgaaaggaaatgccgtacccgtgtcagatggggagcgcccattacagaccaagtatccggatctgccgcccgaccactacgttcctaaagacctctggtttattcgtgcgcgcctgctgaaagagggtgttcatgcgcctggtctgtcatccagcattcacagcagccgaagcgaccttgaagagatgcgccgccggttcaacatttctggaacggctgcagcggaagacaagacaagcctcggcgaatcgctcactacttcgggcccctcctctgccacgcgagacctatccatctctcgtatctcctacggcgtgtgggtctttgtggatatccagctttaccagctggaagagaacaactatatggttgactttaagtgtgacggctatcaaaatgtaatccgctctgaggg

SEQ ID NO: 18266 - DNA, 1293 bp, Emericella nidulans; identical to SEQ ID NO: 18265

SEQ ID NO: 18267 - DNA, 1295 bp, Emericella nidulans
gctcatcggcctctgataactccgggaacccaactcccggagagattcatgacagggagaagcgcacagttgcgtctgtccggccgcagacacagcggcacccaaaccctttcgtcatcaccgagcggccagaggagaaacagctggggatctctacccgtcagttgagcgtccgcgacttcgtattgctgaagaccctcggtaccggttagtaacagacctctatatatacgtggctggaatctaatggtggtatctgtcttgcgcaggtacttttgctcgagtatggctggcgagattacgcgacgacaaaacgagaccagagaaggtctacgcgctaaagatcctaaggaaagctgacggtatggacaatcaaatgccatcccactgtcacggtcttggctaataaaccgggactctattcagtgatcaaactcaagcaagtcgagcatgttcgcaacgaacggaagaccctggcggatgtgtctggccatccattcatcacgacattaatcgcctcattttctgatagtcaaagcctatacatgctggtactctccaactctgcgtccactgtctttggtcgttgactgacatctctcgagcttgactattgtcctgggggtgagatattcagctatttgcgccgtgcgcgacgtttcaacgagaatacctcgaaattctacgcggccgaaatcaccatgacgatcgaattcctccacgatgccgagggtgttgtataccgcgacctgaaaccggagaacatcctgcttgatgctgacggtcacatcaagctcgttgattttgggttcgcaaaacaaattggcgaccgcgaaacgtacactctatgcggcactccggagtatctcgccccagaggtgatacacaatagtgggcatggccttgctgttgactggtgggctttgggaattctaatatacgaatttcttgttggtcaaccgcctttctgggatcaaaatccaatgcggatctacgaacaaattgtcgaaggtcacatacgctacccttcgaatatgtcacccgctgcacagaacatcatttccctgctgtgcaaaacgaacccagccgagcgccttggacatatttcgggcggctcagccagggtgaggacgcatccgttctttgagaatattaactgggatgaccttttctatcgtcgtattaaaggacctatcatccctcgtgtcgaccatcccgcggatacagggaactttgaagaataccctgatcctgatccgaaatctcagaccatatacactgaggacatgcgttcc

SEQ ID NO: 18268 - DNA, 1298 bp, Emericella nidulans
cggacaaagtcatgagacgagcttcataaaggggggtagcgataaactatcgcgcaactggaagggccaatgcgatagagatatagtttttttttccacataccctagcgaacagctttgcatctcccccactcgaactcatggcggattatatagcttcacggcagcgaatcggacaggtctcttcgtttcttgaaggatacgggtttcccagtatggttcgcgcggcttcttaggtcgtcgtatcacataagaattgctgagacaaggaggaattcaaaatagcgaatagcttcgacggcgggacgactccttagctggcacgatgcttcgaaacgtccataccttaggttatgacgggatttagactgtcagcccagaagagtcagcgtggcacaagcgtagccatatgcaggcggcaaactcacctagaccgagcgaatccagcctggccttcaactacgagctgagattggaatcatctggcgtcagagagaataggagttcgagactgagaatcaggagtggaccggcgccgccagctccgcggtttttgtggagaatcctttgcttcctgattttccaggcgatgatcaacttcgacctccgctgtcgtgccgctgagctagctaaagctcccttcgcaaacccaggaccttcaaccatctgtaatattggctctatcgcaatggccactcagcaaactctaccccctcttccaccccctaaatgggtcgtcgatctcaaatcaccgttaccgcgcccgtcaatttcagcgtccagcatccccgacccgccctgcttctcgcgcaaggctggtaaaggcgtgggtaccccaaagcatcccatacatatatatacatcatgtcatactaactgtatatatagcgctcggaaaaatcgaccacttcctccgccccgtccaagcccgccgaaaccgacacgctgaagctcaagaaagcttgggaaatcgccctcgcgccgtcgaagcagattcccatgaacgcgatcatgatgtacatgtccggaaacagtctgcagatcttcagcattatgatggtctttatgttgttcaagggccctatccagggcctcatcaacaccaataatgtgtttgccaagtttgattcggagacattgcggggcaagttgctaggtgtaaaggctgtgtacgtcctgatgcagttcgttctgctggggctgggggtgtggaaggttaatgctatgggtcttctgccgtatgttctcgttaccttactcctgctttgtaggaggtccttatgcgctcttctggcttg

SEQ ID NO: 18269 - DNA, 1302 bp, Emericella nidulans
cttccttcagatccacgtcagctacgtgcctttaattggctcagagcagaagacgaagccgacacaacgagcgattagcgatgtgcgaagtggtggtctcaggccagacctgatcgcctgccgttgcgagactccccttgaggagatgaccatccgcaagatcgccggtacctgtcaggtggagcgtgatcaagttgtcggtgtccacaacgtgccctctacttaccaggtgcctatccttctggaaaaccaaggttcctcaacaccatcaaggatcttcttgaaattcggaacttgcacattgagcccaagtacgtggagctcggcaagtccatgtggcacaaatggcacggtttggccatgagccaagaccatgtctttgacacggtctcgatcgtgcttgttggcaagtacacaagtctgcatgactcatatctgagtgtaacaaaagcgttggaacacgcctctatgcactgccagaagaaacttaacctcatctgggtggagtcgtctcatctggaagaggaccaccagtctataaatcctgccgagtattacaaagcttggcacgccgtttccaccgcggacggcattcttgttccggtaagtcacacatggttgatcagcatcgatgataactaacattaattagggtggttttggccagcgcggtactgaaggcatggtcaagtgtgccgaatgggcgcgtacaaagaacgtccctttcctcggaatctgcttgggtctgcaggtcgccgtcattgagtacgcccgcaacgtctgcggtatgaccaaggccgacagtgccgagttcaacgaggaatgtgagcagccggccatcgtctacatgccggaaattgacaagaccaagatgggtggcacgatgcgtcttggaaagcgccctaccatcttccaggagggcaccgagtggtcaaaattccgcaagctctacggcaacaagaaggagatctgggagcgccaccgccaccgctacgaggtcaaccccgatctcgtggagaaactcgaggcggctggcctgtcgtttattggcaaggacgagaccggcaagcggatggaggtcattgagcttaaggaccaccggtggtatgttggtgtccagttccacccggagtacctgagccgcgtcatcacgcccagcaagagtttcctgggtttcttcgcggcggctgctggttgtcttgacgagatcaccgagactttccagggagcacatgaccttagccatctacaggtgcggcccaagattgaatcaatttagcgatttcgttctgcgctttatca

SEQ ID NO: 18270 - DNA, 1335 bp, Emericella nidulans
  unsure (1)..(1335): unsure at all n locations
tttcaaagctcactctgacccccgctaattatttataatgggttatcagcccagcagcttaagatccattcttgcgggctctacnagtggcgcaattgagattggtagaactcaggatactattcaacttcttcgaattggagtgctaacatgatgtagcaatcacctatccggctgaatgtatgctttgattctctcacgctcttccccagacctaggatctaagtgatttgtagttgcgaagactcgatcgcagctcaatcgcaggctacccgactcgaagaagctcccatggccgccttttggaaaacaatggtacgccggttgtacaacattgattattggaaattctttaaaagctggaattcgtgagtccctggtgttatgcgtatagactgttgtggtttggggcgctgatacattgtcgctatactcaggattcgtcgcgttcgatacatttaagtcgatgctgcaggatcaggatggaaagatatcaggcccgagaactgtcatagctggctttggggctggattcaccgaatctctgctggctgtaactcccttcgaaagcataaagacacaattgtcagtcttaccccatatcccagttgttctgtctatgcgcctggctttcaacaatcacgagacgggtagtagctaataccgtactctttccacctcctacaggattgatgaccgtaaatccgccaacccacgtatgcgcggatttttccacggtagcggtgtgatcttccgagagcgaggtattcatggctttttccagggattcgttccgactacggctagacaggccgcgaattcagcgacgcggttttcgagctacaccatgctgaagcagatggcagagggttatgttgcacccggtgaaaagctagggactgcaagcacgtttgcccttgggggcatggcaggcttaattactgtgtatgtcaaatatagttcacaacatcatctcaaaagacatactgacaacattatctagatacgtgacgcaaccccttgacaccgtgaagactaggtttgaccaaccagctcttagatttgggcgagatgctagctaacagcgaaataggatgcaatcgcttgaggcaagcaagaactacaaaaacagcttcgtctgtgccgcgcgaattttcaaggacgaaggtatcctgaccttttggtccggggctgttccgagactcgcaaggttgattatgagcggcggcatagtattcacaatgttcgttcacgccgaccaatcctattttgtgacttagtgactaacgcgctactcataggtacgagaagtctatggacatcctcgactccata

SEQ ID NO: 18271 - DNA, 1351 bp, Emericella nidulans
tgtgttcgcatcaaacatgatcgtcgcatcaggcaaggaggcgaccgaaggggaagagcgcggaatcgccatcgccgtcatcagcttcatcaccctgcttcacgtctttctgcccaactggggtgtgcggggtatgaacgtcatcggcgtcgtcaaggtcgtcctgctgctcttcatcgtcgtcaccggctgggtggttctcagcggtcggttgaacagcatccccgatccgtacgccagcttccattgttcttttgttggctccgcaacctcgagcaacctttatgccaccgcgctgttcaaggtcctgaactcatttgctgggtatgccatcgtccgttcgcgccggactttgtaccgtatatgcataactggtagtactgactgcaatccagctggtcaaatgccgcctatgtcctcaacgagatccgcaacccggtgcgcacgctcaagattgccgccccaacgggcctgggcatctgcggtgtgctctaccttctcgcaaacgtcgcatactaagccgccgctacgccggaagagatcgccaacagcgggacaactgtcgcttcgtactttatgggtaaggtatttggaaccgctgctgagcgggccttaaggtaagtcactccccgtaccttccccttgaagaataaaatctaacgagcgatagcgtcctcatcacgatatcggcctttggcaatgtcatgacggtgacgttcgcccaagcgcgcgtcaaccaaggactcgccaaagaaggggtgattcccttcccgaccttctgggcctcgtcctggcccttcggatctccctctgctggccttttgctgcacttcatcctgtccgtcattgtgattgtcgcgatcccttttggcgacgcctacaacttcatcctcgaccttgaggggtatccatcaccgatcattaaccttctcgtcgtagcggggttgttctacctccgatacagcgagccaagactcccgcgcccgttcaaggtctactggcctgtcgcggttttcttcatggctggccaggctttccaggtggtggcgccgtttatcagactgcctgaaggcaagggggatacgagtctaccgtattggctctaccccattgttgggattgcggtgttgcttgcaggcgttgtatattgggggatttggcagctgttgttgccgtggctgggcggatacaggcttgtccctgaacatcaggttctgaaggatgggacaacagtggcagtctataagagggagaataagagtgagtaggaggacacatgactagagcttcggtgaggggttattgaaaccacgtaataccacatacatagttcaatgtattttacacctcg

SEQ ID NO: 18272 - DNA, 1356 bp, Emericella nidulans
tggattctcatagtgtatgtatagcctcatgtaaaggtttcgcgagttattatttggagaaaaaacggattaacgtcatgagccagcggcatcgccctcattggatatggttttcacaaagtcgagccaaaccacatgcccttctcccttaccgacgtcagctactcatacccatacacagaggacgaaacaatcagcacaagcgtgctagtagtcgtctcgctgatagcacccgccgtgataatcgtagctgtgtgtctacttcttacgccggggcaatcaatcgacagatctggggcagactcgcgctcgtcatctagggctctactactgcggcgcaagatctgggaatggaatgccggatggcttggacttgggctggcttgtgccgctgcgtttatggctacggaggggctgaaagatctttatggcaagccgcgtccggacatgcttgcgcggtgtgatccggatctcgagaatattgctacttatgcggtaggtggacttgggcagagactgcagggggctcccacattggttagctgggatatctgccggaataaggcggatttgttgaagaggggtgggtttgtgagctttcctagtgggcactcgtctcgtatgttcatattccttcttggtgagcatggtcttcatgggcaacgctgagggccgttacagtttcattcgccggtctaacctacttctcactttggctgtgctccaaattctcgatcaaattcccctacctcgcgcatacaccgctgacacaggacctgcgccctcggaaccgctttgcgacccgtaatcagggcgccgcgccgccatctatctgataatccttgcgtttgtgccgtggcacgtagcattctttatatcggcttctcgctggttcgattataggcaccatggcttcgatatcattttcgggtctgtaatgggcatgtcgttcgcttgggtcgcgtttaggctgtatagtccacctcttgagcgtggttccgggtggtcgtgtggagccatgagtagggaccatgcgttcttcaagggcgtaggaagcccgagcaatgtgggagatgatgggtgggcgactctgagagtcgagtccgaaatgcctgtcacggcggccatgacgcagaacggatttgacttggaaagcgggaggcggcatttggcggcatgaggtgtgccggcattgacaagtcgcatatcgaagtaaggatgtcggagaaaaatcgtcataaccgttatgtgatttatatccagcgattttccgtccgttgcatcataaaagaatagaaattccttttcaccttcatactgcagtcaacaagtccgtacttgaggagcatggatgct

SEQ ID NO: 18273 - DNA, 1366 bp, Emericella nidulans
tgcgagcgtggtgatattagctaacacctaatagaagcacctaaattcgagctggaatcctacatcgcaaattataccggtgagtgctggaactccgttcttctacagcaaactcctggctgataccttcgcaaaaaggccggactcggttcaatcgattataccttatcgggacctgctcctcgtaccttgctgttgatgccctcaaagctgcaattgcggaggccaagtctggtaaagacgttgctcggtacctgcgcgcagttcaagcacttgcggatgttgcaccaaatgagcccgaggctaccattgactcggactgggtggaaaggtcacagaaggttgtcaaagccgagacggaccgattagagcatgagcttaggggatataaaaataacttgattaaagagagtatccgggtatgcgtaatcgcttcgtcgttaactggtttcataattgacattttcatagatgggaaatgaggagctcggccagcattaccatcggatcggcgacctgacttctgcattcaaggcttattcccgtatgagagacttctgcacaacccccagtcacatcgcgtcgatgttgttcaagatcataaatgtggcgattgagcgcggggactggctgaacgtacaatccaatgtgcatcggctccggagtcagggggggaagcctgaagaacaagccaaacaccagcctaagatttcagcagccatggggctatcacagctacattccgggtcatacttagaagccgcaaacagcttcattgcgacggaccccagcttaggggacacgtttaatgaagttctgacctcgaacgacgtcgcggtatacggcggtctctgtgccctagcctccatggaccgcaacgagcttcagcgccgtgtcctggacaatagttcgttccgcaacttcctagagttggagcctcacatccgccgcgctatttcattcttttgcaactccaaattccgaccatgtctcgaaatcctcgaagcataccgagctgactacctgctcgacatccacctccagcgccatgttcaagttctatacaaccgaatccgaacaaagtctattcaacaatatcttattcccttcaaccgtgtctcactcgaatctatggccaagatcttcgttctcggaaaccccacaagccagtccagtcaaagcgactcaaagtcagcctttgtccaggaattgatcagcctcatccaagacggcacgttggacgctcgtatcgaccttgagaagcatgtcctcgtttccacccaaggcgataagcgcatagaagtgcaagaagcagtcctcgacagtctagataactacgttagggaagcacatcttcggctgctac

SEQ ID NO: 18274 - DNA, 1366 bp, Emericella nidulans
cccgctcagtctacgactctcgtggtaaccccaccgttgaggtggacgttgtcaccgagaccggtcttcaccgtgctattgttccttctggagcttctaccggtgtgtaacctattgagcatgcgtcgattgatgaaaaacaaacgttcctaacttcaattgcaggtcagcacgaggctcacgagctccgtgatggcgacaagtccaagtggctcggaaagggtacgtttgcaaccactcccacaagtttgatacgagatggggacctctaacaatggttctcaaataggtgttctaactgccgtcaagaacgttaatgagaccattggccccgccgtcattaaggagaacctcgacgtcaaggagcagtccaagattgacgagttcctcaacaagcttgacggaactcccaacaagagcaaccttggtgccaacgccatcctcggtgtcagtctggctatcgccaaggctggtgccgctgagaagggtgtccctctttacgctcacatctccgacttggctggaacaaagaagccctacgtcctccccgtccccttccagaacgtcctcaacggtggttcccacgccggtggtcgcctggctttccaggagttcatgattgttcctgagtgagtttcttgccggccgtttgcattcgttcaagtatactgacatatggaaagcactgcttcctctttctccgagggtctccgccagggtgctgaggtttaccacaagctcaaggctcttgctaagaagaagtacggccagtctgctggcaacgtcggtgacgagggcggtgttgctcccgatatccagaccgctgaagaagctctcgacctcatcaccgaagccattgagcaggccggctacaccggcaagattcacattgccatggacgttgcctccagcgagttctacaagcccgaggagaagaaatacgacctcgacttcaagaaccccgacagcgacccctccaagtggctcacatacgaacagcttgccgacctctacaagtcccttgctgccaagtaccccattgtcagtattgaggaccctttcgctgaggacgactgggaggcctggagctacttctacaagacctctgacttccagattgtcgggtatgtattgcaatccgctttttcctagtaactgatctaactagttaatagtgatgacctgactgtcaccaaccctctccgtatcaagaaggccattgagctcaagtcctgcaacgctctccttctcaaggtcaaccagattggtaccctgactgagtctattcaggccgccaaggactcctacgccgatggctggggtgtcatggtctctcaccgttccggtgagactgaggatgtcacca

SEQ ID NO: 18275 - DNA, 1389 bp, Emericella nidulans
tatccgtttaatccccatgctggctgttttgtacctcatttcacacctcgaccgcgccaatatcggtaatgcgaagattgagggactcatcgaagaccttggcatgtcgggcattcagtacaatatcgtgctttcgatcttcttcatcccatatgttcttctgggtatggcactcttgcaagatatatcatatgagatgaccgaggcaggctaacccgggcagaggttccaagcaacatgctcctcaagaacttcacccgcccctctttctatctcggcatactcatcacttgctggggaatcatcatgaccctgaccgggctagtacagaactttgcaggattgctggttgtccgcatccttctgggtgtgttcgagtacgtgcttgaagcctcaaatgcgaacaagtaaactaaaggactacagggcaggtttcttccccggtgccgtctacctctgcacaatctggtatatgcccaaagaactctcgactaggctggcgatcttctactgcgcatccgcccttagcggtgcattttcaggtcttcttgcgtatgtcaaacacaggcccctataattaaagcaagctaacatgcgtagtgccggcatcgcgcagatggacggagtcggcggccaagatggttggcgatggattttcatcctcgagggcatcgccaccgtcgtcctaggagctatgtgcttcttcctcctcatcgactcgcccagaaagtcaggcagttggctcgagcccgaggaaattcgataccttgagctgcaacatttcatcaaggagggcggacactttaaggaggagaaaaagaaggcaaattggaaggacatcaaggcgacattactgaactggcgcatgtacatgcttgcgtttattctgctggcgcagtcggcttgttcgtacggtacggccaacccttcctacctacttgccgattccatactgatagtcacctataggaacgaaattcttccttcccacaatcaccaaagccatgggcttccgcgacacaaacgcccagctcatgaccgtgcccccttacgtggccgcgcaatctccgccgtcttcttcagcaagctttctgaccggttctattggcgcatgccttttgtcgcgatcccactatgcctcgtcgtaaccggttacgccgttatggtgtctcttcacggcgaactagacacgcgcgttggcccagccttctttgctatcatcctgacgactatgggcatctacccaatccatcctgcgacgacgtcgtggacggcgaataacctggcaccctctggtagaagggcaatcgggctggcgtttaatatatgcattggaaatattggaggagttgttggaagttacatgtatatcgacagcgaggaacctta

SEQ ID NO: 18276 - DNA, 1398 bp, Emericella nidulans
tctctagcaggctcgctcttccgcattgccaacttctgtgacccagaagtggtcatggagaaactcgaagagacaggccggcataacgatctcattgactttctgtacggaaagaagatgcaccgccaggctcttgagcttctcaggaaatttggccagtctgaatcagaagaagaaacagcgccgcagcttcatggacccaagagaatggtcgcgtatctgcagcatctacccccggagcacattgaccttattcttgaattctccgagtggcccatccgggaggaccctgaccttggcatggaaatcttccttgcggatacggagaatgcggagacgctgcctaggcaaaaagtacttgattttcttcagggaattgacgataagctggctgttcgttatcttgagcatgttattggagaactgaatgacttgacgccggatttgcatcaaaggctggctgttttgtatctgaaccggttacagaaacaccaaaacagtaaggatggattcgcaacagaagatgaatacaaattctggcgggagaagctcattacgatgctaaaaacgagcgaccagtactcgccgtctaaaattctggctcgtctggatcgtgacggtaggtctacccatcgcatacgtgaatattcgctaactagctattagacccagagtttttcgaagctcgcgcaatcctattcagcaaaatgggtcagcacaggcaagcactggaaatttacgtattcaagctagaagattatgtcaaagcagaggagtacgataaatcttcactaatgtggaccacatgttaacgccaaacagatattgcaaccatctccacagaacagaagataccccgacaccgagtggaccagctgctgagtattccgcgctggccccctccgacgatgagccctccatctaccacacactgttgtcattgtacctaactccgcctcacgggtataagccacaatatgctccagctcttgatatccttgcccggcacggatctcggttacccgccaattctgcattagacttgatccctgaatctcttccggtccacgaactcgaattttacttcaaaggccgcatgcgcgcagcaaacacgattttgaatgaaagccggatcacggcaaacttgctcaaggtccaaaccatcaaaacacgcgcggagctgctagtcggcgagggaacggatggaagatcgtcaaggtcaaggcatgtcaccattaccgaagaacgggtgtgcagcgtctgtcataaaagaattggtggtagtgttataaatgtatttcctgagtaagttctgtctgccctttcatttccttggtggttgtcacgcgtccacagcaataccgttgtacatctaggctgtgcaagtcgcatgtcctc

SEQ ID NO: 18277 - DNA, 1401 bp, Emericella nidulans
catgatgttataagcgtcaatgaagataacacgaaataactgagaatatcttctggttgacgtatatggcgctcgcgaaggtttgcggtataaattatccttcactatcaccggcgcactttttactccgtagatttgaagcttcagaacgaccccacgatagactatcggagttagtgatggttatggccgagcttagtcagaagccatgtgacagatggttgcgcttctcgaacgttcgggtcgccgtagtaagcaaagtgatatcactggctgtattctgtatcctataaatacccgagcttccagcagactgacaaagttctatcttctgatattgcatcggatcgtattgtcgtatccacgaacatggcgttcttcctacgacgcccctttgccgttccgacggctctccgtcaggtgcctaaatccgcgaacaccgctcgcttcatccacaactctccgttcaagcccgctcaaccgaagcctagtttcgcttcttcctctatcttcgccaaatccaggcagactttccaaaatgcattccgtcgcccttacatgcagcaaaccgccaacgcttcgcagggcgacttgacccagaagctgatctatggcgcagctatcgtcggtggaactatcatggcaacgaacttcatcttcaaccgcgaaactcgggaagcacgcggaatgccgccgtttgaacgggcgtatctaaatgaaacctttatgcacactggacttggtgtcgggattattggtattgctgctagagctctgcacactagcggatggacttatcgcctcatggccaccaacccatggcttgttgctggtgttggactggtggctagcatgggaaccatgttcggaacttactacacttcgcctaacaagtaagttgacaagattgccaaagacttggtaaatcaatcgtctaattgtgtttacagctacattcagaagtacgctctctgggctggtttcaacgtcacccaggctgctctcctcgcacccctgatgttcatgcacccagctatcctcgcccgcgcaggtctctacactgttggcatgatgggttcgatcgctttcgttggcgccaccgctaagcaggagaagtatctgtatctgggtgctcctctccttgccggtgtaactatcgttgctctctccggatttgctcccctcgtccttcccgccaccgccacccgtgccctgatgtggtctgagaatatctggctgtatggtggtctcgctgtctttggaggcttcactctctacgacgtgcaaaaggttctgcaccacgcccgtatgtctgagcgcggactccttcagaaggatgtcgtcaatgagtctataagcctcgagctggacttcatcaacatcttcatccgtatggtgcag

SEQ ID NO: 18278 - DNA, 1410 bp, Emericella nidulans
gaggataatggacccagcaaagatttttgttggttctatcgatcagggaaccaccagcacccgatttctaatctttaatcgcgagggagatcctgtcgcatcacatcaagtcgaattcaagcagatatatcctaacccggggtaaggactgttgttcctgatgctttatgacagcgctaacggagttggcagatggcacgagcacgatccgctagagcttgtatcttctgtggaaacctgcatcgaagaagctgttaaacaattcgaaatcaacgggtacgaccaacaatctattaaggcggtgggaattaccaatcagcgagagactacagttgtttgggaccatgaaaccggggagccactttataatgcgattgtctggaccgacacccgctcgcaagctgttgttgatgagcttaaaaagaaacccggagcatcgcaacttcaacagatctgcggtctgccgctctcaacctattcctcttcctctaagctcctctggatgcttacaaatgttcccaaggtcaaagaggcatacgaaaaaggcaccttggccttcggaactgttgatgcctggttggtttaccgactgaacggcggaagcgctgccaatgttttcgtctctgattgtacgaacgcctcacgtacaatgttcatgaacctagagacactgggatacgacgacttcttgctggatttctttggcattaagggccgagtacacctgcccaaaattgttccttcttcagatgtcacagcctacggtgcactctccaacggcaggcttgcgggggttcctatcatgggatgcttgggagatcagtcctcagcccttgtagggcaaaaagggttctcccccggcatggccaagaatacatatggcacaggatgcttcctgctgtacaacgtcggggacaaaccagttatctccaagcacggccttctggcgactatagcgtataatttcgatggacgaccagtatatgcgctcgaaggaagcatagcggttggtggatctggaatcaaattccttcagaataatttagagttcttcagggagtctaaggaagttaacgacttggctttaactgtggaagacaacggcgggtgtgttttcgttaccgcgtttagcgactttacgctccgtattggatcgatgatgcaaagggaactatatgtaagctggaacttctcaaatttaccctcatatgctaatactaatacaaaatagttgggatcacccaatatacccagaagggccacattgcccgagcaacactggaagcgacctgcttccaaaccaaggcaattctgaatgccatggagaaagacagcggacaccgcctattcgagctcgctgttgatggaggaatgagcaactcggatctcgctatgcaggtacagaacgga

SEQ ID NO: 18279 - DNA, 1412 bp, Emericella nidulans
tggatcccatcgaccttaatgtgtctggagatcgcagcaagagggttgcctacttctacgactcagatgtgggaaactatgcatatgtgtcggggcatcccatgaagccgcaccgtatcaggatgacgcacagcttggtaatgaactacagtctctacaagaaaatggaaatctacgtgagttttcgtccatttgtacctcgcataggaacgtactaatgctcaaccttcgcagcgtgcaaagcccgcctccaaattcgaaatgacccaatttcacaccgatgagtacatcgacttcctttctaaagttacacccgataatatggacgcattcgcgaaagaacagagcaaatacaatgttggtgatgactgccctgtgtttgacgggcttttcgagttctgcggcatcagtgctggcggtagcatggagggtgccgcccggctcaatcgtaacaagtgtgacattgctgtgaactgggctggtggccttcaccacgctaaaaagagcgaggctagtgggttttgctatgtgaacggtatgtcaaagctgttctgcggtttcaacagtacactgataaaacgttgtagatatcgttcttggcattctggagttgctccgcttcaagcagcgggttctgtatgtcgacattgatgtccatcacggcgatggtgttgaagaagcgttctacaccacagatcgcgtgatgactgtttcattccacaagtacggcgagtacttcccaggaacaggtgaattgcgcgatattggagttggacagggcaaatactatgccgtcaactttcctctccgcgacggcatcgatgatgtctcgtacaagagcattttcgagcccgtcatcaagagcgtgatggaatggtaccgtcccgaggcagttgttctccaatgcggcggtgacagtctctcgggtgatcgcctaggatgcttcaacctcagcatgcgaggccacgcgaactgtgtcaaatatgtaaaaagcttcaatctcccgacgttaattgtcggaggcggtggctataccatgcgcaacgttgctcgaacctgggcatttgagactggtatccttgtcggtgacaacctaggatctgagctcccttataacgactattacgaggtaagtacacatcctggtgtatcggtaaatatgcttacgcaagacagtactttgcaccggattacgagctggacgtccgcccgtcaaatatggataatgccaatacgagagaatatctagacaagattcgaacacaggtcgttgagaacctaaagcgaacagcttttgccccatccgtgcagatgaccgacgttcctcgcgaacctttggtagacggtatggacgacgaagccgaggccgccctcgacgatttggatgaagatgagaacaaggacaaacgctt

SEQ ID NO: 18280 - DNA, 1412 bp, Emericella nidulans
cgcatatcaacatgctagagaagctagctgctgatggggttctttagaatgggtcgcttcttccaggcttgacttgtcccaagaggttgaatggcctcagcctgagaagccggaaaagaagaaatctggccctgcgaaagctcccagcaagaacaagcgcgttagagctggtagccgtgatgtctctgccaccccagataccctcacaggtaagaataccaatgtgggcaaggctcaacggccatcaaaggcaggcggaaaggagaatcgtggcgacgaaaccccggcggatctttccatgttggcttctgaagcagtttctgctgacggaacccccaaagcggtctccgaggatatagacatgatggatgcaagctttactgatgccaaggaaatcaaggaggaggagagagcgttgggattgatgtcgcgggaagaggagattgaaaagcttcgtaccagtggcagtatgacacaaaacccgacagaagttcaccgagtacggaatctagaccggctgcagatgggcaaatacgatattgagccatggtacttttctccataccctgcgtcgttttccgacgctgaagtggtctacatcgatgaattttgtctgagctacttcgataacaagcgcgcttttgagcgacatcgcaccaagtgcacgctcacgcatcctcctgggaatgagatctaccgggatgacaatatttccttcttcgaagtcgatggccgtcgacagcgaacatggtgccgcaacctttgtctgctcagcaaactctttcttgatcacaaaacactctactacgatgtagaccccttccttttctactgcatgtgcactcgcgacgaaactggctgtcatctggtgggttacttctcaaaagacaaagagtccggcgagggttataatctggcttgtatcctcacactaccccaataccaacggcggggttatggaagactccttatttctttcagctacgaactgagcaaacgagaaggaaaggttggctctcccgagaagccgctcagtgaccttggattgctcggttacaggcaatattggcgcgagacactcgtcgaaatcctcttggattctggacgtgagacagtgagcgaaaacgaacttgccatgttaacgtccatgaccgagaaagatgttcatgaaacattggtgacattcaaaatgcttagatacaatgcacgtgttcgtcctttaagtccaatcacctccttcacaggcaaaggcaagctaacaatattacagaaaggacaatggatcatcgtacttacggacgaagtaattgaagagcgaaacaaacgtctagagaaagaaaagattaagggctcccgcaagatcgaccctgcacggctccagtggaagcctcctgtgttcactgcgtccagtc

SEQ ID NO: 18281 - DNA, 1424 bp, Emericella nidulans
agtccgtcgccgaacttccccgccgtatccaagaagctttcgaaattgctactagcggtcgtcctggtcctgtcctcgtcgatcttcccaaggatatcaccgcaggtatcctccgtaaacccattcctatgcagagcactcttccttctcgcccgagcgccgcgactctggcggccaaggaattgagtgagaagcagcttcacagcaccatcaatcgcgtggcccgtctcgtcaacgtcgccaagaaacctgtactctacgttggtcagggtatcctcgaaaaccccgacggccccaaactcctgaaggagctggccgacaaggcttgcattcctgttactacaactttgcaaggtcttggcggctttgacgagctcgaccccaaatccctgcacatgcttggtatgcatggctctgcctatgcaaacttggctatgcaggaagccgatttgagaatcgcccttggtgctcgctttgatgatcgtgtgactggtagcatcgctaaatttgctccccaggctaagctcgctgcttcggaaaatcgtggtggtcttgtacacttcgagatcatgccgcagaatatcaacaaggttgtgcaagcaaacgaggctgttgagggtgactgtgctgagaacattcgacacctccttcctcttgttgaacctgtctccgaaagaccagagtgctttgcccaaatcaatgactggaagacccggttcccgctctctctctacgagaaacagactcctgacggccccatcaagccgcaggctttgattgagaagctcagtgatcttactgctcacatgaaagaccgcactatcattaccactggtgttggacagcaccaaatgtgggccgcccagcacttccgttggcgccgtccccgctccatgatcacttctgggggtcttggtactatgggctacggcctgccggctgctattggtgccaaagttgcccgccctgactgccttgttatcgatatcgatggcgatgcctcctttaacatgactctcactgagcttaccactgctgcccagtttaacattggcatcaaggtccttctcttgaataacgaggagcagggcatggtgacccaatggcaaaacctgttctacgaggaccgctactcccacactcaccagaagaaccctgatttcgtgcgtcttgctgaggctatgggtgttgctgccgagcgctgcaccaagccctcagaagtggagtccaagctgaagtggctgatcgagagtgatggacctgccttgctcgaggtattcaccgaccgtaagtgcccgtgttaccaatggttcctggtggtagcggcctgcacgagttcctcgttttcgacgaaggtaagcctctcagaacttgaggatatattgaagtgttgctaacgttctcgatagccaaggaccgtgaga

SEQ ID NO: 18282 - DNA, 1435 bp, Emericella nidulans
agcggtctggcttcaatgacggccagcccatcgacgacaatggcaagggtgcgcccattctaggtaagagcttcacctaccttataactctataccagtctgtagccctgctaacacggcataggcggcaccgatctgcaccgcgacaaacaaaaccctgacaacctcggggcgcaatcaaccgacaacggtattgtcccaaatctgaaatggagcttctccgactccaagaccagaccctttcccggtggatgggtgcgtgagcagctggtgcaggatttgccacaaagccgagatatctctggtgcccagcagcacctgaccaagggggccattcgcgagctacattggcatcgagtggtacgtcaaccataactgattagaaggattaatgcattaattttgctggcaggctgaatggggctttgtctacgaaggctctcttctcctctcggcggtcgacgagaacggccgctggactacggagaagctgaacactggtgacatctggtactttcccaagggtgttgcccataatgtgcaaggactagatgacgagaacgaatatctccttgtctttgatgacggcgattttgaaaaagttgggtatgttgaaagcctatcgaaatttcttcccttgtccgctcaatctaagaaaatgctcctaatctactgctgcagaacgaccttcatggttgatgactggatcaaacatactcctcgcgacgtactcgccaaaaacttcggtgtcaatgcctctgtcttcgacaccgtccccgagaagttcccctacatcctcaacggaaccatacccgaggaagcgagctctgctccccagggtacattgacaggtaacagctcgtatgtgtatcacacctacgaccactcccctgagcccgtcccgggccagggaggtacattccgcaggattgactctaggaactttccggtctcgacgactatcgctgctacgattgtcgagctagagccgagggggctccgtgagctacactggcatccgaatgtacgtttgcactctactctagctagacaacttgctgactatccaggccgaggaatggctctactttcacaaaggcacgggccgtgctaccgtgtttatcggcgactccaaggctcggaccttcgactttgctgctggcgatacagcagtcttccctgataacagcggtgcgtcagccttactcttgttccgtaccagtatccctggctaataaactgttgttgtcaggccactatattgaaaatacctctaacgatgaaccgctcgtctggttggaattctacaagagcgatcgcgtcgctgacatttctctagcgcagtggcttgcgcttacgcccgatgagaccgttgcgaatacgctaaagattgacattgaggttgtgaaacagatcaaggaggagaagcagcttc

SEQ ID NO: 18283 - DNA, 1452 bp, Emericella nidulans
tcgtggcttgaagagatcatttattgaatcaaacagttctctcgacaccctatctgaaaaaaaaagcggtattgtgtcttgaaaatggtttcattgttcaccctttgtgagttgtctctcaatatcggatggtctttgtccagtctgagtgaatgacaagggatacccatatctaatcacaatgatttgtgatgacctaccttactcttttctttcactgccttagaccacttcgttattcagcactcatcccagcaatgcttaattagggttcgcctttaactatgtcaggctctcagagtcaacctttcacgtatcatagcataaaaatatccccaagtgtttagagctccacctagaattgtcgccgaagagtagacgaataacccccagtatccttcaaagcgaaccgggtcaagtgggatactcgttgtcagtcaagattagagtccttccttgatgcgagcacgactaaaagaaatttgtcttactactaggaatctgaatggtttccggtcacaatatatagctcaaccaatcatcataaatatcaggaacgccgcaacccggtttgggataaacaagtgtcagtagtctacagaagctcgaaccgatcgaccaatcgcggagacaaggcccgatttcccaggacgcagctgtttgtctcgtattcaacaccgcgcctggcgaattttaaaaacgtagtcaagactccttctaccttcaatttccacaaacactgttactgacgaaataaacatgatccccaaaacggaactggactatgttgccatagagaaagcaaaagcccttcagggcgtttgctggggtgacgagtacgagcgcatgatatcagggatgctgtacgccgtccttgacctcttcctagggctacgctaacttcatgctattgaaggtacaaccccctgtcccctgaactcattgatggcagagaaaatgcccgccgtctcatcgccgaattcaacgcgccaccgtaccccgaccttccattctctgagaccatcgctcgcagagagagtgcgctgcgaagactctttggccatgccggcgagggaatctacattgaggccccgctctttgttgactacggatgcaatgtcagtgttgggaaggcattttatgctaatttcaagtttgttattcctcaatactcttctcctccccgactcgtgggtctaatgttgacatgcctcttttggaaacagcctcacaatccttgactgcggcctcgtcacaatcggcgaccatgttgaaattggaccgaacgtgagtatcatcactggggagcactacaccgagatcattgcccggcgtaccaacagggggaaggaatttacaggacaagtggttatcgggaacgactgctggattggtgcaaacgtgacgattctcgcgggtgtcacatcggtgagggatgcacgattggtgcag

SEQ ID NO: 18284 - DNA, 1457 bp, Emericella nidulans
ccgcagcttatcctgcatggattattctggatggcataagtcatgttgggcattaaacagtgtctcatgtgacgccagtcatccatccatgacatgtgcacgactcaagaggcgatgccagcatattataatagagagaaatttagtgtagacccagctgtcagtagtgaactaactaatgcgcctgactaacaaagactaagatcagcaggaggtcttggagtggagagtacaagaaacgaccagcttgacccgctaagcctcaacccatcatccctctgctagagcagccacttctacttctttttccacctgctttcgagacaacccgggtcgtacgaagcctcgaggggctgtgtttgcactaataagctgctttcacacggaaaagcttccaaacgtcagtccttcatcgctgtcgcttagcgatccagttcttcttccccgcactgcctcaacagagctcccctaaacgtcatcaaaggctccagcgctttcagcgtatcgagagctcatcttgagacgatgcccagctcacatcattctcaccgaccaccgacgtctgccacccctaccccggaatggagagtcccgcggcacccccgagaccatcaggtcgtccagttgcgagcccaccaccaccaccgccgccacctccgtcctataacccagccactggtaactacggcccaagtcctaattacagtccgattactggctttgcgggcgttaatacggcgacatggggtgtgaattacaacagacaaaattatatgcattcgcctcctcctccgctgccggtgagcttggattcatgtacaatgtacagttctgttgctaaaacgctatcatagccgcggccttccagtacctctggtcagccgtcaaatacccagtcaccgaccgtaacgcccgcagattaccaccagtcttcaattccgagttatggaggaggggtgtcatcgggggattatcaccagcaatgggcatcaaatcctacttatgcgcctcagcaacctgcgacctctttaccacctcccccacctcccccacctccaccgccggtcacggttgacacgtctagttatcacaatcctgcactatcagtgccagtggtatcacagactcagcaagcttggaaccagccgccaccaccatcgtatcccaatattaccccgagtcaatatcaccctctaagtactggcgccagttatccaggccctacttcagcccttccagcgcccagctttcaacaggacgtagatgtccggccagcggcgtccttttcgccggaaggacctgcgtcacagtctccaatagctgctccgcctgtgcctccgaaagctggtccttccgtgttgggatcaggtggcccttctgattgggagcatctctctcctaccgcaggtgaaattgatgatgtagctgctttcagaccaagaatagacgcaccagca

SEQ ID NO: 18285 - DNA, 1457 bp, Emericella nidulans
caattcgttctttcagagtctcactgagcttaatcggcaagcgtctgcgcgcgcacaagggccagggtcacctggttcaccaggccgcccgcagccgcgaagaagctttttcgatgagatatatgggcctgataacggcccccattcctctcgtggccctttcgacgacggtgctggaggtttgtttcctcgtgatgcggatagacctcagcccatgggatcacctctacggagtttgggagagtacgttccatcaattctttaaactgggttttatctaactgctgcagtatccttgagctattccacaccaatctcaataatctacaagctggtcagcttggagaaacggacagacctggacgaccgaatgtgcgtgtcgtgacaggagggactccaatcagggcacttcttgaggttctcatggacatcagccgtaatggggatgctgtgtactcacaggaagagctagaccgggtaatatccgaactggtagagcagaatgggaaccgcactgcggctcccccggctgctcaagacgtcatccgtgctcttcccaagaagcgggccgacgcggagatgctcggaggcgaaggaaccgagtgttcgatttgtatggacgctgtcaaagtgggcgacgaggtcaccgtgcttccttgcacacactggttccatccgcagtgtattgagttgtggttgaaccaacataactcttgtccgcactgtcgacgcggggttgatccgacggcagcggacgcgaatgcgacaaacacgatgccgtaagcgctctcgacacagcatgaaaagtcaactgatcagtagtactgatgattatttttgctcccgtacagatcaggaactgaagggactgacgcccaggctagacattcgccctcgtcctcgtccaacaatcgacctccaactgcctctgctgaagaagaagggtctggatctcgtccgcggacaaccagtcgtagcgaaagtacaagttcgaattccggaggatggactggttgggttcgcagtcggcttgggggaggtggaagttgaagtctggtttgttttctttcatttcttccttttccgcccccttctttgttgttctattttacaccccttggaaggatccatttattttgattacctagccagatagactttgggcaagtccggactgaacaggcctacgatgtgatgaacaacaggaaaggcaattttgtgtgtacagagtacctttctacgaatggatgacgacgattccctaattctgctgaacgggttctgtgactggtagaattacatataccttagtgatctccacattgagctggagatctttcttcagtgccccggataggcttgcgtcttgccagccttttgctcattcttcaagcagcgaggtgaatccccaacaagcgagcgacaaatgctgcattatagactgcgagataccccga

SEQ ID NO: 18286 - DNA, 1469 bp, Emericella nidulans
gcgcagtcgtggaaagatatatacgccccgcgaaaaggccgggccacgttcatcaagagcgacttttacgatggtggaaactttgcagatcaagccagctcgattgtcagcgagcgtgatccagcaagacacagcgcgatgcggaaatttctctccgccgctttttcagatcgatcactgcgtgagcagaaaggtcttgtcacacgtgtcattgacgactttatagaccaggttggacaacggggcaactcgaaagatggcgttgatatgacgatgtggactaatttgctcacattcgacatcattggcgagctgggtaagttcaattgttcactccttgtaaggtttcattgtcccggccaatctgaccgtattttccgcacatatactagccttcggggagtcgttccatgggctcgaaactgggagtcttcatttctggatagcggttgttctagaaagcatgggacaggcaggcctctctgactttttgaaacgcttcccaattattggccgcgtttttctaaagctcaacccacgctggttaaacaaactcatggatggcgcgatcaaacaccaaacgtatacgatcgacttggttaaacggtactctacccccattcggcgttcatcactgctgggatactcacggtcaattgtctaggcgaatccagcagaagaccaacaggaaagactttatgagctacctgttgctagagcgcaactcatcccagatatcagatatccagctagccgctcacgcctcggactttgtgtacgtatcaatcaactgccccaatttccttgccagccagagcgacgctgaaagaagaccacagcattgctgggagtgaaacaacagccacatgtctggcaactgtcatttactacgtcggtcgtaatccgcgcattctcaagacactgcaggaggaggtccgatccgcctttagaaattacgaggagatcaacggacaatccacctcctcactcaagtatttgcacgcggtatgccttgaggcattgcgtatatttcctccgctagcattggctttgccacgggtggtgccggagggcggagagatgatagacgggcattttgtgccagagaaagtatggcaatatgaagattgtttccggtttcttcaccccttttaagccggatgatgagagcgaaaaagacaactgacatttctcgtccatagacaatcgtctccacaaacccattggctgccagcatggacccggcaaattttgataccccgtgggccttttgtccggagcgctggataagactgagtgagaaggaccaactggaggctagtcaacccttctcaatgggctcacgctcatgcttgggccgagggtgagctctcctcccgcaggttacccatgaagatccgggacggttaactgacgatgatcggataggttggcctggttggaactgcggttgaccttggcaaagcttt

SEQ ID NO: 18287 - DNA, 1482 bp, Emericella nidulans
tctctgcacgcgagcttcagctgcagttggagcgcagccaggcgaaaggaatggtgttcacccgagctgtttaggcacggcgttaaaagcagccaagcgggctggtcttgccagtgagcgggtcttggtgttgggcgcaacgaacccgggcggcgcggcgacgacaactgtccagtttatgagctctgtaccctcggagcctgttgggcctgttcatatcgagcctgatgatattgcattcttggtttactcgtctggaactacggggcttcctaaaggtggagacatcctattagatacagttcctgaggctgtcctggtgatcgactactgaccgttgccatccaggtgtcatggtttcgcaccggaacgttgtcgcagctgtcgtgctccaggcggcgatagagagcccccatgtccactggaagaaggaccggacattggccgtcctcccgacgtatcacatatacggtacgagcccatctggaccaagtcgcacaagtactgatcccctaggcctgatctgcctcgtacacctgccggtctggctcggcacaacaacggtcttcatggacaagtttgacctgcagagattctgcaagctcatccgggaacactccatcgcgcacgcctatgtagccccgccaattgtcctccatctagcaaagaatccctctatcgataaacgagatctatcttcgctacgtatgctcacttccggcggagcacctctcgcgaagccctcattcgagaaacctacgaccgctggaaggttcccatccgacaggcgtacgggctctctgagacaacctccgtctcacacatccaggttagcccgtccatccgagccccctgcctcgcccagtctgaatctattatatactgactccaccagcgctgggacagttggaacacggccatcggctccaacggcgccgtcctcccgggccttgaagccaggatcgttctcaacaacgacccgtccaagaaggccgccgtcaaagaagaagaaggcgagctctggatccgcggtccgacagttttcaccggatacatgaacgaccgcgcctccacagacgcctgcttgactgcaagcaagtggttcaagaccggcgatattgggtacgaagacgcgatggggaatctgcacatcaccgaccgcgccaaggacatgatcaaatttaagggattccagattgcaccgacggagctggaggatatcctaattgagcatccggctgttcgagacgttgctgtgattggggtctggaatggggagatgcactcagaagtaccgttggcttacctggtagcaaaggagagtatggcggagcgggagcgcgagactgcggcgctgtcggttatggcgtacctgagagggaaggtggtgcattataagcacctgcgagggggcgtgatctggatcgaccagatcccaaagagcgcgtccgggaaaatactcaagagggcattgagagatcg

SEQ ID NO: 18288 - DNA, 1492 bp, Emericella nidulans
tacggcgcataccataacaatccagttcgtctcctctctgccgggatggcccgcgacttccactgactgactttaggtgaacgtagcgattcatataacatgtgtgccgatactcttatttaccggcattgcaatggtatgtttccaagcagtcttcggaatttagtatcactaacagggttctgtcatttacgtttaggcatcgaactcccctcctcttatcaagttacctgaagtcctgcaattcgaagacttacctccgaacatcggaacgatcgcagcgctcttttatgctatcttctatgtcctcttggagcctgttgctggcactctaatcgcaccactcctactcggcgctgcagccttgggtaaccgcctcatagctacttatggaatgacagtcaactactggtttggtgggattcatgtggtatcctggttgttgcagtttgtcggccacggtgccttcgaaggccgtgccccagcgctgttagacaacctggttcaagctttgctccttgcgcctctcttcgtgtggatggagatcctcttcttcttcggttatcgcccagagctgagggcacgatatgaggctagtgtgaaaaaggagatcgcagcgttcaaggaaaagagaaacaaagcgttgaaataaggtgatcgcagaggagcggacgagaaatgcctagttttgtacggccgaaatcggtccatcatttttatgccagcgttcatggactaaatattgctattcgctttggattcgctaagttccaggagcttactggaaattattcggttgctgtgtacttaaatgctccaatattgattaagaatcgttctatctgcatctgaacgagttcgtagttcgggagaagaacactatctatcgaattcgaaagggctggtagttggcagtggtgatgtaaacctggcgaaacttggcgagcttgaaaccttggacggaaccggcgaccttctcgtgcgcaaatgtactcgcgcagctggacataggaaaagacatttggtaactgccaatgtacttcaacaggccatattaccggtagtattacctatgtataaaaggaagcatgatggtcaagcagaatgccggtgacggtagttgtggtggttatagcaacgaatgactaagctacaaatatccggagatccgaaaaatacaaacacggtgaccagaaaggtaacgggattgccagctgtccggccagacaaacatcccgcccattaccacagcacgtgtctctgggagaaagtatgtagaaaggtcgatggagaacagagttaaatgtaactttctctatagaatttatagtttagcaaagacatgagttggttaaatcaattttgacccgaggaggtctttttcttggggtgtcccgtgagcgcactagggcgggttcggaggatgctggcactcggcaaaaataggcttagtctcagtcctgagaatcctcccaaccccgacgacaaagct

SEQ ID NO: 18289 - DNA, 1500 bp, Emericella nidulans
cgcgggaatcttcgataaacccaaagtccttggcgaatgcgttgaatgcgtcgaggtcgggatgggagtggtagacgtggctaatccggttgagctggattttcgcgggtccgttgcggatgggcagaggaatgcgccccggcgtgactttgagatcagtcatggtggcgtaatagctgacgctatagagttatgattgtttttgttggtggttttgttggcttaaaggaggggtgtagtgatggcggatggaagaagaggacgggatcacgccgtgtcgatgatatactcaagccgcgttagattgacagtataaactgctgtactcattgctagtcgattgtacatgttctgggaccatcttggagctggccatcgccatgtgtcggaacgatggggccgatataccagctccaatttcataatgaaaagtgccatctggctcacccctctgtacctgagaaaaaaaaaatcaaatacttctcataccaactcaagagatcccacgagatactacagatggctccctgggagagtttgatccgctttaaagccaccgacaaaaatatatactgggcccagcttagcctggaacagacgccctctgctggcctcactctgagagggttcccaaccatcgaagccttagaggcagacgagcagagcacccatgtcactgtcgaagaggcaagcatatccctgttcagcggtatgatgcccatagtaacaggaccagctcctcgctccagttccggtaactgggatcaatatcatctgcgttggtctcaactaccgcaaccacgccaacgaggcatcggtgagataaaaacaattctttttaaagtcccaaggctaatcagtccgtcctaccagctggccatcccacaatgcccgcccatgtggtacaaggcccctccggccctggccaacccggacagcgacatacccttcccagtgcaggcgcagaacgcattccctgacttcgaggttcatcctacaatctctcctctcactgggaagcataatactgacgcgagtccgttctcacttccagggcgaactgaccattgtcctgcgcaacacgatcaaatccgtgccagctgcctcgtacacgtctcacatcctcggctacactatcggcaacgatctcacagcacgcatgtttcagcgcgcctgcggtggacaatatacacacgcaaagggctacgacaatttcgcccctcttggcccgcgcctcgttcatccatccgtgttcgagccgtccaaccccgcgagccgcatcacgacgcgggtgaatggccgcgtcgtccaagacagcccctttgattttatcttcccgattgacgagctgctggcgttcctctcggaggggacgacgatccccgcggggacggccatcatgacggggacgccggcgggcgtgggctggttccaggatccgaagcgttcgttggcagatggtgacgttgtcggggtagaggttaagccgattggggtttt

SEQ ID NO: 18290 - DNA, 1520 bp, Emericella nidulans
acaaaccatatcccgaaggcccggcgagaaccccagtgctgttcagcggggtagtacccaattcttgagtgagttgcaccttttagttcctgactgcagtgaataacaggtataggctttgctcccggtgaccctactactcccggctatccatccaagcctggttgtgagaggcaggatcctcatcactttattccatctatcccgtcaattcccgtttccaatagggacgttcttcctcttctcaaggcccttaacggccatggtccaaaggcatccgacttcaatgaggcgtggcaaggcggtggtcttgcatataagggcgtggagtataacatcggaccttcgccggatgatcttgtcatcaacctgtataatgagcaggaatacgtgactactcctctatggaacgtcatcggtgttattccaggctcgcttcctgataccatcattctgggcaaccatcgcgatgcctggattgccggcggtgcgggagatccaaacagtggctcggctgtgctgaacgaggtcgttcgtagctttggtgaagctcggcgcgctggctggaagccgctccgtactattgtctttgccagctgggatggtgaagagtatgggctactaggttccacagagtgggtagaagatcatctcccctggctttccaaatccaatgttgcgtacctgaacgttgatgtcgccgcgtctggaacccggcttgcccccaacgcaagcccgcttttgaataagctcatttacgaaatcactggccttgttcagtcacccaaccagaccgttccgggacagactgtccgtgatgtctgggatggttacattggaacaatgggtagtggcagtgatttcactgcgttccaggacttcgctggcattcctagttacgatctcggatttagccccagcagccaagaccctgtctaccattaccactccaattacgacagttttgactggatgcagcgattcggcgaccctgattggctttatcatgaagcatgcgccaagatctgggctctggccgccgcgaagctagccgaaactcccgttttattctttaatgccactgactacagccttgggttggaggagtatgtggatcggatcagacctgctgcggacaatcttccgaacggcctgacttttgacttcggtcctctctacgaagcgattagcaggttgcagaagacggcaattgagttcgatgcctatgcagcggacctgacgtcccagctcacggaggagcttccatggtatctctggtggaaaaaagtccggttgttcttcctgatccatgaggtcaacactaagtacaaaaatatcgaacgccaattcctgtaccagcagggattagacggacgtagctggttcaagcacgtggtatttgcccctggtctctggactggttacgccggtgcgacataccccggtattgtggagagcctggaagctggagacgtagctaacgccgcggtaagtggctaattcagttgtctccgttccat

SEQ ID NO: 18291 - DNA, 1534 bp, Emericella nidulans
tacctgtcgctgggagtttctgtacttttgccgggtgagccagccctatgtcttacggctcctaaccaacttcgtttcgagctgaacattgaatctgaatctgggactgggctaacatgcaactagtcgctttgtggatgatgcgtttggattcgccttaacgtggaactactggttcaacgacgcggtatctacggcgtccgatttggttgcgctgcagattgtgctgcagtactggaccgaatcggacaacttccccggctgggcgttcagtctgatcttctgggctgtgctgattgggctgaacttgttcgccgtaaaagtttatggcgaggtatgcgttgtccacccgccacggatcttccctccgctaatcctgtttccctcaggttgagtactggatgagcgtgctcaaggtgatcactatcatcgttagtgggcgttgtcctctgatctagcagaatcggcaagtgttgattgcggaaataggtcttcatcgtcttaggaatcgtggtcaactgcggcggaaacgaatctggccgctatatcggcggcgagaattggcatattccagatgcgccgttcgttggagggatcggggggttcgcttctgtctttgtaacggcagcgtttgcctgtgagagtttccgttcctttttctaaaggatcgctgctaagtcgagattgttagacggcggcacagaatccatcgccatcaccgcaggagaaaccaaggacccagcgcggactattccaaaagtcgttctcaatgtcttctggcggattctcatattctagtctgtctttttcacgcactttaatcgtcttctgccgctttactgatggacaatagcatcctctcctccctgatcatcggcctcaacattccccacaactatccctcgctcaacgacggcacggttaaaacgtctcccttcacgctcgtcttcgaaatgacgggcacaaaggccgccgggagcgtcatgaacgccgtgatcctcacttctgttttgtctgccggtaaccacgcgctcttcgcgggcgtccggcttctgtacacactctctgttgctgggcacgcgccgggcttctttgggaagctgaatcggaaccatgtgccatggattgctgttctagctaccggggccgtgagtgggctatgctttggctcgagtaagatcggagctgggcagctctggacttggttgcagaagtacgctcccattccctcgcattcatgctacacaaggtatactgacaaaccactgcctcagcatcgtcggcgtctccaatcaactctcatggatctctatcggtataaccagcatcaggttccgcgccgcactgaaacagcaaaacaagacacacctgctgccgtttcgcaacttcacgtacccggtaggtccctgggtctgcgtgatcctgaatatagtcatcgtgcttgtacaggggtggagctgttttagcccgacatttgacggtgttagtttcgtgagcttttatctcgagttgccgattatgctgggcatgttta

SEQ ID NO: 18292 - DNA, 1551 bp, Emericella nidulans
ctgtctatgctctccgggtgcccgctgatggtgccctggtccctgcagttcccgatgctgctgccatggtttgtcagtctgttatatgtatagagaaacatgctaaatagtggagcagttccgagtgagcatggctgccattgaccccgatgaggcccccgagtttgatgatgacagcagccgccgtcctcgagcgactctgaggattatccgcgctcccccgggattggatgaggaagactcggacgacgattacgaagacgaggatgactccgaagatgattccgaggatgatgaggaagtcaacggaggtcccagcgataaggagaaggcccggaaactaaaggaggccgcctacctgaaggagttggaggatgctatgtcggaagacgacgagtccgacgagggtgaagagttcgacctgaaggccgccatctcaaagctcgtcaagggcaaggctccagccactgatgatgacgacgaggatgctgaatctgatgagggtttggatcttgatgagatggttgtctgcactctggaccccgaaagggtatgttgcttctcactttcctatgcgtacgcccgtactgacagtatatttgcagaactaccagcagccccttgacattactgtcgctgaaggcgagcgtgtcttcttcaaagtcactggaacccacaccatttacctcactggaaattatgtcatgcctattgacgagccccgtgatgactacgatgaagatgatgacgaggacgaggaggattatgatttgtctccggatgaggatgagctcgatatggacgagctcatgatgggtgaggacgacgagagtgatgacctcgatggcctggagaaccctaggatcacggaaatcgacaccgatgaagaggaagcacccaagctcgtcgacgctaagggcaagaagaagcgcggtgccgatgaggctgctctggaagctaaggatgacaaggcgaagtccgcggccaacggtgagagcaagaagcaacagaagaagctcaagaagaacaacggcgaggcttccgctgtcgaggccaagcccgagcagaaggagaccaagaaggttcagttcgccaagaacctcgagcagggacctacgccttccaaggagaggaagcctgatgagaagaagcctgctgataaggcagagaagacgactggcacccttggcgtcaaggaggtgaagggggtaatcattgatgacaagaagctgggtaaaggccctgccgctgcttctggcaataccgttgccatgcgctacatcggcaagctcgagaatggcaaggtttttgactgtacgtttcctggttaattgttcttttggatatttggatatggctaacattgcccctttacagccaacaagaagggcaagcccttcaccttcaaactcggcaagggtgaggtgatcaagggctgggatatcggtgttgctggcatggctgtcggtggcgagcgtcgtatcaccatcccctctcaccttgcctacggcaaaaagggtgttcccggcatccctggtaactcaaagctga

SEQ ID NO: 18293 - DNA, 1552 bp, Emericella nidulans
ggtcagggaatgaacgtttctattcaagacacgtacaatctgttatggaagttgggatccgtgatcaccggcgtcttgagtcccgagatccttgagacctacgagcttgaacggcatcctgttgcgcaggagttgatgaagatggactctaagctggtccagacttacgagcaaagcaacgcgcccattagcgaggtttgcaaagtacgcagacaattttcagggtttatgtctggagtcgaggtgacttacgggccgaatgtcctgatcgcgtcaaatgagctcggcgagaggtcacagcgtgcgaggaatgtaacaatcgggagaagattggggacggttcccgtggtcaaccaggcagatgcgtccacgatagaacttgcaagagccctgccgagcaccggtgcatggagactgcttgttttcccgggagacttacgacgaaaagagaatgttaaaaagctggatatatttacagaggcattccagagtcatgcagaatgcggcaactctagcaatgtactggcagcagtcattcagcggatggtaattgagctgattctgattcataagagcccaaggacatcggtgcgcctgctggacttgccagagctgttccatccgttcgacgaaaacctggggtgggactatggcaaggtctttattgatgaagggagcgcttacgcggaatttgggattgatgaacaaattggctgtgctgttctatgccgcccagaccagcatgttgcttgggttgggggattggatgaggtctccggtttggatgcatatttctccgcactatccacgtagacttgtaaagaagacgataaaattcttaaaatgtgtaaatatgatcatcttatttgagcagggcaaaatttgcatgagaagtattggttcggcttttgcagttgcttctcgtgcccttgtagagacctccgaagctgttggccactagacttgagtcttccggtagcagacgccgtcattcccacttaagggtactctctgcggttggcacatatggcttgagaaaaaactggacaccagtatcactgtcagacaaacccgcggtgttgccagacgttgtggcaattagcgcagagtctatatgcttagagtcacggggttaacatatcctctcagattgcgaattacctccagacctgatatgaaaagtgattgtagtagctacctgtatgcctctccatttacgaaacccagactagtggtgatgtctacaaaaaaagcctaatccggccagtggaaacgccagcagtatgcaaatcatgaagataatctgtagggcaaagagggccttccagcaaatacaaatattgactaattacggatacgacctcatcagctatcacaacaactgcagcggcctgccaacgtgaacgtggaaggaggaatctgaatatatgcgcagagacagtactcaaccccttggagtcaaggattgactaaaacaactggatgggattgcataaaaaattccctacctactaagtgacacgatataacaacatagaccaccagaggcctc

SEQ ID NO: 18294 - DNA, 1582 bp, Emericella nidulans
ggatgatttcctgggcactcagggtagcgatgatgaaagcttaggagatggtaagatgtccgtgggtttttgcggaacttggttgctgacttgggctttgtcgcttcaatcagatttcggcgacgacttcgacggtggttttccaaagacaaagatatattttcgaatacgcggaaaccatatgaggtggacttcaaagtccttagcccggaagatatcgaacgtgaacagaatttgcagatcaacgaagtctcatcaatactcgggctgcccccagagtcgtcggcaattttgttgcgatttggccgttggaatcgggaaaaactgatcgagtcgtacatggaccacccggaattaacactggaggaagcaggcctcggaaccaatttcgagtcaacaccgaagactgaagtggtaccgggtttcacatgtgatatctgttgcgaggatggtgatgatcttgagacctatgcgatgcgctgtgggcatcgattctgtgttgactgttaccgacactatctcgcgcagaagatccgggaagaaggagaggccgcgaggatacagtgtccgggtaatgactgccacatgattgtcgattcaaagtcgttaagcttactggttacggacgatctcaaggacaggttagtcttccttattacttgactgcctatatgttcgctggcatatcaactaatttcggggccagatatcaaacgttattaacgcgaacttacgttgatgacaaggagaatctgaagtggtgcccggctccaaattgcgagtatgcagtcgattgccacgtcaagcagcgtgagttacatcgcattgtacccacagtgcaatgtggttgtaagcactacttttgcttcgggtgcactctgaacgaccaccagccttccccatgtagactagtcaaaatgtggcttcaaaagtgcgaggatgattcggagacagccaactggatttcagcaaacactaaggaatgccctaagtgccattcaacaatagagaaaaacggcgggtgcaaccacatgacgtgccgcaaatgcaagcacgagttctgctggatgtgtatgggcctatggtcggagcatggcacgagctggtataattgcaataggtttgaggaaaagtcaggcgccgaggctcggactgaacaggctcgttcccgagcgtctttggagcgctacctacactactacaaccgatacgccaaccatgagcagtccgccaaactggacaaggacttgtatctgaaaacggagaagaagatgacgagtctgcagtctcagtcaggcctctcctggattgaagtgcagttcctcgatacggcgtcgcaggcactgcagcaatgccgacaaacactgaaatggacgtacgcctttgcgtactacctggcccgaaacaacctgacggagattttcgaggataaccagaaggatttggagatggcggtggagagcctcagcgagcatgtttgagaagccggtgggagaactggcgaatctcaaggtcgacatcttagacaagacagcatactgcaacaagcggcgagtcatcctgctgagcgacacagcagaga

SEQ ID NO: 18295 - DNA, 1620 bp, Emericella nidulans
ggtgctcgaccagtacacctacatcttcgccattggcaccatctttgccatgctggatgcctataacaatggagccagtacgtgacctctctgctgctgctgcttctgctgcttctgctgcttcttttgcctctgcgttggtagtattgctgttctgttactggctctgtcgctgctactgctactgctactgctgcccctgctgctgcccagcgacgtactgaccgcgcaacagacgatgtcgccaactcctgggccaccagcgtctcttcccgctcgatctcctaccgccaggccatggtcttcggcaccatcttcgagttcctcggcgccgtgaccgtggcgcccgcaccgccgacacgatcaagaacggaatcattccccccgaagcctttgagggcaacgcgggcgtccagatgctcgcctttgcgtgcgccctggccgccgcctcctcatgggtgatgtggtgcacccggcactctacgcacgtctcgtcgacttactcgctcgtctctgccatcgccggcgtcggcgtcgcaacggccggcgcctcctccgtccaatggggctggaacaagggcaacgggttgggcgccatcttcgccggcctgggcatggccccggccatctccggctgtttcggtgctatcatcttcctcctcatcaagttcgtcgtccacatgcgccgcaaccccgtcccctggtctgtctggaccgcgcccttcttcttccttatcgccggcaccgtctgctgtctctccatcgtctacaagggctcgcccaacctgggcctttccaaaaagccgcccggctgggtcgccggcgtgaccctgggcactggcggcgccgtctgcctgctctccgccttcttcttcgtcccgttcgcgcacgcccgtgtcatcaagaaggactacaccctcaagtggtggatgttcctctacggccccatcctcttcagccgtccggccccggcggacgctacctccgccgagctctccagcgtccccaactacgccgtcatgcaggacgacggcctcccgcccgactcgccagagaccctcgtcgacgagcccctcccgccagccgcccagtcggaaaagaacccctctgcttcagctaccgaggctcagctcgactataaggagctcgtcgctcgcggccaggagcgtttccacgccaaactccgacgcggccgcggccccttggcctgggccatgcgcaccctccacgacaacccgatcggctccggcgagatctacgagctgcacaacatcaagatcctgctcaagcgtattcctgccatgatcaccgttggactgctctatggtctgcactacgacattcacgccgcgcagtcgggtatccatgggacccccgagggggcccgcatggagcgagtgtatgcccatgccaccaagtatcccaatgaggtcgagcatacctactcctttgtccagatcctgacggcctgcactgcctcttttgcgcacggcgccaacgacatcgggaactccgttgggccgtgggcggttctctactctgcctggaccaccggcaaggccagtgagtcgaaagcggaggttcctgtctggcagctcgctgtgctggcgattatgatct

SEQ ID NO: 18296 - DNA, 1641 bp, Emericella nidulans
ccattatagccatcggttcggcgataaattctggcttgttgataggactgggggatgctctctcacggtcagtcttctggttatgcaaagatactttcctgacctagacctcttagatcaggagtaatactgtcgcccaagctacaattcaaagtgctaattccagcagccagcctcgatcctgatctcctatacctttgtcggtttcatagtcttcctcgtcctctccgcactaggagaagtggcttccttctcacgagagccaatcaccctacatactcaagcaaaacgattctgcggtccgtcgttgggcttcacactgggatggatgtaagtcgcttcaatttggccttgacggcctggagctcacctggggcagatactggctcaagtatatgatggtcattatcaaccaaatcactgcaggtgtcttggtactgtccttttggactaatctcgggattgggcagaaggcggcgtatattacggtttttcttgctgtgatccttagcatgaattactggagtggccgcttcctcggtcgctatgaagtccttctctcgtcctttaagattctggtagttttgggtcttatgatgctgtcacttgttatcgcactcggaggtggtccgaaccataaaaagggctttcattactggagaatgcctggtgcgtttgccaacgaggaggatagatccgcgttaggagtgtttcgtgccattttcagaacgttccctccaaccacgctatcttacctgggaaccgaacttataggaatggccgtactgcacacgcaagattccaaaaaggctgcagctcgagcaattcagcagacattctatcgcatcttggcctttaaccttgtcgttgtcacgttgttgggaatggcgatcccttacgacgaagacatactagagttgtctatctacacctccaagcgcagagctatggcttttgttgtggctgttcaggtggcccatgttactgtgctaccggatatcctgaatgcttgtatccttatatttgtggtgtcgtcggcaagcagggccctttgtatggctaccaggattattcgcgagctctcccttgaggaaaatgcacctcatttccttcgtcgcgtcaacaaacgaggagtgcccgtctacgctctaggagtaagtttcgccccggttttgtcgggatttttgaatctcttcagtacttccgggcgcctctggacttatcttgtgaaccttgtgaccatgtttagcatactgacatgggtatcgattctcgtcgttcatatatcatttgtacattttcggagagtcaatcaaatacctcctgaaggtgtcccattcaaagcccccttgggtatcttagggtcctgggtcgcccttgtgctttgtatatccatacccatcatgcgagcaatcgaactgtctgatcataatttctacagccaaggtctggatgttggggctttcgtcacatcgttcctcggaattcccctatatcttggtctagtggtcggttataaggctgtatacaaacgcaagaggcaccgtgctcgcatgaaggcagaggcctccaccacaagagtgaggagcttggacactgagacagatggtgcagggctaagccaaacgatttcaagggaaa

SEQ ID NO: 18297 - DNA, 1647 bp, Emericella nidulans
agattcttgtcaaccgtcagccgcgcaatcgccgccgtactgcgcgccgcaaggctgcaaacgctgccgctccagttggaggagtgcagaagatcacaaagggtgctaagcctgctggaaaggccgttcaaaatggacaccctgccccaactgagagcaagatcatggtcagcggcttggtaagatttctttccggtctctcatacaacaatgattaacactttgccagcctgccgatgtgaatgaggccaatatcaaggtatgttgattgagaggccttcgccttgggtttctatcgccgtgtcttttcctcgaagcctccgggccgcagcggctcccgttcgcctttcgaccctgctgtatcgctcatatattgagacgagttgcttcgtttcgcgcaggcagttactccttcctggatgatcgctttgcatcgccgtccttatggcactgcgagtgatagaagtcgagtttgcctctgtcttgcataagcgtatcttgcatcagaatctacaaaattctgctggatttcgctgcagactgcgccttggtgcgagttgaaatacaccaccacacagcccgctttcgtgcaagcgtaattcatgtctcgagtcttgggcgtcagcgagtgcatcagcatacaagcagtgaaccaggaagtcagtgcactttcctggaagccacatttcttggtccatcgatgactaatctggtcgtacggggtcgtgtgcgcttcacattcgtcctttttgggaatgagagtatttatttcgctgaagcctctcccttgctacggtagatgggcataagacgtttagtcggcgggatggttgcattggtttcgcatatcgtgtctatctgttgggaaaacttgggtgggcccaagagcggttactacatcagtttgggtgtcacaattcgagtgaaacaccctgcgtcattatgagtttggggcgatacaaatgagtctttactgacttgtgatcttcttgcgcggtcgctcacttgcttcatgactaaccatcgctgtgcgctcgctgatgctctttgctgtcgacttggagccgtttgttatttgggaccgccgcggcaccgttgacgcgttttcgttactctttgagccgacgtactaattttcttcgcttgttccaataggaatacttctcaaagtccgcaggtccggtcaagcgcgtcatgcttacctacaaccaaaacggtaccagccgtggtatcgcgtcaattgtcttcagagaacccgacacagccgcgaaggccgccaaggagcttaacggacttcttgttgatggtcggcccatgaaggttagattatttcgcattactatgttgtttcccgtttgctaacgttgttaaagattgaggttgttgtcgacgcatcccacgcccctacagttcctgcacccaagccgcttagcgatcgtgtagcgtaagttcgccgttctctatatgatgataagcagctaatatcttctagtcagagcaagccgcagcccaagccggcaaccaatgctaagaacgccaacgccgctcgcagtggacgtgggggtcgcggtcgcggtcgtggtggtaaggcacgcggcaaccgtcctaagcccaagacagccgaagaattagatgccgagatggtcg

SEQ ID NO: 18298 - DNA, 1648 bp, Emericella nidulans
agtcgattctaggcgttccaagatggctgcaaccaaccgtgctgacattgtcgttgatgagaaaattcatgacccagaccatatcgaaaagacacagcagactgtggccattgacaacattcaagtgcttgggttgagctctgaagatgcggacttctacactaactacccacctgaggcgaggaagaagctgctatggaaggtcagacctctacctcgtacgtgatagaggctgctactgacacgttgcccaggttgatatccgtttaatccccatgctggctgttttgtacctcatttcacacctcgaccgcgccaatatcggtaatgcgaagattgagggactcatcgaagaccttggcatgtcgggcattcagtacaatatcgtgctttcgatcttcttcatcccatatgttcttctgggtatggcactcttgcaagatatatcatatgagatgaccgaggcaggctaacccgggcagaggttccaagcaacatgctcctcaagaacttcacccgcccctctttctatctcggcatactcatcacttgctggggaatcatcatgaccctgaccgggctagtacagaactttgcaggattgctggttgtccgcatccttctgggtgtgttcgagtacgtgcttgaagcctcaaatgcgaacaagtaaactaaaggactacagggcaggtttcttccccggtgccgtctacctctgcacaatctggtatatgcccaaagaactctcgactaggctggcgatcttctactgcgcatccgcccttagcggtgcattttcaggtcttcttgcgtatgtcaaacacaggcccctataattaaagcaagctaacatgcgtagtgccggcatcgcgcagatggacggagtcggcggccaagatggttggcgatggattttcatcctcgagggcatcgccaccgtcgtcctaggagctatgtgcttcttcctcctcatcgactcgcccagaaagtcaggcagttggctcgagcccgaggaaattcgataccttgagctgcaacatttcatcaaggagggcggacactttaaggaggagaaaaagaaggcaaattggaaggacatcaaggcgacattactgaactggcgcatgtacatgcttgcgtttattctgctggcgcagtcggcttgttcgtacggtacggccaacccttcctacctacttgccgattccatactgatagtcacctataggaacgaaattcttccttcccacaatcaccaaagccatgggcttccgcgacacaaacgcccagctcatgaccgtgcccccttacgtggccgcgcaatctccgccgtcttcttcagcaagctttctgaccggttctattggcgcatgccttttgtcgcgatcccactatgcctcgtcgtaaccggttacgccgttatggtgtctcttcacggcgaactagacacgcgcgttggcccagccttctttgctatcatcctgacgactatgggcatctacccaatccatcctgcgacgacgtcgtggacggcgaataacctggcaccctctggtagaagggcaatcgggctggcgtttaatatatgcattggaaatattggaggagttgttggaagttacatgtatatcgacagcgaggaacctta

SEQ ID NO: 18299 - DNA, 1681 bp, Emericella nidulans
gctctccaaccttcgacaaaaaaaaagttcctgaaccctacgccggcttcaaagatttcatcatcgccctcactgtccgtgctgcacgactggctcgttgccgcttatctggacagacatattgtgaaaatgtcaaaaagaagtgctgacgcctccgaggacgccgccgccctcaaggccggtgagcgccccctcgctgatgcccctcccgatgacatgggcgagttcgaggacgaatttgaggacgaattcgagagcgaagatgagatcctggaggccggcgtggatggtcggccggatgcagagcgagaggaggaagaaaaaggtatgctgccgtcgagagcgccgtgaatcagtgctaatggttgaagccgacgcaatggaagtagaccaacagacattcatccccggtcggacgaaactggcccctggcgaggttctctcccctgatccatctacttacgacatgctccacactctcagtacgccgtggccgtgcttgtcgttcgacattgtccgcgatactttaggcgacaatcgaaagacctaccctgcgacggtgtatgcggtgactggaactcaggctgagggccgtcgggcgaaggagaacgagctgatggtcctgaagctgagcgggctgggcaagatggaaagagagaatgagacggactctgaaagcgattcagacgacgacgaagggggtgaagccattctcgagcacaagagcattccactcggctcgacggccaaccgtatccgcgcccatcaaaccccgcaatccgatatcaccaagccaccgcaaaccattactgctacaatgctggagaactcgcaagttgtcattcatgatgtcacgccgcacttgactagcttcgatgtccccggcactatgctccctccttccgcgtcgaagcctctgtctacgctccgaatgcacaaatccgaaggatacgccctcgactggtctcctcttcatcctctcggcaagctgcttacaggagacaacgacggcctgatttacgtaaccactcgcaccgaaggtggcggatgggtgacagacacccgtgcattccgtggccacgcctcctcggttgaggagcttcaatggtcgccgaatgaaaagaacgtctttgcctcagcgagcagcgacggtaccgtcaaggtttgggatgtcagatcgaagtctcgctcgccggccgtcaatgtcaaaatttccaacaccgatgtgaacgtcatgacctggtcgaagcagacttctcatctcctcgctactggcgccgacgacggacaatgggccgtctgggacttgcggcactggaagcctaacccttcttcctctgcccctattacggcatcaccggttgcctcgttcaacttccacaaggagcccatcaccagtattgaatggcacccgaccgacgacagtgtcattgctgttggatctgccgacaacacagttaccctttgggatcttgccgtcgagctggacgaggaagagagccgcgaggctggcttggcagatgttccgccgcagttgctattcgtccactacatggagtcggtcaaggaggttcactggcaggcgcaaatgccgggtacgcttatggcaacaggaagtggtggatttgggtatgtttctttcaccttactgatttcacttatgctgactgtcactgcagtg

SEQ ID NO: 18300 - DNA, 1683 bp, Emericella nidulans
cgaaccatgcatgagctttacttgtggccgtttgctaacgcggtccacgcaaaggcagccagtatcatgtgctcctaccagcgtatcaacggctcctatggatgcgagaactccaagacactcaacggactgctgaaaggtgagctcggcttccagggctatgtcatgtccgattggggtgctacccactccggtgtcgctggtatcaagagcggacaggatatggacatgcctggtggtctcggtgcgtacggccagacctttataaaccgctctttcttcggcggaaatgtgacagccgcggtgaacaacggcactctagaagaatctcgcatagatgatatgattctccgtatcatgaccccctacttctggcttggtcaggaccaggactaccctacggtcgacccgtcaactgccgactacaacactttctctccccgcaacacctggtaccaagactttaacctcactggcgagcggagccgtgatgttcgtggtaaccatgctgcgctcatccgcaaacaggcagctgaagcgactgttctgctcaagaacaagaacaacgctcttcctctgaaagcgcccaaaactctcgctgtgttcggtaacgacgcgagtgacataaccaacggaccgtacaatgatgcaacctatgagtacggaaccctcgctgccggcggtggctcgggaactggtcgcttcacctatctcgtctcgccattgacggctatcaatgcccgtgcccagaaggacaacaccagcctcgtgcagttctggctcaacaacacacaaatagcgacttccgacgtccaggctgatcttctgcgcgttcctacccctccaactgcctgccttgtttttgtcaagacctgggcagaggagggcgcagaccgcgaacacctgagactcgattataatggcaccgaggtggtcgaagccgtcgccgcagcttgcaacaacaccatagtcgtcacccactcctccggaatcaatgagcttcccttcgccaaccaccccaacgtcactgccatcctagccgcccatttccccggccaagaatccggaaattctatcgtcgatgtcctgtacggcgacgtcaacccctccggacgtcttccatacaccattgcccgcaacggcagtgattacaacgctcctcctaccactgctgtgaccactagcggccgtgaggactggcagtcctggttcgatgaaaaactcgagatcgattaccgctactttgacgcacacaacatccccgtgttgtacgagttcggtttcggtctgtcatatacgacctttaacatttccgatatctacgctacccgcgttgtcgactccatcacctcagccccggaggacagagctattcaaccgggaggtaaccccgagctctgggagactatctataacgtcactgtgtctgtcactaataccggagacgtcgagggtgccaccgtgcctcaattgtacgtcaccttccctgacagcacgcctgagggcaccccgcctaagcagctccgtggcttcgacaaggtttctctgcaacctggcgagtcgactaaggtgatatttgagctgatgcggagggacttgagctactgggacactgtgtctcagcaatggctgattcccgagggcgatttcactattcgagtcggattcagcagcaggaacctc

SEQ ID NO: 18301 - DNA, 1690 bp, Emericella nidulans
ttccgctacgttcgaaaaacgttctactccctgcgaggctacggtttcttcggcagtattcacaatgtctacctagccattcgtttatttttatactctatctttttgcggtttcccggagtccgtggacaggtcgacaaacaagtgacggctgcgattgagggcctagaatcgaaactcgtggcaaacggccccggtgttacacgatacctgactctgcccaaggaaggatggacgcacgagcaggttcgtgcggaactagctaagcttgggaacatggagcataccagatgggaggatggtcgcgttagcggtgccgtgtaccatggtggaaaggacttgctcaaaatccaggccgaggcatttgagcaattcggcgtcgcaaatcctattcaccctgatgtttttcctggtgttcggaagatggaagccgaggtggttgcgatggtaaattatccttttcagatgattgaggactgcgtccaatgacttactgggcttggcttaggtccttgcaatgtttcacggcccttctgatggcgcgggggtgacgaccagcggtggtactgaatccatcctcatggcctgtttggccgcacgtaacaaggcgcgcgctgaaagaggcgtgacggaacctgaaatgtgagctctcgaatctttctcttttctggtattctgctgactcaaataaaggatcattcctgatacagctcatgctgcgtttattaaggcgtctagttactttggtatcaagctgcatcgtgttccttgcccagcgccagaccacaaggtcgacatcgccaaggtgcgccgactgatcaactccaacaccgttctgcttgttggctctgctccaaacttcccccatggtatagttgacgacattcccgctttatcacgactggccacacattataagattcctctgcacgttgattgctgcttgggttcatttgtcattgcgcttctgaagaaagctgggtttccgtcgccttacgaggaggaaggcggcttcgattttcgccaaccaggcgtgaccagcattagcgtcgacacccacaagtatggctttgcacctaagggtaactcagtccttctgtaccgcaacaagacgtaccgcagccaccaatacttcatctaccctgactggtctggtggtgtctatgcgtccccttcggttgctgggtcacggcctggtgcgttgattgcgggatgctgggctagtctcatgagcgtaggcgaatctggctatatcaagagttgtcttgatatagttaatgcggcgaagaagtttgagtcagctatcaatgaggacgcacgcctttcgccaaatctccaagtcgttggacaacctatggtcagcgttatagccttcgagagtaaaaatgatgccgttgacatttacgacattgccgatgacctttcggcaaagggttggcatctgaacgccttgcaatctcctccggcaatgcatgtcgctttcacaattccaacagctgctgctgttgatacgctcatttcagacttggttgcggtggtcgaaaaggaactggagaaggcggaagagcggaagcgacagggcaaatcttatgtcgtcaaacgcggtgatacatctgctctctatggcgtggctggaagtatgccggataaaagcatcgtcagtcgccttgcagaaggcttcctagacacc

SEQ ID NO: 18302 - DNA, 1693 bp, Emericella nidulans
ccagaaggctgagaccttacctacaaactaatgattcacaagaatcgttggctgacacttctctgttatgttgtgcatttggtatcagccttgcgcttaccgctgtatctgcaacatcaaccaagacctagtattcaataaacaccattcgttttcagtgccacaacaaaaaaagaaactctctcagacctacacggtcaaatgaccattctagtggatcactgggcgcttaggcttttcataaataaagcccggttccccacgcttgggtactgtaactgccttcgccatcgcaattaggccaacatacaaccactttccttttagttcccttgtcttccaacataaagtagagcatgatggcgctggacgaatctgaagccactgcaaggacgaagaggtgcctcgagaggatcaagagccacgataaatcatcggccaaagttatctttatcttcggcaaggaaggcgtcgggaagtcatcactagcagagaaaatcacccaagtgacaggccttgctggtaacggagcaggtatgacaaacccttccagtgaagatacgacctttcaccttttgatgtctagctgacgtcccgccgtccggcccaggcacggaaaaatgccagataatcgacacggaaatcaacggcaccacatacttcatcgtcgatacccccggcttctacgacgaagccagccagtggcacatattccacgacatcgccgacacattcaaccagatccgcgggcatgcagtcatcgccgcaattttcttcgtcacaccaatcaatactttcacgcgccgcctcgacgagcttgaacagcggctctacgcctggcttaccgagctctgcggcgagaccttcttcccctacctaaccttcgtcacgaccttctgggaaggccagacaaaggcatacaacgagcgcctcgaggcgcgaaagcgggctgagtgggcgagctttctgcttcaaggggcgcgcacataccagtttgggaagagacacgttgatgggtttgagatggaggaggtgctgagctgggatgtcgacgcggacgagctgagtaatcatgctaggaagatggtcgtccggcactgtcgcaacgactcgtcttctgtcgagcctttgtttttgcgggagctcagttcgggtgtaagtcttgacgctacgtccgcggcgaagatcttccgcccagagtcctctacttctaatactggcacatctcaaaagcctctgactcccgacaatgcaaaacctgcgaacagcaggaggcggggaacgggcaataagactgaggcctctagtacatcgcagcctgcagaggggttttcccttgtgcagaatatagtccgcgaacttgggcgaggcgtaggagacgcactcatgagttatgttcccgtcattgctcagaacatgatcgcaggtcagcttggtggtggtggtggtggtggtctcgtgttgcggaggaacggcgggcctggggcgatggcagcacagggtttcgacataaactcgtccgtggacacggctaagttccttggtctatcatcggacttcgagagcaggaagcggttatatactgagcttggagggccgggtatcttcacgggaagtgctgctaatggtgattggctgcgagatcaattctggcgcagggctaaggtctgatcaagttgtcgtactatccatg

SEQ ID NO: 18303 - DNA, 1711 bp, Emericella nidulans
agtgccccaaacaaagaggaacatgagccagaaaatctaccgatcacctttccccaaccttgagatcgagtcggtcgacctggtctccaaggtcttctcgaacccgttcgatactcccctttcccgtcccatgtatatcgatgccctcagcggagaacagtacacgtacggggatgtcatccaacgcacgcggtccctggcgaacgggctgcaacagctattcggtctcagggaacacgatgtcgtcgctctgttcagccctaatacgatcgactatcccattgcctgccacgctatcatcgggtccctggccgttgtggcccctactagcgcggcacttacggctcaggaactacacgctcagctgaagaccagtcgggcacgattcatcatcgcccactcgtcgcttctttctactgcaagagcagcagcaaagggcacctcgattgagaaagtcatcgtcctcgacggccaatcatctgcacccggccacctcacctgccagcaattagcgagcacctatgcccccaccgcactccgccaaatccctgctcacgaagccgggtcgcgaatcgcattcatctgcttctcctcgggcacatccgggccagcgaaaggcgtgatcaccacccaccgaaatattacatcgaaccttcaacaatggcgcgcccaactcctcgactcaggctccgcagctcagcgggtcgaccgcaccgccgcgattgccttcctccccttcagtcacatttatgggctgaatttatacatgtgccagtgtctaacgtggggcacgcctgtggtgatcctcccgcgtttcgatcttgacacgtacctctcgtgcgttgagaaatacaagccgcaggagctggcgctcgtgcctccaatcgcactcatgctggtcaaggatgatcgaatccgcaattacaatctgcgcagcgtacggcggattctctccgccgccgcaccgctgacaatcgagctctcgtcggcgcttgagacccgatttaaggatatctttggaacggaggtcttctgcacgcagtcgtggggacttaccgagacctcgccaatcgcaactggaatcccgaatgatcgaatggacaagagaggtgccggcgtaggttgtattgtgccaaatatggagtttcgtttcgttgatccggagacgatgctcgacgcggacgtgggcaaggatggagccagccaacccggcgagatctggtgtcgtggaccgaatgttacaccgggatactataataacttggaggcaacgaggggtgcgttccacgtggatgacgatggagtttcgtggtttcgtacgggcgatattggcgttattgacgctgagggatatattaccatacaggatcggatcaaggagatgatcaagtacaagggcttacaggtcatcccgagcgagctggagggtaagcttgttgatcatccggatgtggtagacgtcgctgttattggagtctgggtggacgcaagggcgacagagttgccgactgcgtttgttacgctgcggcagggtattgacgatgaggggagtaggaaaggtcattgaagatattcatctctggttcaacgctagggttgcgaaccataagcggttgcgaggaggcatatatgtggtagagaatatcccaaagagtccgagcgggaaaattctgaggcgggtgttgaagcagcagttaaaggaatcagcggc

SEQ ID NO: 18304 - DNA, 1715 bp, Emericella nidulans
gcgcgcatattgctatttttgcatacggatggttcgtcaacgtgaagcgatagagatagagcggagtactgactggttcaggtatcaccaagcgaagagcgagccattgtcgccactcaatgtcctttcgtactcagtctggatctcgcgaggcgctggcctggtattgacagtcgatggaacacttatcttgttgccgatgtgcaggaatctcgtcaggtttctacggcccaagctacggtggctacctcttgatgagaatatatggtttcatcgccaggtggcgtacgcgactcttgtgtttaccattcttcatgttccagcccactatgttaagtaagtcgatctctagggggatcaggaagcaaggaaagctaacgttttacagtttctacaacattgagagaaagcagttgcgtcccgagacagcactacaaatacactatgctcagcccgcgggagtgaccggtcatgtaatgctgttctgcatgatgctcatgtacaccacggcacatcaccggattcgtcaacagtcgtttgagaccttttggtacactcatcatctcttcatcccgttcctacttgggctctacactcatgcgacgggctgttttgttcgggatagcgcagagccatactcgccgttcgcgggcgagcggttctggaaacattgcattgggtatcagggctggcgatgggagctcgtagcagggttcttctacctctgcgagcgactatggcgcgagatccgggcgctacgcgaaacggagattgtgaaggtggtccgtcatccatacggtaagtcagctgcgcgatagacaatcctcgagggttttactgacgagctagacgcaatggaaatccaattccgcaagcccggcttcaaatacaaacccggacaatggcttttcattcaagtccccgaagtctccaacactcaatggcaccccttcaccatcacttcctgcccctttgacgactacgttagcatccacgttcgccaagttggcgatttcacccgtgccctaggtgacgccctcggatgcggcccggcacaagcccgcgacctagaaggtctcgaccccatgggcatgtacgaagtcgcactgcagaacggccagcaaatgcccaagcttcgcgttgacggaccctacggtgctcctgccgaggacgtcttcgagaacgaaatcgctgtgctcatcggtaccggtatcggcgtgacgccatgggcctccatcctcaaaaatatctggcacctacgtgcctccccagacccgccccgccgtctccgccgagtcgaattcatctgggtctgcaaggataccacctcattcgagtggttccaagccctcctttcttcattggaagcccagtccgcgtccgacgccgcctatcagggggtttcggagttcttgcgaatccacatctacctcacgcagcgcctcgatcaggatacaacgactaatatctacctcaactctgttggccaagaactcgaccccctcaccgaactgaagagcaggaccaatttcggtcgtccagacttcaagcggctattcacggctatgcggaacgggctgcaagatcagtcatatatgcgcggattgcacacgcattccaggacagagattggtgtctacttctgtggtccgaatgttgccgcaaggcagattaaagcggcggcttcctctgcgtccacgaacgaggttaaattt

SEQ ID NO: 18305 - DNA, 1727 bp, Emericella nidulans
tctggttgaaatggtgggttgctgcagatgccgcggaacctggtgagcatacacagcactacgtcgggatctacttcatgctaggcggtcttgctatgatttgcttgatcataagctgttgggaggtcgttgtgacgtcagtccccaagtccggggaaaggttccatgaagcaattttggatactgttctaaggtgcgtgtttcctgtatctgtaaaggcaaacctgaccgtactaatcactctaatagtgctcctatgcgattcctctcgactacagacagtggatccatcctcaaccgattcagccaagatttgcagctcatagatatggagcttcccatcgctgcaatcaacgtcgttgccagtgagcgacacccacgccctttgatcctttcagaaagcgaggttaacaaactgacattgagcacgtagcacttttcttgtgtcttgcacaaatgatcctagtcggagttgcgtctgtgtatgcggcaatcgcatttcctgtggtgctgctatcattgtatgccatccaaaaggtgtatctgcgcacatcccgccagctccgactgctcgaaatcgaagccaaagcgccgctcctgtcccattttacagactgcttgagcggactagtcacacttcgagccttcggttggcaagacgcaatggaagagaggaacttgaacatccttgactactcccagcgccctttctattccatgtattctgcgcagagatggctaaccctcaccctggatcttgttgttgcgggcatcgccattatcctgattatccttgttgtagctttgaggggctcaatgaatgccccctatgttggaatcgccttgttcaacgtgatccttttcagtcaaaccgtcaaacttctggtccaattttggacaaacatggaaacccatatcggctctgttgtgcgagtgaaggattttaccgagaatgtcgaaagggaagatctgccgtcagagaacaatcctgttccacccttgtggcccagccagggcgcgattgaattccacaacgtctccgcttcatacgggtaggtagaattggtggtactttacgaattgtcgggctgactgcatctagatcttcggacttggtactgaaggacgtttctcttgaaatcaagccgggagagaaagttggcatctgtgggaggacaggaaggtaagttcagtataagagaggccagttcgataatcacgggctaagatggagaatagtggcaaaacttctctgatgttgagcatcttccgcatgattgaactcaatgccggtactgttattatcgacggactcgatatctcaactatcccgcggcaggagatccgagcccgcctgaacggtgtttcacaggacgccgtcttcataaagggcaccgtccgacagaatgcagatcctacaggcgcaagctcagatcgtgcaatttgggatgcccttaaaaatgtccaactcctgaccgttgtacaagagaagggtggtttaagcgcgaatatcgacgatctgcacctgtcccacgggcaaagacagcttttctgcctcgtgcgcgcgatcctccaccccagcaagatccttgttctggacgaagcgactagcaagtaagatcttccagcccttatccctgaaccccgtcctggcaaccacacatactaatgatcgtggtacagtgtcgacaacaagacagacgagacaatgcagcgtattattcgcg

SEQ ID NO: 18306 - DNA, 1753 bp, Emericella nidulans
cggccatgtccttgactactttccctgacgaggtcttgacaatgtatgactttgatcctaatgccactacagattggtacgagagcgtagatctggtcaagtttatcgctgcagacaatgagttcactgaactccctgacgcggcctttccagatgtcgactcggagcaactggacccggactcggaggagagaggaaatcagtttggcggtctagaggtcctggatgtccacggaaacctgctagaacgccttccgatagggtttaggcggctgcaaaggcttcacacactcaacctctcgaacaacaaattgactatggaggatatcgatgtgattttcgagatggcgagcctccgggacctgaagctggctaaaaatcaactgcaagggcctttctcacagaagattggtcagcttgacaaattggaagttcttgatattcacgagaataccattaccgctcttgctgagacagttgaaggcctcaagcgccttcgagttctgaatgctggccaaaaccagctaacggaattgccgttcgagatcctatgcacgcttcctctgagggagattatcgcccctaaaaacaagctacagggcgtattgattccagccactgtggacaagctggactctctgcaagagctggacgtggtcggcaatgcgctcacgagtctcggagagaagttgacgttgcccgctttaaagactctagcaatcagtatgaaccgtatcaagaatctgcctaatgtctcatcttggcaagcgcttctcaaactttcagccgaggacaacagtatatctgaatttccactgggctttaccgaacttaaaaatgttcgaaacgtcgatctgactggtaacaatatttccagattagacgaaaaaattgggttgatggacaatctctttactttccgcatagcaaacaaccctcttcgcgagcgcaaattcctcaacatgaccgtggaggatatcaagcgtgatttgagaagccgatgcgaaccggaaccacaagagaccgatgatgaggaaggatctgtcgccacacagttcactcttgctccagagacaccggctcagaactcaggctggctgctaaagcctggaggcgtactcgataggtcctatactgatatgcaagagttcgatgtggaacaactggaagctatcaacccgagcgatgtcagatatttatacttgcaacacaatagcctgcgctcttttcctgtaccagcactcagcgtgcttgcggccaatctgacagatctcgacttatcacacaacccactagatatctcttcgcttaccgctaccccagtgatgcttgctagtcttcagacgctgaatctgagtgctacgggcattaccacccttgaaccactcatgaccggtctaaaagctccctcactaacctttcttgatgtttcgtcaaataacctctctgggtctctcccctatattcgacgggcatattccaaattgacaacattccttatcgcagagaaccagctggatagcttggattttgaagccgttcagggtctacaggtgctcgatgtgggaaacaatagccttagctcccttccaccacgaatcggcttgctgcgagcagctggaaacagtgccaactggggtggcggttcggctttacggcggttcgaggttgctggtaatagctttcgtgttccccggtggcagatagtggccaaaggaaccgactctatcctagagtggctgaaagaccgtat

SEQ ID NO: 18307 - DNA, 1754 bp, Emericella nidulans
ggctctaacgggcataatcaaagtcgaacccgaccgccgtcagtggaggtggtacaacttcattttcttctggattgcagactcattgaatattgtgagtatactacactgtgtgacctatgaagcagcggagctaagagctaatattctgggccgcgtagaacacatggatgatttcgtcctctatgattgtcgatggcttgtcctggtggcaatcatggttatgcgtctggttcgggtactttcttgcggcctgctttgtctgcttgactggtcgaattggcgctgtctaccatatatcgttccccgtcgtttgtcgctcctcgttcggagtttgggggggattgtggccagtactgaaccggactgttatggctataatatggtatggtgtacaggggtatattggaggtgagaaaacatgaaacctagcatcattgtccggtgcctaattctgtattaggacagtgtataacgctgatgattcgggcgatttggccaagctatgagagcttgcccaatggtattcccgagagctctggggttgacacgaagaacttcctaagtttcttcctcttctggttgctgtctttgccggccctatggttcccggtccatcagatccgccacctatttactgtcaagtcaatatactcgcccattgccgctattgctttctttgcctgggctatctctcgtgccaacggacttggtccgattgtgcaccagtctcacacggtccatggcagcactttggcctgggccgttgtaaaagcgctcatgagttgcttggggaattttgctgctttgatcatgaacgatccagatttctctcgctttgcacggaaacccaaggatgccctttgggcgcagctgcttaccattcccattggtttcggcatcacttcgttcatcggtatcattgcgtcctcttcatctgcagtcatatttgggggagatgcaatctggaaccctcttgatctcttgggaagatttcttgagggtgctagctcggctgagcgctttggtgtcttcatcattgcgcttggatttgctctcgctcagctgggcaccaacatttccgccaactcggtctccgctggtacggacatgaccgctttgcttccgcgatacatcaccatcagacggggcagttacatttgcgctgcaattggcttagccatgtgtccggtactcaaatccttctctttccgaacgagcatgtttggctaacatatggcagtggaacctggtgtccgattctaaccaattcacaacatatctatccgcctattctatcttcctctctgccattgcaggggttatgatctgcgactactacgtcgtccgcaaaggatatttaatcgttaaagatctttacagcggagaaaaagactccgcatatcgcttcaactacggcttttcctggcaagcatatgcttcatacctttcagggcttctcatcaacattgtcggattcgcgggcgctgtaggccgcgatgttccagtgggtgcgcaatatatctacaatgtcaactacctctccggcttcattgtctccttcgtgatgtacttcatcatcacccgtctctgcccaatagccgccacaagcgatacctggaacgaagtcaataccgacctcgaattagatacagagggacatgacattgacgcggaagatatccacaccggcaaaccgattggtttcgaaacttcggagccccgtgaagattataaaggtgcaaaggctggat

SEQ ID NO: 18308 - DNA, 1827 bp, Emericella nidulans
ggcttcatcatgaagttccctaagatctacaacagtacttcgtggctttcatcgccacagttggcgggatgctctttggtttcgatatctcgtccatgtcagcaatcatcggtactgatcaatacaatgactacttcgacaacccctctggacttcgtcagggcgctatcgactcttccctcgctgctggatctgtagtcggttccgccattgcaggttatgtctccgacaagattggtcgccgcgactcaattgcgttcgcttgtatatggtggcttgtcgggactgctgtccaaaccgcgaacaacggttttgggtccttgattgcaggtcgggttttaaatggagtctgcgttggaattaccagttcacaaatacatgtctatcttgcagaaatcgccaaaaaggaaaagcgtggacagccgatcgtcagtcagcagttggccattggtaaggctttggtctaccatcaatgaatccgctcttcaattaactaaagctgctacagaatggggtattctgatcatgtactttgtcggatatggatgcagcttcattcccggtaccgcctctttccggaccgcctgaggaattcaatttgtgccctgcgtctttctcatagttggcctgccattccttccgcgatctcccagatggctcgcgaaggtcgaccgcaccgaggaagctattgcgactttggccaacatccaggccgacggcaatcgtgatgacccgcttgtcgttgccgagtgggaggagatcacgatggtgctacaggcagagcgcaacgcgctaccagggtggcgcaagttcgtctacaatgtatggctatctaggttgattatctgaatagagcgtgttaacacgatggcagggcatgtggaagcgcaccctcgctggctttacagtgcaaatgtggcagcagaactccggcgctaatgtgatgacctatgtaagatcttccttgacagtactgacatccaaaatctaacctggcgcagtatgtcgtgtacatcttcatgatggccaatttaaccggcaacatcaacctcatctcctctggtatacagtacgcgctcttcatcatcttcacgaccttcatcttcttctacatcgacaaaaccggtcgtcgtccgctcctgatctatggtgctctcattatggcactctgccattttgtcgttggcggcattctttcctctggcgagtacgtccccggcggtgttgacggcaatggaaatgtgttgatccgagtaacgggccaaagtctcacaccgttatcgcgttctcctacctcctgatcatcttctacgctctaaccctcgcccctgtctgctgggtctacgccacagaagtgtggtccctagaaacccgtgctacaggcatgggtattgctgcgattggtaattggctcttcaacttcgctctaggtctctacattccgctaggattccagaacatcacctggaagatgttcatcgttttcggtgccatgtgtgtcctcgcagctattcatttcttcttcacctaccccgagacctgtggcaagacccttgaggagatcgaggagatgtttgcgcctggaggaccgaagccttggcatacgaagcctggtggctcgaaagttgacgcgcacattgatgcggtccgcgcacacagcaagcacattaattatgacacaatggaggccaaggccggaggctgaggtgaatgaaaagggtggctgagctggatatacttggatatacgcgtgacagcaggcaagagtggaccgataacagggtcgccctaacaattatctagtcatattgttcactaactcatgtc

SEQ ID NO: 18309 - DNA, 1855 bp, Emericella nidulans
gtcctccgtgggaaatacctcacgccagcttttgggtgaaaataggagagacggcaatccgaaactgcttgcgcgatcagcttaaatttctgagagacgagagctttaggtacatggggaaccacccgctgatattcaccgagactgggataccctacgacatggatgacaaatacgcctataaaactggtgattacagcagccagatcagcgctatggatgcatgccactacgcgctagaaggaagttcctccaatggcttcactttgtgggtttatacggcaaaggtaagaagccctctggaccacggattcgtatatacaacgtccctaacagctccttcagaatgatcatgagtggggcgaccagtggaatggagaagatttgtctatatattcggtcgacgacctagagcttccgagcggcaagttcttggatcacggatccgctagccggttagaccaccaatccccttcatactcgtccagccacagccacaacagcaaccaacagataagccctaggaacttgaaagatgcgatcaagacaccttgtatatcggcacaagtatctcagctagatgaggacagattgggataccgtgctgcagaggcttaccttcgacctagccctatcgacactaatgggttagtatccgagtatgtgttcgatctgcggaactgtagcttctatatgtcacttgttgggaatagagcgatatcgggacaggataccccgacggagatcttcctcccagaatatcatttcccggaaacccataccaaagtgaatatcagctcaggaggagtggttgattgaccacgtagaactcagggatgtcggtgtccagcggctccggtgtagcaatcccgagggtgatcagagtattaagatcctgggtgtcaagcgcaaaggtgatgcattagcagcaccatcggcgaaggacgttagctaccttgagcagtgtcagacgggaggatgcatcgtgatgtaggctgcttttatgaattcgtcttagcgttcaggcacgttgtttctaataactaccactgatatctgaataatcataaacgaatacacaactgctccagaccacaattcatacagttgccttatctgatggcttatcgataagaaaaaggcggtgagaaactgcccctccgagtcggtgtgggcattgcgaccgagcgcgtggaaaattctcccagactgcggaataccgccttctttaacgatttaccaacaacgtccgtcctagtcaatagcaggagagtcaactttggccttcgcacagagcatagatcgtcggggaaggttggaacatccccttccccgtttcccgcacaatcatctacagaaacaacctacctaggagctatccggacctcagccgcattcttacgtgcactacctaaccagtccttgaactgctagccgtgctgcctgggccttgaccacaccatacggtcgacttgctctaatatcgcagcttaccccaacgaagaatcagacaacacgcactgctttccaaaaggtggatacaggcaaggttcttctccaagtggcggtgaataacgtttggtgccgcgatctccaagtgccatagtagttgactcgggtgaccaccggcgaagccatggctgcggaagagggactcgtggatgggggcatagccggtattgttcgcgcgcttgagctcatacataacccgtcgtcaacgaacgagctccgcagagaggctttacagttcgtggagtcgcagaaacaaagttcctctgctgctcgtaatgggttcatgctagcctctcgcagagagaatgatgcattggtgcgctacttcgggttgacccttctc

SEQ ID NO: 18310 - DNA, 1922 bp, Emericella nidulans
aagtcgaccgcaattttgacaagtaccaaatcccctatgatatcatttggctcgatatcgagtatctcgacgaccgaaagtacttcacttgggatcctctaaccttccctgatcccatcagtatggagaaacagcttgacgagtcggagcgcaagcttgtagtgatcattgatccacatatcaagaagcaagacaagttcgaaatatccaaagagctgaacagcaaaggtttagctaccctgaacaaggacggtaatgtctacgaaggatggtgctggccaggggcttccaactggatcgattgcttcaaccctgcagctatcaaatggtgggtcggcctcttcaagtatgataggttcaagggaacccttcctaatgtgttcatctggaacgatatgaacgagccctctgtgttcaatggtccagaaaccacgatgccgaaggacaacttgcaccacggtaattgggagcaccgtgatgttcacaatgtcaatggtataacctttgtcaacgccacataccaggctatgctggagcgcaagaaaggcgaaatccgacggcctttcatcttgacccgatcgttctacgcgggcgcccagcgcatgtccgctatgtggaccggagataaccaagccacctgggagcacttagcaatctccctaccgatggttctcaataatggaatctacggattcccgttcgctggggccgacgttgggggattctttcacaacccaagcaaggagcttctgactcggtggtatcagaccggcatctggtatccgtttttccgcgctcatgcccacattgacactcgccgtcgtgagccgtacctgatccaggagccattccggtcgatcattacgcaggctatccggctgcgctaccagcttcttcccgcctggtacactgctttccatgaagcttcggttaacggaacaccgatcgtgagaccgcaattttacgttcatccaacagatgaggcgggtttcaccattgacgaccaaatctacctcggctccaccggtattctcgcaaagccagtggtcactgagggcgccacgagtgtggacatatacatcgcggacgacgagaagtactacgactacttcgattacactgtgtaccagggagctggaaagagacattcagttccggcgcctatggaaaaggtacctgtgctaatgcaaggaggtcatattattccacgcaaagaccgaccacgtcgtagcagcggactcatgaagtacgatccttatacgctcgtggtggttctcgacaagaacggacaggcggaaggcacattgtacgttgacgatggtgagacctttgactaccagcgtgggggacacattcaccgccgcttccacttccaagactcctcactcgtttcggaggatatcgcaactcacgggcctcagacggctgcgtacctcaagaccatggccagcgtcagtgttgagaggattgtggtgattgaccctcccaaggaattgcaggataggagcacggtcactgtgattgaagatggagcaaagacatcctcttcagcacaactggagtatcatgctcaggaaggcggcaaagctccgtatgcggtagtgaagaaccccagagtgggtattagcaagacctggcggatcgaattttaagctccagcacttggctcagcacttggctagatagagcactagatggaaatatgcattttacatacaaccttgcaggctatcacaatatttgatccctttttttaaggctgcgagactagttggcgatcgatgcactaatcgggcaaagcttgagcttgttttgttgaggccccgtaggaagctgactcagctatatataaaaaaagaaagcaactgaaatccgcttgcgggagatctcagtaagctcaagaaaacttgagactcgagttg

SEQ ID NO: 18311 - DNA, 1943 bp, Emericella nidulans
ccgtctctgtcgccagtcagaagccctagctcggtccctgcagtgcccgctcatcctcgcgccctattccggcagcgaccaccgtcatttccacctcgattggttctacctccagttcagtgcagttcagtgggtggctcgctttctactacaacatcacttcccactctcaatccgcctactgaggacggagcctcgacgattgcaactctccccacgatcaccgctgggcacggatcttctccgacccctcgtccttcccattcctcaccacttccacggtcttcagtacgcgcacggctaccatcaccgcgtgcccagcatcagtcaccgactgtcacaattcacgtacctatgtcaccaccaaaaccgtctatatctcaacgacgatctgtcccgtgaccgacgcagctcgcaccatatcttttcccctcggtgatagcaatggcagtggtaatgccaatagcggctccaatttaggagactccctcagcccctccatgagcacatcgactgttctgaccacgcgtatcgtcacaatcaccgcttgtccgcaaacagtgacagaccgtcccgcacggagcacctttgtctcaaccgagacactcgtcgcgtcaactacggtggtgacggtgattcccaatgctcctgcaactgccaccgcgcttctgacaggaagttacggctctgttccgtaccccggcggttccaacgcagggccgagtcatccgcatcacccgctggcgccgagtctgccctcacctccagctctgggttggcctctggctttgcgtctatcccaggttctccctcaggaactaagcttctaaccgcacctaagcaggactccgaagtcgcatctggccccggcgcaattcgtccatctcctccagtttccggctccgcatactacccaacccactcattcagcgtgttcccgttctccttcccctaaagccccgtcctgcctgagccaagcacattggtatctgtctcggccattggatcaacaacgatgacaatttctaggaccacccccgctgctgcagagttcactggatctgcgtctgtctttaagcaagatcttctgctgactattggagctgatccgctccttttttctttcttttcttttagggtctgagatcaatcagttagattattatccatttgaggctcaaatcaccttagagtggatgagtttccgcggagctgggttgaatgttactgttaatgagaattaattaagagaaatatttatgtgcaaattggaagttatgctgtacataatgcgcacaacatatatattgtatcttaattccagcatttcctgccctacaactctggcataaactatatcgctttcagcatattcaggctatgattctaagtaataaagttatacagcgcggtatttacactactatacacatcgatttctgctccatcccggtctgcgatgttaactcagagcaaatacctgttgcgtaaattacaaaaaaagacatgcaatacaccttcggcctatgtgatttaggcctagaccgtgtatgtaggtgtatatcacctctaaagtcgccttgttgtaaattaatactcatgaatttgaccaagtttaactttcgaaaagacgatataataagcggctatacatgcgaatttacctctatactcacagcatggttctcacgtaagttttgtcatagagttgtaaagtattgtaaatagtctgatggaagctcatccgcatatgattcattgtgtaaaccttgcatgtgataatcccttcctgcatatcacctatcattcatatggcttgttgtagcgtaccgaacaatccatactgatggccttcctattgatctcgtattcaacatcgactcagcccttcagaacccagaacccagagctctgggcagacagatttcttaaaccaatgcaca

SEQ ID NO: 18312 - DNA, 2006 bp, Emericella nidulans
gaagacaaggagcgggctatggaaccttgcctatagtaccattgctaaggtgcttggcacgcagtcgtacggtcgtgtgaatacgggaaaagctgcgatatgagactcgcttcccgcataaattgcagtctggctgcaaacctcagtctggactcaacccatccccgactcgttcagccttgaccttttgattgaagcctgacttatcacggcctccgtaactgggactggagagacccaactcttgcttgctacgattatggccgacacactaccaaacgaggccaagggaccagatcccgacgagacagtcaaggaatgcgtgccaggccgcattgagctccagtcgatgagccaagaagaggacaagagaattctacgtcggatagacctctagtatgttgtctgcagctgtggtccgacttcgcttatccctgataccagcctactccccattatggccgtgtcatacatgttccagttcctcgacaaatccgctatgagctttacagccattctggggctggaggaggatctccatctcgaaggaacggattattcctgggcgagtagcatttactatttcggctacctagctgcatcctaccctgcagccattctgctgcttcggttccccgttggcaagatgatttctatatcaatgtacgtttataccatggaatgccacctcttcagtcgctggcataatgctcattgtatcagcattatctggggcaccgttctgatgttgatggcattggccttcaatgacaaaggcctcattcgcgttcggttcttcctaggcgcaaccgaagctgccattgcccctggccttagtatcgtggtttcgatgtggtacaagaggtccgagcagccctttcgccacggcatttggttccaaggaatcaccatcgccggaatttttggtgggctcgtggcatatggaattggtcacatccgaagcattgctccctggaaggcagtatccctttatatctgcgcagttgccaaatagcccctggctaaccttttgactaggcggtgtttttgatatttggcgccgtcaccattgcctgggcatttgttctcttctggtggcttccggacaccccgatgaacgcgcggttcctcagcgcagacgaccgacgcaaggctgtttcaagggttagcgagaacatgacagggatcaaaaacgataaattcaagctggaccaatttgttgaggctcttcttgacatcaaatgctgggctttagttcttattcaaattacgggttcgattcccaatggcggcgtttccaacgtaagtccttcgggcctgcagcaagccctaacccttacacttttactcaccagaaccttgctaataaatgccaccagttcggctccattataatcgaaggcttcggcttcagcacgctgaatactctgcttgttcagattatagtctacgttttccaaggtgtgctcgtccatctttccaccgcaggctgttcatggttcgaaaacagccggacatactggatggtctggaacagcgcgctctctattgggggtgccgcaatggcccgacagattacacccgataatgtctgggcccggtttatggggtactgtcttgcaaatgcttatagcgtcaacttcccgttgacgcttgccatgtcaacggggaatatcggcgggtttacgaagaagactacggtaaatgcattggtatgaatatgcatctcatatcagcctctcaattaaagcctctgttgacatgatttatcagatcttcatcggctactgcgccggcaatgttgccggcccacatctctttttcgatgacgaagccccgtcgtatccttcaggatttctagcaatgcttatctgcttcggtgtatcgttagctcttgcccttggcttgagatattatcttatctgggagaatcggcgtcgggaccgtcttggacctgtagacaccgacgacgccctggaggagctggatgctgccgttcttgacaa

SEQ ID NO: 18313 - DNA, 2061 bp, Emericella nidulans
ctatcccaaagcgctgtctccctcaccattgactcccaaccttcgctcctccaatttcgcactcctaaaatcaccgccgattcgttgcacaatgtgtacctcgacttcgccgactcctccttcgagggagacctgcatattgtctacgggaactgcgaaaaggcctcagtagacagtcatcaccattctctcggcactctctccatcaaacgagacgccctccctgagcgcatcgtctggatcacacccccggacgctcctcaccttcactgcctgcacgcctttcataacgagctcggtttgattgcccgctccgagcccatccccgttacctcgcccattgtccgccgcgagccactcgcaattgccgactacgccgacgcaatgggtccctggttcgatggcgtcgcatacctctccgcgcaagaaccgggcaagaccgccgtcgccagtgcaaagaactcttccattgccatcatcggcggtgggatgtctggtcttatgacctcactgctgctgtcttcagtgggcatgcacaactggcatatccacgaatcttcgcaccgcatcggcggcaggatccgcacgcagtacctgaacaacacgcgcccggatcagtaccagtaccaggaaatgggccctatgcggttcccagtgagtattacgtaccctgagcagaatgagaccctcgagatccaggaccataagatggtcttccagctgggcagggtcctcacggagatgaacgagaagacgcaccccgagctccgggtagactttatccccttcatccagaacagcgataacgtccccgcagctgctggggggaaccgcctctccaacggccggatcccgaccgctggcgaagtggcagcggacccggacctcgtctatacagccgccgggccgaacgaaacggtcgtggaagaggccgaggccgcatacagtgcatacatcgaccacgacggcctatccgcaaagaaagtggcagacaacattttccgcgcgcacaagacggccgtcgagcacgggctcttccactggtctgaggccggctacctccgctacgcactcgggtactccgacaatgtgaccgactacgtcgccggctcagggccggagagtcccatgtggggagatatttatgacaatgtctacttctctgcgaccgagttccgcacgattgacaagggccttgagtctttcccgcgcgcattctatccgcacgttgcgaacaagacgacctttggacgcaagatcacaggcctaaagtacaaccagacaacgtccaagatcgcggtcacctggcgcgacgatccactagctcaggttccaagcagtgaagattatgactacgcggtcgttgcggcgccatttagcaaggttcgattgtgggatctcccgcgttactcgagcctgctttcccgcgcaatcaatgagatgaactacagtccgagctgcaaactgtctctgctatatgagacgcgtttctgggagcaccagtcacagaatcctatcttcgggggttgcgggagtgtcgacgttccgggtgtcgggtcggtctgctatccgagtttcaacatgaacggcactgggcctggtgttgttctggcctcttacatctccggcacacaggcgaggtctgttggagctctgagcgatgaggattacgtgggaatcgtacagcgagcgatggtggaattccatggcccggttgccgcagaacagtttaccggtatgactggcgcccattagttttaccccctcgttcgaacaccgtccaagtattaacaggcttcgcaggtatatacaaccgtcaatgctgggagatggatgagcatcaggccggtgcatgggcgagtccgctcgtagggcaacaagatctgtttctgccggcttactacaacaccgagtttaagacaatcttcatcggcgagcatacgagctacacgcatgcctggatcttttctgcactggactctgccgttagaggaacgacgcagttacttttagatcttgggcttgtggacgaggcgaagcaaatcgtggaagagtggatgg

SEQ ID NO: 18314 - DNA, 2061 bp, Emericella nidulans
ccggggtgaggagactaaatattattagctatctgtgacgaaagagcagtcacttgaaaacaggacgtaccaggagcatcattagtaataaagcagtggctgttgctacgataattgagatgtcatctgaatgtcgtgctcgaagcgtcagggacctttcagagcccctcagagcctcaggcctcagggccgacttgaaccctctccacttggtgatccgaagttcgcagatgttaaaaagctccataatggggaccagaaccaaaagaacgctagtctctacatggctatttggcgccttatagcctgaggttataaatcatcacgtgtcgacgaccggtacagaaatctgatggaagatgaaacaacaaatgtatattattggtacgaactagacatctccttgcgctgcttaaaagaaaatttcaaccgggcaggcttctttgatacccgtagccctttgtgatctgtctcttaacccatctccccgcattgctgcacctcgcctccgacatgtcatcgaccaaccccgcggtagtcgtcctgcccgccctgtgatgcagcagaggttctccagcagttccttcatccaggaccaccaacaatacaaagctcccgcttccatcaccccgacgattggtaacgtactcgaaaatgctactgagtcgagtccctcgcccattccacgcgtcgcgaatcccatctctccggatcccaaaaaagtgaccgacagtggtatcgtacacagtatcttccaacaccgggatgcggttcttcctcaaggaacaccaaagcttgttgcgacaatattctacaagtcctccgatccagtacatccacatcttcaccccgactcgtctccccatgctcgccttggggataaacttcctcaccccatggtacctgtcggttcggcgccaaccattgacatcgagaaactcccacgcgagcccccggcacccgaacccgaacctttggatcacttgtacggcccgtatgtgtcacagctgtgcttgaccaatttccttcaaatcatcgaatccctccccatcccgcaccagcgtatgaacacctcacaccgatgcctcgatacgcaggagcagccccgcgtcgtcgaagtcacctttgctcctcctccgaaccccgactaccttagttttgaagacctccgcaagcatgaaagcatatggcgattcgagagagagtggaatgtggaggttgtcctgcagagggagagcgccttccgcaggcataagcgcttggttgttttcgatatggacagcactctaatccagaacgaggtgattgatgagatagccaagtttattggtgttgagaaggaagtttctgttagtatttcacagtgcgctgcttgttagtctctggatctgatgtttgcgacaggaaatcacggaacgggccatgaacggcgaactcgacttctccgcttccctgaaggagcgcgtcagcttgttaaagggagtccctgcggacgtctttgaaaagctaaagtctgttctcaccatctctcccggagcaaaggaattgtgcagagctctcaagaagctgggctgtaaactagtggtcgcaagtggagggttccaaccacttgcggaatggttggctggtgaattgggcattgatcacgcctttgccaatcatgtaagtctcgagcttttcttggcttgccgcatccgaataatgtggacgttatcgagcactttttgactgaccaatccgctccacagctcgaggttgatcccgcgtcgcaaacactgacaggcaaacttgtccctacgtacccaatcattgacgcaagtcagaagcgctctttgcttcaatctattgccgctgacgacggaattgatattgcacaaactgttgccgtcggcgacggggcaaatgacctacttatgcttcacgctgctgggctcggtgttgcatggcgcgctaagagcaaggtgcaacttgaagctcccacgcgcattaacggtgaaagcctagtcgatattctctaccttcttggttttaacgatgaggatatccaggagctcactgcct

SEQ ID NO: 18315 - DNA, 2069 bp, Emericella nidulans
ttatctatcatggaaggctacccagtaatatataacacttcaaacatgtctggagccaataacagctcgcatagctcagttggtagagcgcgtgactagtataatgtgaatttcagaaatctgaaattcgtcgttgaaatcacgaggtcagcggttcaagtccgcttgtgagcattactttttttatgaaacaattcatctgcataaactcggtacataatatcgtcattctatctatgcattctatgcattcgaaactcttatctgcgtaactccatggatacctcggtaagtctcacattcagtgtcttggcaaaaaaggaatatatcaagcttctgtagttccgccaccgtcaaactctcttccaagtatattccggaaaatcactttccaggtatcacctctcccctaattttgggcttgcacagtagctgattgattttttttttttggcaggtagccggcttctttgttacaagtgtgaagccttgccatggctgatacacaggcttccagtctttatagctcattgcctgtatcaaccctcgtaggcctggtgattgcaatgggacttctctcctgggctcggcccagtgggcgagtatccttttttagctccaaagagaacaatcttttcctcaataggagaaatgggaaagccggttccaagcagaccacgctaaaagaactctgccgcactgctacaccagcaagatgtgatctcaaccctctcttgttcaacggccacttgcagacctgctggactacagtgaaatttgatgacgttcctgtttactacaagcgccggatattcgaggccgacagcgaggcgtataaggggcatttcgccgttgactttgtcgttgagccttacaaagcacccaaatccgctgaagcaactgatgcggagagaaagtataccctgccatcaggtctcccagaacggacggcaatgttctccgaggatgaattcgccgctctaccttcagaagactcaaagcctatgctcgtggttctgcatggtttaagcggtggttcccatgagctttatttacgccatgtagtccacccgctgattgcggatcgaggctgggaggcttgcgttatcaactctagaggttgtgcccagacaaagatctctacggggattctttacaacgctcgcgctacttgggatgttcggcaagttgtgaagtggttaagagcagctttccctaaccgacctctcttcggaattggcttctctctcggtgcaaacattcttacgaacgtaagtcttttgctttcacaattggaaaacaggctaatatattcagtatttgggcgaggaaggagacgcctgccagctgaaagcagctgttctctgcgcaaatccccgccctcttgaagtcagttcggtggccatgcaaagtaactttatgggcctcaaagtctatagcaaggtaatgggcgccaacatgaagaagctttttgaacagtacgtggcttgctgatggattttccaaaccctttgggatttactgacatagtacaggcatgccgacgaagtcgtgaaaaaccctagggtagatgcagaagcaatcaggaatatcacgtatctgcacgaattcgacaggtatggaccggcttgcctatctcttgcgcttttcatgctaacgttcaatttaggaccctgcagtgcgccctatgggggtatcctacggaaggcgcatactaccgtgacgcatcctctatcgactctttactctctatccgaattcctttctttgtggtgcaggccgaagatgatccagtaaggtcgaagacgatgccagaatcccatatactgacgggatacagatcgttaccgtaaaagcggttcctttccaggagatcgctcaaacaccttatggtgtcatgatgaccacctcatggggtggacacctcggttggtttgagtttggcggcgggagatggtttgtgaaaccagtgagtgctatcattctgttgcagcggtgtatgctaatttgacaggtgaccaaattcctgaatatgatggctcatgagattgatctcgatacccctcctg

SEQ ID NO: 18316 - DNA, 2077 bp, Emericella nidulans
accatcttcgcgtcattgatgcttggtacaaccaagtaagtagaggcgtattgtttaactgttatatattttacatcaatctaaccaatctcgcagctgattgacgaagtcaaactcctccttggtagtcccgacgaggatagcaagggtaggtttgacgctgctacggctctctatatatcaacaagaccgttaactgtggcatagatcgctcttcattccaaagcgcgctgcagtttgaggatttggataatttcgagcaacatttgaagtctcgttctcatgatatacgcgatatcatatcccgccttgtcgccaagtctccaacaagcccacccgaggtctcggacctgcagtctcagcttgcacgcaaattggctgaagagaaggcaactcttgcggagcttagcaaagtgctatctgaaaagcagcagttagaagaaagcctggaagaggctcccttacgatatatggttgccgagaagaaacttgatcgcgcaagaagcttgactgtcgccaaattagagaagcaatatatactaggcgcccagcgaccaggtggtgatagtgcgtctgggaatcgggatgagccgccagctacaaacggcgccactcccacgggtgaacgtacgccagatactgacgagacatacagcaagttggcagccatttctgaaaagcagaaggagcagatacagaaattggaagctgagaatgcaaatctactaagccaaatcacggagataagtattaaagtgagaaaccttatatcgcctaccctgctgcgatgctaatatatgcgatctagaaaacgaaacttacggacgatgattatgcacatacagatctgtttaagcagttgagatcgcaatacgacgatgtggtgaaacgactaaacaacctagaggcggttaacgtacagcttcgcgaggaggcagcgaaattacggtccgaaagaactgcataccgcaatcaagtcgacgaagaaacacagattgttctggccgagaaagaagcacaattaatgaaaactgaaaacgatttggcacggatacgcaacacacgagatgagcttcttgctgaccagcaaatgcggaaatcggcacaagagcaggagaggacggcgtcgctcaaaatccaggagctagcagacgctgggaaagctcaaatagctgcgttagaatctgaggttgagcggttgcggatagaagttggacgagagaaggcgaaacaagcagacaccaacgacatcacgatcgaggatttgcgcgtcaaatacggcaatctggaacgccagtactcgatgctcaatgcggaactggcatccatgcagactgcttgcaagaaatattcttcactggcatctcaaagagttgccgagttcagcgctatggaagaaaaggtgtctcgcctagcggcggagaagtcaaaggcagaccaaaaatacttcagcgcaatgaaaagcaaggaagcccgagacatggaagttcggacgttgcggatgcagaattccaagagttctgatatagtttcgcaactgaaggaatcggaagcagccacgcggtctttactcgccaacatggaaaagcaggtcagcgagaccaaggaagcattaaacagcatggtaaacaagtaccacgtatcccagcaacaaatcacagagaataatatcgtgatggagggtttgcgagggcagatcgcagagctgaaggcactatcggtttccaaggattcatccctggcgtcgacgtctagtgcttgtcgtcgagctgaaacacaggttgaagggctcaaagcatcacttgcagatacgaagaaaagtctggagaactggaagaacaagagccttgggaactcgtcttccgagtatgagatgctgagggtaagcacaccgtacttgctaattggaagctcacatttgctaactttccgacagactttagctctttgcaccgtttgtcgtcgaaacttcaagaacacagcaatcaagacatgcggacacgtcttttgcagagaatgcgtggaagagcgactaacgtcccgatctcggaagtgcccaaattgcaaccgctccttt

SEQ ID NO: 18317 - DNA, 2117 bp, Emericella nidulans
cccctcagttctactctcaagcggcccctgtccaaggacagccgtctgggggacgacgtggacgtgtgagttactcctagttgtttgagttacaaatcggaagctaacgtgcattttcagcgctgaactttgcctataccttctaatccgtcttggcttctaacagtgtataaagttttttaccattttttctcatctgctgtgatacagagtaggatggatatatgtcggaattctcccatcgcacctagatcgacgctggatcgtctatggggaaggggactgcagaagcgaaggaaaagtgttgcggttgtttgattcgggcatagtggtgcatttgacgcgggtcctgaggtctccaggctctgcaaaatttccatcatagcctgttggatataaaaccatctctattgtttagtactattactactttcatgatcatgattatgattgacgaacgtgctcccggaatatggtccagtctgttaccttcacgaaacattgctagccctaaatgctgttcacggggacacctaaatcacctcttgtggccatagacgagtcattcatcaaggctgtcacctccaactttaaccttctgcgctgacgggttcattgtatatccacttttacttaatactatcgcaacacctaggtagcgctgcacgtgacacccagatgcggcactccgtgttcaaggaacgacaacatattagagaccaattcatcaagaatcgccagacgtacagccaggattgataaatttatatccctaaatctaacctgaattgctcgctgctgttctcttttctacacccatccctgtgggaaagtgctgaattcatcgcgccgtgattatgccagccaacggcgatatcgctcgcggtatgcttcgcacctaggcctcccgcatctcgatccatcgttattactataaacctgtacttacccataatatatactaatgttgttgaacaatacagcgtcgccggctacgtcgggctccggaggtttcatcgaagcgtcgggatacaagttttccgagaaggataccaagccgggaaagatcaagctgaagaagccggggaagctagggaagaagaagggtgagaatcagtctggcgcgacctgttaaccattaatcaactgacaccggatgtgtcgcagataaagaaccaccaaactctcccgattcatcgccgattctgccagagatcgatgagaagacgatgtctgttttcccgacaggaaagccgcgcgaggaagaccatctcgagactgtggtttgcaagacgtgcaagaggccggttctcaagcagaacgctgcagaacatatccggggatgtataagggcgaagcaggagaaggcgcggaagagaaaggagcttcgcgacgcgacgaatagggccaaagctggagaaaaggagggtgatgatgagggcgcaggcgttgacaagggtggagatggcgatgattcaatgaaggcgcagaagagtgcaaagaagagtgctgtcaagggtatggcggatgatggaacgaaaaaaggtaagaagcgcaaggcggaaggcgaagaagacaataaggataaagaaccgaagaagaaaaagaagaaggaggagcagaagccgaagactgcaaagccgaagggtcctgttgatgttgagaagcagtgtggtgttccgttaccgaatggtgctcagtgtgcaaggtcgttgacctgcaagagtcactctatgggtgcgaagcgtgcagtgcctgggcgttctttgccgtatgatatgctgctccaggcgtatcagaagaagaatcaggctcgccagcagagtatgttccttcttagctgggtttggttgactctactaatatggttcacttcgcagaggcggccattgatgcaaatgcgccacttcaagatgacctggaaaacaacggccctgtagattcggatgaagaaaaagatgcagttatggctgcgatatctcgttctcaaccacagcccttggtcacccacaccctgatatccacaaagaagaagtaccagtttgtgcggatcaaggaaatgctctcgcatgcgctgggtggtgcccgcggcggagggctcttttcgaccggtgacc

SEQ ID NO: 18318 - DNA, 2144 bp, Emericella nidulans
ggtgcagttttgatgatccctaaggcggttccattcgatcaagtcgttgcggggagaataccggaaggctgggatcctgctcgctatggaatccctgaagaaattgtacagcaagtggacgtgactacgctgtatgcgctttgctgtgtctcggaagcattcctatctgctggaatcaaggacccatacgaaatttaccaatacattcacgtctcggaattggccaactgcctgggctccgggggtggcccgatgaaagttatccagaacatgtaccgcgaccgtttcttagaccgtcaaataagaggcgacatcattctagagcactttgtaaatacaatgggcgcttgggtgaatatgcttcttctctcagctaccggtccgctcaagacgccggtaggcgcatgcgctacagcaatcgagtccctcgatatagggtgtgaggctatacaaaacggaagatgcaaggtagcagttgttgggggctgtgatgactacggtgaggagctagccttcgaattcgcaaacatcaaagcaacggccaatagcacggaggaactatccaagggacgaaccccagctgatatttctcgtccaaccgccagctccaggagtgggtttgccgagtcagcaggttgtggtgtacagattctgatgagtgcggcacttgctatagaaatggggttgccaatttacggggtcgttgcatatacccatatggcgagtgatcaaattggccgatctattccggctccaggaaagggcatcctgacggcggctcgtgagaacggtcaagccaaggaatcacctctgcttgatctgaactttaggcgcgctgtgttcgatgcagaggttgcattgatcaacaaatcacaccccaaacaggcgacgaccttaaagcccgaccattcagaaacaagcaatgctgctagcctccgaatccgtgacgcccagaatcggtgggcaaacaatatccgcctttcagatccatcaatttcccccatccgagctagcttggcgacctggggtcttaccgtcgacgatatcaaggtcgtatccatgcacggaacgtcgaccaaagccaacgaagtcaatgaaggaaatgtcatcaacacgcagatgagacatcttggccgccaaatgggaaacccgctactggctgtctgccaaaaatcattgacaggacatccaaaagccggtgctggtgcctggcaacttaatgggtgcctccagatgatgcaagaaaatatcgtccctgggaatcgaaacgcagataacattgacaagcagctacgagagttcgagcacatagtctaccccatggaatcattaagagtgcccgaaatcaaagccaccctactcacatcgttcgggttcggccagaagggcgccatcaatatcatggtctcgccgcgctatctgtttgcctcgctctccaattctgattatgaagactaccgttcccgtaccacgaaacgacaacgctcagcaactcccacattcgtctccaggattatgaagaataatctagtgcaggtgaaaacccggccgccatggaatgaccctgaagcgatgcagaactttttccttgatcccaacagtcgtgtcgttgacggccaaataacgcgtgcacctaggacggcttacaaacaccaagatatctctgtcccacaatctgcagcagtatcggtgaatgaagcgcttcatgccatgctggcaacaactgaccattcgtcaccagcagcctcagcctcagttggcgtggacgtggaagaaatctccagtatcaacgtcgacaatcccatattcatcagccgcaacttcactctgctagagcgtgactactgtctcagcgcaccggatccccgcgcctcttttgctgggcgctgggttgccaaagaggcagcgttcaagagcctgcaaacgacctccactggagcggggactgcgatggaccagattgagattctcgaagtgggtggcatacctaaagttgttgtacgtaccttagtccctccttctcccatgctacggttataagaggctgacgagtcagctccatggtcatgcccacgaagttgccttcgcgcagggaatcactaacattcaaatcacgattagccactgtaacaacacggcgattg

SEQ ID NO: 18319 - DNA, 2172 bp, Emericella nidulans
taacgatcactatctgaatatactccatatgctaacttatggcactttgaaggtatcgacttgtccaatacccttgcgaaactagacagcaccgcttccgatatagttgccgaacaacgagacgcactggtacaaaggaaggatcttgcgcaaaagaccaaggatttccggaagctcgacgatgcttccaagttggcggaatacaagggtcttttgaaaggttaataccccacgtgtcgaccgtagcgatttctcgcattgaccttgttggacagcctatcaaggattcatcgacctcttaacaaaccaggggaagtcttcttcgtctgcgttcctccagttatactcgtccttgtccgaggcaccagatccgtatcctcttctcgaagcctcaatcgactcgctcgtcgtcgccgaagaaacggttcctaaattgacttctgaacgtgatcagctgcagagctcagtggaccgccttacttcacagttggaagacacggaacgacggcttgaagaagagcgagctgcaaggaagaagttggaggataaccaagacgcaaagatcaaagagattgaaacatcatggtcggcagttctgaccgagaagacgaacaattggacatctaaggaaaagagcttggaggagaaggtagagaaccaggaacgtttgattaaagagctcaaggcgagctatgaggtctcgcagcgcctaggccaaactgatgaaagcggcaaccacccccagggaggcgcaaccgctgccgaactggagttggtgtccagcgaattggaaaagactagcctgaggttggcagagatggagggacggaatgagcagttgaggcttgagctggctcaagctgtttctcattccaaggaggagcggacaacgtctatcgacgacgatcctggatatctccgcctccagtctgagaattcttcgctgttacgaaaactcgatgctgcgcgatttgaccgagagtctgaacggcacacttgggaggccaaacttttgcagtctgagaggcagttctccaaagtcaacgctgaaaaggaagagctgaagacaaggctggagaaggtggcggattacgaagacatccgtcgcgagctggagatgatcaaggtataccccatttgtactcttggaagtcgaaacctaatcgtcggtagtctattgaattctcagctggtgacgacgaggaggccggtgatctcaatgatggtaccaatggcactgtagacaaggctaaagagggcggtaaaaatggctccctggaacagctactgttagcgagaaacaagaagctcaccgatgagcttactgttctgcgggtatcgcaccgtgatctacaaggccagcttgagactctccgcgaggatctttctaccactaaagaggaattggagaaatcgcaaaacctctctaccactctagagaatgatcttctccgcctgcaacaggaggcggcgaatgccttcccatcctcggcgatgtcagtggccggcacatatgtttcaaaatacccccattcttcacgaagaggcgtatcaccaacatcatcaatcatctccggcttcgatcaatcggccgcatctaacaatacgatggacgccatccgcgctggggaagcggttggtggaggatccggtcttttgcccatgatacaagcgcagcgcgaccggtttaagaagaagaacactgaactggaagaagaactatccaagctctatagcacagtcaaatctctcagacaagaagtcgcatctctgcaaaaggacaatctcaacctttacgagaaaacgaggtatgtttcaacatacagccggggccagggggcatcatcttcggcgttcgcctacgcgaacaggcccagtgcgtcttctatccatacatccgccgatactccctcaggtttgtctatcgatcgctatcagtccgcgtacgaagctcaaatatccccgttcgctgccttccgggggcgcgaatccactcgcgcatacaaacggatgagcctgccggaacgggtagtattctcgctgacacgcatcatccttgcaaaccgtactagccggaacctctttgcagggtactgcttcgccctacacattcttctattcatcatgttgtatatgatgagtacaatggagattgaaagtcatagcgcagca

SEQ ID NO: 18320 - DNA, 2201 bp, Emericella nidulans
gggttttggagggaattcttcctgctgccgcctgatcgggcccaactgaatgccatcctggaagctcttagtccagatgagacactcagccttcaggtccgtatggcttttgatgatggacgtatgaattgctaacaatctcagtcacaaactcagcagctctttgctcgtggaatccgggaggctgcctccggatccagcccggtgaactcttatgctctgcaggtatgtgaccctacatgaaagatgtcgtccggtttctaaggcagacgcagaccttgacggtcttcttagcctgtattcttaaaaagaagtacaccaaccctagctccgacatcattactgttctggcaggtctcgacaaagttgaccaggtcatatccaatttcgttgccgtcttggacagcatcatccgcagcggtacgaacagtgagcatttgtcgttcctttgcaacattgactataagctaatactcccgcagatgatattcgattcatggccattaggacagctattgctatgacgagtggagcctataagacgagcctagtatcgtactttacacatcgggatctattcccttcaattatgaaagttggtagtccatttacaccgatgacatcttccaacagtgtgcaaatgctgacaaaactacttcaagcttgtgcatgagtcggagtcaccgatgcaagtcttcgagcctttcttactactgggactgcttgccaactacaacaaatttgagttccagaacccatatcaactgcggctcgatgattttgtaaatgaaacaagcatccaaaagatcattaaaggcgtgggtctctcatgtggtgctttaaggaacggctatgtggcggtacaggacgatttccctgagggctggaccctgatgggaacattgatgtattttggactgggtgtgctggcaccaggcagaaaagagaagcctactcctccttcgccggaggaggcaaaagagatgtttgcggctttgtatgttaaatccttgcaccactacatcgtatctttgctaatgagattagacccgcgcaacaagcagccatcttgctagcaacctatgacttcaccaacgcgaataagctttttggctaccatctaatcaattccccttctgataaagacactgaggagtcacccttctcaagcttcctctccctgacctcctatctcttgcatcacgcctatcgctccacgcgcgttaggcactacgcagagcttagcctttttgttcttcgaattctctcagaggactcaacttcgtgcaagttgctctgtagcgaagaaagcaagcgaaaagtccgtctctgtcgccaaaggcagccctatcttccccttgtggcaggagacagagtgctcgcgacagttatcttcgacattacaatcgatgccatttcgcacaatcttcgacgtcgtctcgatgtccaaatatacaggtatgaggatcctcatcgtaaatcttgcatctctaacctgggtttacagccacacaattgccatccttctccgggttctcacctacctttccatgaacaggattcgcctctcctaccactggtccgagctctggcgcactctgctctccctcatgcgcttcctaacaacatacgtctccgatctaaccacaagcccacatatatcaaccctaacaacatcattagtcgaccttatcgcattctgcgtctcttcaggtgacaccttcctccccgacccagcctcctacgacgacctcttctacaaactcgtcgaaacgggtcccattatcgccaaatttcgcgatgtttacaatctcaagcccacctcgtcctccaacaccccttcgtccctttctaaatccgccgatgcaaacaaggatatccacgttgcggccgtcgaaacactcatctccgtttccacacatttctatacgctcttgttcaatccaggcacgaccagcgctgatgcagacaaagccgccactaaggccaacggtgatcaaagtcagaacccaacaccgattccggcggctcaaaaaaagaatatgagtccgcgtgaggtccaccgtattattaaacaggggtatgatacgttgagtattcagcctcctgaaggcttgagcgcgtggacaagataccgcgagacggattggaagccggacttgaagcgggcggcacggtgcgcggtggatgatgctacgcag

SEQ ID NO: 18321 - DNA, 2207 bp, Emericella nidulans
ccgttcgccttctaatgaaaagttccggagctgcgccgttcgccgcgcgtcgaacatttcgatggagaaatcctccggcgctatccccgctagatggttcgcatttcagggtcggcttctggcccgccagctggaagactcggcgcgaagggatcgacgcatgagtcgcctgcccccttccagcgttgcacgatcattgtcccggcctcgacctggctattttcgatcccagtcgtctaacgatgcccagagacctgaaggagggctcgcgagacaaccaacccagagagctcgtcccgaaccagaagaacctcgattccgtcctcaatcagaacaccctcggctaagcgctgtatcccatctcgcaagtgagaaaaactattcaggtgacgaggatgagacaccgaagaacgaatcccattccccagcggttgataacgaatgtttcaaattcgatgcggtgcgagctgaatcaccagaagaggacgttcagattcaagcttctacggaagcgccacgccgattctatgctgcgtctcctacgggtgttgcaccccctggcctgagcaaggcttcttcaaccgactctgtttcttcccggttaaatatcaatcgcggcctagcccccccggcttcgcctatgcttcggccgtcgagcagtcctcgcctccaaccagaaagctcggacgatgactacagctccaacgctggctcaactttttcgacttcgcgcaaactgtcttccgccagcgcgatgtccatgccgcattctcctatgccttcaacggcccgttcacatcctcgatcaccatccataagctcgggggcctcgaattccagccatggtcctcgaccatccttcaatttctcacgacctatgagcagatccagcacgagtctttctgcacctattggacttgggatgtcagaacaatcgtctgccgacacccagggcgtgatgaaccgcagtaataagcctggccccattgttgtgccagggccttcggacatgcccactacgcccagtgatgagccttcatcagcagtctcgtcgtacatatatactaagtacacccttccgcgcggacgcggagtgccgagggattcagtcgttttctctggcctgcagacgccccattttgaatggcaggaacctctgtttgagagtcctgagcagcgaccgaagactgctgagccgcgggaatctgccagaacaccttccccctcatcaactcgtcaagaatcgccagctccgcaaaaagcaagatcggtatatgaggctccggcgtcggatgataaactcctgacgccggtggtttccagatcatcagctaatactacaccattacctgataagtctgaacctgagaatgtctcccctcgagcacggagttccgaagtgcctagaaatgatgatgtctcggaaacgacgtcttctgcagactctgcatctacactacgtccgcagaccgcaaagacggctgttccttctgctgcgataacggcggaggagcacgttgcaaaaggcattcagctccacgaaaagggctcattaaacgagtccacttatcatctacgagttgcggcaaagcaagaccaccctgttgcaatgctgctctatgccctagcctgtcgacatggctggggcatgcggccgaatcagcaggagggtgtgcgttggttgcgcaaggccatggactctgtcggcctagaactatctgccgaatccgacccgaacgtgtcagccaaatcgaaggaactgcagaagcaataccgcgcccaattcgctttgagcgtttacgagctcggtgtaagccatctgaatggttggggagtcgaacaagacaaagccctcgccttgcgttgttttgaaaccgccggccgatggggagacgttgatgcactcgccgaagcaggttactgttatgctgaaggaattggctgcaaaaaggacatgaagaaggcggccaagttctaccgcgaggccgaagctaagggaatgagcatggttggcaacagctggtaagttcgatgccaaggctttgcgttgtcatctgatactgactgaacgcaggatctataaagaaaagtacatgtcagatgatgggtcagatacgcggtcccgaggccggggccgccatgcacacactcccgacaaaaagggacgcagcaaatcacgaacgcgcagtcttttccaccgcaaaaag

SEQ ID NO: 18322 - DNA, 2222 bp, Emericella nidulans
cgtgcaattcgacaagatcacggcccgtgtatcaaggctttgttacggccttgatcctgagcatgtcgatgctgctgctatcactcagaaggtcatctctggtgtctaccaaggtgtcaccacggtggaacttgacaacctggtatggccaccgacgacccattgcactgttctatgctaatatcattcttcgaaggctgctgagactgcggcgtacatgaccgtcactcatccagactatgctatcctcgccgctcgtatcgcggtttcaaacctccacaagcaaactaagaaacaattctccctcgtcatctcagatctctaccactacgtcaacccaaagaataaaaagcccgcacccatgatatcaaaagaaacatacgagattgttatgaaacatgcagaagagcttaactctgccattgtgtacgaccgcgacttcaactacaacttcttcggcttcaagactcttgaaaggtcatatctcctgcgacttgatggaaagattgccgaacgccctcagcatttgctgatgcgtgtcgctgttggaatccacggcaacgatattgagcgggctatcgagacctacaatctcatgtcccagaaatacttcacacatgcgtctccgactctgttcaatgcaggcaccccccaacctcagctggcctcttgcttcttggtcgatatgaaggaggacagcattgacggtatctacgacactctgaaaacatgtgccatgatttccaagactgctggtggcattggattaaatgttcaccgcattcgtgccactggctcttacattgccggtaccaatggatcttccaacggtatcgttcctatgctccgtgtgttcaataacaccgctaggtacgtcgaccagggaggaaacaagcgtccgggtgcctttgccatctacttggagccttggcacgctgatgtctttgagttcctggaccttcgcaagaaccacggaaaggaggaagtgcgagctcgtgacctattttatgctctctggactccagatctgtttatgaagcgagttgaggcgaatggtgactggactctcttctgtcccaacgaggctcccggtctggccgatgtatatggagacgagttcgacgctctctatgaacagtacgagaaggaaggccgcggtcgccgaactatcaaggctcagaaactctggtacgccatcctggaggcccagactgagaccggaaacccgttcatgctgtacaaggatgcctgcaacaagaaaagcaaccagaagaacctgggaaccatccgcagctctaacctttgcactgaaatcattgagtacaccgctcctgatgaggtagctgtttgcaacttggcctcccttgccctccctaccttcgtcgatgcttctcgcggtgaatacgactttggcaaactgcatgaagttgtgcaggtcttggttcgtaacttgaacaagatcatcgacatcaactactaccctgtacccgaggccaagaaaagcaacttccgccaccgcccgattgctcttggtgtcaacggtttggctgatgcattcctcgccttgcgtctgcctttcgattcggctgaagccaaacagttgaacattcagatctttgagactatttaccacgctgcactgacggcttcttcgaatcttgctaaggaggacggaccatatgagagctacgaaggctctcctgtttcccaaggtatcctgcagtacgacatgtgggagcgtactcctactgatctgtgggattgggatgccctcaaggccaagattgcccagactggtgttcgcaacagtctactggttgcccctatgcctactgccagtaccagtcaaatcttgggcttcaacgagtgctttgagccttacacttcgaatatctactctcgccgtgttcttgcgggtgagttccaggtcgtcaatccttggctgcttaaggatcttgtcgaccttggtctttggtccgacaacatgaagaaccgcattattgcagagggcggttccgtgcagaacatccccaacattcccgatgacatcaaggctctttacaagacggtgtgggagatttctcagcgacgaatcctggaaatggctgcggaccgtggcgcctacattgatcagtctcagtctctcaacattcatcttaaggaacccactatgggcaagatcaccagtatgcactttgccgggtggaagatgggcttgaaaa

SEQ ID NO: 18323 - DNA, 2224 bp, Emericella nidulans
ggcgaacagctcctgtatcaggacttgcccgccctctgctgtttgtggcatgttgatatgagtcttgtagaaaagtcaatgaacacgggagggactcttttatccgtcaatcagcccggctgtggaaagaccctgcaatgagaagggcaacctcggggcaaagcttgtccggggatcctatcccatgtctgagggcgcagataatggtcatctgccaagttgccatgtcataccgaccaggcagtcacggctgtcgatctcccttccgatatccccgagacccagtcttgatcctggcttcccccgcccaatacatggcatactgcgggggtaaactataccaattgcggcatacaagcatcctgggtccaagcaggccagagcttaacggggtggtccgacatataaagatgaaaaggattgttctgtaggtaggccgagctcgttgccttgttccctacggctacctaccggcagatcaacagacaaccctaacaatgctctctcactccaaacacgagacttttgaggggctcgtcctcagggacgtaatcccagacggccgcaaaccctggtatcgtgattggacccttctgaaactcaataccctgcttctttgcgccctccttactcagatcgcctccggctacgacagcagcatgctcaacggcatgcagtcgctcccgcagtgggtgagctactttggccagccgacgggcacgcgtctgggcgccatgacatttggaccgacaggcggcacactgatctcggttttgatctcatcacagctatgcgagcgatttggtagacggtatccgatctgcggcggatcaatcgtcataatcatcggcgggatccttcaagccgcagcggtgaactacggcatgttcgtcctcagtagattcgttgtcggctttggactgggaatagtggctactgctgcgcccccgttgcttactgaagtggcctacccaacgcaccgcgggaaactcgtctccttctacctggttacttggccacttggttcgctgatcgccgcctgggtgacatacgggaccttcaagatggaagggtcggactggagctggcggatccccagcgcactgcaatgcttcttctcgcttgtccaggcagtcctagctctcctcgcgccggaatcaccccgttggctcatctaccaaggccggcgcgaggaggccctcgccatcctgacagagtaccacggtcacggggacgctgactcccgcctcgttcgtttcgaaatggccgagatcacggcgacgctcgaaatggaaaaggtccagcgcctatcccggtggacggaatggctctctaccaggggcaaccgccatcgcctcttcctggcttgctatattcctgctatgcttcagtggtcgggtaatgcgctgacatcctactacctggccaaggtgttagtgactattgatattaccgatccaaaaacgcagctcatcattaacgcctgtctctccgtttggggcttcctcactgctgcggtgttcgcgacactagtcgatcgcgccggacgacgccgcttgttcctgtccggcatggggagtatgggcatagcgtacatcatctggacgatctgctctgcactgaatgagaaacacaatttcgaggataaagggtatgccggcggtgtgctggctatgatcttcgtcttcagcgctgcgtaccacatgtgctcgcctgttgcgccaacgtacataatggaagtcgtccccttttcgctgagatccaaagcggctatgatgtaccagctgacggggaatcttgcgggtctatataacagctttgcaaatccggttgccatggacgcgattagctggagatactatatagtttggtgtgtggtcatcggcgtcaacttcaccctaatatttctgtttttccctgagacgaaaggcaagggccttgaggaggttgcggagatctttgatggacccgacgcactggcaggcaagaacgccatgagggagatggggttggatgttaatgccgacaaggctgttgctgttggggagagaaagcatgttgaggaggcttagatctgagactggcaaagtgcaatgtcatactatagtcgacatggaagccgaatatggcagcaatgtacctccgaggctcttaaaagcgatattgccgcctcttggtgttttggtttatagcttgattcttgtgcaagatagacgagtgtacg

SEQ ID NO: 18324 - DNA, 2271 bp, Emericella nidulans
  unsure (1)..(2271): unsure at all n locations
cctcaaattgatgctagacaaccaccgttcgcgctgcgttattgagtgcggcttaggaactcttactcgtcccgtccaggaataccttcgacagtattctcttacgaaccccgntggtgtacattgcgcgagatatggatcgcattcaaaagttgctaggatttgatgatcaggcggcaaagctactttgtgaaggcgatccgctacaccggacttgctcaaattttgagtactataacgcggaggatcgctcgagtttcgctcagctcgacgaagaaacgcaagatcgacgttcagtcgtctattctttcaaactcaaggaggcgaaggaggatttcacacgtttcgttcgcttcgtcacgggtacagacgtcggccattctagctatgactcgcctttcgtgctgctcgaaactccacccgagctacggtcgtacacctatgcgatctttgtccgttcctccgacatgatcgataacagagtcagattatcagaactcgagtccggtggggatgctattgagctgtgtgtcgatcgctggggcccaaatatggcgatgactgtgagcaagcaggtttctatcctcaggagaaatacgcacgctccgataattctgtcaatcgacacccgctcgcttgggattactggtggcgatcaatacccgataaagggcagtaatgtgtacgctcagattgtggaacactgcctacggcttgccgtcgagtatctggtggtcgacctggatcaagatcaggcgctaatcaatgaaaccatccgtaataggggcatgacaaaaatcatcggtcagcgtatttttgaaccgtcctctggtgttagttgggataatgaagaatgcctatcggcttatctcaatgctgctggactggggtgtcagttggttcgcattctgcgtgtagcaacggagcgcgaagacaatgcagccattgccaaattcactaataggattgaattgttaccgggtgaccacccaccggttatagccttcaacctcggtagccttggccgcacctctcaggtattcaactctattctcacctctgtgtcgcattctgcaatcgatcgtctttctcacaacgagagagatccgcaaatcatggcccgtgacgctgttcaagctcttttccagagttatgtcctggatcctctgcagttctatatcctgggcggcagcgtagcttacagtctatcgcctgcgatgtataacgccgctttccgccattgcggtatgaatcatacttatagtattccggaaaagccaacattggcagcattagacgaactgggtcgagatccgaatttcggtggcgccagtattgttcaaccttggagggtgcaagtcttccagaagctcgcggcaaagagccgccatgccgaagccataggtgcaataaatacaatcatgccacttcggggtcactcggatggaactatgttccctctacaagaacaagctagccgccgccatctggctggtccagtgctgggatggtatggcgagaatacggattgggttggtattatgacctgcatcaaccgcaacctctccccgcgtaatgctatcagcccgtccaggaccaccggcctggtcatcggagccggtggtatggcgcgtgccgctatatatgctatgcttcgactcggttgtcgaaagattttcatctacaaccgggctttatcccgcgcagagaccgtcgctcgccatttcaattcatgggccgcctcccaagtgggctccacggaagtagtgtatgtgcttcggtcgctgcacgaagaatggccgcaggatgcctgccctccgtgcatggtcgcctcttgcgttccagcggacccggacagagatgagccgccagctaatttcgaaatgccaacgcagtggttgggaagcccaaccggtggagtagtccttgaggtatgtgacttactgttgtacagatttactcacattgataaaaccccttcgcactatacatcactcttgttgcgagcttttggtattcgactaatgcataacagtttgcgtacaaaccgctggaaacgccactgcttcgccagatgcgtcgctttcgtagcgaaactggacgtcaatgggaattggtagacggccttgacaatgttgctgagcaggccattgcgcaattcgagatattgactggacgaaaggcgccgcgccgattaatgaccatggaggcgctccgcaactatgccggtgaaaatggaccgttcgacgagaaaacaattcgagctcgcat

SEQ ID NO: 18325 - DNA, 2364 bp, Emericella nidulans
aggacatggctttacggctagtatccaatcgccaacttatgacaaaacgtctacccagaacctagagctaaacgctgatccggcagaggccaacaattgtacactagaattagtcgcctgtcggcgctttcgcaagatcattggccgatttgtcgggattcagctatccccgcatattctccagagtactccaggttttagtacttgtgggtcgacgatctatctccccatactttggagaagatacaaaggccagttcccaatccttcgccaattgctccttatccgcgatgtagctctgtggctttcactggtggcctgatttcgtgtattagccgagctgctttctgagtattaaccgcggatatacgtattgatttacagtatcatgcagaatatataaccgcagcaccggctccaccaccagctgtccgttgtggaatggagctcacacttctttgggcagatctcgtcattcacccttttctgcaggcagtatgacatctcaacgtgtcgttccttctgaacgtgaggtcgctgagcttcggagggtagagggtcagacagccgatctcatccgccaggcgcaagagagcgatgaagccgatcgcaagttgaccatccgtcaggccgtgaagaaatacaaaaaagcagtcttctgggccttatttctgtctactagtttggtcatggaggggtatgacctggtgatagtatgaggccttggcgatcaatccttgacggatactgactggcatcagatcacttcattctacggccaaacccagttcaaggagcgtttcggcgtctacgacccagcttcagaccagaagctgattccagctgcatggcagtccggtatatcgaactcggctctggtcggccaactagctggtcttgttgtcaacagcatctgccaggaccggttcggctgccgtcgaacaatgatggtcttcatggtgtggatggctgtcgccatattcgttcctgtctttgcgccatctcttccagtgctcgcttttggagaggcattttgcggtataccctggggcgtatttcaggtaaatatccgcgaaggacatgagcttttcttgtctgactttgcttatagacgctgtcaaccacatatgcttccgaagtagtgccaacagttctcagaccatatgtcaccgcgtatgtctgtatgtgctggggcgccggcatccttctctcctctggcgttgttagggctgtagcaggactccagggcgaattgggctggcggctcccattcatgttgcaatgggtctggccccttccacttttcatcggcgcatactttgctccagaatccccttggaactcggtgcgtcgggataagatcgacgaggcaaggacaaacttgatgcggctataccaggatatgccggagcgagagcatcaagtggaacaaaccttggcctatatcaaatacacgacagagatggagaaagccgagactgccaacgctagctttctcgaatgcttcaaggggaccaacctgcggcgaactgagattgtgaggttcctcactaccgttgtttctctggcccaactgactggtctcagaattgtgttgtttgggcagcccaaattctctgcggaaacgcgatccttggatactcagtcgtgtttctccaggccgcgggcttcagcgaactgcaagcattcaacatcaacatttcgttatcggcctgttacattgtcggcggcatcatttgttggttcctcttcccccacgtcgggagggcgacaatctacatgagcgggctgaccttcatgttcttctgcctggtcaccatcggaggactagcttggggtccagggaaagacgcccagcttgccatcggtatcctccttgtcatttccacgttatgcaacatgattgccattgggccgacatgctaccccattgtcgcagagacaccgtccggaaggctgagatacaagacaatcaccattggtcggtttgtttataacctaaccagcatattcaccaactctgtcacgcctcgcatgctctcctccacatgtaagttgcctcgatcgtccttgtgcgcaattctgacttgggaacagcctggaattggggagccaaggccgccttcttctacgcagggaccaacctgctttgcaacatctggtgctggtttcggcttcctgagacgaaagatcggacgtttggtgaaatcgatctgctttttacccatcgtgttccggcgaggaagttcaagtctactcatgtcaaccgtacgtacttctcaaacttattctgcttcgtattcattaactgattgacagaattcgcccatggcggcgactatgtgtcgaagcaagaggtcgaac

SEQ ID NO: 18326 - DNA, 2425 bp, Emericella nidulans
atccgacctcttcgaatcctgtttgatacatctgatggatgttgaaaaccccctgctgcgacagtggtcgtgcctctgtatcagtatgctgtggtcagactttccggagccaagtggatgggaattcggtgttctgcgccgatgagactttgcgaactaaacttcgaccccgtcccagaagtcagggccgcaatgcttcatgccctgatgaccttcctcggtatccccgatctgaccgatcaggtggcacagattgaggaatctttagcccttgccgtcctaccgatggcttccgatggtagcgtgattgtcaggaaagagctccttgtgttcttttcaactttcgtgaagcgctatcagaacaaattccttgttgctgcttacgaggaacttcaggatgaaaagctgaaccttctcggtaaactaggcttagatagctctccgcctgcagagacgggtactgcaggcaagcctcagccactgtccaagaacacaacatttggcacaatctggaagcaacttctgattctctccgttgatccccatcctgacattgcgcaggatgcggggataattgtggattacatgcatcagttgttactcgaatctcctatggccgcgctaactggacgacttcgcaaggaaatattggacctctcaaatcaagttgaccaacagtcccaggttcgtgaaaagccgaatctgaagaaggctgcgccgccgccgcctcctcccaccgcgcccccgaagcaagaagggtacctctcattgagccttaggcggactgctagtgtagcagcatcgctaaaaaatctcgcatttggcggcccttcgcagggagaatcatcccaaggatcggaggcatcaacatcaccccaaagtcgtgcacctgccaccccacgagggcgagctcctccggaatggactcggccacccgaggtcaacgaccaacttgctcctgcaacaacataccaacaagcaccagttcccacttcgcgtgggtttgaacgcagagattcatcagttgccccaagcattccactagtgagtagatttttagattggtccacagaggtaagttgagaactccaccggatttgacgaaaaatccaataaacgttttctaacccatgcgcagtacttccgcgaaccgcaaatgaaacccaatgaacccgacgagcccggtagcgcggattacaatgaacgtctctggagcgcagccgcaacgagaaaatcatttcggagacccagcccctgaaaggaaaagcaggcagcagccgctgggataactcgatagcgctgttatcgaacgccactcagcccctaaagatgtgctttcatcagttcgaggaccacattgccgtggccgatgatagagatacgattgcgtacgtactttgaaggcgcaatggcgcggtgcatgctgacataagagtaggatctgggattggcagaatcacaaacgcctcaaccgtttctccaacgggaacccattgggatccaagatcaacgaagttcgttacataaacgaggatgaccaagctcttctgatgacagggtcgtcggatggcgtgctcaaagtgttccgcaactatgaatcagccaaagacgtcgaaatcgtgaccgctttcagagcattaccggaactaatccctagtaaccggaacgccggccttgttctcgactggcagcagggtcaaggtaaagctctggtcgccggtgatgtcaaagtcatccgggtgtggaatgcggcaacagaagtctgcacgactgtaagtcccacttgccaaactacttcgctttttaacttaccgaactaggatattcccgcccgctccggctcctgcatcacgtctctaacttctgaccaagttgcgggcaacatcttcgtggccggctttggcgacggcgcagtccgcgttttcgaccagcgcctcaaacccacagcgtcaatggtcaaagtatggcgcgaacataaacagtggatcaccaacgtccatatgcagcgcgggggcctcagggaactcatctccggcagtcgaaacggcgaaatcagactttgggatctgcgcatggataatcccatctcaacgatttacggcacaagagataccctgcgcacactgagcgtccacgaacacgcgcctgttttcatggtgtatgtcctgcctctcctccctttaccattccgcttcgtctttgtgtgtagtgtcataaactaatagcaagcacagcggcacaaaccgccatgaagtaaagacttacaacgttgacggaacccacctttctaccttcgagccttactcaggcttcctccaccataaccgctcctcgcccatctccagtacagcctttcacccgcaccgcaccctcttcggctgcgccgcgctcaacgataatcatatcaatctggtcagctgctagg

SEQ ID NO: 18327 - DNA, 2449 bp, Emericella nidulans
gcctggcagaccatattgatagtaactcctcaatgaacctccctagacaactggatatcgaatcactaggttcaattgatacacttcgctgggcaccgttcgagggcccgccgttggaggaaggccaggtcgaaattgagatgaagtatatcggcttgaatttccgggttcgacacctgcactttcgtgtcagtacattattaacggatgatatgataggacattcttgtatcgcttggcctcttcggcgaacccaatgagttcggtctcgaaggaagcgggatcgttcgaagggtagcaccgggtgcaatacgagacctgaagcccggcgatagagtcgccctgttgacgacggggacttttcgaacgcgcttcgtcgtgcactcgcggtattgccttcggattccggatcacatctcgcttgagggagcggcgacgatgccatcagtctacatcacggctgcgtactgcctgattcatcttgcgcggttgcaaaagggcgaggtacggctgcctgcgtgtggatctagagtgatcttctgaaactaactctctcagtccgtactgatccattcagcttgcggaggcgtcggtctcgcggctatccgcgtctgtgagtatgttggggcaaaggtatgactccgtttccctgaaccggcaaggcagctaatagctcagatctacgccacggtcggcagcgacgagaaagtccagtatctcatcgatcgcttcggcataccaaggagccgcatcttcaattcccggaccccagacttcctccacgacgtgatgcgcgagacaaacggtcgcggcgtgaacgtcgtgctgaattcactgactggtgctcttctccacgcatcctgggactgtctcgcttcgtttggtcgaatgattgagctgggcaagcgggacttcctgagtaacgggcagctcaatatggggccttttatcaagaatcgctcatatatgggattcgatctgacgcagtttggaaaggaagcttatcatacctatgagtcgtacgtacagtccgatcagattctcgagctttcttctaacggtttcaccggacagaatgcacacccagttcgagacactcacagcagagaacgagctagttcccattcgcccagtgagagtgtacgaggctacagacgttatagatgccttcaggtacatgcaacagggcgtccatatgggtaagattctgattagagtgcccgaaaacccctctagcctctctgtctctccagggaattcgccattctctcttcgtccagacgcctcgtacctgcttgttggtgggctaggcggactgggccgctcagtatcgacatggatggtggaaaagggcgctcggcatttggtgtatttatcacgctccgctggtctctctgaaaaggatcaggcttttgtccgtgagctcgaagcgcaggggtgccaggcaatctgtgttcccggtgacgtgtcggccattgcagacgtggaagctgcaatatctaagtcttcgcaacctcttggtggcgtggtgcagatggcagggtttctccaggtactacgctgaactggtccatatcaatggctctgagactaatgagttcaggacgcaatgttcgacaaaatgaaatattcagaatgggagtcctgcgttgcctcaaaggtccagggaacttggaacctccacgagacaacctcttccagcgccctcgatttcttcattgtcgtcgggtcggttgccggcatctgcggaaacccaggccaagccaattatgccgcggccaacacgttcctggactccttcgtccagtatcggcgagatctcggtcttccagcggcggtaattgatctgggcgccatcgatgaagttggcatgatggctgctaatcaagaggcaatgcaacgtgcgcaagcggcgtcagtctgcttcccaagcgagcaacagttgattgaggggctcaaactcgccttatcacaatgcgcagttcccccttcatcaaaatcacttctctctacctcgtgcatcgtcggcctctcaaatacaaaaccgctctcgaacccgagcgtccggccgtactgggtgcgcgatgtccggtttgccatctacaagaacctcgagtcaagaagcaccgaggcagtccagggaggtcaaagcaacgaactccgcactctcctccggcgcgttgagcagaacccctcgctgttgaacgacccggaatcggaagagatcgtgcgccgcgagattggcaaccaggtgacgcagcggatgccgcaggcggagaacatggatgaagacgagattgcgaatatcacgattgactcattgatggcgattgagataaggggatgggcgagacggaacctagggctagagattacgcttgtacagattgcaaaggcgaagactgtgggagggttgacgagggcggccgtcgatcatctgaaagccaag

SEQ ID NO: 18328 - DNA, 2487 bp, Emericella nidulans
gttggcgatttaacggtctctggaattgaggcattgcatgatccttgcccaaccccatatatggatcagcagatacaaaaagccaccgggaaatcgaataagcgcaggctgggcgaaaagcaaaagctgctctttgctcctatgtctgacgttggcggtgttttggtcgacaaagatgctgtctacatcgatgtgaagacttcgaattttaacgaagatgacgaagaacgcgatacggaccgcggtctgggtgagcagttggttattggactgcaaggcgagcggaaactccccgcgtgagctagacagcggtgtccgcttgttccacggtggagaagccatcacaaaagccgacgacgaagacaatgatactgggcgtaagcacaggagagaagtacgatttgctggagatgacaaccaaggcgctgcggaagaagacgagggctttgaaagtgcagaggatggggaagacgaagaagaggaggaccaggatgatatggaagctggtagtgacgatggcgaagctgaagtggacgtttctgcacctccagacttcgcggaaagcttcagggaacgacaaaatggaccgacgtcgcgccaggaatcggatatcgcattcgccgatagcgattcagatttaggctcgatatcgtccgtggaggatcaaattcttgaaagcgatatggaagaggaagaagaaggctcagacgaggaagacgacggaactcttcgttggaaagataacatgcttgctaatgcgaaatcgcttcactccaagcgcccaaagtaccgcatcacggacctctcgcgcacgatgtacgacgagtcaatgacaccggctgaggtcatacgacgatggcgtggtgaggaagagagagatgaggagccggagggcgaagacgacgaggatacgttcttcaagaagacgaacgttgagcaggaggagcaagctgagtatcgcgccgttcctgagtatgattacgaggagttggaacggaaatggcgagacgaagagatgatcgagtcgttgcgcaacgtttcgtgactgctaaactcggcgacgctgacgatggtgaggatgaggacgtcgaagacgcctttgacgaggatgatgagggagacggtgcgtttgaagatctggagactggagaagtcttcaatgggatcaaagacgacgacggcgaagctagcggggaagatgatgagaaggatgggcctgaagacctggaggctgaacgcgcgcggaacgctaaaaggaaggaagaactgaagctgagatttgaagaagaagatcgtgaaggctttgcgaattcgaaagacaactcacgacacgacggcgcggaacccgaggaagaatttggggaggatgaatggtacgatgcgcagaaggcaaaaatgcagaagcaggccgacatcaatcgcgccgaattcgaggccttggaccctaactccagggctcgagcggagggttacagagctggaacatatgcccgtattgttctcgagagagtgccttgcgaattttctacgaagttcaatcctcgataccctgtcattgttggtgggttggcaccgactgaggaccgctttggttacgtccaggttcgtatcaagaggcaccgttggcacaagaagattttgaagagcaacgacccgctcatcttttctctcggttggcgacgcttccagaccctacccatgtacagcacgtccgacaatcgaacccgtaaccgaatgctcaagtacactccggagcatatgcactgcttcggtacattctatgggccgcttgttgcaccaaacactggtttctgctgtgttcaatctttctcaaataagaatcccggtttccggatagcagccaccggtgtggtgttaagcgtggacgaacacacggaaatcgtcaagaagctcaagctcacgggtgtggcctacaagatcttcaagaacactgccttcataaaggacatgttcaactcatcgctagagatcgccaagttcgaaggagcagcaatccgaacggtatcaggtatcagaggtcagatcaagagagccctgagcaaaccagatggatgtttccgtgcaactttcgaggataaaatccttatgagtgacattgtattcctgcgcgcatggtatcccattaaacctcaccgcttctacaacccagtaaccaacctcttggatattgaagagggcctgtcgggcgatggcggctggaagggtatgcgactaacaggcgaggtccgacgggagcagggaatcccaacacccctgaacaaggactctgcataccgcaagatcgagcggcccgaacgccacttcaaccctcttcgagtcccacggcaactcgctgcagaactccccttcaagtcccagatcacacgcatgaagtcgcggaaggataagacctacctgcagaagcgtgcagtcgttctaggcggagaggagaagaaggctcgtgatctgatgcagaagctcaacacc

SEQ ID NO: 18329 - DNA, 2487 bp, Emericella nidulans
ttttccccctcttgaggttcttcctcagctccaatgcgcccttctccgccctaagatagagtcctgcgggtagcaacagcattcctgcttctgacacgagacaccacattcttcaccaaacaggattgcatgcccagccaatcccgcagtcgggaccgatatggtcgcgacagtgatcgcgatcgttcccgcgtccaaccacgcagaagataccacgtatccgaggacgatgacgatgacgacgatttcgacgacaacccacgcgaccgccgttacagacgagatggctaccggcgcgcgcctgttgattcacgagcttacgattctcacgacgattacgaagtagttgatgtggaggaggaaccacggagataccgatcggatacagagcgacggcgggaacgggccagggcgtcaccgggcacgtcacctcgcaaacgagaacgcacacgggactcaggcggtgggcacagacgacggcgaacagaagagagcgatggcagccaggcgccgcaagcccaccgggataggaggtcacgcacaagacgggatcgcggcctggacgatgaggatttagaagacgctgcacgaagactccgtcgccgggaacgagaacgcgagcgagaacgacgcgctgaaacctctaagcacaagagtacggactcttcgaatagttcggccgggttgttgaatgcaaacgccttggctaaactcagagcgcagcatgaagagttggaccgtcaggaacagcgtcgggcagaaaaagaagctaaagcggaaaggaaaagaaggcgcaaacgacccgcagtcgaagggcagatgcgcaccctcgatccgtttcctgatgaagtccctcggggtcaatccaaaggtcgcatcgtatcgggggcctaccttgaagaaggcagggctccagatatggaagtcagactgcgtgggggcggaagagggccaccgagggagagacgatgggagaaagatagtgatggtcagccccactgacaccgttctggaagcggaagaaatggtggtggattggagccattgtgctcgttatcgtggtcataattattgttgtcgcggtcgttgtatcgaataataagaaaagcgactcagattccgactcagattccaattcaggttcatcagattcttggggtggtgataaatcgtccttaaatggacttgatcacgacagtatcccggtaagcctgacctgccactcgtttgcgaaagaccgttatactaacatgctctagaaatccgcccaaggcacagtgcttgacccatggacatggtacgaaacaacagacttcaatgtaacctatacagacgagactgttggtgggctctctgttatgggcttgaactccacctgggacgattctgttgcgccgaacgaaaatgtaccgccacttaacaagccatttccgtatgggtcacagccaattcgtggtgtaaacatcggaggattgctgtctctcgagcccttcatcacgccctccctatttgaaggctactcatcagatgtcgttgatgagtacacgctaaccacaaaactaggcgacaacgccgccagaaagcttgaagagcactacgcaacctttatcacagaacaagattttgccgacatggctgaggctgggatcgaccatgttcgaatcccattttcctactgggcagtaaaccccagggaagatgagccctatgttgccaaaatctcgtggcgttatctacttcgcgtcatcgagtactgccgcaaatacggactacgagtaaacctcgacccgcacggtatgccgggcagccaaaatggcatgaatcacagcggacggcaaggcagcattcgctggctaaatggtgatgatggcgacacatacgcccagcgctcgctcgaatttcatgaaaagatatccaagttcttcgcccaggaccgctacaaaaacatcatcaccatctatggcctaatcaatgagccgtacatgctttccctggatgtcgagaaagttctcaattggaccgtcacagccgccgaattggttcagaagaacggcattaccgccaaaattgccttccacgacggtttcctcaatctcagcaaatggaagacaatgctgaagaatggaccctcgaaccttcttcttgacacccatcagtatactatctataatgttgcccagatcgttcttaaccacaccgcaaaggtcaacttcgtctgcaatgattgggttggcatgattggtgaaatcaattccacttctgaagggtacgttcctttcctttctccattcgtgtacgtcgcagattatataagatactgacaagaacaaagctggggtcccacaatctgcggtgaattcacacaagccgacaccgactgtgcgaaaaacctcaacaatgtcggccgcggcacccgctgggaaggcacctattctgagggcgactcgactatgtactgcccacggccgaacagaggacatgcagctg

SEQ ID NO: 18330 - DNA, 2487 bp, Emericella nidulans; identical to SEQ ID NO: 18328

SEQ ID NO: 18331 - DNA, 2514 bp, Emericella nidulans
caacgattttaattcaacgattcaaatctaagaatgtacatctctatgaagccatgcgctccgcgcggctctgcagcgccttgaccataccgatgccgacttgggtagcctcgtccaggttctcctctggcaagcccagcagcttgttctgagccttgtcagagtggttgccggcatcttccgggaagaacgctcgcgcgtagagcagcttagcaaacccagccatgttgccagtcttgaccatcttcagaccgtctgcgtatcgctcgtggacatcctccttggtgatcgtccagttggcgtccgctgtaccagtcacgcgctttacactctcaaacatctcgttctggctgataacaaaactctggaggtagacgggtttgttgaaccagctcgagagtgtcaggctcttgtcgttttcgccgtctggaagcactttaaggctgagcacagtcgcaacagcgcgcccgacctgggctaaggtcgagaccgaagtcttggtgtttccatcgccgtagatcgtcaattctttcttgtcaaagtcgaacccgaaacgcgccggcctgcccgctaagctgtaatcgtaccagaacccacagcatacggtgatccacttcatgcccagcttgtcgatctcatctcgattggcctgggctacgggtccgagcatgacatcctggccgaacttaacatgctcaatgtcgccgccgtatccattgggcatgatgtacggcacccctgccttggcggctgcctggacaagcttgctgtcagtgtcgcggggtgcagtgggggcaacagtaataataaagaactgttggcccctgagggcatcgacaatggaggcctcatcgttgtagtcgatgggggcgacaacgacgccctcggggagtgtgttggtgctgtctttgcgcgtgagggcagtcacagtgtgttttccagttttcaggagcgcgccagcgatgacagagccaacagtacctccggcctagtagctgttagtctcatcctgtaacgtacttggggagggagggggaggtgtttacgtacaccgacaatggcgactctctcaatggcattggtgaagctggcgggttgatccttagcgaatgacattttgcttgagtgatgtgtgtgattgatctgggttggatgaaggaatcaagactcgaatgcagctggatcatgataaatttatattgattccggcttatgatctcgctgcagcggcggcactgcagcctgaaaccccgccatagccgtgctcaacatcgtaactccgcaatagcggctccatatccatccgagcggcgttaagttcttaaatgaaacaaacacacggagcatcttcccaccgattcctccagtgtcagacggtcgagtgggtctaatggtgactcgggtggacagatttgactcgagcacagcctcacgatcatacatactccgttctcaaaccctatccctaccttttctacgagtctacaggggctcgctcccaggcccgtgactgtcagtaaacatcaattcacagtgaaaatgccctctggcaaccatcataacctgctacccagctaacctgaagcctcgagtgaaggtgagtaaagatgagtgaagatcgtgaattcgtgaattcgtgaattgcgtgaattgcgtgaaaactgtaggccgtcagtacagtgaagatgattccaacgtcgaacgtcccaagtccctcccagcgaaagccagcaaggtcctcgttgtcgtcagtatctgctcctcgcagtttcttactcaagccggtcttgtctcagcatcgtccctcaacacatcattagacgctcctttgacatcaacaaccagcctgacaggctgagctgattccccctagatactctcactgtgggcgccttcatcctcatcggtagccgcttcgacgacgtctttgagcacaaactgttcttcgtaggcggctatgtctggtgcccatggtcttgtcttaattgtattctgtgtatagcggccccgacttctttacttctaccgtaccatacaaaggacgcccattgcataagcgggctattgctgcggacgccatgggtctgattctaaacaacttgcgcgcgtggacatttatgctgatctgcatgaccttgtgcctcatcgggtgtcatcttcgcaaaagggcctgtgtaccatatctactgagcgctgacaatgttgagattattatccttccatgggggatggattcgtcgtttcccgctgctacgattatcctgagtcaggtatgccgcgccagctttaggatctggctgcgtcactggtgactacgttgtcaactgtcccatctccattgggtttggcttttccggtactgtcgagagccaggtcaatggtcaaggaaaggatgtcttgcagggctaccgaggagtgttttgcaggtgttgcacttgccgagtttaggcgtagttgttgtcctgctcttttgttttgtatatcaagatagaaagggtgcaacaaaagaccaat

SEQ ID NO: 18332 - DNA, 2518 bp, Emericella nidulans
cgccagaagcattgtctgataaatattaacatccagcccatcgcccaggccattgagcaatggcaggacctgatccaggacccggcagctgtgcatatcccccatatgctggaaaacccgctgcctgggctgccagttcataccaatggcatgctgtgccaacgcaatccgagccactgccagtacctggtgacctatatcaatacaatgcgcaagcattggcagcaggcgcatggctggacccagcatccctaccaggggcatgtgcctgcagaggtcaaagcacagggcaagcaggagctgcaatagttatttcgccaggtagcctggcagcaggtgttcccaacctgcaggaactcgcacctggtgcacatctaattgtacgacgcccaggctgagcccccgaccccggcgccggatcgagcgcagatcacggccaaaatcaaagcgcgcgccgccgatgatgagcagcaggcgcgcgagaccgccgacagcgagaccctgcatgacgccaacccctggctgcgcatgacgcgctgggcgcggtacctggccggcgtccacttccccgatctgatcgacgtcgtcacccccccagaccctgacgatgcagaccccgccagccaggccacgcagcgcgtgtgggacgccatgatgtagctggcgcggcgcagccagcataccgtccagcattgcggcaacggcatccgcatggccgcggtcagtacgatgcccaatcagacgccgtaccagccgctgcgcgcgtacatggtcgagaagagcatccaggagcatgtgcggccgtggcagcagatcctgctgtttatcattcgcacgcagacggactggccatggcgcagaagaagccctcctatgtcatgacagcgcggcagcagcggacctggcaacggctgtggcagctggcttgcctgccagcccctgagccagctgacgggcttgctgatgggccagctgatgggcttgccaatgggctgggtgggcctgctgagcctgctgacagagctgacggactgtcagctcgctggagccccgatccgatggcccccgaccttgatccccgccgcatcgagccgtttgtcatgaccccgttggaaacgacatgcctggagttctgcatcgagctgctgaaccagaaaatcaaggtccatgagtatgagagcccgttggtgtgtgccatggcggtcttgggccggggggagcagggctggcgcgacaccgacagctatccccccattatatcccgggtgctgaaggtggcgcggttcctggtggtccagaaggcgctgtggcttgaccccgaacattgggagatcatcaggatgtgggtggcggccagcgagcagggcgcctgggctggggaggctgctgaccaggagctgggctggttgatggaggatgaagggtatgcaagcgcgcccagtccgccatccagtaatgagactccctcatccccgccccagggcagggctattactcgaatgccgcgctcccagctgctgtttcaggctggtgttgactggatggtgcagaagttcatggtccgtggccagcatggtcccgtcgaggtgctgctggattggcggacgtttgggctgaagattcactacaatacaaccacccccgggcatgtcacctggatggggcaggagcggctgctgtacaaggaaatggacttcaccatgggccagttttgaagctttgtacatggggtggtggcaggtgctcgggagctgatggccagcctgctgtgtcagcctaatcaggagcaatggccccccatcccatggcaccagctgtttgacaaccccaccaaaggcacccccggctggagcttcctgcaggacccccgcaccccgtggcccgtcactggggggacctggctggtcgaccggattgcgggcgagccggcggtggcccgggccttcaccacccagggcgccgtcagcccaaccaaactgcagaagtacttccagcaggtggcgcggttcaaggagaagctggcgctggccatgcacctgacaggcggtgcgccagtgcgggcgccagagctactgagcatccagcatgtcaacaccaaaaacaactggcagcgcaacatcttcattaaggatggcatggtagtgtttgtgatggtgtaccataaggggttccatgccagcaatgacatcaaaatcatttactgatacctgcccagggaggttggggagctggtggtgtggtatctgtggctggtgctgctgtttgtgcgccagctggcagtgacctggggtcagatcaggcccagcaatcccaggcccagccctagggccagcaatcccaatcccagcagctcgagccccagcaacccccaacccagcaacgccaggcccagcaacccccgagccaggaaccctgcccccagccccccccaccgcagcccgtatgtatggggacctgacgtcggcaccggccgcgagtggcccagcgagcgctgcgcgaggtgctgaaacgggagagt

SEQ ID NO: 18333 - DNA, 2702 bp, Emericella nidulans
tgtctatcctgccgaatgtcgcaaccgcttcggcaaccactgcctgacactctccaataatcctgcgccgcgagtctcagcctagtgggctctttcacagaggtgccatattagatcgaatgcgcaccttatgtctaattgaacagccttgaatcgctcagcccatccctcgtcgcggtgagcttcaacttccgcctggaagtcctcgaacatatcccgacggcacgcatcgcggtcgagatccgaggatgtgataccgacgagagcactgtccccatgcgcaaggatctgacgcgcaaccgaaataccaataggcgaatctcccgcggtgatcacccatacgcgcgactcattatggggagggaactgcgggcgggagtagtcaggggagggattgttctctgtcatgagggcgaggatggcattcacggggccagcatatccatcgcgcaagaggacacgcccaataatcgagcagcgagagctctattgcgtgggagggtatttgtattcgaatgaatgcggatggcattcagatctagcctagaactgccggacttctggaccgcgttggccggggctagtccgcccttagtcaaggcttggaggcgattccatcatctatcttcgcgccatccgtggcctttttcttttcctttcctttccagccccgccgtctattgcaaagaaccaggtttcaaaatgcctgagcagcggcaacagagagaagagggagagcaaggcgtgcgtacggtcccgtctacttgtcaaactcattgttctgacgttttatctccagtccattgtcagatcactaatccagggtgtcactattttctttgtgacccaattcttcatcggtcaattctttggaaacaagcagaatgctacggccggtggaaaacccggtgctgtgactagttttggggagcgacctccgcaagccgaagtcgagaactacagctctgttcccgatactattgctccgatctggccctcggacagtgccttggatatcagcgtttacgtttctccgtcgattgtgcttccttcgatctcatctcttccctcgagttctcttgtactggaagagaagaaattcggtctaggaaactacagcgatgttagagaggtggagaccaccattcaggttcccaaagaggtccagcataacgggaccctctgggctcactttttcgtggcattgagtgggcacgagcttgatcctgcggcaaagggctacagcacagatacagctgtgcacttcttacgacctctcaatcagtacctccctaagagaaaggctaagaagctcaagaacctactcgcgggtgccgatgaaacagatgaggaggaagacgatgggacccccgatgtttcaattgcatcatattaccacccgaacttcacactatccgtgattcctgattctgggaacatgaaataccgtcaaatccatcctgccattcgtcgccacacacagctagaggcgactggcgcgagagatgcttcgggtcagaatggttggtactatcctattgtcttcctgaacactttctggcagttgagaagccatatggtggagctcaactcgacggttgaaactatccctctacggtttacactccaaaacctccagaactggaaattcgcaatgatggcgagcctcgacgagaacgccaaacaaactgccaagcaagccgcattcggaggatctacccctggtggtggcgatggtagcgagtttgagatgatcaaagaagtgctcctggataccaacatctggttgttgggtacaactggtgtagtcacaattctgcacatgatttttgaaactctagcattcaaaaatgacattgtaagtcgtcctcgtcttcccaagggttttagttactgaagctgattgtgctccttactgcagtctcattggcgcaagaagaaagacaatgtcgggacgtcagtccgcaccatcctcgccaatgtgttcatgcaaacagtcattttcctctatctcatggacaacagtgagaacacttcctggatgattctcgccagtcaaggcttcggtattgtattggaagcttggaaggtgacgaagacggttaatgtccgtctgcgcccacctccagttggatccttcttctctttccttccttatgtggttgtgtttgaagacaagcataaactcacagaaacggagaagaagacccaggagtatgatgagattgcgttccgctacctgtatatcattgctgtgcctctcctcggagcgtacgctgcttacagcttgatgtacaacacgcacaagtcatggtactcttatatcatcgagaccctcgtcggcagtgtttatgcctacggttttctgatgatggttcccagcttgtacattaactaccgactcaaggttcgtaccgtcgcaatcgtcacttgaccttctgctaacaagcatactctagtctgtcgctcatatgcctggaaaggctatgacttacaagttcctcaacacgtttatcgatgatctcttcgcgtttactgtaaagatgccttggctccacagacttgcaaccctgcgtgatgatgtaattttcttcatctggctctatcaaagctacaagtataaggtagactatactcgagtcaacgagtttggtcaaggaggcgagacgatggcgaggaagaagaggacgtgaagaagctcg

SEQ ID NO: 18334 - DNA, 2703 bp, Emericella nidulans
cgtgtgtggggtttgaagatacttgaccaagtgttgaaggtaattataactccgcgcttcataatctgtcctctaatttcttttcttagatgtttggcaagacacccgaccctgactttgcagaagcatcactacttgaacagtaccaggcccagattgggtctgctctcactccagcatttgctgcggactcctcgccggagcttgcgtcggaggcaatcaacgtatctgcgacatttatcgcaactggtatcgtaacgaacgtggagcgtatgggaaggatcttaaaactcttagtcctaggactcgaaaacttctcagcaaaccccgacactaccgagataggggatctcaaaggtctcaactccaatgcaaaggtgatggtcaagatggcgttgtatgcggcatgggcacgccttcaaattgcgagcattgagcacgagtatctcaatgaggtcgttcagccttacttgttaaagcttacccccctatggctgtcctctcttcaggagtatgctcggcttcgttttgaaccggacatttcgggcagtctcggcacgggtccggaaagcgacgatatgtacgaggtttatgccgccctgaatcgggagacgcttctgaaggtgagaagctcatttgttctatactctactaacagagctaactgtacttgcagttctaccaagaaacttggttgagcctggttgatgctattgccgggcttgtggagagggacatagactttgtctttgacgcgctggacggaaaggcgcagattaaagagcccgagaagtccgaagaggatcagctaagtaacggagaaccaaagggaaagggagatgatatcaactatcgcgacgagcctgttgcgttcttctttgtgctttttggcttagcgttcgaggctctcgttgaccagtctacttcagcctctcagagaatggagatcctccaggctctcaagaggattctgagacccataatctctggtaacgctatataccaagatgccatattctccgaaacgatggacagtctagatcggctcgcattgacagaaggtacagccgttcagaatgtcatcgtcgagatagcccgaaacctcgcgctagatcacccatccgcgaaaggtggtgaagatcgcagtgaccatctttcagacgatattgaacagctcttcgagctaacgaggagcatcattctcgtccttgccggcctcctacccaacctccgcgagtcaactaccatcgcacgattcaatgtgggctctgacgatgcactgtctctcatccgtctttctctttcgtctctagtcaacgtcgcctcaatattcccatcaatcattcgaaacgaccttaatgcatgcattctccacatcttcagcacaatcctcgccacaggtctgtgccaacaagaagtcgtacctcaagctctgcccatattcaagcactttatccagagcatcagtggccaggaaaatgccagcctagaaaaccaggagaaccagaatgttatctcccatcagctccgcggctgcctcgtccgttttctaacaaccctcacgatcgcccaacgtcgcgaatccgaatcctcccttccctgtgccaagaacaccctactcaccatcaccatcctcctaacaacaggcggacatctcatcccgccacacgatcctatcctccctcaaattctcaacgaactcctcgactgccttcaagatgttggtctcgctagcgtcgcggctggctgtatccgatctatcctcctttcaaactcaacgaaatccaacacagacgaagtcatagctcgctacttgattccccgccttattgccttcctcatcggcacacctactgatccaggcggagaagcctccaacgacccggagaactcgcgaaccagcatcgcgcgcacgctagtttcatgcgtaaccgtcccaaacgcagctgccttcccgggaggagaaacacatacggctatgtccttggtgatgtcatgtctccttgcgcgggccaaacgcgagggtgcacccgtttatactgaaacagccgccaacctccttgaactggcgaaggcagatcagctggcattcagaacattggtcgggactatgagccctgcgctgaaggggttgctcgaggagattctacgtaacgcaaacgttggggctggtggcggtgcggtgggcagaggggagcaggagacgcagaatgggggtgggcagcagagtatgccgagtattgcgttgagatttgatttctgatttggaaaccatgaggatcagggatgtgtaatgtcgtgatcattaatgacggctttatagtggtttttctgtttttagttcatctttataccatgattttatatatctattcatctttttgcaatgaatatctcctgcctctaaacttagttcgagtaggtgataagtgatgtgggtatcagtagctattacatccaagcctagctcaagtagggtactggcatagcatgcatggataagacaagaatgtgaatgaacacaaaagaaaatgttaacgatagagaattgacagctttctctgtcaaggtgtaaccatgccgcagccttcaccgaagtctaaaagaaatgctcaagtctaaattatattccgcgacaagcttgcaaaagaaaataatgtataagaaagtaaagtctgatatcaacgcttttcgtaagtcagc

SEQ ID NO: 18335 - DNA, 2739 bp, Emericella nidulans
gctgcttggtttttagatggaatttatgagtaattatcatagatcctttgtaaggcaccgtagtgccctggagtatacttcatatagcggagcttgggccaagtcgatctgccgagcgcacgtaagctcccggtgatgccaggtaagaactccgcaacaacgttacagaggcacgagagctggtcaattagttttgcttgaagtaggctcttacatgctcttcctcagtgtatgaggctgttttgtttctcttttctaatgtccacataacaatgcatctctcgatatcttcattactttcagcgcccctgttctgcgcggccgcgcttgccgtccaagttagtgacggtgtgtcaacagtagcccacgaggctgccagagccagcaatgaatcgctactatggggtccttacaagccgaatttatactttggtgttcgtcctcgaatacctaatagcgttttcgcgggcctgatgtgggcaaaggtcgacaactatgcaaccgctcaagaaagtatgcgcccatgttcatcgccaatgactattgacgcaaaggcattcagactgaaccctgctgacaatatcaagattttaggcatacatgcgaacagaacgaaggaatggcaggctacggctgggacgagtatgacgttcgaaaaggcggccgcgaaacaatccacgatgccggaaactcgctcgacttaactatcgacttcgttaaagtccctggcggacaacatggaggcagctgggccgcacgggtgaaaggtgtccctcgagatgatgctctgcctgatcagcccacgacggtggtcttctacgccggtctagagggacttggcagcttgggggtttcgaccgagagcgacgaccctagaggatttgagggggacgttaaacttgacgggttcacggctgagcttggtcgattctcaatagatgtgactgcgggccccaagaccaacgagcatcctgcgtataatcatccctcatatgatgacaagccgctggacaggaccatagtgtcgagttttccggtgccgccggagcacacctggcagacaaagggttagtgcttggtttgtacttctggagttaatgctgattatactccagtgctgctgtttacgcaaatgaaaaaagcagttgatgaggccattcagaagtatggagcggagaatccgccaccccctgcccaggtcttcaccgtcaacaattcaccaggtgatggaaatgtccagttggtacaaaaggttttctccggtgcttttgaggtatgccgccatcatgacctcatttgtttggtaattaagctcacagttgtcagtttgatattctcttctcctctggttccgcgccggaacctctcacatgtgagttggctatcagatgttgcaagtgtaaacgatactaattaatttgtagcggagatccttactgctgagatcaagagtgcttcactctccttctccgagaggttcaagaaaatactttccccgcagtcaccctttgattccgcagattaccttgaattctccaagtccatgctctcaaacctcatcggtggcatcggcttcttccatggctcagacattgttgaccgctcagctgccccggagtacgatgaagagaatgaaggtttctgggaggaaacagaggaagccagaagccgggcacaacctgtgcttgaagggccaaaagatctttttactgccgtgccatctcgcccattcttcccacgtggttttctctgggatgagggattccacttgataccaatcctagactgggaccctgatcttgcgtatgcctccccgatggtcacctggtggcttaagcagctttacctggatgcacaataactaactgttcacagactcgaaattgtgaagagttggttcagcttgatggacgaagatggctggattgcgcgcgagcagattctgggtaacgaagctcgaagcaaggtcccgcctgagtttacagtccagtaccctcactacgccaacccgccgaccctcttcatggtactagaagcttttgttgataagcttgaggcgcaagacgaatcgacgcagacttaccttgaggacgagggtctgcactctgtctatgtaaagcacccgaagctgggagagaatttcattcgctccatttaccctctactaaaaaagcactacttttggtacaggtccactcaatacggtgacatcaagtcttacgaccgtgaggcattttcgaccaaggaggcgtaccgctggcgtggacggtctgtgcagcacatcttaacatctggattggatgactatccccgggcccaacctcctcatcctggtgagcttcacgtggatctcattagctggatgggtatgatgactcgggcgctacgccgcattgcggagacccttggtgaaactgaggatattgaggagtttaaggcctacgaaaccgccatcgaacgaaacatcgacgatcttcactgggacgcggatgcgaagacctactgtgacgccacaatcgatgactacgaagactctgttcacgtctgccacaagggatatgtctcaattgcgccgtttctgacaggcattgtgggtccggacagtcctcgcttggaggctatcttggatttgattgaagaccctgaggagctttggtctgactatggtattcgaagtctcagtaagaaggatgaattttatggcactgctgagaattactggagaagccctgtgtggat

SEQ ID NO: 18336 - DNA, 2904 bp, Emericella nidulans
tgacgagatccgttcataattgttaaacataataaaagagacagtattacagaggaggtacttcttagatactgagcattggagatatgaacttatgataccataagcaagccgttactgtacggcgtctgacgtcgtgatccgctatgccgtcattctccagctcctactctcgggtacgagagtccagtggccgactcctgtaagtcataactcccaattccccaccatcatcgattgtggcatatcattctgctttccagacttgccttcgcacggctctgattgactgaagcagaacgcgttcccttccgaccattagatctcgttgctagtcctcagttttcgttcaggatttgccgtctcgcaccgtgaaacttccaattcggctccgttggcggggtatcagtttcagacactttgacgttcacagcagacctacaattatttattcagaaataatcccagtgcaaagaaagctgggcagtactcagtagtgggtgacaaagaaacgaaaaaaagcaagcagccattcacgtcattgcttaggctgctctaatcccaattcccaaccttacctagtctactccagcttcagccatcattcatcatcatatcattgccttgcctcctcgaccttttcctcttttttttcgtttcccctctcccatcatctttccgactttcttgatccttcttcctcctccttgttcctctttgctgttcagttttctacttactattcgctactgattttccctctcgtgtcgccctccctttcctaccatgagcacaattcagagcctgaaaaatttcatacgtcatgggaaacaagcccgccttgtcaccccccatgcggaacccacgaccaacgtgtctcctgtccatgctgagcaacagcgtcagccccagggtcaattcgcccccgctgcagggaatctagacgcgattgacagcaagctggggggtggtcagcctcactccacacaacgcgaatctcccgagattcccgtcaagagggctcgcgaggccgaaatcgagcaaatcatcgctgaagaaaagaccaatcgcactaagatgccgcattacccaggcttagagcgttacgtcctgctggagaaaatgggagacggcgctttcagcaacgtctaccgggccaaggatgcttccggtgaatacggcgaagtcgccattaaagtggttcgcaagtttgagatgaacagcacacaggtaggtcgttcctttttgttgtcttgtgattttcgaaattgcttgcctcgggtgtccctttttcactggcgctgctatttgtcacggactgttcgccaatgccgttcttctctagtctgacgcccacctacatcccgacttcaaaaggaagccgaaagctgcggaggtgcgctatattccttctcgatacctcgcctgaactacgctgctcaattcgcacgccaatacactccaaatctgcttctaggatgtctgctaactgctgtatagcgagcgaacatcctcaaagaggtccagattatgcgccagatcgatcaccctaatatcgtcaaactgatccagttttctgagtctcgccaatactattacattgtcctcgagctctgcccaggcggagaactcttccaccaaatcgtccgcctgacctactttagtgaggatctcagtcgtcatgttatcgtccaggttgccaaagcaatcgagtatctgcacgagacatcaggtgtcgtgcatcggtatgggtactcttcgtcgttatcaggagcgcagctaattttgccagtgacatcaaacccgagaacctcctcttctatcccaccgaatatgtcccatcgaaacatccaaagccgcgccaacctggcgacgaggacaaggtagacgaaggtgaattcatacccggcaaaggcgcaggcgggataggtgtgatcaagattgccgactttggtctgtccaaggtcatatgggatacccaaacaatgacaccatgcggcactgttgggtatactgctcccgagatagtaaaggatgaaagatattctaagagtgtcgacatgtgggcgctaggttgcgtcctttatactctgctttgtggatttccgcccttctacgacgagagcattcaagtccttacggaaaaggtcgctcgtggacagtatactttcttatcgccctggtgggacgacatttcaaaatctgccaaggacttgatttcccacctgctgacggtcgaccctgatgaacggtataccatcaaacaatttctggctcatccttggatccgacaatccggtgaagagacgcaagctgcttcagacgccccgccactaacgacaccggcgcccgaagctcgcaaccaggcacttgatgccattgcggcagaacttgcgccatatccgcccgcgagtgcacagctgtcagccggggaacggccaatggatttccgatctcctggtgcaattaacttgcgtgaagtctttgatgttggctacgctgttcatcgacaggaggaagagggcaagcgacgcaaagctggccgcggtttccggcagtcgaacccgaccgccgcgttccagtcagcacttaacccgctcgatgaagactacgatgatgaggatggaattgcgtatcagaccatcgacgaagagggccatccgcctgctaaaatgcaaaagtccacccagcagtctggcgacgttgctgcgatggaggctaaaatgcggcaaaccaacttgggtgctactagtcatgctgcacagatgcggcaatcacaccagccgcgggggtatggacaacacagcgcccaggtcgcagccgctgccaagcagaacatggttcgaaatgcacgggcaccattcgagctcagcctagacaacgcaagtctgctagagaagcgcg

SEQ ID NO: 18337 - DNA, 200 bp, Emericella nidulans
cagtccggcgacgacgtcaacgactacccgcacgtctacaacaactacgagggcttcgacttcagcgtcgatcctacctactatgagtttcccatcctaagctctggacagatctacagcggtggttcgcccggtgcggaccgtgtgattttcaacgaggatggagagattgcgggcgtgattacccacacgggggccag

SEQ ID NO: 18338 - DNA, 202 bp, Emericella nidulans
ggttcgttcaccgaggcgacatgacagccatcgcgccgaaactaatattgcaatagccgtgctgtgtatgcaaaactgagaagacagctcgagatgattgcatgctcttctccaaatccgatgacccgacgcaagagtgcaagtcaatgattgagcaatacaaggcctgcatggctgggtatggcttcaaggtctaggttga

SEQ ID NO: 18339 - DNA, 204 bp, Emericella nidulans
atgtcctccaagtacgtcttcacaaaaggtctcaaggagctgcggttccttttgtgccagacctccgagcaaagcgcggcgacaaggtgagtcaatcttcgattgcgggatcaccggaagaagaaataggactgactgtattccccaggttgtttatcaaccgcgcctatcccaccatgaagaagcacaacccgcacactccca

SEQ ID NO: 18340 - DNA, 210 bp, Emericella nidulans
tcctcggtggttccgtagcaggttttttcggacgttttctaggatcagaaggaagcgctataatgatcactacgtgcgtttcattctcttcgatcttatctttgattgctttttatgaagtcgcgccgggagctagtgcttgctatctaagaattgctccatggatctcatcggaaatgtttgatgcttcttggggcttctttggcgacc

SEQ ID NO: 18341 - DNA, 212 bp, Emericella nidulans
tgggctggtggtctggcaattgcttcatgtggtttggaatcaactggagtgagcaccaacattaacgtcaattatttgtccactgcaaccactggtgactggctcgagattagaggctatgccaataaaattgggaaatcacttgcttttaccacaataaccatctcgaaacttactagctccggcgatactacgctggtggcccaaggttc

SEQ ID NO: 18342 - DNA, 224 bp, Emericella nidulans
ccttcggggctgatgcttgcgtgggtttacgcccgcccgttccttcaagtgcggatgtgttgacaattgccagagtgaacctcgtccgcttgggtacccccatcgtcctgctcgacgatcggcccgacaagacgtcaaccggaaaggcagatggaatccagcccaagacgattgagacgctgaagcagctcagacttgcagataaactattgcgggacggggcg

SEQ ID NO: 18343 - DNA, 225 bp, Emericella nidulans
cacccagcgcacctcccaacttcaacctctggctcaacgggctcttcgcgttcgccggaaccttcactgtcgcaaacttgtactatgcgcagccgcttctcgatatgcttgcgtcctactttggtgtcagccaagagcgggcgtctctgatccccacctgttcgcaagccggctacgcagcgggtctgattttcatctgcccggcgggtgacatggtgcgtcgca

SEQ ID NO: 18344 - DNA, 227 bp, Emericella nidulans
gtccgccatcggtctcccacgccgaacaacagacgtgctcaaggctctcggactaaagaagcgcatggccaccgttttccaccccgtctctcagtcggtagccggtcagatcatgaaagtaaaggaactggttgaggtgcaggaagttgataaaaatttgacgaaacaagagctgcatctggagcgaaagcctgatccagggtattatgtcgagagaacagcggcga

SEQ ID NO: 18345 - DNA, 230 bp, Emericella nidulans
cgccagagggagcgaccgttcatctgcaaaagactccccgagtcggtcccgacaccggctctcccgaagtgcaggtcgcaatccttaccgcaaagattctgaatttgtctagacacttggaaactactaacaaagacaagcacaacaagcgcaacttacggcttctcgttcacaagcgacagaagctactccgatatttgcgaaagaaggaaaggggtggtccaaggtgg

SEQ ID NO: 18346 - DNA, 239 bp, Emericella nidulans
ggcgaacactcctcggcacccttctttcgaccgaccaactcacaaatctggttcttctagatacaatagagcgcattatccgaacacccgacgaccccgaaccaagctcacagatcgaacatggcctgtatctgattagaggcgataatgtggttgtatgcggtgaagtggatgaagcaattgaccaagatatcgactggaccaaagtaaaaggagaggtagtgcgaggaacgaaaaat

SEQ ID NO: 18347 - DNA, 240 bp, Emericella nidulans
ttgtgctggagggcgaggtgcagctcgagttggatagcggagaaacgagattgctcaagagaggagacgttgccgtgcagcgcggaacgaaccatgcatggagaaatgtcacacccccgggggaggatgggcaggcccagtgggcgaggatgctgtatgtgctgctgccggcgaaaacagtcgagattgatgggaaggcgttgggagaggagctgggccacatcggcgtgcggtcgagta

SEQ ID NO: 18348 - DNA, 243 bp, Emericella nidulans
gcggcaatgctttcagcaacgacaacctcggtgcgggttctctcgacggtcctatcgtcgcctacctgtgcggtgactgcaacgcccgtgtgtcactcaagcgaggcgatcagatccgctgcaaggagtgtggacatcgtgttttatacaaggagcggacgaagcggtgagtttttcttccctactgtatccgggcgtgaatgctgattaggacattctagaatggttcagttcgaggcgcga

SEQ ID NO: 18349 - DNA, 245 bp, Emericella nidulans
catcggccgacttccacggtgcgtatgaaccatccactccatcgcactgctatagtcaactgatgagggaaaatagtccacctccgcgatggggacatgatggaattggttacccccaccatcagacaaggtggtgtcaacacagtcttcgttatggtaaggagataactttactgggggacgagaagcaagagatgaaacgatgcgccaactgcattgatttgataagaacgccaaataacatc

SEQ ID NO: 18350 - DNA, 246 bp, Emericella nidulans
atgagaacaaatcctactacttcaaatccagaggtttcgatacgtgaaaaaaaaaacctgggacgtatcgcccaaatcattggtccggtactggatgtagccttccccccgggcaaaatgcctaatatttacaatgctctggtggttaagggtcgagatactcttggtcaagaaattaatgtgacttgtgaagtacagcaattattaggaaataatcgagttagagctgtagctatgagtgcgaca

SEQ ID NO: 18351 - DNA, 250 bp, Emericella nidulans
tgaccccgatttcgaacctccagagagtgacattgaagccgacgatggaagtgatagtggtgatagcggagtcgaggaggacgaagccaccggagttgagggagacgacgtcgggatagatggagacagagaatctgatggagaggagaatagagaagacgatggtgatatagcgtctgatggagacatcaatctagaagacgatggagacagagatgaaagtcaaaagaagaggacgagagaagagaaa

SEQ ID NO: 18352 - DNA, 256 bp, Emericella nidulans
gacctcaatcagtatactttggaccaggatggaaagcgggtttataccctgaagaaggtcactcccaccggggaggtcacaaagagcgctcaccccgctcgcttttctccggacgacaagtattctcggtaagctcccgactcagcaagaactcgattgtacttgtgtttctcagaaggtgctaacagttatttaaaaaaagtcaccgtgttacgctgaagaagagatatggccttctgcttacccagcaggctgg

SEQ ID NO: 18353 - DNA, 261 bp, Emericella nidulans
tcaccagtctcggcggaataatcggctattcgcgcaccggctcagtcccctccataatcgccggtttatccgtcgggactctctatctgttttccttcctccgattgcgcagcggccaaacatacggcgaggagatcggccttctcgcatctgttgtgctgggcggtgcatcgattccgagggcgattcggctgaggaaacttgtaccggttgttctgagttttctagcgatctatggtattgtggtttttgggggagcgg

SEQ ID NO: 18354 - DNA, 270 bp, Emericella nidulans
cgctaccctgcgtaacctcattcgaaggtgctgatctctctacgtaaggtgtctcggataaaggagcgggtcgaggagaaggagggaattccgcccgtccagcagcggttaattttcggcgggaagcagatgtacgtgtcaagctttgaacacctttgatagcatgcttaccgtttctccttgctccgtagggccgatgacaagaccgcccaagactacaacctcgaaggtggagcgacactgcatctcgttcttgctctccgtggcggc

SEQ ID NO: 18355 - DNA, 273 bp, Emericella nidulans
cggctatttcgggcatactttgaggaggaaaagaatattactgagcgtgcggtgttggttgaggctgcagttggagggggtttggacaagagtgaggtggaggggttcttggattcggatgttggaggggtggaagttgatagggacgctgagggggcaagaagacagtttgtgacgggcgtgccgtatttcatggtgcagggacagtatgcgatcgagggagcggacgagccggagactttcttggaggtatttgggaagataaaggccgac

SEQ ID NO: 18356 - DNA, 278 bp, Emericella nidulans
tgttcacatggaacctttccccacttcagtcctcaaagttctcatttgagtatttgctactaccaccaagatctgcactaggggccgttcgacccgggctcacgccaaggcttcgtcacggacccccacgcctgcctactcgtcggggcatcgtttctaccccgacggcgaggtatgggtaacacgcttgagcgccatccattttcagggctagttcattcggcccgtgagttgttacacactccttagcggattccgacttccatggccaccgtcgg

SEQ ID NO: 18357 - DNA, 279 bp, Emericella nidulans
atggatggaatcaaatatgcagtatttacagacaaaagtattcggttattggggaaaaatcaatatacttttaatgtcgaatcaggatcaactaggacagaaataaagcattgggtcgaactcttctttggtgtcaaggtaatagctatgaatagtcatcgactccccggaaaggttaaaagaatgggacctattctgggacatacaatgcattacagacgtatgatcattacgcttcaaccgggttattctattccacctcttagaaagaaaagaact

SEQ ID NO: 18358 - DNA, 283 bp, Emericella nidulans
gccgactctccctgcgttggccagatcactttctacgacactgccacttccgcgagcgcccccagcagctgcggtacaacgaacgacggcagcagcgagaatgtcattgctctccctgttggtatcatgaccgacggcgactgcggaaggaccgttactatcaagtacggcggcaagaccgccacaggtaccgttgtcgacaagtgcatgggctgtgacaacacctccattgacttgtcgcgccacttcttcggcgagttggcctccttcgacgcgggcagag

SEQ ID NO: 18359 - DNA, 286 bp, Emericella nidulans
cagccggcggatcaacttcgactgagctctctgctgtgcattctggcaaatcgcatgtttcaggcttgccgggctcttcaggcacgggaaatgaggccgcttcttctgagtatcccaggtcggcaggctccacataattcgcagaggactctgcgtcataatcgctggctctcgttggtgcgctcgactcaggctcgggcgccgatttagctgctatatcagtctcgggctccggtgcaggttcaggtagtgactcaaattcagtctcgggcttgagttcgttggc

SEQ ID NO: 18360 - DNA, 288 bp, Emericella nidulans
ccgcttcgatccatccctacccgctaacaagcaaatagccccgtcattttcaaggccctcgtctcttcgggacccgtcgtcgttgatttctttgctacatggtgcggaccctgcaaagccgttgctccggtcgttggaaagttcagtgagacatataccggcgtcaagttccttcaggttgatgtcgacaaggcgcgttcgatagctcaggagcatcagatccgggctatgcccacctttgtgctctacaaggacggtaagccgttggacaagcgagtggtgggcggt

SEQ ID NO: 18361 - DNA, 300 bp, Emericella nidulans
tgcctctttcggtggaacagcatcaacacctgtcagtaatccttttgcatctatgaatactggcggtgctagtcagcaagcgcccgcgagcagtttttccggcttcaaaggcaacctgtttaatgtgccttcgactgggagtcagtctcccgcccaacagcctttgccgtctggagggctatttggagctgggtctcagcagagcagctctgcagggggactgtttggtagcagtgctaataatggaccctcggctcaatctggcattgctactccatcaaacggaagcatcttcggcca

SEQ ID NO: 18362 - DNA, 301 bp, Emericella nidulans
cgcgccatcatcccgatctcgttatgtgccgcaagcaacctggcatctccattggccgtctatgcgacaaatgcgatgggaagtgtcctgtgtgtgactcctacgtgcgtcctactactctggtccgcatctgcgacgaatgctccttcggcaactaccagaacaagtgtatcgtttgtggtggcgagggaatcagtgatgcattctactgcttcgaatgtacgcgcctagagaaagaccgagacggatgtccgaagattataaacttgggaagttcgaggacggatttattttatcaaaa

SEQ ID NO: 18363 - DNA, 304 bp, Emericella nidulans
ccggttcggtgcttctcatgcggcaaggttctgtgactcacatcatgtgccggacttattactgacatgccatcatgtttaggttgttggcgatctctgggagcgatacctacagcttcttgacgatggtatccccgatgggtcagtatttccatgggctcttatattacctgtctaaacttgcggacttctagagacgctatggatcaactcgggtgcaagcgctattgctgtcgccgaatggtcatgacacacgttgacttgattgaaaagcttctgcggtaagcatctcgagttattaggt

SEQ ID NO: 18364 - DNA, 305 bp, Emericella nidulans
caatggcggcaggctgaagaactacacctacgagtggttgagacaagaaaaaaaggcctgggcgaggtagaccctcctacgctaaatagcatggtggacttagcttccatatacaagcatcaaggacgccttgctgaagctaaggagcttgaacggcaaatagaggatgctcgtatatggcaactggagcaggactcggacacagattcggaaacatctatcatttcatctatcatgtcggaagcctattctcatgatagcacgacctcctcggggtcactctacgagacccaacgtgctgtccc

SEQ ID NO: 18365 - DNA, 308 bp, Emericella nidulans
tatcagcatcaatagttaactggtttttctcaatcagaaattcatgcgtgaaggttgtccgaactgcgacaatgtccttggcctccgcggcaacaacgacaacattcaagagtgcacctcacaggtatttgagggcctagtcactgtcaatgacccggcaacaagctgggtagctcgctggcaacgactggacggttatgtccctgggacatatgcggtgaaagtcacaggctcgcttcctaccgaagttattgggcatctagaggatgctggaataaagtacataccgagagatggaagtacggctg

SEQ ID NO: 18366 - DNA, 308 bp, Emericella nidulans
cttgctcgccgcaaggatgcgtcctgtacgtttacccacccgatacctgaagctggaattggtctggagctcgagtccgacaaccgtcaccgcgagccgacccgaccttgcctgcgaactgagaaatgataaggatgaggaagagaacatggactaatgaaaatggctctttagctgcccgcatcaagcgcaaccgcaagacccagcagatcaagttcaaggtccgctgcagccgcttcgtctacacccttgttctgaaggactccgacaaggccgacaagctcaagcagagcctgcctcctggtgcg

SEQ ID NO: 18367 - DNA, 312 bp, Emericella nidulans
caaggtacatacctacaattctcatttcagttcgccgacctaatatggttccaactacatctagttcggcatgtacgttctctttcccatcggctggatgtactacttcggcacgaatctcgacgagcgcttcagtgtccccgggttctggccaacagccgaacaatcgcacaagattccgctggagaaggaagaaattgaccaggaactggcgcgcatgcggagggttgatgccttgaagagggagcggcgggagcggcagttggccatgcagcaggaactagaggcccaatctcaagccttggcgcaggc

SEQ ID NO: 18368 - DNA, 313 bp, Emericella nidulans
gctctacccaactctgaaaggcgatcaagtgcttctagactacacaactcagacgcaacgatgcgtaattcacttcgcgcatccagaatttgtgcgctgcgccaccatggataaccatatccgggcacttgcggcgcgacatcaggatgttcggttcgcaagggttgacgtgcgcgaaacgccctttgtcgtcgagaagttgaaaatcagaatcctcccctgcgtaattgggtttttggatggagtggccgtggagagagttcttggcttccaaggtttgggaccagggggaactgctggactggaaggattt

SEQ ID NO: 18369 - DNA, 314 bp, Emericella nidulans
ggagcctacgaacactagctatccgatcaccactcatacgccgaacgttcaattaactcaaaatcatcaatcgttccaactaatctaccgaagtactcggctaagaagaaagaagacggacgaatccgagccaaagccgtacaagcgcgagataccttcgggacagcctaggcggatccatgctttccaacgaagcacgcccatccaacctaggcgagacaagggttcacatttcgttcatcacccttggccggctttcgaacagccggactcccatcaaaagatggttgccaagaacatcttcgttacggttt

SEQ ID NO: 18370 - DNA, 315 bp, Emericella nidulans
aacccccaaaggccgtcgtcaccggtacaaacctggtaccgttgccctcaaagaaatccgcaagtaccaacgctcctacgatctgcttctccgaaaattgccatttgcacgtctcgtccgcgaagttgctctcgacatcctccccgcagacgttggctccgagctgcgatggcagtcgcatgcaatccaggcgctccaggaagccgctgaagcctttttggtacacttgttcgaggacacgaatctttgcgccatccacgcgaaacgagttacgataatgcagaaggatatccacgttgcgcgtaggattcgcgg

SEQ ID NO: 18371 - DNA, 315 bp, Emericella nidulans
caggaacttgcataaacaccatcgaaccgacctgctataccgactacaccccgcaagaggaagttgtcgactacctccaaaaagccgtcgacctgttcaagacgctggacacctacaaagctcttgctgccgcaaacatcaccccttcctctagtgcaacttacacgctagacgaaatccactccgccctctcagacattcacgatggctttgcgccgtatgttggctgtgatggcgacaatctgaacgaggcctggtacttctactatgtccggggtaacttgattacgggagattttgaccctgctgagaagc

SEQ ID NO: 18372 - DNA, 315 bp, Emericella nidulans
gcaccttgtcctgccctgactgggattttggtgtcagaccctgttgtaatgccacgagtgggctaacgattttcctccgcccctgctgggtgggccagatcgattaacagaaggttcatgggatgaagtacatcgagtcataggtcaggcgcacactttattgcatcaacaaggcattgtgaggatccaaactgatattcgcgtcggttcaaggtttgtttttctcgcagtggtcgcaggaccactcgctctgtgtgttaccagcagtaaccgggctaacgtcatgtccaattcaggaccgacaaggtgcagtcg

SEQ ID NO: 18373 - DNA, 317 bp, Emericella nidulans
tcacatggaacctttccccacttcagtcctcaaagttctcatttgagtatttgctactaccaccaagatctgcactaggggccgttcgacccgggctcacgcccaaggcttcgtcacggacccccacgcctgcctactcgtcggggcatcgtttctaccccgacggcgaggtatgggtaacacgcttgagcgccatccattttcagggctagttcattcggcccgtgagttgttacacactccttagcggattccgacttccatggccaccgtcgggctgtctagatgaactaacaccttttgtggtgtctgatgag

SEQ ID NO: 18374 - DNA, 317 bp, Emericella nidulans
gcttgctcctagctctgtcaaaataatcagaccatgctgaccgagcacgatcagcaccctaaataatccccgcgtctctaacgaagccaaggagcacgctcaatcggtcctagacaacgagcttggcggcgaccagcctcatgaagacattttgacagcccagggcgctcgcaacaagtccccaaaccgcgtagccgggggctacaaagcgtatgtttcattgctttaatctatactatttctattcgcggtgtctgactgattgtgcagggcgatgcataacgactccatctcgaagcaggggaaaaagcaggcgc

SEQ ID NO: 18375 - DNA, 317 bp, Emericella nidulans; identical to SEQ ID NO: 18373

SEQ ID NO: 18376 - DNA, 318 bp, Emericella nidulans
ctccatatactacaattcagcgcgacagctcttaactctataatagttgcaaagcacaatacaaaagatagttgctgggtgattctgtacgggaaagtatacgatgtacgggccttcatcacaggactttggctttatcaatgctgaccattacactgtcaggtcactgatttcctctcagagcaccctggtggttccaagataattctcaagctctcgggtcaggacgctactgaagaatacgatcccattcatcctccgggaattctggaggagaatctcaaaccagaggctttcttagggaccgtggactccgcc

SEQ ID NO: 18377 - DNA, 321 bp, Emericella nidulans
caaccgaacaatcgaactattgtcctttatacaatgtttcctacagcacgcctactccaagcccgcgtcacgctcttcacccgtgccggctgcggactctgcgacaccgcaaaacacaccgtgacccagctgcataagcgccggcccttcgactactctgaggttgacattatggctccaggcaataaggaatggaaagatgtgtacgaactcgatgtcccagtcttacacgtgcagtctggcaccggggcactctccgacccgaagaaattgttccatcggtggaccgagcaggaggttgagacgcttgtcgacaacgcc

SEQ ID NO: 18378 - DNA, 323 bp, Emericella nidulans
tggtaacaccatcaggtaaatatagtccgacctagtttccagaagcctacaaccgtcttttccgaccagtgtgcagaagaggaggaaatgtatatatgggggtgtgtgtgtgtgtgtgtgtgcgcgtgtggtcagaaagaatgctagtatatcaacgaaacggtctttatagactcttcatcgctaccagatcagacactggattacgcacgcacaattgtcgcagcaaaccgatacgcgagtcaataaaggaaacccacgactaacattgtcttttttttagatacaacgctaagcgacgacactggcgcaagacccgtctc

SEQ ID NO: 18379 - DNA, 324 bp, Emericella nidulans
cgctcttccttgctttcccatttcattctcatggcacaaacttactaattccgcagtaaactggtaccgcacccgcaagattaactatgacgacgagctctctctacagaaaggaacaattgacatcccagtcctctttattcaagcacttaaagatgctgccctcccgccgcacttgggcaagggaatggggaaggccataccgcagctgacgacaaagcaggttaatgcctcgcactgggcgctctgggaaaagccggcagaggttaatcaggctttagaggcttggttcaacgaggttgttgaagggggtagcagggtggc

SEQ ID NO: 18380 - DNA, 325 bp, Emericella nidulans
gctctttttcaggtacgttggcctccaataaaccatatgaattttctagcattattaataatcctccgattcagctttttcaagaccctaacgaaccaagtcgtgacaatagagctcaagaatgatatccgtatccgcgggacgctcaagtccgtcgaccagtacctgaacattaaactcgacgatatcgacgttctagacctcgataaatatccacatctcagctccgtcaagaacatgtttattcgagggagtgtagtgcggtatgtggttttgccgcggtcggaagttgatgtgggtttgttggaggatgcgacgcggagag

SEQ ID NO: 18381 - DNA, 329 bp, Emericella nidulans
tggtcgcaaggcccagaaggtcacgcagaagttcatcatcaacgcttctcagcccgccaacgacaagatcttcgatgtctcggcctttgagaagttcctgcacgaccgcatcaaggttgagggccgcgttggaaacctcggcgacaaggtcgttatctcccaggttggcgatggcaaggtcgaggttgtcgctcacatccccttctccggtcgctaccttaagtacctgtaagttctaactgctgaatgattctgcacgtcttgtataagactaacgggcgcgtttgtattcaggaccaagaagtacctcaagaagcagcagctccgtg

SEQ ID NO: 18382 - DNA, 329 bp, Emericella nidulans
ttatgtcattgtaattctggtttacaggcgttgtaacaggtccaatgccgggtcttctcacaaaacttcaaccctgataggctacggctagggaataaggtgctacgccaaaggttacgaggaccagcactggcagcatggtatcctaagaaaacagtctcatttcgagatttgcgaacgacgtgcaactccctgggtctgacgacttttgatgaagccgaagacgacagagaagaggccattcagatgtgagttttgctctgcccgtggtaaggtatattttgcttatatataatacagtgccaaactgcgtggaaagggaagaccaa

SEQ ID NO: 18383 - DNA, 331 bp, Emericella nidulans
tccaccctccgttgttccctactggcatcaattactggagaggatattgacaatcatgacgaatagggctggaccgtgtcccgcgctcctcgctgaagcccgaacaggcgtgtccgatttgcagcaatccgtttttagacgacaagtacccactcgttgtgcggttaccgtgccacccgacgcatttgtttgacttggagtgtgtgcggccttggttgagactcagggggacgtgtccgcttgaccggacggatttcgcgaagcaggagagggacaagattgaggagcgcaagagaatagctgaacaggatgacgaggaagagtgggatgg

SEQ ID NO: 18384 - DNA, 333 bp, Emericella nidulans
ccccaaacccatggcacgtcgcgcaacatgtacactttgtatgaaatcgtctgccgcaccaacatcccagccttcaagctgaaacactcggtcgtgcgccgccgctactcggactttgaatacttccgcgacatactagagcgcgagagcacaagagtcacgattcccccgctcccaggaaaggtgttcacaaaccggttcagcgatgatgtgattgagcaccgtcgagaaggtctgcagcggtttctgcagattgtcgctggacacccgcttctgcagacagggagcaaggtgcttgctagttttatacaaggttagttgcatctcactccg

SEQ ID NO: 18385 - DNA, 338 bp, Emericella nidulans
ctatacgagtctggtctaacgattccctccgactcagaaaactactcagccaaccatgacacctcttcaacttcgtcagactccccgctaattctctacaagccatcgacgacgctctggagcgttctgcgtggtgcggcaattaacctatttctccctttcgtgaatggcttgatgctgggatttggtgagctatttgcacatgaagccgcgttcaggctagggtggtctgggacaaaggtatgccttagtcttctcttattacccttcgctcaagctgatcctgtttgctttagatctttcccacgtatcggcgatctcggcctgtagctgctggg

SEQ ID NO: 18386 - DNA, 339 bp, Emericella nidulans
ttggcggcgctcccaaaatgagctcggagcagaagattgctgccgcagagaccgaagtcgaaatgatcacagacatgttcaaccggttcgtcagaccttaccatgtcaacgtctggcaattatatcgcccgccattcatgttttctccagttaacataattctgtcctagattatcggaatcctgctcgaagaagtgcatccccaacgactaccgcgagggcgatctgaacaagggcgagtccgtctgccttgaccgctgtgtcggcaagttcttcgaggtcaacatcaaggtcagcgaaaagatgcagggtgttgctggtcagcagcagggtggtgcg

SEQ ID NO: 18387 - DNA, 340 bp, Emericella nidulans
gcgactacctgcagcgcctgtacggcgtcggcgtcctcagcatacgcagctacgtcgagcaacaaaaggtcacacggctccgaccaatgggtcgatacggttacggaaaactacgacgtccccggtcgcggaagaggatgactgttgagatgaaggagccgtttgtctggccggacgcgcctgaagatatggagaagtatgtccctttgccatgtcccttctccatatgaattggccaaggttcagtgctaacagctagcagggtgggaaaaggaccagttcttcaaagcgaggaagtaccaggataagatccaggaggcgcagaagcccgatgcgccta

SEQ ID NO: 18388 - DNA, 341 bp, Emericella nidulans
ggacccgtccgcctttttgggcgagataattggagctccagtaactgtcaaattgaattctggtgtcgtatacaaaggtcactctcgaggttatcattagcaaacacgcagtcgctaacaaatatgctcaggcgaactccaatcggtagatggttatatgaacattgcgctggaaaagtcccaggaatttgttagcgggcagttgacacgcagttatggagacgcctttatccgcggaaacaatggtatatgctcctttctcggtgtaattagatataatttggtctgactgctctatgaaattcatagttttgtacattgccgcgaattgaaactcgaag

SEQ ID NO: 18389 - DNA, 342 bp, Emericella nidulans
tcaccctctacaaccaacaaatccaagcccgaaaccacaccctcaacacaatcgacctcaaccccagcagttccaatcgcaacgctcgtattaaaaacatacaatcccgaagctgggatatgtttgaaataccggacaaataaagccgctgaggtggggcggctgattacagcgctgggattgttggctgggggtgcagacatggcgagcttggatggaccagtttctgctacgattacagggggcgatgtggagatggggggtaccaacggtgttggtgaggaagttgtggctacggcagcgagtacaggtgcgaatacgggtgcaggtgttgggaaagga

SEQ ID NO: 18390 - DNA, 344 bp, Emericella nidulans
ttcgagcagattgcccagcatatcggccgtaacgaggtcgctaccgccgccatcttctatggccaggctaaagcctctcccgaggacatcgagaagctttcgtctctcctcgacatcgaccatgagaccctaaaagcacagctctccggcttccccgaccgcggccgttcggttgagatgccgccaaaggagcctctcatctaccgtctttacgaaatcgtgcagaactacgggtatgcgtataagccggtactgaatgagaagtttggcgatggaatcatgagtgcgatctcgttttcgactaaggttgagaaggaaacagatgagcaggggaacaactgggc

SEQ ID NO: 18391 - DNA, 346 bp, Emericella nidulans
cttcgccgccgacgaggctggccagccctataaggagaccctcaaggaggtcctctccaagaaccccaatgtcagcgaggtcctcgacgtcggtgtcaactcgacctccgacaagactgcctaccctcaccctgccgtcgagggagccaagctcatccgggacggcaaggctgaccgcggcctcttcatctgcggcactggtctgggtgttgccatctccgccaacaaagtccccggcattcgcgccgtcactgcccacgactctttctctgtcgagcgtgccatcctcagcaacgacgcccaggtgctctgcttcggccagcgcgtgatcggtctcgagctggcc

SEQ ID NO: 18392 - DNA, 348 bp, Emericella nidulans
tgccgcaaattatccagcgactgggctactcaaccgtcaaaactaatctctacaccgtcgctcccaacgtcacaggtgccgtcatgctgcttattctcgcattcagctctgatgctgtcaagctccgctccccatttatcgtcctcgggttcctattcaccttcaccggcttcatgatctacgcttccatctcagacgtccaggcccagatcaagctggcctacttcgccaccttcatgatgacctggggcacatcagcgccgtccgtcctactcagcacctggtataacaacaatattgcgcacgagggccgtcgcgtcctgctaacatctatcggcgtgccgcttg

SEQ ID NO: 18393 - DNA, 348 bp, Emericella nidulans
tgttatttgcggcactggtacgtaacctgagacacgctcatcacaaatctaatggttacagctctttatctcactcgttcgcgatggctaccacttcttcccgtccctgactatatatacgatcgtctaccagccagtttcaccgacgacatagcggcgggactcacgtcgtctgaatttgacctctcaacgaatattgagcatggggatcaacgggccggattggatgccttcggcaagcgcgaagttctgaatatcatgagacgccaaaaggttgattttaatgaagctcgacggatttatacagagcagcggtttgccaagaacaatattggccctgacggccgg

SEQ ID NO: 18394 - DNA, 349 bp, Emericella nidulans
tgacatgcttggtatatagcggagggctcgaaattctctttgccaatgaacgaaagcataaagtgaccttacccgctcaattagaaaatggcactaggccgaatatctcctatctactccaatacctggtcgataatgtgatgaaggatcggagaaaggaactttttgtgcttgaggataatgtgtatgtgctatgcaaaatatagtaatgggtctagctgactgtcactgcagacgacccgggatcctggtacttatcaacgatgcagactgggagctagagggtgaggagaaatacgagattcagcaaggggataatatagtattcgtttctacgctgcatggggga

SEQ ID NO: 18395 - DNA, 350 bp, Emericella nidulans
caaggccacccgatgctcgtcgagctcaagaacggcgaaactctgaacggccaccttgccaactgtgacaactggatgaatttaatactcagagaggtcgtccaaacgagccccgagggagaccgttttttcaagctgcctgaagtctatgtccgcgggaacaacgtacgttttgcgccgccgcagaatatcatctaatctaaccacgaagctctttccagatcaaatatctgcgaattccagaagaaatcatcgatatggttaaggaacagcagcaaaaccagtctcagaatcgcaaccgcgggcctcgcgatggtggacggggcgaccggggaggtcgtggtgggcgc

SEQ ID NO: 18396 - DNA, 351 bp, Emericella nidulans
gtcttgatacaagtaatgaatgacgagttcgatgttgttgtagacgatgaaagtgcaggggaggtagcagatcggattatggaaattcgcaagatggtcgagaatggggagttcgatggcatcagacagatgtgggaggaatgggagaggaaggcggcgaagaagggcgatgctgttgcggcgtttaagaggggggaggatcaggacggtgagacggacgatgatgaggaggatggtgaggaggacgaggagatgggggaggctccagctttagtgagtgctccgagggagcgagttgagcctgaagttgatgaagatgggtttacgaaggtggttgggaagaagaggcgg

SEQ ID NO: 18397 - DNA, 353 bp, Emericella nidulans
tggcaaacgaatgcagggctcagagcatcaacttactataaacagcatgcacgacttggccagcacctacactgaggttgggagactgaccgaagcagaagaactggggctacaggttgtagagatcagcaagcgtgtgctcgggccagaacattcagatacattaggcagtatcgccctcctttcttcaatctacaaaaagcttggaaatctaaacaaagcagaggagtttggaggggcggtggtggaggccagcaaccgtgttcttgggcctgaacaccctgaaactttgatccgcatgcaaaatctggcgtggagctatggctcagcgaagcagaagaattccaacggca

SEQ ID NO: 18398 - DNA, 355 bp, Emericella nidulans
ccgaggacgtccagcaaaccaaagccaacctcatcgcacagctccaacaggagatggctatggccaatgctaagaaactcatcagcgtacgctcgcactctctatccttttcattgcctttttttttcttgatctccgttaggttattttcgagtttggtgcactggctaacttcaatacagaaagttaaccagaactgcttcgagaactgtatcacagcccccggctcctcattgtccgccagcgaatcgacttgcctgtctagctgtatggagaagtacatccagttctggaacgccgccagcaaggcgtatattgctcgcgcgactacgcagactgtcgcggcgaatgcgat

SEQ ID NO: 18399 - DNA, 356 bp, Emericella nidulans
ccggtagaggaggcggtgccgctcgcaagacactgcttgcgccgattcacttcatcttcaaactccttcagcaacgttcaacagtctctatctggttatatgagcagcttgcattccgaattgaagggaagattagagtaagattacttcgttgcgcaggatactgcaatgactgacggtaaggctaggggtttgacgagttcatgaacctggtcatcgacgacgccgtggaggttaggctggccacaaaaagcgaggaagaaaagaggcggccattgggtatgggaatatctattgccactacttttctggctcagtactgatcgtgccttaaatacaggtcaaatactgctcaa

SEQ ID NO: 18400 - DNA, 359 bp, Emericella nidulans
cccagtcaccggcccaaaaacgcgcccttgaatgtctagacgccctcacagacctgatcaaccaagctgttggcgatgctctcagcgacttgctcctcgtcgaagccattctcgcacacaagggttggactcccacagagtggctggccacctacacagacctcccttcaaggcttgtccgggtggaggtcgctgaccgctcaattttcaaagcctacgatgccgagcgtaagcttgagtctccccctggcctccaagccaagattgagtccctgcaatcccgctacaacaaaggccgaagctttgcacgcgcaagcggtacggaagatgccgtgcgtgtgtatgccgaggccgcgagt

SEQ ID NO: 18401 - DNA, 361 bp, Emericella nidulans
tggcaactgctgctcgtccaagggctactgcggctcgaccacagcctactgcggcgaaggatgccagctcgaattcgggacctgcaatgacgccagcgtgcagacggtcagtacaacgggatcgtgcggagcgaccttgacgagcaatgtcacttgcctgggcagcgaatacggcgactgctgctcgcgcatgggatactgtggagggaattccagctactgcggtgatggatgccagtctgagttcgggagctgcgaccccagctcctcgacgtcgagttcgatttcgagctctactgcgagttcaagtgcgagtgcgaatccgaatcttcttgccaatctgactggaaccggcgatccc

SEQ ID NO: 18402 - DNA, 362 bp, Emericella nidulans
gcatcgatagatgaaatcggctcgaaaaatgggagcgtactgaagaaacaaatcaagaggagggttcgaagactggaaattgcgacgagaaggactaccgaccgaccgaccgaaagcattcgatccgatcacaaatgcaccttccattcctcaccaaatgaatacatcaatctcaaatttctaatctgaaggaatactgatgatttcgtccgtagtcacgacgtccgcaagtcgatcgcccgtgtcttgaccgtcatcaacgccaaccagcgatcccacgtccgcctcttctacaagaacaagaagtacctccctcttgacctccgcccccgcctcactcgcgctcttcgacgccgcctcac

SEQ ID NO: 18403 - DNA, 365 bp, Emericella nidulans
cagaaatatcagaatcagggcgctgacaggttactccgacagagatcaagaagagaagacagttccgcaagtttacctatcgcggaatcgacctcgaccagctcctcgacctctcctctgaacacgttcgcgatgtcgtgcacgctcgtgcccgccgtaggttcaaccgcggtctgaagcgcaagcccatgggcttgattaagaagtccgcaaggccaagcaggaggccaagcctaacgagaagcccgacctcgtcaagactcacctccgtgacatgatcgttgtccccgagatgatcggctccgtcattggtatctactccggtaaggagtttaaccagattgaggtcaagcccgagatggttg

SEQ ID NO: 18404 - DNA, 365 bp, Emericella nidulans
ccgcgaaacaaactccaccttcacgcagaaaaacctcaccgttcccgaaagcctcgactacctcctcgaccagagcgagccgtggtaccgcgaccaagttttaggaagctactcgcacggcgtcgcacacacaaccgccgaagttgaggccaacgagaatgacccacgcacctggctgaaccctctcgaggctcgcctgccacttgcaccagacatgaaactctattgcttctacggcgtcggcaaaccgaccgagcgaagctacttctatcaggaggaacgggaccccctcgttaatcttaatgttagcatcgatacaaccgtcacaacggctgatggaacggatcacggcgtcgtccttggtg

SEQ ID NO: 18405 - DNA, 368 bp, Emericella nidulans
caagtacaggaattgctcaacatccctcaggagttccttcgcgatggaatgcagtttgtgaaccgcagtcagaagcgtatgcatagccttttctctctcattttatctgtttcaactccctggatcgtgtttctctttgctcaaaagatgaatgctgaccacaaacagccgacaagcgcgagttcatcaaaatcagccaggccgttggcaccggattcctgattatggggtttattggctacattgttaagctgagtatgcttccctgttctgttcaagttttctggtcaaaaatctttcatagttgagtaaacgcgactgacccgtgtagtccacattcctgtgaacaatgtccttgtcggtggcgc

SEQ ID NO: 18406 - DNA, 368 bp, Emericella nidulans
aggcccgacacgcatcctccttctatctcagtcctgctgcagtcacagttggctgtttcggcttagattttcgtcccttccaaaccactaacttgctttgaaaatagtctctgcctttccagaaggtgcaacatcaggtttcgaccctagatgctcagccctccggtgagcatggtggcatcttggtcttggttacgggtgctctcctggtatgttctataaactaaaacggtgaatacggctgactgtgccgtacaggtcgatgaggaaaagaaccccatgaactacacacagaccttccagcttatgcctgatggtgctggaagctacttcgtcctcaacgatgtcttccgtttgatctacaacgc

SEQ ID NO: 18407 - DNA, 376 bp, Emericella nidulans
ggcggcaatgcgttgtccttattccgtcccgaagagattgaactcttggttcgtggatctgatgagcagctagatgtgaaatcgctgagggcggtcgccacatatctcaactgggggacaccaaagccagagtcggtgcccgtggtgcgatggttttgggagtattttgaacgggcaaatcccgaagcacagcgcaaaatcctttcattcgtcacgagcagcgaccgcattccggccatgggggcaacgagtctgaacatccagctgatttgtttaggagatgactcgccgcggtttccaaccgcacatacatgctttaaccggcttgggttgtacaggtataagacacgggagaagttcgagcgattactctcgg

SEQ ID NO: 18408 - DNA, 377 bp, Emericella nidulans
cactaaaagccaccgcccgtgacggcgtacaaagcctcctcaaccagctcctaactacctgccccatcacctcctcgcaacagggcgtcctccttactctccctgccccctcgacgattcttccacgacacaagcctcttccgacacccaagcctcccaccaagtgggagctgttcgctcgcaagaagggcattggcaagtacagtaacaagcccggggctgctctggcggataaggagcgtcgcaagaagctggtttatgatgaggagtcgggcgagtgggtaccaagatggggatacaaggggaagaataaggatgatgatcagtggctggttgaggtaaaggagaaggattggaagaaggaggaggaggccgcg

SEQ ID NO: 18409 - DNA, 381 bp, Emericella nidulans
ggccgcctctcgtgtcttcgctcagcgcctggcctcgaccatgaaggtcgctcgccctgccgcccgcatccaggcccgcaccctcaccacccagcgcatggccacccccttccagaccatcaagcgccagcaaccctccatgatccaggcctccgctcgccaggccttcgctgcccgccgccagtactcctctgagatcgccgacgccatggtccaggtctcccagaacattggtatgggctctgctgccatcggtcttggtggtgccggtatcggtatcggtgtcgtcttcggttccctcctccttgctgtgtcccgcaaccctgctctccgtggccagctcttctcctatgccattcttggtttcgccttcgtcgaagc

SEQ ID NO: 18410 - DNA, 382 bp, Emericella nidulans
ccattattctctttgaagcatgtcgcatcggcctgctgcctcgcgtccagcggcggctttctgagaaggagcgccagctgatccagtccggctcggttttcgtctgggatgaacgggaagccggtatgcgacgctggaccgacgggaagtcatggagtgccagtcgtgtttccggcagttttctgacgtatcgtgaaatggagggcaagcgaggaggcaccagcgtgtcaacgcaatcgactagagctgggaaaactcccgactcagcacgcggcagcgacgacgatcggggagaggggctcgatgatgggccggacgggtaccggtataagcctgacggcctgatgaagcagtcgttcagtatcaccacctcgaccggcca

SEQ ID NO: 18411 - DNA, 386 bp, Emericella nidulans
ccgccagacttccggcacatctactctttcctacgacaccaagtacgacgttgccgacacctctctgactactgttgcctgctcggacggcgattacggcctcatcactgaagggtacacgacttttggctctctgcctacattcgcacgtattggcggcgcaccaaccattcccggctggaacagccccaactgtggctcgtgctaccagatcacttacacctctgcaactggccagaccaactcgattataatgactgccatcgacactgctcctggcggcttcaacgtcggacagcaggccatggacctcctcacaggtggccgcgccgccgaattgggccgcgttgacatcacttggacgcaggttggacgggagcagtgcg

SEQ ID NO: 18412 - DNA, 387 bp, Emericella nidulans
ttcatcggcggcacagacccctcctaccgtcgcgacatcacagcggaagactacaagctcatcgcagcaggcgatgaatccctactcgacccagaagtcggcgttgtcctcgtcgggctcgatttccacttgaactacctgaagctcgcactggcataccactacatccggcggggagcggtgttcctagcgacgaatatcgactcgacgctgccaaactcggggacgttgttccccggtgctggaacagtgagtgcgccactgattctgatggtgggaagggatcctgttgctttgggaaagccgaaccaggcgatgatggatgcgattgaggggaagtttcagcttgatcgggcgcgagcttgtatggtgggggatcgtgcgaat

SEQ ID NO: 18413 - DNA, 388 bp, Emericella nidulans
tgcagaggagggctgggaaaagcctcatcggtgctcttttgacctgatcatcaactgtgccaattcatccaaggggttcgacctggagaagtacctctccatgatggacgtccacggccgatggatcagtgtaggcctgccagaagaggaaggacaagtgatcaaggcgcaaaatctaatttccaatggtgtgctgatcggtgcgagccatcttggaagtcgccgtgagatgctggagatgctgcaactggccgctgacaaggggctaagaggctgggtggaagaactgcaaattggcagtgaaggattaaaggaggcgatggaacggatgaagaagggagacgtccactaccggtttacgatgacggggtatgacaaggtatttggg

SEQ ID NO: 18414 - DNA, 390 bp, Emericella nidulans
tgacatgtacgcacacctaaacaacactgtctacgcgcaactcttcgactcgatcatcaaccactacctgataaccgagtgcggcatggaccccttctcgtacacttcctcgaccccagccaaaaacgacatcaatccgtccggccaggtcgccattatggtgaactcctactgcgactactttgcgtctgtctcgtacccagatattctggatttaggattgcgcgtgaacaaattgggttcgacgagcgttacgtatgaggtcggggtttttaagcagggcgaggaggacgtcaaggtcgttggcggttatacgcatgtttggtgtgagaggggagtcatgaggcctgcaaagggtggaatggaaagaggaattcgggaggcgttggg

SEQ ID NO: 18415 - DNA, 390 bp, Emericella nidulans
gacccacaatctcagatatagcctgacgcaaacaatgcacgctatccagctgcaatgagtcgatatctcactccttcaaaagttgccctcctgagccttatttctatttacaccgaaggcgtggttccgaattcgtcggctatccatgttctctcgtttgtggtttcttacctgagccccttgggtgcaggagatgcgccgtcatcctcggacggttggccagcacagtattcagtatccatagaggatctagaaaaagcactgaaagtacacccttcttccataccgggcagatctatatgggatcttttcctgcggaagatatggtcaatcgactcatgtgacgcgttagagttgttcttcacagagatatccactacccttgcaaag

SEQ ID NO: 18416 - DNA, 390 bp, Emericella nidulans
gcctctaggttccatattggaagtgggagcatgcttacagtgggattaacaggcttgctcgcgtgaaggcgtttgatcgtcacagtaacatgtatgtggacctatcagctgctgatctactctgaaactgtgagactaactggattgtcttagggttcttgagaacgtcgtatgtttataacttcaaaccacgcccggttcgattccgaggaacgcgttgctaatgagccgacagaaagagatgtggactgagccccagaagggcggcaagggacgaccggtgaacaaggatcgattcatcagcaagatgtacttactactccaccttgttaagagaagaccgtgctgatggcgtcgttactaggttcctacgaggcgacagcgtcatcc

SEQ ID NO: 18417 - DNA, 391 bp, Emericella nidulans
caaatagtttcaacaatgtctgatccatctgctcccactcctgaggcgcctgccgtggttgaacatctgaatatcaaggtcaccgacaacaacaacgaggtttttttcaagattaagcgaacaactaccctgaaaaagctcatggatgcattctgtgaccgtcaagggaaacagccgtcaacagttcgtttccttttcgatggaacgcgcgtacgcccagaagatacaccagacacggtacgtcttgtattgatcttccgtatactcatttccttggactcaaatcaaaatttactatttggttaattctgctaacatgcttgtctacaccctagctcgacatggccgatggtgatacccttgaagttcaccaggagcaaatcggcggtgg

SEQ ID NO: 18418 - DNA, 394 bp, Emericella nidulans
gcggtcaaagcctgcaagggatcacctgcggcattccccctccatttccgtgacgtcgaactcgagctccaagaagttgatttccaaccagaatttattcgcaatatcataccccgcgtcgattgggaggcgctgcatagaatgggcactgaagtatgcagcaccattgtcactattgtactctatcttcaagtgttgccagagagctgactcttgtaccccgatcagctcaatttcccaaatattccagaaaccaagcctgaaggtgcagcgcttgaaaacgaacagcttcttagagaccttcatcggctgctgctggagacacaggttgccgagggcaagcttatatgtggtaattgtggccatgagtacatggtcaaagagggaatcgcca

SEQ ID NO: 18419 - DNA, 394 bp, Emericella nidulans
atataagctgctgttggaaatgtatcaggaggaacatgggcctgagcattcctcaactctgacgagtatggctaacctggcatccacctattggaaccagggacgatgggatgaagttgaaaagctgggggtcctagtaatggagacctcgaagatagtgctaggagcagagcaccctgatacactgacgagcatggccaacctggcatccacctggaaatctcaaagcaggattacagatgccctaacactgattgacgtgtgttgcaagctgcgcaacaaagtcctagggccagatcatcctgatacaagacactctgctgatgtatttgatgcttggaagtacgaaattgatttgatctacagaaagcttccgtgcccatcatctcagata

SEQ ID NO: 18420 - DNA, 395 bp, Emericella nidulans
tgcgtgctgtgatggctgctgtagtgacaaacttggctgcttctgtaggtggtgtcacctggtgcttgctcgactaccgtctagaaagaaagtggtcaaccgttggcttctgttccggtgtgatttccggccttgttgccattacccccggttctggcttcgtgactccctgggctgcgtttatcttcggcgttgtcggtgctgctgcttgcaacttcgcgactaaagtcaagtatctcatccgagttgatgatgctctcgatatcttcgctgtgcacggtatcggtggtcttgtcggtaacctcctgaccggtctcttcgcagcgtaagcccttccacctgactctttgctaatctaactaacccactatgtagtgactacattgcccacctgg

SEQ ID NO: 18421 - DNA, 397 bp, Emericella nidulans
cgtgaattgttagagcttaaggcgaagctagctcaacaggaagatctttctctcgcagccgtcggcaagatgaggagggcggaagctcttgcgactgagatgcagaaggaagttactgccgagagagaggcaaccgcacagctcttcaaggacaaggctgccttggagaaacagctgaaggaggcacagttgcggtgtgttgacttggaaacaaaaagctactcctctggtagccaagatataagattcctccacaaaagaatcaaagaggtaagcaagcgacttatgctagtcccagaggattaaatatctaacacgccttttagctggaaactcatctggaagaacaagaagcgaagaataactcagagcaacggtctttgcggaatgttgatcg

SEQ ID NO: 18422 - DNA, 398 bp, Emericella nidulans
cgaccagctctctcggcctccgcggccagaccgctgcctctctgcaggccttcaagaagcgtaacgatgatgcgcgccgcaaggttcagctcctttctgagcagccccagaccgtcgacttcgcccgctaccgcagcattctgaagaaccaggccattgttgacgagattgagaacaacttcaagaacttcaagcccgctacctacgaccttgaccgccagctgaaggctattgacgccttcgaggcccaggctatccagagcgctgagcagaccaagggcaaggttgaggctgagctccgcaacctccagaagactctcgagaacatcgagaccgcccggcccttcgacgaactcactgttgtatgttctcctgcctttttacttgaattcttgggc

SEQ ID NO: 18423 - DNA, 400 bp, Emericella nidulans
cctcgcgagcggtgagaacaaggtcgaaatggaaattgacacccgtatggatttgccatatccgtgtagaaactcaaccttcaatgatactgatctttttctaggaatcccatcatctgccatcttcacatttaacaaagaagaccacacgctcggaaacttgattcgttcccgtctgctgcaaagctctcatgtcctcttcgctgcatacaaggtatggcccccttgatggcgtgttgcgatgattttcgaaagcaactgctccatattttatgctcggctgctccatactgacccaaaaatcaggttcctcatccgctggtacctaaatttatccttcgtgtgcaaacggatggagatatatctccaaagcaagctgtcattaccgcatgcaacgagc

SEQ ID NO: 18424 - DNA, 400 bp, Emericella nidulans
cgacagttccttgccgtcatcggcgacgaagagtaactcaacctctcaccaggaactccaaagacgagattaaacgctaaccaaaccctcgtcttagctccgtaactggccttcttctcgccgggatcggggtgagtgtcctactcgtcaaaattaggaacgataaactaatcaccatgcatagcacgtcacaggccctccggattcccagcggaatttcctcgtcgttgacgcaaagacagagaactcaactatcgaaaacgcattccagaacttcacacaggaacgaaacgatatcgctgtcctcctgatcaatcaacatgtatgcttattagtcgattgcttgtcctcaagtatttcccacacggcttgcaatatactaactaccagcacagatcgc

SEQ ID NO: 18425 - DNA, 400 bp, Emericella nidulans
atgaaatccatcgctcttacctctctttctctcctcccgtccgcgctggccagacaatttacttggctggtgactccaccatggcgtccagtactcctggtaagtgtggcttttgattgaccttaagagcatcatgctgactggctgactttactaggatggggtgactacattgccgacagcgtctcggttgaaatctctaaccaggccattggtggtcgtagcgcgcgctcctacacccgcgagggccgcttccaggccatcgccgacgtccttcaagcaggcgactatgttgttatcgagtttggacacaacgacggcggctctctctccaacgataacggccgtactgactgccctggcgatggcgatgagacctgtgagaccgtgtacaacgggg

SEQ ID NO: 18426 - DNA, 401 bp, Emericella nidulans
ggcagcttctatagcgcccgagtgcaacgatcttaaagagtgtgcagttacagtcgcccacattatgaaagacaaagctaactcgtgatctgcccaggaaatatgacacttgctttctgaagtggtacagcgagagtatgctccattcctcctaatatcactattagaagcccaaattaagacctacagagtacctccgtggcaacacaggctctactgaatgcgaagaactcttcgccaagtacaagtcctgtttgactgtatgtttgccacccaacctggattttgcgcagtggtcttggagaaacaaaactatgaaactgacttattatcatacacagaaaacgctcaaggaacgaggcattgatacaatgctagaagaagcgcggaagaacacaccg

SEQ ID NO: 18427 - DNA, 402 bp, Emericella nidulans
cctttgccttcggggttgagctcgagtgatacatgttggattcgatgcggtgggtgtgatgctaaccaatgttttgcaataggtacggcaagggttcccgtcaatggtgtgtagccttcttccctctataattttggcgaatatgcgaaaataagtggatatcggaaaagcaatggaactgggaattggacaatgatttcgcatggatataatggatgttgatgggttctaactcgaatattcgaacagccgtgtctgcgctcaccgcgccggtctgatccgcaagtacggggtatgaaattcttcctcgagattgagcttggtaatgctgggatttggtgactgattgggacttggtttagatggacatctgccgtcagtgcttccgtgagaaggcctccg

SEQ ID NO: 18428 - DNA, 403 bp, Emericella nidulans
tcgctacaccgtccgtaccttcggtatccgccgtaacgaaaagatcgctgttcacgttaccgtccgtggccccaaggctgaggagatcctcgagcgcggcctcaaggtcaaggagtacgagttgaggaagcgcaacttctccgagaccggtaacttcggcttcggtatcagcgagcacattgatcttggtatcaagtacgaccccaacattggtatctacggcatggacttctactgctgcatgtgagttggacacttttcgggccatgagctctcttcttagcaaggctatcaggactgatacaaggaaacaggacccgccctggtgagcgcgttgccaagcgtcgccgctgcaagtccaccatcggtgccagccaccgtatcaaccagaccgagactatgc

SEQ ID NO: 18429 - DNA, 403 bp, Emericella nidulans
aaaagtggcggtgccggtggcggtgctcaacagcaacagcaggagaagcccaaaaaggaaaacattctcgacttgaccaagtacatggacaaggaggtccgggtcaagtttaacggtggccgagaaggtacggttctctcgcatctgggacagctatttatgggatatctttgctgaaacatgaccagtttctggaatactcaagggctacgatcagcttatgaaccttgttttggatgatgtgaaagagtcgatgcgtggtaagttgcgcatttcaatctggtagaaccatcagtgactgataccgtgcagacgacgagggcaacgagaccacacgggctctcggtcttattgtcgcccgtggcactttgatcgtgctgatctctcccgccgatggtagcga

SEQ ID NO: 18430 - DNA, 406 bp, Emericella nidulans
ggcccagcgaaccgcctaacaaacccaggccagcgtcaatgaaacccgcaaagattcctcggcctccaaatgcgttcatcctctataggcagcatcattaccccaaagtaaaggaggcacgaccggacctctcgaacaacgaaatctgtaagttccttgccacgccccagcggtgtgagataagctgaatagacaagcggtgataataggaaagaaatggagagcagagccggaagaggggaagctgcacttcaagaacctagcggaagagttcaaaaagaagcacgcggaggaataccctgactaccagtacactcctcggaagccttctgaaaagaagcgtcgtgcggcttctcgcatttctcctaagaattcgaagcgtactgtggcccttgagaaccctggg

SEQ ID NO: 18431 - DNA, 409 bp, Emericella nidulans
gggacgtcaacatggagcgacaacccgtgaagacaatccccattcatgaacatctccgacctcgtctatgcgatacgtacgagaacgacagcatctttgataaattcgaggtggtcttttcgggcgatgcagagaacgttatgacaggcagttacaacaataatttcatgatttatcctaccgatcccgcgaaggaaaccgagattgttttgcaggctgacaagtctgcgttcaaggcgaagaaggtcggcgtaccaacgccgatgaataagggtgccaatgggaagaagagtaactcaaggaccagcagccctgctggtcctggcagccgcatgaagaaggagacagatgcagatcaaattgattttaacaagaagatcctgcacatgagctggcatccgtttgagga

SEQ ID NO: 18432 - DNA, 410 bp, Emericella nidulans
tgacaattctacagcctggcccatcgtcgatgaggctctctctcagcagctcctcgacctcgttcagtctgccacccactaccgtcagctgaagaagggtgctaacgagtacgtactccgctcatcctgccccgcgttccaaagtcttgaacatcactaacgatcttttcttgtttcaggaccaccaaaaccctcaaccgcggtacttcggagctcgttatcctcgctgccgacaccacccccctccccatcatcctgcacctgccgctcctctgtgaggacaagaacgtaccctacgtctacgtgcccagcaagcttgccctgggtcgtgcgaccggtgtttcccgccccgttattgcggctagcatcaccaccaacgaggccagtgatctgatgccccagatccgcgc

SEQ ID NO: 18433 - DNA, 411 bp, Emericella nidulans
cctggtccgggccgctaaaaacagacgcgagggtcttgttagagttctccttaggaatggtgctgaagggtatgggaaggatcgggatggtaggacagcactatgggagggggcgtcaaacggccatgggaatatcatcaagctgctgcttgagaacaggctgaagttgagtcaaagagtaatgatggccgggcactactatcagtggcagaattaaatgggcacgaggctgtggtcaagctgtcccttcaggacggtgctgaagttaattcagaggataatagtggttgcacaccactatcatgggcagcatcaaatagatatgaggaagcaagcaagctactccttcagaatggtgcagaagttgattcaatagatagtaatggtcgaacaccactatcatgggcagca

SEQ ID NO: 18434 - DNA, 412 bp, Emericella nidulans
tccgcggctttcgacgtgatcaacgctaccctccagagcgacgaagccgagcgcaagaacgccatcaagagtgcccagactatcgttgctttcaacctgaagaacgccagcggcaaggaagagagctggtacctcgacctcaaggagaaaggcgaggtcggcaagggtgctgctcctgccggcaagaaggctgatggtgagtttccatctattcaggaattatgaattgggcatttgtgtgtcgaaggctaacgttatttgattgtcagtcacccttaacctttcggacgctgacttcggttctctcgtttccggcaaggccaatgctcagagactcttcatgggagggaagctcaagatcaagggcaacatcatgaaggctacgaagatggagcccgttttgaagaaggcc

SEQ ID NO: 18435 - DNA, 415 bp, Emericella nidulans
atcacccgtggccgttacgccggtaagaaggtacgacacgatctataaatctttgtttttgcgcgaagagggactgcgttctggaaacatgataggggactgggagaaatatcgacaactggacgttgattcaagaaggaaatgggcgaatgcgagaatcgaagatattgggagttctgggttcagattgtgctgacgaggcccgtttgcgattttacaggtcgtcattgtccagcctcaggactctggctccaaggctcaccccttctcctacgccattgtcgccggtatcgagcgctaccccctcaaggtcacccgccgcatgggtaagaagaccgtcgagaagcgcagccgcatcaagcccttcatcaaggtcgtcaactacaaccacctgatgcccacccgttacactctc

SEQ ID NO: 18436 - DNA, 417 bp, Emericella nidulans
gcaggccaagaggccgtcaacagtgtcaacgggccaatggccaagacactcgaggagatcgttctctgggctcgcaccgtcgtcggccagcagccttggctcactgatccaaagtgccttcccatcccctggcgggacgttgaggtaaagaagacattgaaaattggtgtcttgcaccacgatggattagtgacgcccacgcctcccgttacccgtgccctgaatgagacagtgcagaagctaaaagacgccggccataaggttgtgacgtgggcaccgacggagcataaggacctgctcactacgctggccaaattcttcgtcgctgatgggggcaagagcattcgcaagctcttggagccaacaagcgaaccattctgtccggagatgaaggcatacgaggatgcggcggaactc

SEQ ID NO: 18437 - DNA, 418 bp, Emericella nidulans
caacgccatttccagcactgttctcgacaacaagaatatcttccacaatctcgaaagcccggtatctgagtcaggttccaacttatcccaaggccaacgacaactactgtgcctcgcgcgagccctgctcaagaaccccaaggttctcatgatggatgaagccaccgcgtccattgactacacaaccgatgccaagatccaagagactcttcgtgagcttcgtgacaacacgatcatcaccatcgcgcatcgcctgcaaacaatcattgattacgacaaggtcctagtcttggaccacggccgggttgttgaatttgaccacccctggacgctagtcaacaaggaaggcgggattttccgaagcatgtgcgagaacagcggcaacctggagactctcctggagctggcgaagaaggcg

SEQ ID NO: 18438 - DNA, 420 bp, Emericella nidulans
gcaaaggtcaaggcccagcaaatcattgatgagaacggcgttggtatgtttttcctccgatcccgcgataagactagagcgaggctaacagggtcgatttggtaaagtcgtcttctccaagtcctactgcccctactgcaaggccagcaagagcctcctgagcgaactgggcgccaaatactacgcgcttgagctggataccatcggtacgttgcgtttacctggctccgttattgttgtaacttagatgggtaactgtgaaccgctgctaacgactttttttcatagatgacggagctgacctccagaacgcccttgaggaaatcagcggccagcgcaccgttcccaacatctacattgccaaaaagcacattggtggaaactcggacctccagggtatcaagaaggatctgcccgcgc

SEQ ID NO: 18439 - DNA, 420 bp, Emericella nidulans
gcgatccgaaacggtgctcagggaagaggctgatgcacttcggattgatgcgagagctggctatagggcagaagtttcaaggggttgttgtatcgtacgtttggcatacaacaaaattacgttcagcaacttataggataacacacaggcctaatgcgaagagagtcgtctcccccgcggatagagacttgctagaacaatatggtgccgccgtggtggagtgttcctgggtgagggtgaaggaggttccgtggtcgcggattggagggaaatgcgaacggctctgtatgtcccttacagctatctgaatgcatgtaaccgtatgcgctaacttggctagtaccataccttatcgcagcaaacacagtcaactacggaaagccatggcgattaaactgcgtcgaagccctagccgcttgc

SEQ ID NO: 18440 - DNA, 421 bp, Emericella nidulans
tcacaaaccaaggcggcttccttaagggtctttaccgcggccaggctgttacctatctgcgtgaagtccaagcttacggcgtgtggttcctgacttttgagtacctcatgaaccaagatgcgaagcgcaacaacgtcaagcgtgaggacatctccagtctcaaggtcgctacgtatggagggctagccggtgaggctctatggttgtctagctacccgatggacgtggtgaagagcaaaatgcaaagcgatgggttcggtgcgcagcagcaattcaagagcatgaccgactgctttaagaaaacgtatgcggcagagggactcgcgggcttctggaagggcattgggccgaccctactcagggctatgcctgtttctgcgggaacattcgctgtgtatgttttctctcgtaaaccggtcaa

SEQ ID NO: 18441 - DNA, 423 bp, Emericella nidulans
cagggaccggtacctgaggacaagattgacggcttcgttgttgccgccccggcgctggctatcggcctctggatctttggatggacggtgccgcccatcgtgcatgtgcattggatcggctctatgttcggcgtggccctgatcgggttcgcggcgacggagttctcctacacactgagtgggtaccttgcagacgcatatacagtttatgctggctctgcgatggctgcgagttcggtgctcaaagccattgcgtcggggtgtctaccgctgttcgcgtacccgatgtattcgggcctcgggtcgaatgtcgccacaagtataattgcggcgcttgggacagtgtactgcattacgccatgggtgtttgtcaagtatgggctaaggctgagggaaaagagtccgtttgcaaggtatagtgcg

SEQ ID NO: 18442 - DNA, 423 bp, Emericella nidulans
cgacaagcccgcgacgaagttggcgacgcgaccgccgcttctgaggtcaaggtaatgcaagttgctacaatgacaaccgattttgcggttagtttcagccctaacccagctcttaggctggagacgtaactaacaatctcagtgtcaaaacgtgctgctacaaatgaaccttaacctcttatccacagctacactgcaaagaatttcacacttgaagtctttcatcaaacgctgccatgcctgcttttctacgactaaggatatgaacaaacagttctgcccacgatgtggcggagatactctcacgcgtgtatcctgcacaaccgattctagcgggcagttcaagatgcatttgaagaaaaacatgcagtggaacaacagaggaaatgtgtttagcgttcctaagcctgtccatggcagcgc

SEQ ID NO: 18443 - DNA, 424 bp, Emericella nidulans
catcaaacacataaaagcggatttgctgactcgttgttctataatcacagccatgataccccctactatttactactccagggttggccttgaacttggcaagctggtgttccgtggacagaacatgactcctccgtaagcgcacccgccatggcatgtcagtcgtcaacatcaaccatcccactaatcctatcttaggagctctgctaccttccagtcatacttccagcctctgatcaatgctcttcgcaaccctgcttcccttcagaacgccaacttctcgccccaaaatatcctagcccgtgtccgcaacgcgaacaagaaggaaatcgccctggccggtgttaccgctgcggaggtcatcggattctttacagtcggagagatcatcggtcgtttcaacatcgttggctaccggggtgag

SEQ ID NO: 18444 - DNA, 424 bp, Emericella nidulans
cggcgggattgatgcgttctgcggtgcggcggggagtgggggaatgctgatgggcgtctctagtgtcttgagaacgaaacggcctgaaaccaggattgttgtcctagagcctgcgtctttgcccgtgatttcagagggcggcgcgggtgtgcacggttttgaaggcattgcaccgggtttcgtgccaccgcatttggctcgagagatgtatgatgaggcgtgggggatcgacgaggcgaggcgagggctatgtgtcggagactcgccagggaagaaggcattttcttgtcgggacgtcgactgggctgaatgtcgttgctgctgtgagattggcaaaggagctaggccggggaagacggtggtcactattgcttgcgattccgggttgaagtatttgaacggggatcttttggcggatagttag

SEQ ID NO: 18445 - DNA, 425 bp, Emericella nidulans
ggaagcgttcctgcgggagatgcgtgaatacatccttcccgaggtgctggatgcttacgttaagggagatatcgaaacactcaagctttggctctcagacgctcagttccacgtttatgaagctctcacaaaacagatcaccacagcaggtctgaagtcggatggtcgtatccttgatatccgcggagttgatgtcatgagcgcccgtatgctggaccccggtgatatccccgttttcgtggttatgtgtcgcacgcaagaagtccatgtttacagaaacgtcaaaacaaatgagctcgccgctgggatggaggacaaggttcagttggttaactatgtcatgggtctcacccgaatccctgaagatgtgaacaaccccgagaccaagggctggagattgatcgagctccagaaggctgctcggg

SEQ ID NO: 18446 - DNA, 425 bp, Emericella nidulans
tcgacctcctccgcctgttccacaaaataaccctcctgttcctactcaaaatcggccgcctcccccaccgcctcagctacctattcgacgtagttctacggctgatagtcgggccagtattcctcacccacgtcaggctggtgaggacgttgaaggcgaggtcaccgaatatgatggtgattatgataccgacatcgcttccggtgccaagttcaaggatgcattgaaagcacatggtcgggactctagcattgatgaaggaactgccaccgacgatcaatctcttcagtcgcctcgcagtccgccagagaaccgtccaccaccaccgcctctttctgctcccagaggggttccgcctcctccaccctctcaaccaccaaaaagttccggttctggcagagcttctatagatgcgcccagggcgc

SEQ ID NO: 18447 - DNA, 426 bp, Emericella nidulans
cgcccaaactcccaaatcctctctcccccgccacttctatacctatatcttccggcgccggaacatcgtcgccttcaccatcgccatcaacgcccacaccagccacgtcctcaaaccacacccacacatccaccctctctacgacaaccctcacaccatcccccgccgtaaaccccaccacgacatacccgaaccctcatcttccggtaacgggtctcgaaacgcttgaaacggacaagttccgattgacgtgttttcaaacgctcactgggacgaagttcctactattcacagacccgcttatggataatgtggatatggtcatgaaggggatatatgagctctatgcggactatgtgatgaagaatccattttatcagattgagatgccgattaggtgtgagaggtttgatagggggctggggg

SEQ ID NO: 18448 - DNA, 427 bp, Emericella nidulans
gcggtgggaatagtatcgaccctattttgggctacgttgaccgatttcatgggcggcaaaaggtacctggtcgggtactttattgccatcactggagtcgtcacctcggcaatgattcttacctgctttgactccacggctacagtaatgggcgcgtactactgggccggcgcggtgtacgcctgtcaggccacgttctttgcgtggtgtaacgatgcgatgcgctacaaggacgagcggctccgatcagtggtgattgcttccatgaacatgggcagcaacgccgtcaacgcttggtggagtatccttttctactcggctgatatggcgccgaagttcacgaaaggcatgtgggcgatgatagcggtgtcaatcgcattggctttctggacgatgggaataacattcctgacggtgcgagaggaga

SEQ ID NO: 18449 - DNA, 429 bp, Emericella nidulans
gctcactgtctccccggctgacacatctcttcagacgaagaatgtggtggctcagacaaagcctgaggagaagaagccagcgaagaaaagaaagtcctggggccaggaattaccagttcccaagacaaacttacctccaaggtgtgtgatacctcaagagtcaactccttactcctgctaataactaccacagaaaacgcgctaagacagaagatgagaaagagcagcgccggattgagcgagttcttcgcaaccgcgcagccgcacaaacctctcgcgagcgcaagagacttgaaatggagaagttagaaagcgagaagattgatatggaacaacaaaaccagttccttcttcagcgtctcgcccagatggaggctgagaacaaccgtttaagtcagcaagttgctcagctatccgcggaggttcggg

SEQ ID NO: 18450 - DNA, 430 bp, Emericella nidulans
gcgagagagctgcggcacaaccaacaaccgcaccacctccttactccgaggggcagcctgcccaggccggcgctacggtgccagcggcaattcgtatagcgccgctacttaccaggaacgacatctcacagcagaagaggaggaggagcaggaagttcaggcagtcaaacaagatatccggttcatgaaacagggcgatgtcgctccactcgcaacgccctccgcattgccgcacaagccgaggaaacctctcgagagacgctcgctcgccttggtgctcagggtgagatgatccacaacacagagaagaacctcgatgtggccggagtggaagggcgtatcgcggatgaaaaggctcgcgagctgaagacattgaacaagagcatgttcgccgtgcatgtgtccaacccattcacgagtgctcagcgaa

SEQ ID NO: 18451 - DNA, 430 bp, Emericella nidulans
caagcggatccgacgtttggacccgaaggaggtgcggaatagggaaaagcacaagtctgctgttcccaacctagggaaactagaggatgccgcagactaccttctagatccttcagctgcgggatatacatcagccagtgaaacggagctggacacggatgctgaggtcgaggtcgcgggaacgacgacaaggaaggtattgacgaagcgggagatgcagcgtatgaaaacaggggagaaagtcgaaaagaagacaactaccgccgaagtggagaaacgggctgtcaaattggtcgaactgggcccacgaatgaggctccgattgatcaaagttgaggaaggactgtgtgaagggcgggttatgtggcacgactatatccacaagtcccagcaggaggtcgatgctttggataaaacttgggatcaaaaa

SEQ ID NO: 18452 - DNA, 431 bp, Emericella nidulans
gtccttggccgcaccggtatgcataccaatccttattcgatcgatcgatcgatcaatgaatatatcgaaatctcttgctgggtggtcagcggcggcagatatattagagcgccgctggactgcgacagggctaaagggatgtgccgttcttggagatatggaggctaataggagtcttgatgataggttctcgcggtggtgtcacccaggtgcgcgtcgagttcatggatgatcagacccgttctatcatccgtaacgtcaagggacccggtacgtttatagtgtgatatcgcgacatgcagagccctccaatcaaacccatccggcaaagcgagacattaaactatgcgaggggagtactaactaggatcgtttcattcagtccgtgtcgacgacattctctgcctgctcgagtccgaacgtgaggcccg

SEQ ID NO: 18453 - DNA, 432 bp, Emericella nidulans
tgacgccttccgtctcattcagccccagacggttgtcatgggtcaagagccccgacaaaccacctccaacctgggtcacctgaacaagccgtctatccaggctctgatccacggattaaacagacactactacagcattggcatcaactaccgcaagacggggcttgaggagaacatgctaatgaacctgcacaagcaagtctggaccgaagcgttgcagatgaatgactttcacgacgaatgtcagcacaatgttgaccgcatgaagcagctcgttaacttggccgagggctacgagaaacgagtgaaggaggagacggagctcactaaggaccagctgaagacaagatatgtcggaaaggttgaccccaagaagcgtaagtcatcatacctaccactcacaatgtcaggacggtttcttaacaaatgcgt

SEQ ID NO: 18454 - DNA, 433 bp, Emericella nidulans
acggggacactcgagcagcacagggagtatcttcggaaactcgaagaagatcctcaccagattgccgttctggccaaattcaataatacgttcttttcgtaccaccagatctactgggctaaggtgtgttgcctacgtctagttcaaattgtttttcgctgacaacgtccaggaagacagcatcggcgcacactacgacgccgacgactgggatcgcgggcgccactcgctagttggcgacgtgcgcttccgcggccagcatcgggtaatagtctggtggtgcagtatcatgcattatatgttcctggatgagtcacgcacgaggtacattgtcggcgagccggagttcacgaatctgacagtgctggcctacgatcacgctacgggatttggtctcgagaaactgatcgatctcccccataagcgctctgcc

SEQ ID NO: 18455 - DNA, 434 bp, Emericella nidulans
ggcattcatgcatcagatacaagaggtttcagaactcctgatgcgttgtttcgcacgcggactgggcttcctagatgatttcttcatcaaagcacacgatatctcgaggccgaaagcacagacaacatgccgattgctgcactactctgccctcccgccgccgtccgagtcaccggcaggggcaggtgcagaaggccagccctacctcagcgcgggcgcgcacgtcgactgggacttcctcaccctcctcttccagaaagagggtcagtcgggcctggagacctgcccgagacgggagagcgtcactgaattcgggattggagacgaatggaccaagatcgagccaaggacgggcgagatcgtgtgtaataccggcgatctgctgatgagctgatcggacgatcgttcaagagcaccttccaccgggtcagggc

SEQ ID NO: 18456 - DNA, 434 bp, Emericella nidulans
gcccaccgcatcgtaacccaagtcgtcgtgaccggcgcccgtgtcttcggtcgcgccttcgccgaagcatacaagcaagcctctgcggcctcgaaatatcaacagaagaccggaaaatctgccggtggttcgtcctcctgcggcatcacactcgatgaggcatgcaagatcctgaacgttaagcccccacaagccggcgaaacaaatctggaacaagtgatggagcggttcaagaaactttttgacttgaacgatccacagaagggaggcagtttctacctgcagagcaaaattctcagggcgcgcgagcggatagaggcagaggttagggaggcagagaggaaagcggcacatgagaaagagttgaaagaagggtggaagccgaaggtctacaaagatcggtgatttgatgctttggtgatggaatgggttgg

SEQ ID NO: 18457 - DNA, 435 bp, Emericella nidulans
tcccaagtggcttgctttggtagacggcattctttccgtatcagatcaagcaaatctaacaacgcctaggtgtctgtcgtctccgctgcgaacagtgtccaagcctacttctccagctcctacacgtctgagctttacaatggccgcctagcggatggtagcccgcacaccaacgcgcactcgtcccgactcttcggcacctggacgttcctctctgctgtcattcgcttctctgcagcctacaatatcacgactcctgtagtgtacgaccttgcggcgtggacgtttgggatcgccttggtacactttgttgtggaatggctgggatatgggagtgcgcagctcaagggccggtttgtgtttccgttgctggtcgcatccggcagtttgacatggatgttgacccagagagatgcctatcttggattgtaaact

SEQ ID NO: 18458 - DNA, 436 bp, Emericella nidulans
cgctgggatccttcgtttgtcgtgttgctgatacctacaactttattggcatcgcccttgttagcatggtcctcatattcggcgtttttaagaaaggctatacaggttcgtctccgtcatgcgcagcttgatgcggtctgcttaccatagctttgaaacagaagaatcccttttggtaatccgcggtttaggcattcaaacatccacatcttctcctacttatctatccaaggctgcgacaaggttcatcccaacgacagaaattcaagacattgtcatacacgaggctttcaaggggttcgaagtgcgcttctatttggcggtgattgttgtaggggagcctgaggtggttgtggtcttcccggtaaatctctcgattatgcgctcctctacagaaaacgcatgtgcttatgctattatgctcagaaactcctgc

SEQ ID NO: 18459 - DNA, 436 bp, Emericella nidulans
gctcgccacttcgcggagacggtcatcaaaatcaaacagaaggcgcctaatattttggtggaatgcttgacaggtgattatgcgggagacttggaaatggtcggtgtcgtggcccgatcaggtctagatgtctacgcgcataatgtcgagactgttgaggccctaacaccacacgtccgcgaccgtcgagctaccttccagcagtccctccgtgtgcttgaagctgcaaagaaagccaagccatcgcttatcacaaagacctctcttatgttgggacttggggagaccgaagaacagctctgggatgcgctccgccaactccgcgctgtcaatgttgatgttgtgacgtttggtcagtatatgcgcccaacaaagcgtcacatggccgtgcacgaatatgttacccctgaccgatttgaactctggcggcagcgtg

SEQ ID NO: 18460 - DNA, 436 bp, Emericella nidulans
gctctcaagagtgctttgcagtcaatgtctgatccctcatctgagcctccaactctggtcaacgttgcgtccaaggcgcgtgtgcagcggctaatcgagagtgctcttgaagctggtgcccatataattcacggatccgtaactgcagactctgacgcagcaaactcagattctggagtccgtatgccacccgtccttctaggtggagtcaaggaggatatggccgtatggcaggatgaagcgttcgcttcattagcagcttgcatgacattcgacacagaggaagaagcagtccggattgcgaatagcagcgggtatgggctgtccgcggcggtgtttactcaggatctgcgaaaaggtctggcgatcgccaggaaaattcagtctgggtaagtaaccttgtaatcaacctcattggttgcaacatatgattttt

SEQ ID NO: 18461 - DNA, 436 bp, Emericella nidulans
ctcgccatccacaacgccctctccaagatcagcccttacttctccattgccgctggtttcggtaatgtgcacggtgtctacaagcccggcaacgtccgcctccaccctgaactcctcagcaagcaccaggcctacgttaaggagcagactggctccaagaaggacaagcccgtcttcttcgtcttccacggcggttctggctcttccaaggaggagtacaaggaggctatcagctacggtgtcgtcaaggtcaacctcgacactgacatgcagtacgcctacctcagtggtgtccgtgactacgtcctcaacaagaaggactaccttatgtcaactgttggcaaccctgacggcgaggacaagcccaacaagaagttctttgacccccgcgtgtggattcgtgagggtgagaagaccatgagcaagcgtgtccagg

SEQ ID NO: 18462 - DNA, 438 bp, Emericella nidulans
gcgccggcaacaacaactccttctggtacgcacgtcgccaactaaacctgaccgaagatcaccttctacgctacagattccttaacgagttcgaccgcgccatgcagttgacagaatccaagtacggctggctccatgcgccccaggcttatatttctctcaagcacgaaggagataaagtgcttgtctttgagcgggcggatttgctatggattttcaatttccatcctacggagagttttaccgattatagggtcggtgtagaacaagctgggacttatcgggttgtgcttgacactgatgaccaggcgtttgggggcttgggaaggatcgatcaggggactagattctttacaaccgatatggaatggaatgggaggaggaattacttgcaggtttatattccgactaggactgctctggtgagtctactcgttc

SEQ ID NO: 18463 - DNA, 438 bp, Emericella nidulans
ccttgaccgtttcccacctccctacctccacatctttttttctttcctgcctacagcccctaggatataaattcattggtcgccatgacgactacattggatttgggcaagactccaacgagcccgcggacttctggataaccgagcaaaagccggggtgggtggcctctacgcagacgtccgactcgcagctctatctctaactatcttatagatgccccgccggcgccgctcatgttgcgttccccgcaccttcaaaggatgctgtcaactcgtttttcatctgtgcactcaaagcgggagggaaactccatggagagcccaagactcgcgactctcagtcaggctactttagcgctgctgtcatggatatggatggaaatagcattgaggctgtatatcgtcccgacacagacatgagaagcagcagcggcagca

SEQ ID NO: 18464 - DNA, 439 bp, Emericella nidulans
agcgcgctgcccctatgcaggcattcccagaaaactcgacaaacatggctctcggtggtgccggtccgaataacgacaaaatagatcttgatcgtttccatggcagaatggaggaaggatacaatgactttgcttctactggcatagatcgaagcaaaacggaaggcgggtcatttgatcccacgtcgcgcatcgaaccaattcacggcgcagtgacgatgggcttaggcaccagtaccttcttagacggagctcctgccagtcgtgcggcaatccgtgagaatcagaatgaacagaacgctcttaatggctcgggcggcttgcagcggaaaaagagtcttgcacagagaatccgtggtggtatcaaccgccccaaccctcgggtcacatctccgcaggctgcatacgggtcacctcacgcttccacctccccacgcaa

SEQ ID NO: 18465 - DNA, 439 bp, Emericella nidulans
gcggctcgagagttgtgaatagcacctcctgtactgttgctacgctgtcgttgattggcatgtggcatttccggtctctgtagaccgggaagcccatagggcccagggctcattgaccgtggcggagttggtcgaggcccaggggagtgtgaccttggaacagctgggaactgggcaggagacatcgggcgttgaggttgagcatgcgggggtggaggtccataggcaccctgagcaggggacattgcgcgtgcaggagacctaggacgcgaagagggtgaaccgggcctgccaacatctccggggtataagcgtggtgattgtggcatgcggccaggaggtcccatcataggcgagcctggggctcctgggtgtccggtagggccaaaaggtccgcgggcaccaggaccaggaccagctccaggtggtggctttgctc

SEQ ID NO: 18466 - DNA, 439 bp, Emericella nidulans
caacccctccctctcctccttcagaccttccaaggcctaacctcgcgcaacgaagatttctggttcgctgcgtgcccatacttcgtccgcacgacctacgcaatggtacaaccctatttcgagaaggcgacgtccccaacgcattctatcttctcgagtctggaatgtgcgcgcagagtacgatctcccgcagggccgatactttgagctcattgtcgccggacggccgtgcggcgagctgccattcttcagcgagacgcggcggacggcgacggtgaaggcagagcaggattgcgtgacgtggagccttgatgcagagaattggaaggccctgaaagaggaggagccggatatcgcgcgcgagttgctgacggtcagtctaaagctgacgacggagcggatggatagtattacttcgtgagtccttcccaccaccacc

SEQ ID NO: 18467 - DNA, 440 bp, Emericella nidulans
cccttcatcagcggcgaggaggataaacttgagaatgaagcccagaagatccttggttcactgacagcggatgccaccgctttcgacgagcagcaaggacttaggatcggagccacctgcacaagagttggtgtcaccgacggccacatggcgttcgtttctctgcgtttcaagaaccgcccagctcccagcgctgaacaagtggtgcaagccatgagagaataccagtcagaagctcagaagcttggatgtccatctgccccggccgaggccatcaaagtgttcgatgagcccgacaggccgcagccaagactagaccgagacatcaacaggggttacacagtcagcgtgggacgagtgcgcgagggtaaccagggtggttatttcgatatacgattcgcagctctctcacacaacactgtcatcggggctgctggatc

SEQ ID NO: 18468 - DNA, 440 bp, Emericella nidulans
gcagtgaccgcacgcaaacgaaacaaggtaagtgtctggcaaatctagactcaatatgagtgcttctcttataatttgctcttgttaagttcggtattaatgtttgctagccgaggccgctcttcgtcaacaagagagtaacccaaactttcccatatcgctccttcagatcaccgcctccgattcttatcctttagggactcgcctgtctagtgcgattctcttcaagaacgttattcgacggaactggaccgatgaggatggaaactataagctcccactcgaggtagtgggtacgctgaaacaagagctcatcaacctgatgatctctgtgccacaggtgctacaaacgcaattgggagaagctgttagtgtaattgcggatagtgatttctgggaacgatgggatacgcttgtcaatgtaagcttgactacctgat

SEQ ID NO: 18469 - DNA, 441 bp, Emericella nidulans
ttcaatccctttgtcacagcttgtacaccttatactgtgcgccatgtacatcaaaaaggctcttcagttaaaaagctgctttgaagaaggtctaaaagtcctccaactcctaccaaaaaagtcctagatgagttggtgaaagggtgtgagttagtgatctataatgccagcttactagcaaaggaaaattgtgatctctgctcagctatagagaatgacaggcagaaaaaggctcgttctaaataccagatgtcccctacagaaggtctttcatttcaggaagccagagacctgatttcgttgagaaataaggaaatagaggcaagatgggggggttctggtggaagtgcgccccaacctttaggtataccaaaacatactctaccaacatgttcagaatataatattcaggggcataagagaaccagctgtcctaaatat

SEQ ID NO: 18470 - DNA, 441 bp, Emericella nidulans
agcacaataatgttcaagccttcatcaccattattctcgggtcttctctggtacgctctttctacaaactcttaacgctctggtttctgccgcggcggtgctcaatcgaccacgcaacccacattcaaaccgtcatcacgaaaatcgtcgctaatacctcttttcaataggaagatcccatggcgtatctcgcagccccagaaggcccggcaacgtaaacgccttcgtgctgtcgacaaggtagtcgacaccgtcagcgcggccctggcccgaaacggccagaccacgaaggctgttgagagatggtacagagagatgccccgagaggaggagatgctgccgcgtgacaaatacacgatctttgataagaaggagaagacataccgcaagggcattcacagtatgtttgccatattccttacgctggcctgctccaggaaa

SEQ ID NO: 18471 - DNA, 441 bp, Emericella nidulans
cgccgtcaacctgttcttgcaggtcttcttcactatcatgtacagtgatcttgaatggtaagcatttatttacacctcaaatccagctgctcttctaagcaatcaaagcgcaaccgggcgctggaggaagttcttcatggtttccgctaatctggtgctgcagtgactacatcaaccctatcgacctctgcaaccgtctcaacgcgtacatcatccccgaagctggtgtccacgctttccttaccttcctcttcgtgataaacggctactggctcgccattgccctaaatctgccgctgttggcatttaatgccaagaagtgcgttccttccagcccgagtctgacgacgagtctgcgcgcattagagttgggttctgactcccttactttgcaggatctacgacaaccagcacctccttgatgcgaccgagatcttccgc

SEQ ID NO: 18472 - DNA, 442 bp, Emericella nidulans
tgactccgaggctgaagatcacacagagaagaaagatcctaaggtcgtcaaaatcagcgacaaagacacgctggttatcgactcgaaacggcgtgagaaactcctcaaatccaagaagaaacttctcaaattcaagggtaagggaacgaaattggtctatgacgacgaaggaaacgcacacgagctctacgagatggaagacgaagaagcattcaaagcccgcggtgatgcaaaggaacagcaggcacggttcttggctgaggaggcggcacgacccagcgcgcggatatggaggataaggagattgctaagcagaagaggcgcgagaagaaggagaagcggaaagcgagggagcgcgacgtcttggctgaggaggagcgtgaagagcgcgtcgctcagcttgttccgtttgacgaggacgaggacatgggtgatgcaggcg

SEQ ID NO: 18473 - DNA, 444 bp, Emericella nidulans
agccatggggttgcttcaatcccttcttctgagcttggtacgccttataccatgcgccatgtgcatcaaaaagtctcttcagttaaaaagctgcttgagagaaggtctaaaagtcccccaactcccaccaaaaaagtcctagatgagttggtaaaagggtgtgagttggctatctataatgtcaacttactagcaagggaaaactgtgatctccgctcagccatagagaataacagacagaaaaagagttgttctaaacaccagatgactcttacagaaggtctttcatttcaggaagccagggacctaatttcatcaagaaataaccaaatagaggcaagatgggggggtgctggcggaggtgcgcctcaaactctaggtatacctaaacatactccaccaacatgttcagaatgtaatattcagggccacaagaggaccagc

SEQ ID NO: 18474 - DNA, 444 bp, Emericella nidulans
agctgccccaggagatccgttctcaggatccacttcttgctgcaactttacagtatgcaccgccgtctgcggatgatatcaacggagtgctcttatccgccctaccaaagcatgcttctccgattgagtcttttcacgtgccctcgactttgtcttcgcactttattgccgcactcgccaatatcctctatgcgcattctcgtgtaccccgagagtctcgcactgcagcggccctgcacagtacaacgactggtctcttagcctccactaataccatctcacacacagagcgggcgatgatggcactgctacttgccgagcgctgggcgggcgacctggcacctacagaagaatcctaccaacggaacctgatgctttgcttgtctccgcaagaggcatggtggtgccagtatcttggccgagtagcggcactgattggcgagg

SEQ ID NO: 18475 - DNA, 445 bp, Emericella nidulans
gggcgatcaccctcgctcacatttggaatatcatcggactggtcattcttgtcatctggaatgtccctgagtctgcactctggttcgcctttatcacgacgtattctgctgtgtctatgtccagcgtgttgtatggctgggtgaacgagcaattacgttactcaccagtggagcgctcaataacactggtcattctcaacactgttgcacagtcgacgacagcctggaccccgctgctagtgttcaagacggttgaaggaccccgctttacgaaaggatattcttttgttcttgcgaacgcgatatgtctcatcgccttggctcatttcatcaagtacttcattgcacgccaggagtacgtattctccgatcgtttccgttcacaagcgcaagctaaccccactcagcaaacgtgaaaaggtcagagatgccacatatgcgagcg

SEQ ID NO: 18476 - DNA, 446 bp, Emericella nidulans
actggaggggcacggggactgggcttgacgatggcggaggctctggttgaagctggaggagagggttcgttcccagtcatatagatcctatgagaatgttgaggatgctgaccagtgcagtgtactgcctcgacagactacccgaaccagacgacgagttttacgccgcacaaaagcgcgcgaatcctgacttcgggggcgccctccactaccgccgcatggacgtcactgacgacgctaacaccgaagctatcttggatgatattgcgagcaagaaggaccgcctcgatggactgatcgcagccgcgggcgtcaaccacgtcaaagatgcattcgacctgacgcctgagatggtcgataagctcatccacatcaactataccggcgtcttcaggagcgcggtagcagccgcgcgcgcaatgacggctcgaaaatgccccggctca

SEQ ID NO: 18477 - DNA, 447 bp, Emericella nidulans
gggttcgcaattctggggcttcgtccgcgacgagtacacaacactccccgaagtatgggaccgcatccttagtaccgatgttgaagcgacgtgggcatggaaaaggttctctgggctggatgaggtccgtgggaatgtgcccaagttcgatgagacttgggaggcggcgcggaacattacgctcaagacatttgccgaggaggagagtgctagtgtccaggcgactatgtacaagatgggcgagcagattctagcgtaccagccgcttcttgagactgtcgagtactcgttgccgaataaacattactttgagattggtgagtcgttaccacatatcctccatttgcttctgcggctgactgcttgtttagatctgagctggcacaagggccttaagaacacgggcaaggatgctgaggtgtttgttccccagacaaaccctaacgg

SEQ ID NO: 18478 - DNA, 448 bp, Emericella nidulans
tgaagaaattcatcaggatggctcacgagatgatcaatgtcaagcacaaagctattgctgtgcactgtaaggccgggctcggacgaacagggtgcctgatcggtgcttacctgatttaccgatatggattcactgcaaatgaggttattgcttttatgcgcttcatgcgtcctggaatggtcgttggcccccagcagcactggctccaccttaaccagggatcgttccgcgagtggtggtttgaggactgtatgaaggagaagctcgcccagatgcagccgaacccggtcacccctggccgatctcccgccaaacaccgcgccgctgcagtgactacccctccgcagaatggccactcgaagcgatctgcactcggagagattgacaacaacgaagctactccaatttacgatgataacctaccggctccaactccagggcagcctcg

SEQ ID NO: 18479 - DNA, 449 bp, Emericella nidulans
aacaaacccgcggggcattcctgtggctcccttcgtcgacaacgtctccgactatgtctcctcccgcgcagacgtcgaaccgacgatgcgctcatttcaagaaatgatttcaaagtaccaattcatggaagtcaacacctcgcggcgcgctgccgggctgcgcgagaagatccccgatattaagaaaacgctggagatggtcacgttcttgaaggcgcggaaagaaagttcgtctgcgacaccgctcgagacaaatttcgagctgaacgatacgctctatgcgcgtgcgaccgtcgaccccgcacatacggaagaggtgtatctttggctaggagctaatgttatgctggcttatccgattgcggaggcgcaggcaatgttggaggacaagttggcggctgcggcgaagtctagcaaactgtgatgaagatttagagtttctgagggag

SEQ ID NO: 18480 - DNA, 449 bp, Emericella nidulans
atcagcagaacaagatcgataccagcgtaggttttcctgattactctttgttttttttacactggactgcttctaaccgtggcctagaaactgagtcccgatgagcagcgtctgcttcgtctctatggcaagatgcctaacaagaaagatctgctccagaacaagctcaaggtatgtagtgactgactttcctcccgccgttttcgctcactaatatgcctgatctctatctaggagcggaaatattttgattcaggcgactatgctctcagcaaagccggaaaagcctcagatgtcggtgtgaccaacatcggctcacaacacccagttcccgagaacattcctcatttgacagctacctcgcctggtgcgaacgctgcgggcaatgggggaagcatcagcgctcagggtggacagcatattcctgggagcatcagcagccatccggg

SEQ ID NO: 18481 - DNA, 450 bp, Emericella nidulans
ggccgcaaaatggccgactttcccatggagccagccctagctaaggtcttgattgcttccgtcgacatgggctgctctgaggaaatgctctccatcgtcgccatgctctccatccaatccgtcttctaccgtcccaaggaaaaacagcaacaagcagatcaaaagaaggccaaatttcacgacccccacggcgatcatctaacgttactcaacgtttacaacgcctggaaaagatccggctttagcaacgcctggtgctacgaaaatttcatccaagcacgccagattcgccgcgcgcaggacgtccgccagcaactccttggcatcatgcagcgctatcaccacaaaatcgtctcatgcgggcgcaacactaccaaggtgcgacaggctctttgcacagggtttttccgcaattcagcacgcaaggacccgcaggaagggtataagacg

SEQ ID NO: 18482 - DNA, 451 bp, Emericella nidulans
tatgttttcctctgtgtactacaacgccagtttccagttctgattgtctttctccgtttaggtattgaccctccccgtggtgttctcttatacggccctccgggtaccggaaaaactatgctggtcaaggctgttgcaaacagcaccactgctagcttcattcgggtgaacggctcggaattcgtgcagaagtatctcggagagggacctcgcatggttcgcgatgtcttcagaatggcgcgggagaactcaccggcaattatattcatcgatgaaatcgatgccattgctacaaaacgtttcgatgcacaaactggtgctgatcgcgaggttcagcgtattctcctggaacttctgaaccagatggacggtttcgagcagactagcaatgtgaaggtcatcatggccactaaccgagcagataccctggatccagccttgcttcgacccg

SEQ ID NO: 18483 - DNA, 452 bp, Emericella nidulans
aagcgtactacgaactctaccggggaagcaggtactttgtattcctattcggaaggtctaccacactgttgctgactggtgcgcttccaacactagtcttggcctgtcgttgacagacacccttgatgacttgatcaacgaaggtcgcattgagccgcagctggccatgaagattctctccacatttgaccgcgttattaccgaagttcttgcggataaggtccgcactcgtctgacttttaaggtacaccatacactccccgtccctgacgtgctggcgcaagcctgtctacattccctcggcgctgcgttcatttgggtaatcagttgctgatgatttttcattatctgtagggtcacctcgatacatatcgattctgcgacgaagtgtggaccttcttaatcaaagatgtcaatttcaagctggataatcagcaaaccatcagcgcgga

SEQ ID NO: 18484 - DNA, 452 bp, Emericella nidulans
gccgcatgatcaacagccacaagcacgacccagaaactggcaaagtaccgccggaggccatggtctcaatcgtctgtatctctgcgatcttgatcccgaccggggagctctggtttgcgtggacctgctcccctgcatctatcccctggattgtgcccatcctagctggtgtgtttttcggctgcggaaacgctggtgtttttatctacgcctcaaactatctaacggacagctatggtgtgtatgctgcctctgcgctagcgggaaactcggtgatgcgcagtatcctgggaggcgttatgccgcttgtaggcacttacctgtatgatgggctaggtccaaactgggctgggacgctgttgggcttgcttgaggtggccattatcccaataccgtttgtgttctacaagtatggatataagattcggatgaagagtgcgctcattactcgg

SEQ ID NO: 18485 - DNA, 454 bp, Emericella nidulans
gcagatcttcgtcaaaaccctcacgggtaagactatcacccttgaggtggagtcttccgacaccatcgacaatgtcaagaccaagatccagggtgtgcctccctcctaatcaccacgattatccacaaaactgactctaagctctacagacaaggagggtatcccccctgaccagcagcgtctgatcttcgcgggcaagcagctcgaggacggtcgcactctttcggactacaacatccagaaggagagcacccttcaccttgtcctgcgtctgcgtggtggtggtaagaagcgcaagaagaaggtctacaccacccccaagaagatcaagcacaagcgcaagaagaccaagctcgctgtgctcaagtactacaaggttgatggcgatggcaagatcgagcgtctccgccgtgaatgcccctctcccgaggtatgcaatctgtctacagtacat

SEQ ID NO: 18486 - DNA, 454 bp, Emericella nidulans
ggagggctacaagggctccaccttccaccgtattatccctaacttcatgctccagggtggtgacttcactcgtggcaacgtgagtcctctttgttcctgcaattctcgcggatcttttgttctgaaggctaactatgagcactacagggtactggcggtcgctccatctacggcgacaagtttgccgatgagaacttcaagattactcacagcaggcctggtctcctttccatggctaacgctggccccaacacgtacgttttcctacactcactacggtaacaaaacaaactaataacaccctgctctagcaacggctcccagttcttcatcaccaccgttgtgacctcatggctcgatggcaagcacgttgtcttcggtgaggttgctgatgaggagtcctacagcgttgtcaaggagattgagtctctcggtagccagtccggtgctcccc

SEQ ID NO: 18487 - DNA, 454 bp, Emericella nidulans
tctcttggccgtcgccgttccctcctctggacgtccatcgcccaaggcctcgcaatgctctatatcgggttatatgttcgcattgcaccccccaaagagggtgagcccgttattcctgctggctactttgcactcgtctgcatcttcctcttcgccgcattcttccagttcggctggggccctgtttgctggatctatgtctctgagatcccgacaacgcggctccgcagtttgaatgtttcctttgctgctgccacacagtggctgttcaactttgttgttgcgcgcgctgtgcctaacatgctggctaccgtgggtgccaatggttatgggtacattttcctcatctctatacgccatatggtcactgaactaacaatctatttagggcgtatatcatatttgcttgcttctgtttctccatgtttgtcttcgtttggttcttcgtcccgga

SEQ ID NO: 18488 - DNA, 455 bp, Emericella nidulans
aagaaagctatcgccaaagaccagatcgtcaaactcattgtcggagccggacaggccagtcccagtccgcccgtcggtccagctctgggtagtaagggtgtcaaaagcatggatttttgtaaggtatgcagcattgaatcatcctgctaggacagcgcaagacggtcgctaatttgtataggaattcaacgcgcgaacagcgcacatcactaccggagttcctattcccgcccgcgttacagtccgccccgatcgctccttccacttcgacctgcgaacgccgacaacgacgtacttactgttgcaagccgccaaggtagaaccgcgcaagaatcgaatccgcggcgcccagagacccggccatgagttcattggcaagatctccttgaagcacgtttacgagatcgcgaagatcaagcagtcagagacgagactgtcggggttgagcttggagg

SEQ ID NO: 18489 - DNA, 456 bp, Emericella nidulans
agcgacgcaagcctcggatgctgcaacggacacgaaagaaagtgaaccacgtctcttacgaagaaagatctggacttgtcgttcttgacagcgagtccggctgctcagcaatcacgcgttggcgttgccacaggatcgaaccagcagcacacaccgttgacgaccaaaactacattcattttgtcacaacttcctgctctgcaagcgatgctaaaagagctccggcctaagctggccgctttaccggaatcgggcctggcgaaagacaaggaacccaagtcagatgagagacgagattacattgaaagcagaatcagactacatcttgagcggtctggccagctacctggtaatgatgggaacattactgttggcggacgcagagtgaacatctccgaagcacaggcactcgaggccgtgactagtatgcttacacaggcggatagaaaggaggag

SEQ ID NO: 18490 - DNA, 457 bp, Emericella nidulans
ccctctccggagcattgagagctaacacttgctagaacggcgttggtgccttcattctgcaatgcaagcgcttggatttccactactgtgactgggctggcagttcccggggaatgaagtatgttgctcttccgatctaaataccgttcaaccatctctctctaatattatgaactatagcgctttcctgaagcatgcccttccagctttcgcgaaagaaaacccccagattgagatccgagtctcaccacgacctcacaagcaccctatcatcaaaggacactatatcaacggacgagagaaggcgatctgcgtgcggaatctcgagccggaacagataacccagaaagccaacttattgaagcaggctagcggcgagaagctgaagcgcaccaagaagcccgtcacgagtatcaacgagagtgttcgtggtatctggtcgccttaccacggaggc

SEQ ID NO: 18491 - DNA, 458 bp, Emericella nidulans
gctcaccgcccctcaccaacgcccgtatgcttgacaagctcgttggcgagtttattgaagaaacatgcattaaccccaccttcatcactggccaccctcaaatgatgtctcctctggccaagtaccaccgccagaacgctggtctctgcgagcgttttgaggcattcgtctgcaaaaaggaaattgtcaatgcttacactgagttgaacgaccccttcgaccagcgtctccgcttcgaggagcaggctcgccagaaggaccagggtgacgacgaggctcagattatcgacgagaacttctgtactagcttggagtatggtctgcctcccacaggtggttggggtatgggcattgaccgcttggttatgttcttgacggataactacagcatcaaggaggttcttgccttccccttcatgaaggatgataagaccgcggctgagggcaagtcggcagcc

SEQ ID NO: 18492 - DNA, 458 bp, Emericella nidulans
catcaagcgcaccggtcttggtctgctctcttctacgaactccgctacaaggacggacaggaagacccctccttcatcctgaaccagggaatctaccgcaactccaagatcctcgtcgtcacaggacccaatttcggctgtggctcctcccgcgaacaccgcccatgggctctcctcgatttcggcatcaagtgtgtcatcgccccctcctttgcagacattttcttcaacaacaccttcaagaacggcatgctccccgtcgtgattcccgaccaggccgtccttgagaagattgccgacgaggcccgcgccggccgcgaagtcgaagtcgacctcgttaaccaggagatcaaggatgaggccgggaacaagcttgcctcctttgatgttgatgccttccgcaagcactgccttatcaatggactcgatgatatcggtttgacgctgcagatggagga

SEQ ID NO: 18493 - DNA, 458 bp, Emericella nidulans
cggaaaggtcgtttcctgggtcaacgagtatgctggcggtgctgctgccaccgctaccgacactgagtccacatctacttctctctctgagactgttgccgcgtcgaccaccgcttccacagagacccccagcgcttctgccgtctcctccgcctctggaacctgcgccaactgggacgacgagtccgatgagtactccaccgccggcttcggttccaggactgtctccaacaatgccaagtatgttgcctacgttggtaacgtcggaaacccttggggcagcaacatcattgaggtcgatgccgataaagcatgcaaatataagaatgtcgtcaagttttccggctctgagactgacgactggaccatcgtcttctggaacaagattggccctgatggattgctgaccggctggtacggcaactctgctctcaaactcacgatttctcccggcgaga

SEQ ID NO: 18494 - DNA, 461 bp, Emericella nidulans
ccgtcgtgctccccagcattagtcccgcctacttcacaagcccgttctgacataggaaattttgtaaaacagcgaagacgccgaattcctcacgcgcaataaagctctctcaccggaccggatccgcgccatcgaaacaggcggatgcccgcacgccgccgttcgtgaagacatcagtgccaacctcctcgccctccagaacttgcaccgccaattccagacagaccttctccttattgagtccggcggcgataacctggccgccaactactcgcgcgaactcgccgacttcatcatctacgtgattgacgttgccggcggcgacaaagtcccgcgcaaaggcggaccgggcattacagggtcagatttgctggtggttaacaagattgatcttgcggaggcggtcggcgccgatatctcggtaatggagcgggatgcagcaaagatgcgggagggcggtc

SEQ ID NO: 18495 - DNA, 461 bp, Emericella nidulans
tgattgacaagtgcgttggatctcggatatggatcatcatgaagaacgacaaaggtcgacttattcttgcatggcaatagagtacgtactgacatggacagaattctctggcactttgctcggattcgatgactacgtcagtaagtgttaactgcaatctatcaatctgcgagattttggctctaattccttttagatatggtattggaagatgtgaccgaattgtaagtgttcttgtctttcagctggatagtgctttttgttctctgagcgcgctctattcgacatcacattgtcaacctctgaactaacatctggatagtgattacactggtgcgcaggtcaagctgccaaaaatcctccttaacggaaataatatctgcatggtaagaatcttgcttctgtgacactactaaaagactgactcttgttccagttaattcctggtggtgaagggcctg

SEQ ID NO: 18496 - DNA, 462 bp, Emericella nidulans
gatacctggcaactaccgtatagctttatcgcctgaaagctatactaccgattcaattggctttgatagattcatcatttcgatcgctatacacgaccccgtcttcagcagaaaaatgagccccgattgctactttttgatggccatggtttcccacctaacgtacgaattcctagagttcggtaagcagaactctataattctgtactgctttccatctcatactacacatctcattcaaatgctcgatggccagcaatttcaagtgtatacatactactatcgaaagtggaacaattttcttgctgggctgagtgtggaagccgacgacaaaggtgcttttttaaaggagaccccagacgtacgcaagcaaactttcaaagcgcggacaattcgagatactttaaaaaagcgaggcctctatccattcaattctgtagagcttctggggccgctgcaaaa

SEQ ID NO: 18497 - DNA, 462 bp, Emericella nidulans
cgtctccggccacaagtacggcctggtctaccccggtgttggatgggtcgtctggcgatcgcctgagttcctacccaaggagctcatcttcaacatcaactatctcggcgctgagcaagccagtttcacgctaaacttctctaagggcgcttcacatgtcattggccagtactaccagatgattcggctgggcaagcgaggataccgctcggtcatggtgaacatcacccggatcgcggattatctagctgaccagctcgaacagctcggctttatcatcatgagccagcgccgcggtcggggactgcctctagttgcgtttcgcctccctgcggaccgggcggacgagacattcgatgaattcgcgatcgcgcaccagctgcgcgagcgaggatggattgtgccggcttacactatggcgccacacagtaacaacctgaaattgatgcgcgtcgtggtacg

SEQ ID NO: 18498 - DNA, 462 bp, Emericella nidulans
cccaaccgacctccccatccacactttcccgactccctcctcgttcgagaccttcctaagccaaaaccacaactcgctcccgggaatgtatatcaaattcgccaaaaagaactccggcatcccatccatcaccgcctcccaagccgttgaaatcgcactctgctacggctggatcgacgggcgcgcaagctctcttaacgatcagtactggctagtacgctacacaccccgacgcccaaaaagtctctggtccgcaaagaatgtagcaactgtgcagcggcttatcgacgagggacgaatgcgcgatgcgggattggcggccgtggaggcggcgaagaaagatgggcggtgggagagggcgtatgatgggccggctaacattggggttcccgcggatttggaggaggcattagagaagcatgaagaagccagaagggtgtttgaggggttgaatcggtcgga

SEQ ID NO: 18499 - DNA, 463 bp, Emericella nidulans
cgctggacaaagcagcacggtaagcgcttggaccacgacgagcgagtccgcaagcgtgaagcccgtcaatcccatcagcagtccaaggatgcgcagaacctccgcggtttgagggccaagctgtaccagcagaagcgccatgccgagaagatccagatgaggaagcgcatcaaggcgcaggaggagaagaacgtcaagtcatccgcgcccagcgagccctccaagacgcccctcccgcaatacttgcttgaccgctccgaggctacgaatgcgaaggctctgtccagcgctattaaggacaagcgggcggagaaggcggccaagttcgccgtgcccctgcctaaggttaagggtattagtgaggaggagatgttcaaggttgtcaataccgggaagaagacgcataagaagtcgtggaagcggatgataacgaagccgacatttgttggaaacgactttacgc

SEQ ID NO: 18500 - DNA, 463 bp, Emericella nidulans
atgctttgctggacatcatcctaaaggaatattgctgactgaaaaggcgggtacactgctctgtcaaccaaaggagtctcatccctactgtcatataccctgtggcatgtcatcacatttccgatcacctatttgttggtgtttatccttgtcttcagtgctctaatgcaaattcggtatatcaacaaagccctgcagcgtttcgattctacgcaggtgattccaactcagtttgttctcttcacactctcggtgatcattggtagcgcaatactatatcgagacttcgaatcctacacagcgtcgcgtgcggggaagtttgtgggtggttgcctgctcaccttcctgggtgtttattttatcacaagtgggcgcattcgtgccgatgacgagtccacctactcaacggatgaggaagaagctatcggactcctacctggagagcgatatcaggacagagtcg

SEQ ID NO: 18501 - DNA, 463 bp, Emericella nidulans
cgagcgtgtcctcccttccatcggaaacgaagttctcaaagccatcgtcgctcagttcgacgccgctgaactcattacccagcgcgaggctgtctcaaaccgcatccgcacagacctgatgaagcgtcttcgcaattcaacatcgcccttgaggatgtctcaatcacccacatgaccttcgggaaggaattcacgcgcgccgtcgagcaaaagcagatcgcacagcaggatgccgagcgagcccgcttcattgtcgagaaggccgagcaggagcgccaggccaacgttatccgagctgagggtgaggccgagagcgccgacatcatcagcaaggccgtcgccaaggccggaaacggcctcattgaaatccgtcgtattgaagccagcaaggatattgcacacaccctcgccagcaacccgaatgtcacatatttgccaggtggtgaaggcaaggatggcggga

SEQ ID NO: 18502 - DNA, 463 bp, Emericella nidulans
tccccctcgcctccgttagcacaaccgccgagattgcaaagggttgcaaggaggccggcttcctctggctctcaacccacatcaacgaccctctgaccgccgccgtacgaacaaggtccttgaagtcgtggaacgcgataatattgcccggcggcgcgcagagcgcgagcgcccagctacgcgagaggtcttgtcaagctgcagcagaagtactggtgcattggtgacgtccgtggccgcgggcttctccaaggtatcgagatcatttcggaccctgagacgcgggctccaggccctgaactcggccaggctgtttccgatcaggccatgacaaaaggcctgtcttgcaatgtcgttaacttgccaggaatggggggtgtcttccgtttggcgccaccagtcacggttaccgcggaggaaattgaagagggacttgcaattttggatgaggcgtttggggacg

SEQ ID NO: 18503 - DNA, 463 bp, Emericella nidulans
cgttgacttgtacgagtctatattcggcgttttggacgaagaaacggcggaacaggcatacagagaatacgttgtcctgggcgcctctctgcgcgtgcccgtagaaatgtggccaaaagaccgcgaggccttctggatctactgggacgagcagctcgcgacattcgacatctgcgacgaagcaaagaacgtcgcgcacgatctcctgtataaccccaagattccgttctacttcaaagcactgatgccgacgctgcgtcttgttacggcggagttgctccccgagcgcctgagaaaggagtatggtctgaaaagcagtaaggggcgcaagcggttgtataaatcgacgatggcgatcacaaaggcgacgtatccatttttgcccagagcaatcaggacatacccagtcaagttctatatgaaggatatgaggaaaaggatgaagaagtatggggagacgcag

SEQ ID NO: 18504 - DNA, 464 bp, Emericella nidulans
gcacttcaacgccccctccagcgtgcgccgtgttatcatgagcgcgcctctgtccaaggaactccgtgagaagcacaatgtacgatccgtcctttccatccatcaagtcattctacaacgatcttccccatgcgcatcttgggcggttgagaaaagggtggactgaagattgatttgaggaattgggaacaatggcaagaggaccagagctgacggatatcaacctaacaggtccgctccatccccatccgcaaggacgacgaggttaccatcgtccgcggcaccaacaagggccgtgagggcaagatcaccagcgtctaccgtctgaagtggtgcgtccacgtcgagcgtgttgtccgcgagaagtccaacggccagagcgttcccctccccatccacccttccaaggtcgtcatcaccaagctcaagctcgacaaggaccgtgagcagattctggagcgcat

SEQ ID NO: 18505 - DNA, 465 bp, Emericella nidulans
tcggggccctgatgaagctcaagccgctcgaacagttcgtcccggcgaatactgaacttgacgacgaactgcttcgccagatttgcaaaaagttcctgcagttgccgcccgagagcgtcaaggatattgtcacccagctctcaaaattgccaaagagtgagtttggcgcaaagcatgagtatgtgccggctctgctggagcgcgtgagccagcagtactcggagtcggataacggtgctctcgttgctgtactgctgatgaactacatggtactccagccgggcgaggccgtctgtgtcccagccgacagtatccacgcctacctgaagggtgatattctcgagtgcatggcgcggtcggacaacgtcctcgcgacgggtttctgcccgcaagctgacaggaacaacgtcgaccttttcgcgaaaatactctcgttcaaaccgcacagtatggagcaggcacagc

SEQ ID NO: 18506 - DNA, 465 bp, Emericella nidulans
tgtccattcaaggccccgacttcgaggagacctcaaagcccatacccattgaactgctgaaacgccctgacccaatacttttcttcgatgaagtaatattgtacgaagatgaactcgccgataatggtattactatgctgtcttgtaaaattcgcgttatgcaggacagacttcttcttctctcgcggttcttcttgagattagacaacgttcttttccgacttcgggacaccagggtatatgtcgatttcgagaaatcagaagttataagggagtatcagtccaaagagtgtgattacggcatcgtcagacaggtgggttcgctgtgagagccaaggaattccaaggctaactcatcaacatagaagttagcaagcgcacgggatgatatacccgctatcatgagggaccctaacaggctctccgaacttcttccccttgttgaccgacgactagaacgcgtgg

SEQ ID NO: 18507 - DNA, 465 bp, Emericella nidulans
ggcgtcggtgcgattgtctgggccgggtatcccagccaggccggtgcgcaggggtctttgatgtcctgaccggtaaagcagcgcccgccggtcgactaccgatcacgcagtatcccaagagctatgtcgacgaggttccgatgacagatatgaacctgcaacctggaacagataatcccggccgcacatatagatggtacgaagacgcggtcctgccattcgggttcggactgcattatacgacattcaatgtctcgtgggcgaagaaggcatttgggccgtacgatgctgccacccttgccaggggcaaaaatcccagctcgaacattgtcgatacattctccctcgcagtcaccaatacgggagacgtcgcttctgactatgttgcgctggtgttcgccagcgctcctgagctcggggctcagcctgcgccgatcaagacgctggtcgggtacagtagggcca

SEQ ID NO: 18508 - DNA, 467 bp, Emericella nidulans
tcgccaatacctgtccgacgagtcgcgctacaaagaagtcgttcctatcagggacgagacaattcgacgcaagatccgctacacttggcggttgcaatatctgaaagacgttgtactcgcccgaatcctcgacgatcctaccttttccgtcttgaactctatgatcttttacaaccaggtcgacattgtgaaccacattcagtcggatggcgcctttctaaaggagctattttcggtctttgatccgagaagcgcagatgcaaagcgcaaagaggacgccgtccagttccttcaccaatgcgcgtcaatcgcgaaaaacttacaggttccggagcgtgccaccctattcgcaaacctcatcagccacggcctttttgctgtgatcgccttcgccattaagcacccaaacccggctattcggactacgggaattgacattttagttgcgctccttgaccacgacccca

SEQ ID NO: 18509 - DNA, 467 bp, Emericella nidulans
gatgcgaaggaaccgactggaccaggagctccagcgcgcgagcctctcgtcgcgaaactctcgcgctcaatgacagagcttgcgtcccccgttcgtcctttggtcattcttgacgagtctgggcagccgctagcgggggatgaccacgatagacgcttctttgaagcctcctggatgcataagtacaaaggcgtttactacttttcctactcgactggcgacacgcactaccttgtgtatgcaactgggtcttcaccttggggcccgttcacgtaccggggacgaatactagagcctgtgctagggtggacgacgcaccactcgattgcggagtttgaagggcgctggtggctgttttatcatgattgcgagatttcggggggacagagtcatttgaggaatgttaaggtacgggagattggatataaggaggatgggagtatttatctagtcgactagttatgaaa

SEQ ID NO: 18510 - DNA, 468 bp, Emericella nidulans
acggcgcatggccaggtagaggccacaaagaccgttatatttagccaatggacatccttcctgactcttgttgagccgcaccttcaaaatgccgggatccagttcgcccgcatcgacggtaaaatgacatcgatagcccgcgaccgctcaatgcgccgcttctccacagaccccaagtgcactgtgctcctcgctagtttgagcgtctgcagcgttggtctgaacctggttgccgctaatcaggctatccttgcggatagctggtgggcccctgcaatcgaggaccaggctgttgatcgtgtttaccggcttgggcagacacgcgagactacagtatggaggcttgtcatggaagacagtatcgaggatcgagtgctggcgatccaggagcagaagagaaagttgatgctcgctgccttccgggagaaggcgagcaagaaggttgatgatcgagcgacacgtgtggca

SEQ ID NO: 18511 - DNA, 468 bp, Emericella nidulans
ggcaacgacccagctgctcatgctcctgatgccgctgcttacgacaagggtaagggaaaggcagttgaggatatggacgtgagcatggatgaagaggaggaggagagcgaggagagtgatgctgagattgtatgtgcccaggattcgctctttttaagcacggctactaatgtgtttttctctactttagatggttgaaggtaaaactatccgaaagcaagttcagggcccgcgcgactaatcaggactattcccagatgaggacgacgatggtgacagcaatctcgaacccgtctcgaccgagaacatcattagcggcggacgacgcacacgcggcaagaccatcgactaccaggaagctgccaataagattgacgcagacgagatggatgatgaagaggacgatgatgaggacttcaagccgagcgacaagtagtgatttatcgaatatctgacgacaccaacgaa

SEQ ID NO: 18512 - DNA, 469 bp, Emericella nidulans
tcccctacacccttgcggtcatcaaagaggctcttcgtctctggcctccaacaggtatcagccttcgccgcggccaaccagaccaaaccctttttgcagagggcaaagaatggcccacataccccttcgcggtccttgttaacaactgtgccaccatgcgccgggaagatctcttcaaggatgcagagagattttatcccgagaggcacctcgttaatgatcccactgatccatactttgtcccgcgtgacgcgtggagaccgtttgagaagggaccacggatgtgtctgggccagacgttggctttgatgcaactcaagattgccctagtgatgacggtgaggacctttgattttgagattgtttacgaagaggggacattcatgtatcaggttttggatgtcacggctaagccgtcactggggttgccgactagggtcaaattagttgagtagtacatgcttttgga

SEQ ID NO: 18513 - DNA, 469 bp, Emericella nidulans
cgtttccgcgcagacagcagaggacatcgctacagcgagagacctatttacagcctacgttgcatggctaaatatcgaccttggcttccaagacttccagtcggaattggactttctgcccggaaagtatggcgctccttacggagaccttctgcttgcatatagcatagaaaacaagccactaggatgtgttgccgtccgtcctcttgacgattcgaagcaactgtgcgaaatgaagcggttgtatgtctctccagaagcacgcggtatgggtctaggcaaggctctggtggcagcgattgtgcagcgagcaaaggacctgggatacaaagagatgaggctggacaccctcccttcgagaatgcaaggcgcaatcgtattatatacccgggtcggcttcgtcgagacgcctccatactatgagacgcctatgaacgaaaccgtattcctcgcacttgaccttactcga

SEQ ID NO: 18514 - DNA, 470 bp, Emericella nidulans
acattctgtggcgcccacccaagcccacctcgaattcaatgtcgccttcgtccagaatcagatcgcgtccctcacatacagcctacccgaaacacaacgaactgcccaagacgtgcaagacgcagcggacggcctccgcaccgcggtcgagactttcgggcgtatcgcccaggccaagaatccgccttacccggctgagtctcttgaacagcgcgccaacatgtccaagacaattataaagcagcttgaacgggccctccagagccagaaggaatacgaggagaagaatgccgctaaactacagcaggcccgcgaggcccgggaggccgagattcgccgtcgcgaagaagaagtccgcaaggcggaggaggctgagcgggagcggaagcagcgtatcgcggaagaacgtcagcggctcgttgaagaggctcaaaggcttgcgctcagcgggcagaagaggaacgggcccg

SEQ ID NO: 18515 - DNA, 470 bp, Emericella nidulans
gggccccaaggtatgtcttctgcaaccaaacccactacgcttaacaagtgctaattcggtttcctagaaccctctcatcgagaagcgttcccgcaacttcggtattggccaggacatccagcccaagcgcaacctcggccgcttcgtcaagtggcccgagtatgtccgtcttcagcgtcagaagaagatcctgaacctccgcctcaaggttcccccttccattgctcagttccagaacactctggaccgtaacaccgccgcccagaccttcaagttcctcaacaagtaccgccccgagaccaaggttgagaagaaggagcgtcttcatgccgaggctaccgccgttgctgagggcaagaagaaggaggatgtcagcaagaagccatacaacgtcaagtacggtctcaaccacgttgttggtcttgttgagaacaagaaggcttcccttgtcctgattgcccacgacgtcg

SEQ ID NO: 18516 - DNA, 471 bp, Emericella nidulans
tctcgccaaggtctccgacgagctatcaaaatgcaaaccccttctcggactatgctgcaagggttccagaggacaagcctctgccaccgcacccgcaccagcaaccacaacctcagtaccaccacccacccgcgcccgctgtcactgctgcttcacctcccacaagtcccggtggccgctcacgtacttcccgcctctcacgtatctcgaacctctccctcttccactcaaaccgcgaaggcaacaatgcctcgcactcgcaatctggaggtagcagaatccgctccccgcgcttcacaggccgcaaacacggccacaccgttggcatcaacatctcctcccccttggcctctccagaccctacctccccacattccgaccaaatccccctctccccgcgcttctacaaccccactcctcctcccctcccaccaaaagcagacggcccaatcacccgcataaacaccaata

SEQ ID NO: 18517 - DNA, 472 bp, Emericella nidulans
ctgattcagactcagactcttcgtcaagttccgagtccgagtccgagtccgagtccgatgcttctcacagctcctcttcaagctcttcttccgattcctcggattcctcctcggattcctcatctgattcctcatctgattcttcgtctgattcttcgtctgaatccgaatcggacgccgccaagaaagccgacaagaaggctctcaaggctgccaccgagacacccctgccgccctccgactcaagctccagcggctcctcggactcctcgtcgtcctctggagaagagtcctccagcaccagccgcaccctccagaactcggaggctgaagccacccaaaagcccgccgctacatcggaagcctcagtctcctccagtgccagcccagctcccagaaatggcaatggtaacggcaagaaaaaccacaccggcacccgtcctacacctctagccgctctcagcgaactccc

SEQ ID NO: 18518 - DNA, 472 bp, Emericella nidulans
ccctcgcggctacagcaaccgtgccgccgctctcatcaagctgatggctttttcgcaggctgtccaggactgcgacgaggccatccgctgtgaccccaagttcttccgtgcttatatccgcaagtcccaggctcttgccgcaatgaaggaatacagccgtgccattgatgcttgcagcgacgccgccgagcacgacgacggcagccacgcccgtgaaatcgagcaacagcaacagaaggtccttgaggcccagtacagttcccgtgccggtgagactgaacaggagacgatggagcgtatccaaaaagacccagaggtatgcccgccatgacagaataatatgacgtgcatggctaacgtgagcagatcatgtccatccttcaggaccccgtcatgcagagcatccttcagcaagctaagggcgaccccgctgccctgcaagagcacatgaagaacgcacaggtccggctga

SEQ ID NO: 18519 - DNA, 473 bp, Emericella nidulans
gttgttgataaggagggctcgcctaggtggagtattggtggccgatggaatgataagatctatgcccgtcatacccctgggttcgaagcgacagtttctggacctgagcagaaggcacaattggtttggcaggctcatccccgtccgactggaattccgttcaatctgacgccattcgtcataaccttaaatgcgcttactgacagcctccgaccgcaactgccacccactgatacccgccttcgtcccgatcaacgcgcaatggaggaaggcgaatacgactttgccgctaccgaaaaacatagggtcgaagaaaagcagcgtgctaagcgaagggaaagggaagctaatggtgaggagtataagcccaaatggttcagcaaggccaagtgtccaatcacgggtgaagaatactgggctcacaccggtgattactggggttgtagggctaggcaagattggagcaagtgcga

SEQ ID NO: 18520 - DNA, 475 bp, Emericella nidulans
cgaaggggagccgggaaccctagtttgcctgctccaccaatcactctatggcctaaccctgtccgcgcgcctatggtacgatgatctagcatatcttggatctataggatttaaaatctccccgcatgacccaggcctattcacacatactacggaaaagctctctatcaccacccatgttgatgacttcatgattgttggtgaaaagccccagaacgccgtacaagcgcttgaaagcttgaaatcccgatctgaaatcaaagaagtgcctgcattcaagcaatatctaggcatgaatattaaagcaacatctactggcatccacctatcacaggaggatcagattgatgacctcgtcaactctttcaggctccataatgcccatcctaccaaatcaccccttgatcctggaacaattatcgatgatgctccggatccaaaaatcaatatcaaagaataccagcgtggtactggc

SEQ ID NO: 18521 - DNA, 475 bp, Emericella nidulans
tggggacaaggtgtgacccgtacgtcaaccttttgatgggtggagagtctttcgacttccattgtcactcgaaccttactcgtgcggtcacgccgtacggattgactgaactggacgtgcatgatgttctcaatgtcttccaggtgaccgggttggatgaagaggggaggtacttcatggagacatcgcccgcgaagccaggcgagtactttgagttcttcgctgaggttgatgttctctgcgccttgtctgcttgtccaggaggtatgctaatttcactttgcttcctggtattgaaccccactaatatttgttttgataggtgacctctcgaattggggctgggatgacaaggaagatatgggggctaccacccgtcccttgggggtggaagtctataagatcaccgaagccaaagctttggaaggatggaaggagcctcagagccctaaatacaccggaatgcatggcatga

SEQ ID NO: 18522 - DNA, 475 bp, Emericella nidulans
ccttgccatcatcctctcgacaaataaagcgtgctcgacccaatatgggtggaaggcctctctcgctccctcgtctgcttgaaactttagataccgatgctctccgcggtgttctccgctcgatatgcgatcgtcaccctaatttggccgacgaagtggtccaaactgctcctcgtccaagcgttgcttctgcccttcaggttcttcgaaactatcaatcagccctacaatcctcattccctctggggggcaaccccgaatctgactacgcctacaaccgagtccgccaacctttggggaatcttctcgaagctctgagcgacttcactccccatttcttaccgcctaacgaaacccaaccttcgatatctttgagttacctggatgacgttacagaaatcatccatcagttgccacgttggagctcacctcaaaacaatatagagcgggattctgcatatgatgaaatttgcaa

SEQ ID NO: 18523 - DNA, 475 bp, Emericella nidulans
ccagccatcaagcgcatcacaactgctggtattcccgttgttggacatatcggtctcacgcctcagcgtcaaaacgcgcttggagggtttcgagttcaaggaaagtcaacgacggacgcactgaaactgttaaaggacgcacttgcggtacaagaagcaggtgcgttcatgatagttatcgaggccgtaccgccagagatcgcaagtattgtcacacaaaagctcagtgttcctaccattggtattggtgccgggaacggttgctctggacaagtactcgtccagattgacatgaccgggaacttcccgcctggtcgcttcttccccaaatttgttaagcagtatgccaacgtctggaacgaggcactccaaggcatccaacagtatcgtgaggaggttaagagccgagcgtatcccgcagagcagcacacataccctataccgaaagaggaactggttgaattccagaaggctg

SEQ ID NO: 18524 - DNA, 475 bp, Emericella nidulans
gcacctgtcgactacagttcgcttgaagctacaacctcccgcaaagaacggctcgatgtcgcgtcgatggttggaaagacgacaatcgtctccgcagcaaacgcggtgggcaagcgtggtcgaggcgcgggattctactgctcggactgtgatctgacgttcaaggataatttgcagttggtggagcatctgaacagcaagcagcatttgatcgctacggggcagagcggggaggtggcaaaggctacagtggaggatgtgcggcagcggttgaggatgcttgcccaccagaaacgggtcagggaggaagaggaacggatggtgtggcagatggacctgggtgaacgacttaaggaaagggaggaacagctttcaaaagagcgagaagaaaagaggcggaagagaaatgagaagcgtcgcaaaggtggagatggtgtaaagcaggaagacagctgggaaggtcggctggggatca

SEQ ID NO: 18525 - DNA, 476 bp, Emericella nidulans
gggcaaggggcccctaatcagtatcaatgccttagagaggatgtctaatccaacaggctcgacaacgacatgtacgcgcactcaacaacacggtctacgcgcaactcttcgactccatactgtatcaacacctggctcttcaatgagtacggcatggatccgtttccccacaacgaggtcatgagcggtccgctgcggcatccgcttccggtgaaggtccctgcaagcaggtcgcccttatggttaactcatatgcgatacttcgcctcagtcgggtttccggatgtgctggagctggggctctgcgtcgtcagcttaggaaattcaagccttgtctatgaggccggagtgtttaaggaccatgatgaacaggtcaaggttataggtagatatatgcatgtttggttggatcggcggacgtggcggcctgcgccgaaggaatggaacctcgcgtgcgcaaggcactggagaggccg

SEQ ID NO: 18526 - DNA, 476 bp, Emericella nidulans
ccagaccttccgatcccgatctcatacatcgcgggtaactactttgtcttttcggtcgacgcagccacgtttttaagacgtgagcaccatatatgcggcgtcctggccgggactctaccacaagtaccacagcagaatatcttcactggcctgccattggagctaatgccagaagaagcaaggctcctggcggagaagggcgtagcttgcattgtagacgaggtaaacttccagaagcaggggatgaattgtctcgtggaggaagaccgcaagaagtatctcgaagaactagaattgcaaggtgtcgagtctatgcagcttcaggtgcgccgaaaagaacggcaacgggaggaagctctgaagaagaagaatgagaaggctgctgcaaaggcgaagaaaacagagcggaaacaagataccgccgagcctgcgtctggagaagattctatcgttcctttctttgacgatgcccagcc

SEQ ID NO: 18527 - DNA, 477 bp, Emericella nidulans
ttcgccgacgacgccttcatccgagacaaagagagtgggatcttcttcgacccggagaagctgcacgtcctcaaccatcaaggcgacgacctgaaagtccggggcccgctgaacattgcacggcccgtccaggggtggccggtaatcgtgcaggcaggccagagcgagccaggacgacaactggcggccgagactgcagaggcggtgttttgttcaccgcgcgatttagagggtgcaaaggcgctgtatagggatatcaaggagcgcgccgaggctgcagggcgaaacagggatcacatcaagatcctcgtgcggcattcgtcctggttggtgacagcgttgaggaggcaaagaggaaacggctcgagctggatagcctagtgcattatgacagcgccatcgcgtcgctgtcaatcgccctcggcgccgatgcgtcagggttcgaccaggacggtccattgccggtggacctacctg

SEQ ID NO: 18528 - DNA, 477 bp, Emericella nidulans
cccttcgtcgggattcagattgcccagcgagccggaaaccacgccgatgatctgtatcgcggcgggatcagggatcgcccctttccgtgcatttttgcaggagagggcggtgatgatggaacaagacaaggaccgcaaactggctccggcattgcttttctttggatgccgggctcccgggatagatgatctttatcgggagcagttggaggaatggcaggcccgcggggtcgtggatgcccgatgggcgttcagccggcaatctgatgacacgaaagggtgtcgacacgtggacgatcgaatcctggctgatcgagaggatgtggtgaagttgtggagagacggtgcgagggtgtatgtttgtggttcgggggcgctggctcagtcggttcgaagcgctatggttacggtcctgcgggacgagatggaaacgaccggcgacggttcggacaatggaaaggcggagaagtggttcga

SEQ ID NO: 18529 - DNA, 477 bp, Emericella nidulans
cactgcccgcccttcagcatcatcgccaacggcctcgatctgaagacagcctggaggcacgacggccatttcggatttccatataactatctcggcgtcgcgacgccggggttcccgaacctcctctggatcggcggtcccaatgccaccggccatggcggcagcgtgcccaatagcatcgagaaccagatcgtctatatcgcgaagatcatccgcaaattccgatcgcaagggatcaaatcgtttgctccgtcaaaagcggccaccgacgactttatcgagtacagcgacaatttctttccgcggacagtttggacagaaaactgctcctcttggtataatggcggacgaccgggagcaaggatccacggcctgtttcccgccagtgcggcgagcctgaattacatccgtcgcgacccgagatgggaggactttgaatatgagtatactaatcccagtgggaaccgatttgcctgg

SEQ ID NO: 18530 - DNA, 478 bp, Emericella nidulans
cgtctgcgcgtacggtcccgcgttcgggaaagaggattcaacgaccctaccatccattaccgagcttacctctggcaacgcaccgggcattcctcggattcagtggggcgtggtagatgtccgcgactgcgcagaactgcatgtcctggccatgacgcatgaagaagcgccggcgcagcgcttcatctgtattggggagggaatgatgtggatgagcgagatggcggcgaccgtgaaaagaaatatgggagacaaggcgaagagagtgacgacgttccagccccggatttccttatgcgagctgcggcgatttttatgccggttgcgaggctggtcctgcaggacttggggcgcgatagagatgttcgaggtgacaaggcgcgaaacctactggagtggaagtggatgtatacgaacgaagaggcggtcgtagctgctgcggagagccttttaaaatttgatgaagatagatgaacaa

SEQ ID NO: 18531 - DNA, 478 bp, Emericella nidulans
cggtaagcgacagcgccttggaacttattcattggatgaggatgagttcctcagcgagcacggaatggatgagtccgaggatctagaaatggcacttcctggtcttcctaccattcagcttgatagcagtgagagtcaggaggacatggcatctaagaagcgcggaaaccgcaagtccatcaggaagtcggagaacggctcagaggctttcacaggagtgcaggctcagatgtccattgacaatgcaattgagcccacctctcgcgatcacgcagattgccaagctcgtcagaactcggtggtcagcgcgtctggctcagagacaacatctgctcctgtctcggtcaatcgccgcggtcgcaagcagtctttgacagacgacccttccaagacattcgtctgcaatctttgtcccgccgttccgccgacaggaacatctcaagcgccactaccgttccctgcacactcaggacaagcc

SEQ ID NO: 18532 - DNA, 479 bp, Emericella nidulans
cctcactggcaccggcgataaggcctttatgacaggtatagacgtcaaggccgcctttgaagaaatactaggaacagacagaatgcatatcatgacgctgcataaaaggcattacatctactttgattccatgccgcattccaggtttacgttactgcggtctagcagtgtgagaagccagttattatcacaatgcatggtttacactgggtctcgggatagatctgagcacagcgtgagacagaagaatgtgaacgtgttagaccaagttctctgtcaaagaggttgataatggagcagcggtaaatattggtagccgagcttcttacccaaggtagtacgtaacttcaggtagattaaagaggttgcattgacggcaagaccgtttggggttgagaaggctctaaaagtgggcaattctatatactacgataaggcagcgacagtgaatactatcaaaactggaggcgctcatggcg

SEQ ID NO: 18533 - DNA, 480 bp, Emericella nidulans
agtccggtaaattttattacctcgctggatgatcctgagaacaagcggatctctacaattgggcgcgttatgccacatacggttgcgaaggtggtggataaacaggggaagattgttcctcaggggcagagaggggagttatgtgttggtggctatgcgctgcagaagggatactggaagaatgaggagaaaacgagggaagtgatgaaatacgacgcgaatggcatgctttggatgcatactggcgacgaggtgatgattgatgaaggaggatatggccacatcactgggcgtatcaaagatctgataatccgcggtgagcatacaagaaactaagtagagctactagctaattatcttaccaggaggagagaacatattcccaagagagattgaggaccgcctggttgcccatgactccatcacggaagcgagtgtagtaggaatcaaggacgagaagtacggcgaagttgtgggctg

SEQ ID NO: 18534 - DNA, 480 bp, Emericella nidulans
agcccatcattgccgccgtaaacggatactgtctaggcggcggcttcgagatggccgtcaattgtgacattgtgatcgcgagcgagaaggcgagcttcgggctgcccgaggtgcagagagggatcgccgcggtggcaggcgctctgcctcggctggttcgattgataggcaagcagcgcgccgccgaaatagcgctcagtgggctgccgttccctgcatcgcagctggagcgctgggggttggtgaaccgggtggtggagcacgatcagctgctagccagtgcggtggaaacagcgaaagctattgcaagaaacagtccggacagcctgcgggttacattggaaggcttgcattacgggtgggagatggccagtgtggaagaggcgagctccgccctggtcgatgagtggtatcccaaactgattgcaggggagaactttcatgagggggtcaaggcgtttgtggaaaagcggcagccaa

SEQ ID NO: 18535 - DNA, 481 bp, Emericella nidulans
caggtcgtcagcgccatccatcacctgcacacgaaagctttggttgtccaccgtgacatcaaggatgagaacgtgatcttggacggtgaggggaggattaagctaattgatttcggtagcgcggcctatatcaagaacgggccgttcgatgtctttgtaggaacgattggtaaggtatctgccgcaatctttcttggccaaaagctcactatccttctagattatgccgcacctgaagtcctgcaagggaagtcataccgaggcaaagagcaagatatatgggcgcttggtatcctgctgtatacgattgtctacaaagagaacccattttacaacatcgatgagatcctggaccatcctcttcgagtccctttcataccattctcggaggattgtatcgacctgatcaggaggatgcttgaccgagatgtggacaaccgcttgacgatcggcgaagttatggagcacccatggatggttg

SEQ ID NO: 18536 - DNA, 482 bp, Emericella nidulans
tcggccacaactctcccctcagtttccaaaccagcttccatctgtgctccaagcccgtctactttcaacagagaccaaagcagcaattgataaagctgttgcatcggctccggtggttcttttcatgaagggcactccggaaactccgcagtgcgggttctctcgcgcaagcatccagattttgggtttacaaggtgttgatcccaagaaattcgtagcgtttaacgtgctagaggatccggagctgcgtcaaggtatgtctgtcatcttgaatgttctgcataactttggcttagtcgtgcttttctacaggtatcaaggagtactcggactggcctacgattccacaattatacctgaacaaggagtttattggtgggtgtgatattctgatgtcaatgcatcagaatggcgaactttcgaagctcttagaagagaagggtgtcctagttgctgaatagattgaggttatgaaatgccct

SEQ ID NO: 18537 - DNA, 483 bp, Emericella nidulans
gatcgagcccgccgctatccatctgccgggtatctacgtcaagcgcgtcattcagagcacggcaccgaagaacatcgagaaatacaccttcgccaaggaggaaggtgaggataccgccgcggccctaggcaagggcgatacggctgctaagcgtgagcggatcgtccgccgtgcggctaaagagttcaagaacgggatgtacgccaacttgggcattggcatgcccatgctcgcgcctaacttcgtcgacccctcagtggaagtgcagctgcagtctgaaaacggtattctgggcttaggcccttacccaaagaagggccaagaggacgcagacctcatcaatgccggaaaggagaccgtcactcttgcaccaggagccgccgtctttggcagcgatgagtccttcggcatgatccggtctggccggatcgacctgactatcctcggtgcgatgcaagtaagcgccaagggagacctcgctaa

SEQ ID NO: 18538 - DNA, 483 bp, Emericella nidulans
tctcgccaaacctggtgagggtacaagattctacatcgaaggcttcgattccgccttcatgtccgccaggaactataccgtcgtcaacaccactgaagaagccgactttgccctgctccggtacaatgcgccgtatgaaccacgtaacggtacctttgaggccaatttccacgcaggttctctcgcatttaacgccactgagaaggcacgccaggccaagatctactcatccctcccgactattgtagacatcatcttggaccggcctgccgttattcctgaggtagtcgagcaagcgcaggccgtacttgcgagttacgggagcgacagcgaagccttcttggacgttgtgtttggagtcagcaagccggagggcaaactcccgttcgatttgccccggtcaatggacgctgtcgaggcgcaggcagaggatctgccattcgatacggagaatcctgtcttcaggtatggtcatggcctgga

SEQ ID NO: 18539 - DNA, 483 bp, Emericella nidulans
atcaaagaccaaagcaatacggaccttgtgaatctgcgccgaacgatttacttgactatcatgtccagtattgactttgaagaatgttgtcataagttgatgaaaatctcgttgccagcgggcctggaacctgaacttccttctatgatcatcgaatgttgctctcaagagcggacgtactccaagttctatggtcttattggtgaacgattcgcgaaaattaatcgcctctggtcagacctgtttgaaaacgcattcgccaaatattatgacacgatacatcgatatgaaaccaatcgcgtgcgcaatatcgcacgtttcttcggccatatgctgagtacagatgcacttggctggcatgttctgtcagtcatccacttgaacgaagaagaaacaacgtcgagcagccgtatctttatcaagatccttttccaagaccttgctgaacatcttggtcttccaaaattgcgagaacgaatgaca

SEQ ID NO: 18540 - DNA, 483 bp, Emericella nidulans
aaatgcaccccagcggcaagtacctctatgctctgatggaagctggcaaccgcttggccgtctacgtcattgacgagcgaacccacaagcctgtctttacgcacatcacatatcctttacttcctcctggtatgtctcgcgaaccgacaatcctgctttgatctgacatttataggccttcccccccgcaacaagtaccgcggtgatgtcactttcactactcgcagcggtgaatatcttttcgcaactacccgcagcaaccactttgatgtgaccggttacattaccgctttcaagctgggcccgaacggcaacatcgagcgccagctgtttatccaccctacttccaccagcggcggccactccaacgctgtgagcccatgcgactggagtgacgagtggctggcgctctgcgatgaccagctgggcttcgtcgagatttacagattccgtgacgagaatctttctcgcgtggcacgtgtg

SEQ ID NO: 18541 - DNA, 484 bp, Emericella nidulans
cggcctgacgacatcggactagctcttcagcagatctaccgttgccgaaaggaggttctccacatccgccagctgctgaacgacaaaacagacgtcattcgttgctttgcccgccactgcgatgcctttggtgcttctccgtcccaagtggggctctaccttagtgacatccaggaccacgtcttgacaatgatggccaacctcgacgcagccgagcagatgctctcgcgcggacagtcaaagtacctcagccagttatcgttcgactcgactcgcatgcggaaccagatctcgcatgccctcagtcggctaacggtcatcgccggcatagtcgtgcctctccagttcgtcaccggtctctttggaatgaacgtcaccgttccagcgcaggccgacaaagcggacagcttgacggcatggttcagcattcttggtgtgcttgtcgcgctggttgtggtattctttgtcgtagcccggaggctgc

SEQ ID NO: 18542 - DNA, 484 bp, Emericella nidulans
tccgctggattccaggccactctggaattgctgggaatgagctggcagacaagctcgctaagctagggtcttctatatacagccccgacatccccccctccccagcatacctatgacgggaggcaaaacagtggctctgtacagagacatatacagcatatgctaataaggcgcctgaaacctacaaagccctgaatatcagaccctatacaaaagaaagccgctcccgcgagcacaagctgccccggtgggtacttggccgactcgtcgccgcccgtacaggccacggagactttacggcataccaccagtgcttcaaccactcagactacctggagagctgctcttgtggtaggaccaagaccccagtgcacttcttcttctgcccatacaccagaaagcgctggaaagatagatggagatgtataagggacggcccgtcaaaaacaatagactggctcttaagtacagctgccggggctga

SEQ ID NO: 18543 - DNA, 484 bp, Emericella nidulans
aacgccgagcgccccttgcgcgtggtggatgttgccggtggaacaggatatactctgcagcgccttctaaataagattcctgatctccaagccgagctgactcttcaagatctacctgaggtattggagaacggacccgttcaggcggatgtacgtattcgcaggatgccgcacaacttcttcgagccccagccggtgattggggccgatgtatacgtcttaacaagagtgctccataactggcccgacattgaatgtcgagagattctcggacacactgtggctgcgatgaatcatgattcgattctgcttatcggggacaaggtgttccccactggtgcggcggagctaacgcctacggacataatggcggacatgagcatgatgatgcttttcggaggcatggaacgcaccatagcccagttgcgagagttgttgtcgtcggttggactggatattgtgaggacttggcggtcaaatgggc

SEQ ID NO: 18544 - DNA, 484 bp, Emericella nidulans
agacccggccgcatctcacaatgccagccaacttacggccatcgcacttcgtcgcaggaacgctctctggcggaacgaagctcacctcgccgccatacatgttcctatcgcgacacacaccgtctcaaactgcggaagaaagattgtcaaccgggccgcgccaaagccgcgccgtgaccgtcttccacactggccgggacatgtgcggacaccctgggtacgtgcacggcgggttcttatctgtcatgttcgatgaggtgtttgcacattgcgtgtcgcagtcttttcggagcggaacagggatgacggcgaatttaaatgtggattaccggaagccggcgctgccggaccgggtttacgtgctgagggcagagacagtcaaggttgaggggaggaaggcgtgggtggagggagtgataaggatgatgccggcaaagaagacggcgagtgagtacaagtcggtgcttgttgcggaggggagggc

SEQ ID NO: 18545 - DNA, 484 bp, Emericella nidulans
gaatgacttcgtgaacatcattttcaatcgttccaatactccattcaattttaacacgataccctcccagttcaatttcttcaacattgtcgtcagtcctgtctctcgactcactcaaggagacaagatggcttccgcagcagcatcgaaccctgagaacatgttctactgcgtcaaagtaatgagcaaaccagggtttcctgaaatctcccctgctgcgtcgccaaaaatcatctcgggcaagaatctcgccccgtttgtgcgcattcttgcactcaatgcttcggtgttctccctcgtttggaacagtcagggcgagcatatttcatcctggcgcaatagactgcgtgagatcaaacgcctacgggaacgggtactgggatcacaatctcagaacgcggatacactggatgccacataccctacccagcgccgcaacaccaaagccaacatcttctccgaagaggtgccggtccgtaccagc

SEQ ID NO: 18546 - DNA, 485 bp, Emericella nidulans
caaacttgtgcctgctcctgtgctggaactgattccgcgacgaacagaggttcatatcgcgcgcaaatttccaggaaatgctgatcaggcgcaagaggagtttctccgcatgggcttggatgcacttaaaaagggccgcaaggtcgttcgcctgaagcagggtgacccttatctgtacgggcgaggaggcgaagagcttgagtttttccgcgctgaaggctttacgccagttgttttgccgggcatcaccagcgctctgagcgctccattgtttgcggaaattcctgcaacccaccgaggggtagctgaccaggttttggtgtgcacaggcacaggaagaaaaaggcctgcgcctgaacctccaacttacgtaccgacacagacggtagttttcctaatggcgctacatcgactctccgcgctcatcaactctcttactatgccgcctgcagaagactttgaccgccctccacaaccgcggacac

SEQ ID NO: 18547 - DNA, 485 bp, Emericella nidulans
gcattggccgtgcgatcaagaaacggtgcgatcccttcggtttgaagacagtctaccacaaccgaactgtattggcaccggagcaagctgcaggtgcggaatatgtctcgtttgacaaattactggccgaaagtgatattatcagcgtgaatgtgccgctgacggggcagacgaagcaactcattggcgcggcggagctggcgaagatgaagcgcggcgttatcatcgtgaacacggccagaggtgcgattctcgatgaggcggcgttggcagatgccctagagagcgggcatgttggggccgcaggactggacgtctatgagcgggaaccggaggtgaatgaaaagctccttaagcaagagagggccctgatggtgccccatgtcggcacgcacacggcagagaccctggcaaagatggagacttgggcaatggagaatgcgcggcgggcaatcactggagaggccctcttgtcgccggtccct

SEQ ID NO: 18548 - DNA, 485 bp, Emericella nidulans
cagcgcagctatcgtcgtctcgttcctcgcccgcgcgttcggaagtatacgattgcccggccgcaccgatcctgtcttctgctacgcctcgatcactcaatcttccattgcgctcattctccctggtttctccgtgttaactagcagtcttgaactacaatcgcaccagatgattgccggttcaattcgactcgtttacacgatcatctactccctctttctcggctacggtgtgactgtaggcacgacaatctacggcgccatcgattccaacgccaccagcgacaccacctgcgcgcgccagtccgtctggggtagcgcctacacacagcacttcccttttgtcgccgtctactctctaattgctgctctaatcaaccaagccaaattccgccaattaccagtcatggttttcatcggcacaaccgggtacgtcaccaactatttcagtacacaaagactgggctcctcctcccaggttgcca

SEQ ID NO: 18549 - DNA, 486 bp, Emericella nidulans
tccttggtccgcaaggctcaactctcaaggctctcgagcttttaacaggaacctacattcttgtgcaaggaaacaccgtctccgccatgggaccgtacaaaggtctgaaggaagtccgaagaattgttgacgattgcatggcgaacatccaccccatttaccacatcaaagagctcatgatcaagcgcgaactcgccaaggaccccaccctagcccatgaatcatgggacagattcttgcctaacttcaagaagcgcacactgtccaagcgccgcacgccattcaaggtcaccgacaagtcgaagaaggtctacacccccttcccaccggcgccggagaagagcaaggtggatctgcagatcgagtctggagagtactttttgtccaaggaggccaaggaacgtgcgcagaaggaagaggttatggagaggcagcggataaagcgcgaggaaaagatgaaggagcgggagaaggcgtttgtggcgc

SEQ ID NO: 18550 - DNA, 486 bp, Emericella nidulans
tgcgcctcacggttgagttgattcagaactctctatcctacatcaacccgctcaaggatcgcgagctagatcttcgaggtgcgttccacacaaagtacctgaaaaggacaggtactacactttgagagctggattgatatggacctttgtcgtcggcgttgtatagggcacaagattcccgcgattgaaaatttaggtattgcgaaggtacttacctctctccacctcttccctcatttgtaaggcccaattcaaaaaagatcaggttctgacgcagtctgccccaggaccaagatgcaatcgacttcacagacaacgacatctcctcgctaggcaacttcccgttcttcccgcggctgcgcatgcttctccttgccagaaaccgggtgcggcagatccagccaagccttgcgaattcaatcccgggcttgacgacacttgtcctgacagcaaacaacatagctgagttggcggacctagatccgc

SEQ ID NO: 18551 - DNA, 487 bp, Emericella nidulans
gagagccaccaataacactaaaagagtaccttacgcgattccatcattactgtcccttatccactggggtgtatattgcagccagcttgtacatcacccgaatagctgtcgttgactcagttatttcagtcaaccggaagaacatgcatcgcctggtgctagctgggctgcgtgtagcgatgaagacggttgaggatcttgtctatccacacagccgagttgctaaggttgggggcgtgacagaacgagaactcacgcgactggagatcagcttctgtttcctcgcggatttcgacctacgagttgacgaacagacactggataaccaggccggaattctgcattggtacatggaacacccgacgtgactctgggtatggtgacgtgcgcgagcattgcttgataagacaggatacaggaggttttattcaaagctcgctaccgtgacgagaccagctggcctggatttggcattaccgctcgtcgc

SEQ ID NO: 18552 - DNA, 487 bp, Emericella nidulans
ttatttggacagatattgattagatttcgcacaggtacaacacacggtccaaccgcgtccgcatcgtcaagacccccggcggcgagctgcgataccagcacctcaagaagcagggtaccgctcccaagtgcggtgactgtggcatcaagctccccggtgtgagtaccgagtccccggatctggctggatttcatatacaagaaaaaaaaaaaaaaacaaggggatcgatgaatggattcaacatagcgaaacggccacatgtaataagagacaacgagactgaccaacttttcctattcagatccccgccctccgcccccgcgaatacgcccaaatttcgcgccccaagaagaacgtcagccgtgcctacggtggttcccgctgcgccggctgtgtcaaggaccgcattgttcgtgctttcctgatcgaggagcagaagatcgtcaagaaggtgctcaaggagtctcaggagaaggctgctaagcgc

SEQ ID NO: 18553 - DNA, 487 bp, Emericella nidulans
acggggagcgacaaggagggatttgctagagagctaggtgctcatgagtatattgactccagcaaggtgaatgatgtcggattggcgctgcgcgagttgggcggcgcatccttaattgttaccacagccccctcggcggaggtgatgaagccgctcttggagggtttgggagtccttggaaagtcgttgattctatctggtaagtcatctcctgctcctccctcccacatagggtttaaatatgctgatcatgggtcgcagtgccgggtgaattgcccatagatacggtaaccatggcaagttgcaattcttcctataccggaagcaactccgctaacaaacgcttagcttaaatacggcgcttcggttcagttctggccatgcggccacgccgcagactcaaaagaggcgattgcctttacggagctgcaaggatcgactgtctggtggaagagttccctctagccaaagcaaacgaggcattcgg

SEQ ID NO: 18554 - DNA, 487 bp, Emericella nidulans
tggcgaggtgtccgagtgggacgctcaactcaaccgcatcgtcgcgcgctggaaggacgcgggtggcgttggtacaaccgtccttcgtctcggcggctcaacggagaatgactctcttggtggagaccgctacgtcgctattggcagtaaatcgggtattgtcaatatttacgaccgcgtgcagtgggcggtaaattacgcctccctcctctcgaagggagacacatcaaccgctatttctcgcaatcctgaacctctgcgtgctctcgatcagcttgtcacatctatcagccacatcgagtttgcgccagacgggcagttccttgccatggcgagcgaaatcaagaaggatgcgctgcgtctggtacatctgccggactgcactgtgtaccggaattggccgacgcaaagcacgccgctgggacgggttacgtctgtggctatctcgccaaactcggagtaccttgctgttgggaatgatcggggg

SEQ ID NO: 18555 - DNA, 488 bp, Emericella nidulans
gcgccaaggagcagaaccgtttactgaaggagatattggtaccccaagcgtccatcaatccatcttccggtattacgtcgccaagacccgtagggtctatcggacaaggcactgtggtagaaacgccttttcattgtcactacggatacaacatccatattggcgaggacgttatgatatctgagaactgtctcctagtggatgattgtcctgttaccattggggcacatacgtggattggcccaagagtgacgattctcacatcgatggctcatgcgaatatgcaggaacggaaaggttcgcaaagccgctaccagggcaggcctgttactatcgaggaagattgttatgtcggagccggctgtactatataccctggcgtccgtctccggcgcggggcttatgtcgctcccggtgaagtagtcaaatccgacattgtcgcttatgggtttcagggactaaaaccaagctatatgtgatattgtctg

SEQ ID NO: 18556 - DNA, 488 bp, Emericella nidulans
cctcgcatcttcactggcattctgtgagtggagtataattctcaactgggatgtcttttgagtactgacttctgacgcagtaatctacattctgtggtcttacctcccttcgcccttcctacatcagcttggaatatattactatccaaatcgatggtggtcgttggcttttccttcctggctagtcatgtcgatcatctatatctacgttgccttagcatcgtacaatactggatatttgactctacccatgaatagcgtggagaatattgtcgatgaagtggcaaacgtggcggtcatagacgggaaggggagacgccggcctggtggtgctgcgaaaatgcgccctggggctacctcttttcagatcatgggcccgcaaaatcgcaaagtcaactggagggaaatctggagcgaagggacggatgcggttctggatattcctgttgggggtgtatgcgaagttctctacgggccagaacgggatg

SEQ ID NO: 18557 - DNA, 488 bp, Emericella nidulans
gacgaacaggggcacggcttatatcatctaccatgatcctgcagatgcagaagccgcaattgcgcatatgcatgaagcccagcttgatggggcagtcctgaatgtgtcaatagtattaccgaagagagcgttttctcgttcgccgccgcccatgtcaaaagggcgaggaaagtatggacgtcagagacaccttccgggacgacctgcggacgattcctctcgccgctcgccatatcagcagcgagcttctcctcctcggaggtatggtcgttcccgggccatgggcatggagagacatgacttataccgacctcgatcactctcgcgctcctggtctcgatcactctcacgctcccggtcccgatcactctcgcgctcccggtctcggtcattctcgcgttcccggtctcgatcacctcgccgttctcgatcgttttcttcccggtctccttcgacaacgccacctcggagaagggcgcgctacagcg

SEQ ID NO: 18558 - DNA, 488 bp, Emericella nidulans
cacatattgctagacaacaagtccgactgactatcgacagtcttgagcttggagctggaggcgggcttgttgggttagcggttgcctctggatgcgaagttggcccacctcaaatatatattaccgaccaagtgccaatgcttccccttatgaaatcgaatatcgcgcttaataacctctcccggaaagtgaaagccgcggtcttagattggggcactaccctttcagacgagatcccccggcgtcccgatgttatcctcgccgctgattgtgtgtattttgagcctgcctttccactcttgatatcgacactgcgcgatcttttgggtcctgattccgtctgctatttctgtttcaagaaacgtagaagggcagaccttcggttcttaaagctagcaaagagagcatttcaggtcaccgagatcgatgatgaccctgaagccggaacatacaagcgcgaaaatatcaacctgtacacaatacgatca

SEQ ID NO: 18559 - DNA, 488 bp, Emericella nidulans
tcggctccaagaaccgtggtggccccgtcgttcgcgagaccgtcatcaagggtaagagcgcactcaacgctgcccagcgacaggggctcgttgtcggaactgaaaagaaatttgcgtctggaaattctgtaagtaatctctccccattgtgactattcaataatagtcgccacatattaacgttgcttaggctggacgagccagcgccgttgaaggccaacatctcaccaaagtcgaccgcagcgacgacattgtaaagcccaagactgttgggctgcaagtagcagacgccatcaagaagcgccgaacggacgagggctacaagatgacacagaaggagctcgccaccaaatgcaacaccacagttaccgtcatccaagacttcgagcggggtacagccgcaccggaccagaaggtgcttagcgccatggagcgcgtgctgaacatcaagttgagaggctctgacatcgggaaagagaagttcccca

SEQ ID NO: 18560 - DNA, 489 bp, Emericella nidulans
tggagaacgagaagggagaaatcgtcgatctgtacgtacacattttgcggtttttgctttgccgctttgccgagatgtctgcaatctggaaaagggcgagatgggatagcatggagatgggcaatacagacattgatgggaggttgcttcctgattaaatatctgaagcgaaaaaattcgtctgaattctcattctccagctgttgcatctcgctctcatttctcttgagcgagcaaaggccactccagttaaatgtgcacaagagctatcaccactaacctttctctctagctacgtcccccgcaagtgcagcgccaccaaccgcatcattaaggccaacgaccacgcctcggtccagatctccatcggcaaggtcgacgagaacggccgctacaccggcgagaaccagacctacgctctgtgcggcttcatccgtgcccgcggcgagagcgacgactcgctcaaccgtcttacccagcgcgacggct

SEQ ID NO: 18561 - DNA, 489 bp, Emericella nidulans
cgcgtctcagtgaacggtctggccgaacgggtatgtactatataggaatgatagctgacgatcaaacaacagcaattggagactgacttactcacagcgatgccggcgatgtcccgtgtttttgcggttcccacatcatcgggcgaagagctcacactgaccctccacgagccctcgttgactgccgacaacctaggcatgaaaacatgggtttcatcctatctcctttctcggcgcctccacaccatccttgattctacctcacaactcgttccctctacatcaaccggtccaacacttaactctgaccggacccttcgagcactcgagttaggcgcaggtatcggcctggtcggcctttcatttgctgctctacgcggcaactcggcaaaaattcacctcacagatcttccggaaatagtgccaaacctggcctacaacgcggctcttaacgttgagcttcttaacagaaccgctgcgactgtcaca

SEQ ID NO: 18562 - DNA, 490 bp, Emericella nidulans
tggtcagccaggagccgacactgtaccagggcaccatcaaggaaaacatcttacttggtattgtcgaagatgacgtaccggaagaattcttgattaaggcttgcaaggacgctaatatctacgacttcatcatgtcgctcccgtaagttcatatttctgtccttcatcctatacctggtccgctaacatgcaacaatagggagggctttaatacagttgttggcagcaagggaggcatgttgtctggcggccaaaagcaacgtgtggccattgcccgagcccttcttcgggatcccaaaatccttcttctcgatgaagcgacgtcagccctcgactccgagtcagaaaaggtcgtccaggcggctttggatgccgctgcccgaggccgaaccacaatcgccgttgcacaccgactcagcacgattcaaaaggcggacgttatctatgttttcgaccaaggcaagatcgtcgaaagcggaacgcacagcga

SEQ ID NO: 18563 - DNA, 491 bp, Emericella nidulans
cattgctgccgtcgaagaggccaaaaagggtgcggccgaaggaggcgtgcctatcggtgcggcactagtaggcatggacggaaccattctcggccgagggcataatatgcgtgtccaaaatgggagcgcgacattacatgtcagtctcccctgctcttcctgccagactacggagtacaatcgagggtgtggctaaccttacccaggctgagatgtctgctctcgaaaactccggccgtctgcctgcgtcagcgtacgaaggcgctacgatgtacaccaccctatcgccctgtgatatgtgcacgggggcgtgtctcttgtacaagattaagcgggtggttattggggagaacaagaacttcatgggcggggaggagtatctaaagagccgtggcaaggagctggtggtgctggatgatgaagagtgcaaacaaatgatggaaaaattcatcaaggagaagcctcagctttggtaggtttcttttatttgt

SEQ ID NO: 18564 - DNA, 491 bp, Emericella nidulans
ggtgcgtttggccaccgactccagagcttggctggcctgaagattgccgtacttgcttctgttgacgcagaggaatccttcagcgcggctactgctctgaaggccgagctctccaacgacaacctggacgtcattgtcgtcgctgaacgcttctccaacggcgtgaaccagacctactctgcctctgacgccattcagtttgacgccgtcgttgttgcccctggagcggagaagctcttcggtgccaagtccgcggccaactccagctcaaccctctaccctgccggccgtcccctcgaaatcctcgttgatgctttccgcttcggtaagccagtcgctgctcttggcagcggctccactgctttcgacaacgctggtatcaacaccgccgtcgagggcgtgtacgttgccgatgccgtggacgagagctttgccaacaacctcgaggagggtctgaccgtgttcaagttcttggatcgctttgccctgga

SEQ ID NO: 18565 - DNA, 492 bp, Emericella nidulans
cggacagctggcctctgagagaatcccaatctccaacatgattttacaagctacccgaagccgcataaggtttccgcgacttcccagcacaacgaaccgactcagtccccgtcgctctctcatccccgccccagcggccaactctggtcccataacggaacggcgagcagaccgtcagcttcccaatatcaactctgaagggcgacgatggcttcggaccttaccagttttcgcggtcgtggtgggcgccgccatgctgggcatcttcaactaccaaaagtcctcatcgagtgtcgtgagcagcacactgtatgctctgcgcacgtcgccgcgtgcgcgcgagatattgggtgatgagatctattttgcgcagaagataccttggattagcggcgagatgaaccagctgcatggccggatcgatatctcgttttgggtgaaagggacgaaatcgcaggggaaaatgaggtttaagagtattagaccggaccg

SEQ ID NO: 18566 - DNA, 492 bp, Emericella nidulans
tcccatggtttctcccccgttttcaaggagaagaccaaggtcgatgttccctctgacgtcgatgtcatcctcgtcgcccccaagggttccggccgtaccgttcgcactctcttccgtgaggccgtggtatcaactcctccattgccgtcttccaggatgttactggcaatgctaaggagaaggctatcgccatgggtgttgctgtcggttccggctacctctacgagactacctttgagaaggaggtctactctgacctctacggtgagcgtggctgcctcatgggcggtatccacggtatgttccttgctcagtacgaagtcctccgtgagcgtggtcacagcccctccgaggctttcaacgagaccgtcgaggaggctacccagtctctgtaccctctgatcggcgccaacggtatggactggatgtacgccgcttgctccacgaccgcccgccgtggtgccatcgactggtccagccgcttcaaggaca

SEQ ID NO: 18567 - DNA, 492 bp, Emericella nidulans
gaagccctccgtcgcatctccgaagcgcacatagatccgcacaaagggcaacggcactggcgacgtcgtcaagccgtcaagcacatgcgcaccgtcaacgcggagattgcccgcgcccgcgccatccttcagtcgtcgcctgaccccgagcccgagctccgcgcctacgcccgtgagctcgaggccccctatgagcttctccgcgaagccgccgagaagggccgccttcctgtcgtgaacttcgcggccggtggtgtcgcgacccctgctgatgctgcgcttatgatgcagcttggctgtgatggtgtctttgttggctccggcatctttaaatctggagatgcaaagaagcgcgctaaggccatcgtccaggctgttacacactacaaggaccctaaggtgctggctgaggtcagccagggcctcggggaggcaatggttggcataaacgtttcgcatatgaaggatgaggacaagctggctaagcgtggg

SEQ ID NO: 18568 - DNA, 492 bp, Emericella nidulans
gcggaagatcatgggcgtcaacctcgatggcgccttctactctgcccaggctgcagcgaagattttcaaggaacaaggtcggggcaatgtgatattcactgcgtctgttagtgcgacattagtcaatgttcctcagaagcaggctgcggtccgttccctccatggttcatacggacacgactgatatggagcagtacaacgcatccaaggcggccgtggtccaactagcacgatgcctgtctgtagaatgggtcgacttctgtcgcgtcaattgcatctcgccgggcttcatcgagacagagatactcgatgctcatccgcaggaatggagagcgaagtggcacagcatgattccagcgcacggagtggcacaggcttatgagctgaagggagtatgtatttcacgagattgagctgcaaaagctaacattacaggcgtatgtcttttgtgcgtcggacgcctcgagttacatgaccggcgcggatattgtg

SEQ ID NO: 18569 - DNA, 492 bp, Emericella nidulans
ccatcacagcgccgctttccccagaccaccctccacccgccgttaaaacgtatgcccaggtctacgcaggcgtacgtcaggactcaggcgacccatcttatttcgtaaagatggcccgcgatttctacgaccgtgagggcattacagggacaaagacagtggtattctcggactcgttggacatcgagcactgtcttgagtataaagttctagcagaggaggctgggttcaagcctgtttttggcgttgggacattcttcacgagtatgtgtttctcctaccttgaggtgaattcactgaaccgaactgatgtggtgtagatgacttcatcaatacaaccacgaacgaaaaatcgcaaccgctcaacattgtcataaaaatttcctctgctaatggccgggccgctgtcaagctaagcgacaatatgggcaagaatacgggcgacaaggatacagtccaggctgtcaagaagaggctggggtacgtcgagca

SEQ ID NO: 18570 - DNA, 494 bp, Emericella nidulans
tcgaagctgagccgtgtcgtacaacttactggtttctcggatcctgtctacgcagaagcctatgttacggtgcatcaatttgatattgtcctggacgtcctcttggtcaatcagaccctggagactctacagaatctgtctgttgaattcgccacattgggagatttgaaggttgtagaacggccgactacccacaacctcggccctcgtgacttcttgaacgtgcaggctacagtcaaggtgtcatcaacagataccggagttatcttcggtaacatcgtgtacgatggtgctagctcaacagaaactcatgttgtcatccttaatgatattcacgccgatataatggattacatccagcccgcccactgcaccgagacccagttccgcacaatgtggaccgagttcgaatgggagaacaaggttaacattaactccaaggccaagagcctgcgtgacttcctcaagcagctcatggagagcactaatatggc

SEQ ID NO: 18571 - DNA, 495 bp, Emericella nidulans
ggtagaattcgctgcgtttattccctacgcgtatattgtgtcctatgggctttatgcaagaattcccactgatatcgcgtacctgctctgcgtgttcttgaatgttggcgcgatacctggacgcgctttaccgggtattgtggcagataaactgggccgattcaacgtcatgtcactcacagcaatcgcttgcgggatctgtacactggcattatggtattgctctggcacgaacgaaggcgctatagttgcttatgcagtactatacggtttctggagtggtgctgcaatcagtcttactcctgtgtgtatctcccaggtgtgcaagatggaagattacgggaaaaggaatgggacgacgtttacgctcgtcagtattggcactttgacggggatcccgatggctggagcgatccagcagagtcagaatggaggattcaagggtcttattatttttgctggtgtcctttatctatcagcggcagcggtgtttgt

SEQ ID NO: 18572 - DNA, 496 bp, Emericella nidulans
ggtgaagaaggcgcggagggctatgaggagggctacgggggcgctgtgaacggagaacgtgtggtcgtttctggtgacccgaatgctggatattcaggaaaggtggttgaacaggcacgggcaaagaagatccccaacgaccagcgcacgacgactccatacatgaccaaatatgagagagcgcgtgttttgggtacgcgagcattgcagatcaggttcgtttgcgactgttttgacgagatgggtgaagcgctctcattgacatcccattagtttgaatgcgccggtgcttgtggatctcgagggagagacggatccgctgcagattgccatgaaggagcttgcgcaaaagaagatccctcttattgtgaggagatacctgccggatggaacgtaagtgataagactctatgtgccccatgatgttctcatcgatttcgtcctggtattgactggttgataaagttatgaagattggacatgcgaggagcttcta

SEQ ID NO: 18573 - DNA, 497 bp, Emericella nidulans
cgctcgcgggtaaccccttccacattgaccgagaggctatggctaaggagctgggctttgaggggctcctgtacaactcgatgaatgccgttggcgatcgagactttgcgatggagacgatgcagtggggaagctcgtttatgcttaagatctcgcgctgggcggaggatctgatcatctactccagtctggagtttgggttcgtccgcttgtcggatgcgtactcgactgggtcgtcgttgatgcctcagaagaagaacgctggtgcgttttccccatgttctgcgttatgattctctaatcattgtatagacagcctcgaactcctccgtggcaaagctggccgcgccttcggccacatggcggcctaatgtgcacgatcaagggtctccctacaacatacaacaaagatctgcaagagagtgtcgagcccctcctcgatcacatcaagaccgtcggcgatagcatccagattgcgactggcgtgctgtccacgc

SEQ ID NO: 18574 - DNA, 497 bp, Emericella nidulans
cccatccaggcttgaagccaactctcacctccttcagcccccggtaaacaattactgcgtctaccacccctcctctcccgcaacctctgggtacacggtgatgatagtcggcggcccgaacgcccgcactgactaccacatcaactcgactcccgaattcttctaccaataccggggctccatgctgctcaagactgtggatacgagcaccaacccgcccaccttccaagacatcccaatccatgagggttcactgttcttattgcccgcgaacaccccgcactgccccgtgcgctttaaggatacggtgggcgtcgtcatggagcagccaagacctggaaatgcggaggatgcgatgaggtggtactgtcggaaggagggatgtggggaagtagtttgggagaagaggtttgtctgtacggatctggggacgcaggtgaaggaggtggtggaagagtttgcgggcgatgagggaaagagaacgtgcaaggcgtgcg

SEQ ID NO: 18575 - DNA, 497 bp, Emericella nidulans
taaaacacacagctgcttctttacctcttccgcttctggatggaccaatgatgagataggactggcatggcttcgagatatctttgacagggagaccaaagcaaaggcaaggaggcgttggaggctcttattcctggatggccatggctcgcatatcaccatgaagtttcttgactactgcaaagcaaataagatcctcctggctacatacccccctcattcaactcatacattgcagcctcttgatgttgggatcttctctcctctatccaaggcctatagtgacgagttagaagcatttctgcatgcttctcaaggccttagcgcaattacaaaatgagacttcttcaggctcttttgggcaagctggaacaaagctttatctccagcaaatattaagagtttatggagatcaactgggctgagacctttcaatcctgaggttatattagcgcgctttagggaggatacaacacaaagaccttcctccagtgaat

SEQ ID NO: 18576 - DNA, 498 bp, Emericella nidulans
agctgttccggtcgggggtcaatctgaggatcaacttgaatagacccaagaatggaaatgctctcacggccataatggcgcaagatcttacagaggctgtcacgaatgccggacgagatgcgaccatttcacgaattatcctgactggaagtggcaagttcttctgcaccgggatggatctgggcaagggaagcaccgcagtgggtcaggggggctccagcagcaatgcgcagtttgaccgactgacaaatctctttgaagccattgaccagtcccccaaggtcactattgcgtgtttgaatggacccgcattcgggggcggcgttggactggccttcgcctgcgatatgcgctttgcagttagggctgcgagtgtaacgctcagcgaggtcaagctgggtctttgtccagccaccatctccaagtacgtcattcgagaatttggaattgctctttcgcgggaggcgatgctctctgcaaggccagtgtcagccggcg

SEQ ID NO: 18577 - DNA, 498 bp, Emericella nidulans
ccagccccgcttgaccaagttctacacgcaaatcgtcagtcactacagtctacgagctctagcctgctacgagccaaaacttacaaaacactcataggacacacaaacgaaacaatcccttatcgcccaaatatatgaccttgttgcccagcgtccccctacagcctgcaatttcctcccgctccctccgatactcgcccgcggcgccagttccagcgcaagcactggtccttctgacgctccaactcaaattacctaccgtacatacgcgactctctcatttatcatgatctcaacgtccactgagtccccgctggccctgatcgacctcatccaagtttttgtcgaggcgctcgaccgcatcttcgagaacgtatgcgagctggacctcatatttggctttgagactatgcatgcggttcttagtgaaatgatcgtcggtggagtggttgttgagacgaatattgataaaatcgttgctggggtacagagccagga

SEQ ID NO: 18578 - DNA, 498 bp, Emericella nidulans
cccatcgcagctagcggatcaacaaatgcagaagaccggcatgatcgctcttcatctacccccaccaattcgtcccgacaaggcggcgagagggacaaacctcgtttgacggagcaagagaaaaagaacaaccacattgcctcagagcagaagcgacgcgcggcgatccgtgaagggtttgatcgacttacggagcttgttcctggcttggagggccaaggacgaagcgagagcatcgtcctaaagaagactgttgattttatccatgcccagctccaagagcgcaagaaccttatcactgaaatcgaacgcagagggggtcgtgtcagtgacgatatgcgaccctaagttacctgtcgttactgtacttggataccgaagcccgttggtgctaagttaagtctggtggcgtctttcagcctctcgcgattgaaacgacacttatataatctatgataccttgcttattgcatgtacggcaagatattgctaattacc

SEQ ID NO: 18579 - DNA, 499 bp, Emericella nidulans
tgaaatccgtttcctggctccaactcctcgacccagaagctgatcccatttacgctgaggagcccgccataattcccgacgcggagctcgcaactctcaaaaccaacaagcgcggcgcataccaccgaaaacgaaaccgctgggcccgcgtgcagagcgtcgtcaatgaagttcgcgcaggtggctacgatggccttgtcgtcgctacactcatggatcttgatagtgtcctcaaacacacagtcccacttctagctggctccgcaccagtcgtcgtatactcgccaaccattgaaccgctaacggagattgcggatctttactctacggcacggaaaacggcttatatcaatcggaagcgggagttagaagaaaagcaaggccagtctgccaatggcgagttcccagaactagctgctgaatttaatttgaaccctacacttttattggcacctacactggaaacagttagggtgcgtcagtggcaggtccttccggg

SEQ ID NO: 18580 - DNA, 499 bp, Emericella nidulans
tccatccggcggtattgttcaaaactggggctccatccaagagattctgttcctcgaggttgcgctcacagagaattagctcatctttgtcacccgcggcatggacacatggccatccatccatttagtcactgctatcctcggcgttgatgtcctagcaacaatattctgcttgtttggatggtttagcaatgaaaccatgcccacgaacccaaaaacctctttcgtggagaccaggaacggttggacagatatcgttaccgtggtccgagtctggggctactcgctgggtgttgagatcgtgatcgcactggtatacttcatgctgaaccgattcaagtggctggatgatctaggccgatcgaagcgtgacaaaggagacctgaagattgaaaatcttttgggtcatctagctcggttgacggttgagtacgagcagcctggaaagccgaagggacggttcttcttggctacgagtaaggaggaagaagaagttgaa

SEQ ID NO: 18581 - DNA, 499 bp, Emericella nidulans
cattggcttgtctacaaagaatcccctcaaaaggaacaggttatctggtcgtacgtggtggaggaccccgaaactcacaagattacggatttcttctcattctataatctcgagtctacggtgatccaacatcctaagcacgactgtgttcgcgcggcatatctctactattacgccaccgagacagccttcttggacgaccagaaagctctcaagaacagacttcagatgttgatgaacgacgctttaatcttagctaagaaggtacgtgttcttttgccctgatagcgaattacgcctaacttcgccaaaggcccaattcgacgtattcaacgcactcacttcgcaccacaacccgctcttcctggaacaactcaagttcggtgccggtgacggccagctccacttctacctttacaactaccgaaccgcccccatcgccggaggggtcaatgagaaaaacttgcccgacgaaaatcggatgggtggtgtgggcgtt

SEQ ID NO: 18582 - DNA, 499 bp, Emericella nidulans
tccgagcgtgagcgactggacgagttcatcgactctatccattattcagcaaggtgcgtacattacctcaaattaccttcagcttctaaaatgcgcagatactctgatgatcaatttgaatatcgccatgtccagctgccgaagaacatgctgaaaaaaatacctgccgactactttgacagttccaaagggaccctcaaattattatgggaagaagagtggcgagctcttggtatcacacaggtacgcattattattccccggcaaagaattgtctaaccctattatagagtctgggctgggaacattacgaagttcatgaaccagagccgcatattcttttgttcaagtatgttcctacagtcggcctagccagtctacgtgctcacagtttacacagacggcccttgaattaccagccatcaatcccacaatgaacggcgtattccgagctgccgactacgcgttcgcagcgtttacacgggcgtcgacagtccag

SEQ ID NO: 18583 - DNA, 500 bp, Emericella nidulans
tgtcaatcgatgggcgaacctcgagttctctgctttttacatggaagccatcaaagaccgcctgtatacttatgccgaaaacagtcctagcagacgggctgctcaaacgacactgtttcacatttaccaacatctacaggaagtcctaggtcccattacaccgttattggtggaggaaacttgggagcacaccccggaggcgctcaaggccgcatttgagcaccctctgagacgcactgtctcgaaacctgacccacaatggcaggacccgtccctgagtggagactatcaggagatcgtcacggtccactccgctatcaagagtatgctggagaaggcaagaggaaacaagcagaccggctcatccttgcaatctttcgtgcatatccagctcccgaacactgctacccaatctgtgctccaacgaaagctggaagagctccctgatatctttgtcgtctcctcagtcacgcttaccggtagcgaagaagcccttcccg

SEQ ID NO: 18584 - DNA, 501 bp, Emericella nidulans
agccgccggaaggtgttgagcgatcactatggctgtacgaactctgccgcttcttaaccatgaaagttaacaatctcatcatcgcattctttgcggaaaaccctccctgctccgcacagacttgccccgagatgcgagcgtccgaatggcagtacctttgcgccgttcatgatccacccaaggcctgctgcgccattgactactgctgtcacactctcgattgggccaccaatattcttacgtcaccaaaacactttccaagcaggctcaccctgggatcggagtctggaggcggaccgcaggcaggcctgaggcacctcaccaatatcttccggaggctatatcgcatcttcgcgcacgcttggtttcagcaccgagaagtattctggcaggtagagggtcatgatggactttatatgtttttcaaaactgtttgcgacgtttaccaccttattccggaggacaactatactgtgcctcctgaagcggagggggatgacg

SEQ ID NO: 18585 - DNA, 501 bp, Emericella nidulans
cctgaagagcacacccgccacaattgcacggcatctccaagctgcaagcgacgtgggtttacgctaggacttaaacttgttcgtggcgcatacattttctcagacgagcggagcctgatccacgagacgaaggcggatacagatgcggcttataacgggattgcacagggggtgctgtgccggcagctcggcgcgttcgggacagagaagccgttcccatctgtggagttgttcctggcgagccataataaggagagtgtcatgaaggcgcatgcgcttcgactgcagagactgaaggagggattgccgactgtgccggtgggattcgggcagctgcatgggatatccgatgaggtgagctttaggttgttaacgctgaagaatgagcgtaacgagccgatggtgtataagtgctcgacctggggcaggctgagcgagtgtctggcatacctggtaaggagggcggttgagaatcgggacgcggtaggccggacggaggat

SEQ ID NO: 18586 - DNA, 501 bp, Emericella nidulans
cgcggcgtcaaggtcctgatggagggtcttgatttggagcggcttgttctcagtgctggtccgcttgggtgggtccactgcatctcaatctgcgaggatgaacctcggcaaaggccgtgctaacaagcaatttaggatcatgcaagccgcccttgatctcgttctcccgtacacccacgttcgcaaacaattcggagccccaattgctcataaccagctcatccaggggaagctcgcggatatgcataccaagcttgctgcgtcccgcgcctatacctacgcgacggcccgccacatcgacagccatgcctccctgggatcagcagccattcgcactcaggactgcgccggtgcgattctctacgcagccgagagggctaccgaatgtgctctggatgcgatccagctcatgggcgggaacggatatatcaacgagatccctgcagggaggctactccgggatgcaaagttgtatgagattggagccgggacgagcgagat

SEQ ID NO: 18587 - DNA, 502 bp, Emericella nidulans
tccaacgacccatctccgcttcaacacaactcgcagagaaatccctcccaccacgcataaagcttgacgatgccgacataacaatcgcctaccttaagggcactggcccgggtgggcagaaaattgtgtgctccctgtcccccgacccctattacttcgacgcctccgttttgtttgtgcgaacgccgtcgcctgctgacagctctgatcgcagaacaaaacgaattccgccgtacaactgatccacaaacccaccggtattgtcgtgaaatcgcaagcgacacggtcgcgctctcagaatgagaaatacgcacgccagattctggctgataaggtcgagcagtttctaaaaggggatcaaagtcgtattgcgctgaaggcggacggcgacgtagagaagaaggcgagccggttgaagaagagtcggaggaagtatcgggagttggaagagaagaagagcaccgaagagacgagtgatacccagagcgtggaggtggaggga

SEQ ID NO: 18588 - DNA, 502 bp, Emericella nidulans
ggccaggccgataatgcttacgaagggaatacgtacaagggactgcgattggtctcagatgactacagcctgtactatgctgtgtggtgcaacaacgaaaaggagttctataatcttaaggtataataccccgactgctctgattgtttggagctgctcacacacgcacaggatgatccttaccaaacagtcaatctggctgcagatatttcaaaacatgagtcctaccgcatcgccaacagacctctacctcagatattccagcgagcaaatgccctcatgatggtgctaaagtcctgtactggggattcatgccgtcatccttgggtccagctgcatcccaacggcgacgtgcacagtctcgccgatgctctcgacaagtcctacgacacgttctatgcaaatcagcccagggtttccttctctgaatgcagcctcggataccatctctgggctgaaggaccgcaaaagttcaacgtttacaagaagggcagccgcgatg

SEQ ID NO: 18589 - DNA, 502 bp, Emericella nidulans
agcgcgcaacgatgtcaaccgcgtctgtgacccactgaccacgcaagtcgatcgactgatggtcgttgagaagttctcccatgtccagcacctggtatcacaagtctccggtgttttgcgtcctgaaaagacccgctttgatgccttccgctccatcttcccggcaggcacagtctctggagcaccaaaagtccgagccatgcagttaattgcagaactggagggtgagaaacgaggagtctacgctggtgcagtcggctacttcggatacaacatagcctcggccgacggatctaaggagattcctggtgcaatggacacctgtattgctttgcgtaccatgctggtgaaggacggcgtggcgtatctgcaagcaggtggtggtattgtgtttgattcagacccttacgatgagtatgtggagacactgaacaaactgggtgcgaacatcgcctgtatcaagggagcggaggaaaagtatctcagcatggaggcgaaaagc

SEQ ID NO: 18590 - DNA, 503 bp, Emericella nidulans
ccgccgtccctcacagaggaagggtacgagatccatctcggaacgaaccacatcggccactttctcctcaccaaactgctcctccccactctccgcgaaactgtttcccgctctgaatccccggatgtgcgagtcatcacgctaagctcgctagcggccaacaccgcaccatcatacgattccatcacgtccacccccgcgctgctaagtctcggttgggcttcgcggtatggggcgtccaaggctgccaacgtgctcttcgctgcggagctggctcggcggcaccccgagattttgtcggtgtctgtccacccgggcgcagtggtgacggatctataccagcagactaaaaaagcaggccttttctacgaggcgggcgttggtcttatgatgaagttctttcgaagcattcgcaccggggcattgacccagatttgggccgcggccgcgccgagagagcagctgatcaatggcggatactacgttccgatcgcggtcaaggg

SEQ ID NO: 18591 - DNA, 503 bp, Emericella nidulans
tctgatgcagcgctccaaaaccggtcgtggcagccacattgacatttccatgctggagagcatggtcgaatggatgggattccccatgtactatgccttcaacggcgcccccggccctgtacccgctggcgcctctcacgcctctatctacccctacgggcccttcgagacaggcaacgggtcggtgatgttgggtatccagaacgaacgagaatgggctaaattctgcacgcttgtcctctcgcagcctgaccttataacggacgctcgcttctcgaataactcacttcgcgtccaaaaccgcgacgcgctcaaagagattattcacaaatccttcgccaatatcactgccgaggaagccacacgtcggcttgacgaggccgctattgctaatgcgaatgtgagtgacatgcagggcgtctgggaacatacgcagcttcgcgcgagaaatcgttggactgaggtgaagactcccggaggcactgtgccagcccttcttccgc

SEQ ID NO: 18592 - DNA, 503 bp, Emericella nidulans
ttgcagggctcgttcacggtagaactttacaattcgcatgctcccaaggtcagttgcgttgcccaccacagcatctcgcactcgacatgaaatccgctgacacgcattttgggccatagacgtgcaagaacttcgcgacacttgcgcagcgcggctactataataacgtcatcttccatcgcattataccgaacttcatggtccagaccggtgaccctactggcactgggagaggagggagctccatctacggcgagaaattcgaggacgagattcgctcagacctaaagcataccggagccgggatactgagcatggcaaatagcggaccgaatactaacggaagtcaattcttcatcacattggctcccacgccttggctcgacggaaaacacacaatcttcggtcgcgtcaagagcgggatgaggatcatacagcgaatggggcttgtgaaaacaaataatgaggacagaccgctggatgaagtcaagatcctgcgcgca

SEQ ID NO: 18593 - DNA, 504 bp, Emericella nidulans
tcgaaggtgcgctcgttgtcaaaattcctgaacctctaaccttcgcaaatacgggggacctcaagaatcgtctccgccgattagagatgtacggtacgaaccgtgcgcacccctctatgccgaggataaggcctccagagcataatcggaatgttatttttgatgtccatggtgtgacaagtattgatggttcaggggcgcaggtgttatatgagattgtggatgggtatgcgcaggccggcacgagagtgttcttctgccgggttccgaaccgaagtgtgtatcgtatgttccagcggagtgggattgtggagcggtgtggcgggatgtcgcatttcgttgggcatgttgacgaggcgcttaaacttacagattcggagacgaggccgttaagtgcatctagtgcttgaggtgcggctttggtcagtctgaactatggagttggtcggggctccaatgctgtacgcgattgccaattcaatggagtccaaggccaacggcagg

SEQ ID NO: 18594 - DNA, 505 bp, Emericella nidulans
gcggctacacccatttcccctaaaccctcttcgtcgacctcatctacgtttcctgttgtgagcccgacttatactatcaatgctggcgtgctcctgtcccgtccgccccaaatcacacgcgacctcaccgattttgagaaagcgtactacttctaccagaagcgtctgaacgagcgactggcgctcccattcacgaaatacttctactttaagcgcggaacgccccttgacgaggattggaagcgtaaggtccgagagcgccagaccgctgcgcgcgatattggcaagtacaatgcgtacggtaaagaggcgtggaacgatgaactgcttctgggcgccaaggagtcggaaccggagcatattgttgaggcgttgatttcggatgccgagagcactgccaacaacacgtctcaagatacaagcaagcaagagcaaatcccaaggccgcatccccgggtaacggaggcggataagaagggtgacaccaagagtctggatcgggctc

SEQ ID NO: 18595 - DNA, 505 bp, Emericella nidulans
tcgtgcattcttactctacccatacaccagcgaaagggttatggaaatctcctcattgacttctcttacctccttactcgcatcgaaggcaaaacgggctcgcctgaaaagcctctttccgatatgggcttggtttcctatcgaaattattggcggcttgtcttgtcataccagctgcgaaatcaaaagacgccggtcagcattgccgagctttccgaacgcacaggtatgacggcagatgatgtcgtttctgggctggaagcattacgcgctttagtacgagatcccgtgaccagaacatacgctctccgtctcgattacgactattttgaggaatgtattcgcggctgggaaagcaagggatatgtgacgctaaacccaaatgcacttgtttggaccccgtacatcatgggtaggaataatcagtcacaattcgaccgcgctcctatacataccgtcgcgccacgcgaggggcttgaagaagacgatgatgaaagaaaagagc

SEQ ID NO: 18596 - DNA, 506 bp, Emericella nidulans
actaccgcgaggcgcaggctcaggtcgccagcggtgttgacccaatgcgggaagagcgtatcatggacgggttgcgcgttcttgcgcgcgatcattcgcggctcccaatgcagtgggatgattctcctgaagcgggctttaccactggggtgccgtggatgcgcacgcatgatctgtaccgggaaattaatgtgaagaagcaagagggagatccagacagcgtgctgtccttctggaagaaggtgctgcttctgcggaagagataccgtcatctgttcatccacggggcgtttgaggttctcgatttcgacaacctggacacattttgttttatcaagtccagaggagaggagcgggcgctcgtggtgctgaacttttcggcgggggagcagccctttacacaggcagagatggcagccgacatggaattgctggtggggaattatgctgaagctgaattgtgtgagaagctgaggccatatgaaggacgaatatatatcagaagt

SEQ ID NO: 18597 - DNA, 506 bp, Emericella nidulans
tgggtacgtcccgatttttcctgactcttaactgtcactaataaagaatgcagccgcatcccccatggtttctacgaacaccaaatgcgcgcctacttcagtcaatttggcgacatcaccaagctccgcctaagccgtaaccgccacaccggcaaatcgaagcactacgccttcatcgagttcgcttctgaatctgtcgccaagattgtcgcggctacaatggacaactatctcatgtacggccatatcctgaagtgcaagtatgtccccagcgagcaactgcacccagagctgtggaagggtgcaaaccgccgcttcaaggcaacaccgtggaaccgaattgagcagaagcgtctgaataagggacggacccgtgagaactggacgaagaatatcgagaaggagcagaagaggcgtttggctaaggcggagaagttgaaggagttgggatatgagatagagctgccggaattgaagagtgtggatgaggttcctgtgcagaagcc

SEQ ID NO: 18598 - DNA, 507 bp, Emericella nidulans
cgccaaggtcgtcattgagcgttactaccccaagctcacgctcgacttcgagaccaacaagcgtgtctgcgatgagatcgctatcatcccctccaagcgtcttcgcaacaaggttagtgcacgaataaatcacggcttggaagaagcgatcgataaggagacgaaaaggctaaccctgggaattgcgtttagatcgctggttacaccacccacctcatgaagcgtatccagcgtggccctgtccgcggtatctccttcaagctacaggaggaggagcgtgagcgtaaggaccagtacgttcctgagatctctgcgctcgacgtctcccagaccgagtccggtcagctcgatgtcgactccgacaccaaggatctcctcaagagcctcggcgtaagttcactcttaaggccactattatagatgatgctgggtcatggctaatttggtactcgtagttcgacaacctcaaggtcaacgttgttgctgttacccagcagcagcccgagc

SEQ ID NO: 18599 - DNA, 507 bp, Emericella nidulans
gtcatcactgatatcgatgaaggtcgcttgaagttcgctaaagaactcgtgcctgaggtccgcacctacaaggtggagatcggtttctccgccgaagagactgcagagggtatcatcaatgcgttcaacgacggtcagggagccggccccgatgctttgaggccccgtatcgcccttgagtgcactggagttgaaagcagtgttgcatctgccatctggagcgtcaaattcggcggcaaggtgttcgtgattggagtcggcaagaatgagatgaagattccatttatgcgcctgagcactcaggagattgatctccagtaccaataccggtactgcaacacctggccccgagccatccgtctcgtaaagaatggtgtgatcaaccttcagaagctagttacccaccgctacgcactggaagacgcgctcaaggcttttgagacggcggcaaaccccaagacaggagccattaaggtccagattatgagttcgactgctgacgtcgaa

SEQ ID NO: 18600 - DNA, 507 bp, Emericella nidulans
ccctccctccaaacgcctatttgttggtaacctcagtttcgacacgactaaagagtttcttgaggagcacttttcgcaatgtggaaccgtgaccaacgtccatgtcgctacttttcaagattccgggaaatgcaaaggttatgcttgggtggagtttgaggacttggaagcggctaaaacggcagagagagggtataaatatatcactgaagacaacgaggatgaagacgattcggctcaaaaaccgcagcggagaaaaatatggctgaaccaagttctgggccggcgcatgagactcgagttcgctgaagacgcaacgactcgctataacaaacggttcggtaagaacggggaggggaaaaagggagctacaggcaacgacggggatgcagagcccggtgatttcgaggaggtcgcggctgaaaagcctcaacagaagaaggccaagaacgcaaagccggattatacccgctacgacgagtccaccgtgcagaagctgagcggcgc

SEQ ID NO: 18601 - DNA, 507 bp, Emericella nidulans
agcgccgcattatgggaaatgttcacgtagttcattccggattatggaaattgaatgaggacatcgccaatatcgagttagcccagcacgcaaagaccttcggcgtcgtattcgcggaccgaattacccacaaaacaacccaccttctttcagctggtaagcgcaccgcgaagtttcaagaagcaatgcaacgcccaaaaatcaaaattgtacggaaagaatggcttgtagatagcctacttcagtggaaacacctggatgaagggccgtatctcgttccaacccaccccaacgagcagcgcagttccaaggaagtagccgaaagctcctggctttcatcctcagacgaagcttcaggcgactcattcactgatactgaagacgcttccgagctcaacgacgagatcctgaagtctgcagggatcaatgatcttggcttcgaccaggacgaggaggcggctgtgcacgaggaactcaaagagttcctaggcagtgatgatgagagcg

SEQ ID NO: 18602 - DNA, 507 bp, Emericella nidulans
tcctctctcccgctccatccccttctagacaacggcatcagccaaggaaaacccaactttcccggcggaaaactctactgccactgcgcctccaacaaagtcgaaatcacactgacctccgatgtcctgcacaaccacgcgtgcgggtgctctaagtgctggaagcccaaaggcagcatcttctctgtcgtgggcgtcgtcccaacctccgctttgagcgtaactgccaacgcctccaaactcgctatcatcgacaagaacgctccgattcagcgctacgcatgtaaggagtgtggcgtgcacctctacggacggatcgaagttgagcacccatttaagggattggactttgtgcacgttgagctgtccgaggggggcgggaaggagggatggcaaggggtgcaattcgccggttttgtgagcagtttgattgggcagggactggacccggagcttgttccgggtgtgagggagagactgaagagtttggggcttgagaattatgat

SEQ ID NO: 18603 - DNA, 508 bp, Emericella nidulans
attaaacgccgcccgcaagctcgcgaccactcgtcgtgagaaccgctgggccgatctgcactacaagaagcgtctcctcggtaccgcttacaagtcttctcctttcggtggtgcttctcatgccaagggtatcgtccttgagaaggtcggtgttgaggccaagcagcccaactccgctatccgaaagtgtgtcaaggtccaactcatcaagaacggcaagaaggtcactgctttcggtgggtgccctatgtttcctatttcgtgtttcggcatatttgcgatgagtcgagagatggagcgcatgggattatggaaaatatcagaaccctgaagaaacacaactaacaacacttctcagtccccaatgacggttgcttgaacttcatcgatgagaacgacgaagtcctcctcgccggtttcggtcgtaagggcaaggccaagggtgatattcccggtgttcgtttcaaggtcgtcaaggtctctggtgtcggtctgatggctctgtgga

SEQ ID NO: 18604 - DNA, 508 bp, Emericella nidulans
tctcttttacgacataatcttcacgtacattcccaatgttttccagacaatctttcaaagttgccccttagacttgcacacagacgccttctacccctcccgcgcgtcagagataaaccaccgtcttgtgcagattgctaacggcgacgccacttccctaatccactccgttcacgcccggtactcagagacacagccctgcgccatcggcctcgactggtcgttcccgcttgaggatttgctcgaaatagccgaatgtttcaagggggaagcgctggctgccatctgtaagattatggcacaggagtatcaggcgcgcggtggcggtgtgccggatttatttctttggagtgttgaacgaaaagaggtgtgttttgtggaggtgaaaagtgctaatgatcggttaagtgatacacagagattgtggattcatgtgttgctcggatttggggtgaaggttgagctttgtaatgcagttgctagaaaggttaggagggtttgaagcggg

SEQ ID NO: 18605 - DNA, 509 bp, Emericella nidulans
cccccatagcgaacaagcaagcgtaataaactcgctcttccgagacccgtccaaagaaataaagctcccaacgccttcgacccaaaaatcagcctcatcccttccagcgccgccggaaatcgttgcgaacgtgcaggggtcgtccgccggtgcagggtccggagaattccatgtttacaaggcgagtcggcggcgcgagtatgaacggctacggcttatgcaggaggaggttgatcgggagaaagaaggggctgagtggcagcggaagcaggaagaggtgagaaggaaagatcaagagaagacggagaagaatcggcggaggagggagaagaggaacaaggcgaaggcaaagggagccaagaagggtgctggtgctggtgctgctggtgctggggctgatgctgggggtgctgctgagggtgggaaggggtcggatgagatggatgttacggaggagaagggcgtaacgacgaataagaccggtgaagaggaccagacggaagcggctg

SEQ ID NO: 18606 - DNA, 509 bp, Emericella nidulans
ggtgcaagccgcaacaagcagtactgcgcctctgcctgggttggcattgatggcgatacctgcagcaccgcgattctgcaaacgggcatcgacttctgcattcaaggctcctcggttagtttcgatgcctggtatgagtggtacccggactacgcgtacgacttctccggcatcaccattagtgccggtgacagcatccgcgtgaccgtcgacgcgacgacacttaccgctggcaccgcgacagtcgaaaacctgaccactggcaaaactgtcacgcacacctttaccggtggcgtggatggagatctctgcgagtataatgccgagtggatcgtcgaggacttcgaaagcaatggacagctggtcccctttgcggattttggcaccgtgacatttacgagtgctgaggtgaccaatgatgggaagactgttgggccgagtggcgcgacgatcattgatattaagcaggggaatagtgttcttacagatgtttcggtgaccgacgactc

SEQ ID NO: 18607 - DNA, 510 bp, Emericella nidulans
tcgtgaaccagcccaaacccatctcctacccgagaattggggtacagtgcccttgagtttcgggcttatcatgtgtaagtggtttgtttaatcttgcggataattgtggctaaaccttgccagcgccttggggcgggcacggtgtatttcccaacatataccgagatatgaggcacccgcataaatatgggcgaagcctctgggtaacctatatctttactgtaagcaaaattagagcaccttcatcgacattatgctgacgagcatcttatggcagtattccctggattgtgcgatggccgttctgggttggatgatgttcggggacacgattcgggatgaagttacagcaaacgtgttgacgatgaacgaatatccacagttattatctatttgcattataatatctgttgctgtaattcccattaccaaagtacctctcaagtgagtttagcccagtctcaatgcttctgcatatagggctcaagtcgctaacgcagggcgcagctg

SEQ ID NO: 18608 - DNA, 510 bp, Emericella nidulans
tggtctgggttgacaagtctggatgtgatgatgaataggcttttaaagaattgggtggttcccaaacggtacaacgccgatcaacgctatcaaatatatctggcggactccaagatggaatcatgctcactcgtctattcaaaggctcaaccaatataatgatctctgaagactttattcaagaacttcataagcattgcggaagaagtcccgaaccagggtctgccttgataatggacaacgcatgtctccataattcgacgaatcaagcaaatgtgctcacagaatggtgttaggtcagtttacttaccgacttactcatcatatctgaatcccatcgaggagttcttttctgagctagaaccctttcaccgggattggcagtcacaagagactagcccgggacagggatttcatagattcctagggtgatctattgatatagtcgcggcacaagagcaaagtgccaaagggcactttcaacatgcgggattgattatcgaatatctt

SEQ ID NO: 18609 - DNA, 510 bp, Emericella nidulans
atttattcggctcggctgaggacgcgcggcatattaatgaactatttgacttcctgatgccacttggcggtctttgcgccgttccgttcattgggaccatcctcgacaacgctagcactccgtttgtccttttcgtcctggccgcaacggcaactgtaatcggcgcgctaggttgcatcccaaatagttacctagcggcctacgccaatattatcctcttcgtcatctaccgcccattctactatacggcagtgtcggactacgccgccaaagtctttggttttcacacatttggtaaagtatacgggctgattatctgtgtcgcgggcctgggaaacttcgctcaggctggcctggacgccctcacatttacggtattcaatcgcaatccaatcccagtcaacctcatacttactagcttcacggccgtggcggtttcgcgctcatgctattcgttgggcgcaaagcggctgttatgtctgcgtcgaatgaatctgagacgcgggcgga

SEQ ID NO: 18610 - DNA, 511 bp, Emericella nidulans
gccgccatgcgccaactaatttccaaagatctctcggagccttatagcatctacgtataccgctacttcctttaccaatggggcgacctctgcttcctggcaatggacacaaactcaacaaccggcgaggaacaaatgattggcgtcgtggtctcgaagctcgagccgcacagacacggaccgatgcgcggttatatcgctatgttggctgtgcaagaagaatatcgcgggaagggggttgcgaccaaacttgtgaggatggcaattgacgcaatggagaagcgtggtgcggacgaggtgtgtatcgattctgcttgtcttgcttatttctggcttaattgcggtttatcctgttcaaaaattcacggattgattctaatgacgggttcgatagatcgccctcgaaaccgagatcacgaatacggctgcaatgaagctttatgaacggcttggattcctgcgcagtaagcgtctgcatcggtactatctgaacgggaattcggcttatcgg

SEQ ID NO: 18611 - DNA, 511 bp, Emericella nidulans
tgaaggaaacacagcgtgtcaaacctgtcgttgtttgtaggtgtcgttgcttcatttatgaatcatgttgagctaaccctaatgtcaccgcaacacagtcggtatgggtcgctacgttactgaacagataacattacatgacggaactgtgatctcaaagggcgagacaattaacgtcgtcaatacacgaatatgggacccagctgtctatcccaacccgctagaatgggacccctatagatttgtacgtcgtcgcgactcgggcgatcacgcagcacatctcgtttcgcccacaccagatcacatggggttcggactgggaaagcattcatgcccaggccgattctttgcagccacgaaaatcaaaatcatactatgtcatattctgttaaagtatgatgtgaaaatccctgatgaggaaatttctacagtgatttcttcgggaaactttctatttcccgactcaactttgaggatctcagtcaggcgaaggcaagacaacttgactatc

SEQ ID NO: 18612 - DNA, 512 bp, Emericella nidulans
gggtcggcgaaatacaatgatagcaggttgcgcaggacttagcctgtgcatgatgatgatctcagctctgttgtcacaagctaaaacatctaacggacactcttactcatccgctgctgtgactttcttctttctctatatgctagttttcggcatgagcgtgaactgtgtgccctgggtctatgttccagaaatattgcctctggccgcccgcactcgcggtactgcgatcggtatcagttcgaactggttatggaatttcacggtcgtcatgattacaccagtcattatcaaccgcctacactggaaggcatatttgatcttcatggtcacaaatgcgctgttcgttcccgccttttatttcttctatcccgaaacaagcaacttgcgactcgaagatgttgattacatcttttctcgcagtggggatccggtgaaaaatgcgcagcagattctcgctgaattgaagctaaatggacatgttgatgcccttcaaggcagtggcagccaga

SEQ ID NO: 18613 - DNA, 512 bp, Emericella nidulans
tcttcgttgccgagttctttccaaaatttcatcaaatcctatacatttggctcaccaatgaccctaactacgaagaagtcgccgagtggttcacctggtggcgatcccagtttccgacaggaatcaacgatctggagatcgtagacgacgaatggaacaaggcactccgcacaatggacctagcagcccaactaggtgaccgcgctgcagaagaattaccacctccctcatccacacccacatgctcaaaaccaaccaaatccacccatcccgcacctcaatcacctcaaccatcatcaataaattccggacgaactgccccacacaaaccgaaagtcatcgaagaagtcgcattcaaagatgtcctcgaaaattggtgcgcagaggaaggcctcataatgctcccaattcgcgaagcgcatccgcaaaacggccagcctctgttccgaattacagccagcgcaacgggcaaaggcggtgttgtggctttcatccagggcgatgtcgtgtgg

SEQ ID NO: 18614 - DNA, 513 bp, Emericella nidulans
tcaccactgtctcttagctccttggtgtctccatcgttgagttagctcatgcgagcgtcgctccatcttcggtgaaacagacgaacaggcagcacgcaaggccgccgcagcctgcgctcaaggaatggtgcctttagtgtgcattggagaaatcagcgcccctggtccagtggcttcggcagcagttggacttgcagtacgggaatgcgaaccacttgttcgagcgatattgaatgccattccggccgatgcacctatcatattcgcctacgaacctgtctgggccattggaaagcctaagcccgcaagtgtggaccacatctctgctgttgtggatggtcttcgcgctttaatcggccggagatcgggagacgttcgcattctgtatggaggcagtgctggccccggtctgtggggccctgggggtctggggaaagccgtcgacggcatgttcctaggccgattcgcacacgatattgagggcgtgcgtaaagtcgtccgcgaagtcgagga

SEQ ID NO: 18615 - DNA, 513 bp, Emericella nidulans
ggccccgcgcttcctcattaaatgcaccaaagccggagtgccgatatattgcgtcgccgtcgtatccctcatcacctgcatcacattccttgcgtgtgctaactccaccgtcaccgtcttcaactggttcattgacctcaccacctccggcttgattgtcacatacacctgcatgattgttgtcttcctctgctggtaccgggccctccgcgcccaaggaatcgaccgcaagacttacctcccctgggtggcgccgctgatgccatactgggccatccttgcattcctcgtcggcttcgcggtcaccgtctttaatgggtttaccgtattttcgccctggagcacacaggggttcgtcaccagttactttgccattggtttctttgtcgtgatgtttgccttctggaaaacctggcatcggacgagctttgtgaagcccgccgaagcggatatctactctggtaaagccgaggttgatgcggagtgtaggatttgggaagatggaggcgtcga

SEQ ID NO: 18616 - DNA, 515 bp, Emericella nidulans
cgcttaaaaaccggccgctcatagtttgatcacgtacaggtacttgcgattggatttctccttgttatactctcttcggctctctggcacaacttcctgccgctgactgttgttgcgacatacgttattgcgccgctccccaactggatctgctcaagatgcgcgaaccctgatgactttatggacagctctggcaatgccgttgccgactttggccggttcttgaccgggttcctggtactcatgggtgttggtaagttgatctacccaaaatgatgaggcattgtcggtcaggaaattgccatttttcgattctgatatgattttcctatactatgctatttgaacggggctaatttgctcatctttacagcgctcccagccgtccttgcgcacagtggtgcaattcaagtgcccgccatgatcatgtccatcctcggaggtctactgatttatggaacaatcatcagcttttcaatgtttttccgggaacaagaggaattctgagctgctga

SEQ ID NO: 18617 - DNA, 516 bp, Emericella nidulans
ggggaacgccggttcgagttgttaaagaatgttgttgggcgggttggagaaggcacctttgtcgagcctccattttggccagactatgggtgcaatattgtaattgggaaggaatgctttgtgaatttcaagtatgtctcttccctattgtcttcgcctcctagctatatctagtcgagctaactgtaatggctagctttacggccctggacacgagcctaatcgtcattggcgaccgcgtgcagcttggtcctaacgtatccatttacacggcaggccacgacacatccatcctatcccgacgcaagttcgtcgagtttggtcaccccgtgtttattggagatgattgctggattgggggaaatgtgattattctgcctggcgtgaggattggagaagggtgcacaattggggcggggagtgtggttacgaaggatatcccgccgttttcggttgcagtgggtagcccttgtaaggccataaagaccattcaaagtgcggaggaggagttgaacg

SEQ ID NO: 18618 - DNA, 517 bp, Emericella nidulans
ttcccgacccatcgcagcttcatcctctagctggtctgaaccaagatactctcgactatatcacactcgaagactccgcgcttgaccagcttcctggctcacaatctgttttaccgtcgcgcggatggtcggacgacctctgctatggaaccggaaccacctatgtcacagcgctcgcgatcggaggagcatggggtttggctgaaggactgaagcggacaccagtgaccgcgcctcccaagatccgtctcaacggtgtgctgaactcgattacacggcgaggacctttccttggaaactctgcgggtgtggtcgcaatggtatacaacggtctcaactcttttgccggttacgctcgggggaagcatgatgctgccaacagcattgctgccggcgccgtcagcggaatggtcttcaagagcactcgtggccttaagcccatgctgatctctggtggtatcgtggcaactattgcgggaacttggagtgtaagtttagccggataacgactcgctcg

SEQ ID NO: 18619 - DNA, 518 bp, Emericella nidulans
accacccggcatgctccgtatttacaccgatggcagttcactgagaaatggaagggtacaagcgatggccggcgttggggtatactttgggcccggcgactcacggtttgtctccttcaggatgtcaaaagtatacctactaacaataccttcccagcagaaacgtctcagaacccctcaaaggcagtcgtcaaacaaatcaacgcgccgagctcacagcgatcctgcgtgcccttgacattgccccgcgacatcgagatgtgacaattgtcacagacagccagtatgcgattaactgtgttacggtctggtttcaaaaatggcgaagcaataattggttgactgcggacaagaaaccagtggaaaacaaggatctggtagaatccatcctgagcaagatcgacgagcgtacggagctccgggtcaagactctttttgaatgggtcaaaggacatgatgcggatcctgggaatgaagctgctgaccgtcttgcggtaaatggagcccagcgaggagca

SEQ ID NO: 18620 - DNA, 518 bp, Emericella nidulans
tcgcctcactggtccctcccatcctcacctgcttaattggccgtcagcttggtggcaccgccgacctttccgaacaattcgccctccgcgatctcgctgctgccctccttggcctcattgcaaccaaatactctcattcctcacacactctcaaaccccgtctcgcccgctcctgcctgaaaaccctcctcgacccctccaagcccttcggcgctcactacggcgccatcatcggcctccacgccgtcggtggatctgaagccgtccgcgtcctcataatacctaatctacctatttatgggaatctactgaaggatggtcttgctgatgatagtgcacgacgccctgaggcggaaaaggtcctgggcttgctgctgggtattctgacagctctgaaagaggaaaagcctgtgctgacgaatgggcatgggcctgggatggttagtgaggatattaagaggaggctagagggcaaattgggcgcgttcgtggcggagaaggtcgcggagttgggggac

SEQ ID NO: 18621 - DNA, 519 bp, Emericella nidulans
tcggccactcgcaagcaatcaatagcgctaactacatgtttattcaagcagtgcgagcgacacgcagctttcacaatccagaagccatggatatactccttgaagagttggaaaatctctatcttggccaaagctgggacctgcagtggaaatataatctcacttgtccatctatcgacgactacacgaatatgatagacaacaaaacgggtggaatgtttagacttttgctaaggctacttcagaatgaagctggccctggaggaggttatggatgcgaccaggcaccgggactctccctcctcttggaccggctaacaacccaattcggccgtttcttccaaatccgcgacgactacatgaatctccgtaacagttcatacgcgcagcaaaaagggtgctgtgaggacctagacgagggaaaattctcttatccaattgtttactgcgcggcgaaatatccggacttcaaggtactcatcagtggtgttttccggcaacggcccgcttcagctacaa

SEQ ID NO: 18622 - DNA, 519 bp, Emericella nidulans
tctggtcagggcctctccttcctaggcatggtagccggctgcatatgtgcacctctagtcctcttcacagtcgaccggattgtgcagctaaatcctaccctccgaatccgaaataacaacactgagggcggcggatcgcccccagagctcaagctctacacagccatgtttggctctctcatcctccccaccggcctcttcctcttcgcctggacggcgaaaccgcacatccactggatggcccccattgtagcacaaagcctgacattccttggcagtatgcttatatacatcccctgtaacttctacatgcttgacgtgtatgggtctaaatacggggcgtctgcaagtggggcgtcaagcttgacaaggtataccctttccactgcgttcccgctgttcgtaccgcagatgtacgacgcgctgggggtggactgggcgactagtcttctgggatttctagctacggtgatggcgccgattccgtgggttttcttctacaaggggccagggtttcgg

SEQ ID NO: 18623 - DNA, 519 bp, Emericella nidulans
tggattgacggtgttgctggtgagaatggcaccaaatacgatgctacgctcacgcagctccgactagcgtatgccgctgtgcatacgaccagtgacatgatgacgaaagtggtagcggcgctctgcgaacaccaggagctaatacagccccttcgcgaggagatcgtcactgtcgtaaaagagcatgggtggagtgaagccgctttggcgaagatggttctgcttgatagtgtcttgaaggagacgcagaggttggagccgcttgctagctgttcgtcaccctccctcttaccaactttatcagttgtatgcaattgcagtgactgataaaatggtgcacagttaccctctcccgcatcgcccgcgaacccgtcgttctaaacgacggcacccgcatcccaaagggcgcacaagtccgtctaacaacagacaacatgtggaactcatccgtgtatcccgatgccgcaatattcgatggctatcgcttcgtaaagctccgtgagcaggagaggggtgcca

SEQ ID NO: 18624 - DNA, 522 bp, Emericella nidulans
ctgccccagaagtgcccacctggtacatgttgaccgtaatcttcgaacatgtcgcctcaacattcatgaatactgtcatgttcgttgcagtgtccgctttccatgctcgcgtttctgatcccgccatcggtggtacctacatgactatgctagcaacgtatgttctctcagttcctttaacccacctttactgattatcctatagagtctcaaacctcggcggtacattcccgcgctacttcatcctgaaactcgtcgacatgttcactgaggccacctgcgtcccaccaaccaccaacccttcaccaggttctctgaaaggcgacctcgtcacgtctccgttctcatgtgccgtggaaccagatcgtacccgctgcattgacggcggtggcacttgcgatatcacaagagacggctactatatgacgaatattctttgcgtgctggttgggacggtaacatttatcatgttcatcaagcctgctgttttgaagttgcaaagtttgccgttacgggcttgga

SEQ ID NO: 18625 - DNA, 522 bp, Emericella nidulans
ataaggtactcgactctcgataatgtggatgggaaacaagcgcgaagaactggcacttctagcggattaggcgagcttttcgagtcagtagagaaccaagcataaccagaaacatgctaacgtctctcagccatggaatcgactcccttaactgcactcttgccagtctgctagaaactgcggcaatgggtctgggctcctcccagctcggcgcttggactgctcttgtgccatgtcttgccatgtacttttcgacgtgggagacatatcacactcacacgctctatctcggatatttcaacggccccaccgaaggtcttttgataggtatcgccattatgattgcgtccggctggtacggccctcaaatctggtctcggcccgttgtggaatttctcaacttgccgggcctcttcggcaacaactctatgaaagacttctgggtgccgatactcctagcaggcttctttctgggccaccttcctggctgcgtctacaatgtcatttcagcgcgcagaagcc

SEQ ID NO: 18626 - DNA, 523 bp, Emericella nidulans
tgagttacctacgactctttgagaataataggatttattctaatttacagatccaaactcgtccaatggcgacaaactgctgaaccgcagcaaattccacaccggaaactttgcctccaccgtaacccttctgccacgaaccctagtctcctccgagcgcgccatgtccggctctgacaaaatggatattgacaacacagcacccctccaccaagttctcgtcacctcccacaatggctctatcggcttagtgacctgcgtccctgaggaatcctaccgccgcctctcagccctccagtcccaacttacaaacactctcgagcacccgtgtggtcttaatcctcgtgcctaccgcgccgttgagagcgacgccagcgccggtagaggcatgctcgacagcaatctgctcctccagtacctggacatgagcaagcagcgcaaggctgagattgcgggaagagttggcgccacggagtgggagattcgggctgatcttgaggccatcagtggtggaggactcggg

SEQ ID NO: 18627 - DNA, 523 bp, Emericella nidulans
ccatggccgatatcgatgtcaagattgctcaatggaagcttgttgaagttggccgcgtggtgctaatccgccgcggacccttcaccggcaagctggccacgattgtcgagattgtcgaccacaagcgtgtacgtttttgcgatccggaactctgcgacgggaacatttgaacttgaaggaggatctatgatgaatgtgaaattgactagtgcggcgacaataggtcctggtcgacggcccttccactgaggaggcgaagatcgttcctcgtcacgtcctccctctctctcacgccactctcacccacttcgttatccccaagctcccccgtgccgccggaaccggtcccgtgaagaagctctgggcgcagaacgagattgacggcaagtgggctaagagctccattgctcagaaggcggacatcaacaaccgacggaagaacctgaccgacttcgagcgcttcaaggtccttagactcaggaagcaggtacgttgcgatatggcttttaatctatcaaatggc

SEQ ID NO: 18628 - DNA, 524 bp, Emericella nidulans
cgtcagatcccgaagcgctcaagaacgaagggaaaacaattggcaatctcgatgacgtcgatattgtggatggaaaggtctacagtcttcccgctgactgtcctgcctgtgccaaggagtgcaccgtcaacatgcagaaggtggatattccatacttcaaggaagtctttatcttgagcaacgtctgcgagcactgcggataccgctccagcgatgtcaaaactggtggtgaggttccagagaaaggaaagcgcatcacgctcagcgtcgagacgattacggatctccaccgtgatatcctgaagtccgatacctgcgcactccacagtgaggagcttgaagttacggtccagcctggcactttaggcggacgattcacaacggttgaaggtctcctcactgaaattcgcgaccagctcaagggccagatctacgatatcgacgattccacacaaagcggaggtgacagcatgtcagctaccgacaaggagaaatgggctcgcttcttcgaccgtcttgactcc

SEQ ID NO: 18629 - DNA, 524 bp, Emericella nidulans
ggcaagctcgcggatctggtgatctggtcgcctagctactttggcacgaagccgagccaggtattgaagagcggcatgattgttgcctcgatgatggtatggcgcactattataaccctccgggcgcctcattcatgcttacccagactgaccaaccttgcagggtgaccccaatggttcaatccccacaatccaacccgtgatcatgcgtccacaattcggcgtacgtccctaccccattgattttctcctttccatttacttacatatgaaaaaaaaggcctaccttcccagcacatctgtaatgttcgtctcgcaagcttcactcgacacaaacaccgtccaatcctacgggcttaagaagcgcgttgaagccgtcaaaaactgccgcaatatcggcaaggccgatatgaagttcaatgacacgatgccaaagatgaaggttgatccggagagttatcgcgttgaagcggatggaaggctctgtgatgcgcagcctgcggagacgctgccattgacgcagg

SEQ ID NO: 18630 - DNA, 524 bp, Emericella nidulans
tgtcgctggcgttgctgaccgaatgacaaaactgggtcattttcctgtcaccgaggagcaggttctgcgcgtcctggagactgctgttctctcgccattcgataagcaagtcgccatgggcattaatcaaggcccgggctcccattggcacccggtcggcccatccccgctgggcagagatgccagattccggtctctccagtaccagaagagcactcagcgtcaagctacaaacggatacagcaatgccagcacctcgcttgctagtcggttatccgatgcaaagacacggcagcaggcagagaaactagttgttgaggctattgccagtaagctagcagatatcttcatgatccctgtggcgcatgtagacgctgcaaaacatctttccgagtatggtttggattcactgagtgcggtggaactgcgcaatatgttagccctacaggctgcggcagacgtgtccatctttagtattatgcaaagcgagtctctcgctgctcttgcctctgaggttacgcgca

SEQ ID NO: 18631 - DNA, 524 bp, Emericella nidulans
cgtctgcatgccagacatgggtcttggtatggaggtcgcagcaccagacatcatggaccgaccaccgcaatccaagcaggggattttcacctgggagataatcgtcgacattctcgtctacggcttctggaccgcagcgttatgtctctctgcgttctccctacgcatgtggggattcggcgacggcaatcttgcgtctggctgtaaccgcgagtactctgacgcctgcgacctggtcttccgcgcgcgggctaccacgtttgtctgcctcacatggttcgcgctcttcttggcctgggaaatggtcaacctccgcctgtcgttcttccgcatgcagcctgatagcaagaaatacttcacccagtggatgtatgatgtctggcgcaataaatttctcttctggtccatcatggcaggttggatcaccacattcccaattctttatatccctgtcctgaatacagtcgtgttcaagcacacaggtatcagctgggagtggggaattgtatttgttgaagccgcgc

SEQ ID NO: 18632 - DNA, 524 bp, Emericella nidulans
acctatctctatgtcaaagggagtcgactggtgaagaagctgaaacactccaatgagtgcgcagacgtatttataggtatgtatacccttgggattaactgtaacagctaacacgcgcagatgaactagaaactctctcattcggacagggcctcgagttacattggagatttaacacaatattaccatcaacaaaagagtaccttgttatggtggacaacaaaaccggtggtttcttccgtctggtgcttcgacttctcgaggtagagtcggaaagcgagccgaaccccgaattgatgcatcttttcaccttgctgggaagatactaccagatcagagacgattacctaaacttagcttctgaagaggtaacttaccgttcaccataattcgtgacactggctgatagttgagtcctagtacactgccaagaaaggattttgcgaagatctatcggagggaaaattctcattcccgctcatccacctcctgcaaaacattgctaaccccgagcccatacgtgg

SEQ ID NO: 18633 - DNA, 525 bp, Emericella nidulans
cgagatgatctagtaaatctctcaggcacacggtacgccgtgaagattgagtcatggaagcctgcggagggggaccctgcactcaaggaatcatggctatcaagcaccttggaaatcagtatcaatggaacgaagctcctcgcctacgtatccgtggctatcaatcgactcgaagccctcgcagggtgtctcaatcgcacgcagactgtgttctgccatattccagcgattggagcgtccgtggagttcaagcgtgacacctctttatcctttgtcgagagcacgcgtgctgccgctagcggtgagaacaatcaggagcagaggactgtgactgcgccgatgccgtgtaaggtgctgtcaacgctcaagaagaacggggagcaggtcaaatcaggagacattgtaatggtgatcgagagcatgaagatggaggtgacgatcagtgcctctgcagatggtcagtttgagacaaattggaaggagggtgatgctgttgaggagggaaagactctgtgtactgttaag

SEQ ID NO: 18634 - DNA, 525 bp, Emericella nidulans
cgggctggcggatagcaaaagcaagaatataaaggctatactggatatggtatataaggagaaccaggagcggaggaatatccttgtcaaaggccaggataccaacagcgacagcggtaagtttgttcagcagctcaacgacaagccggaaggagagaagcagtacgagattgcatgcgccgaccagaactttctttcgctcaactatcttcatggtcttcccacagaagaggtcatgacggagctcatgaagtaccccgggattggacccaaaaccgcagcttgcgtcttgttgttttgtctgcaaagaccgtgctttgcagtcgacacgcatatcttccgcatatgcaagtggctcaattgggtgcccccggatagagctacggaaatcacggccttcagtcacctggaggtgcgcattccggatcatttgaagtatccgcttcatcagctgcttatccgccatgggaagtcttgcccccggtgtcgagctatcacgggacactcttctgccgggtgggagaa

SEQ ID NO: 18635 - DNA, 525 bp, Emericella nidulans
tcgatagcgcgttgcgagtcaatcaagctggcgaattagctgccacgctaatctataccgcgcagacaccgcaagttgtccgctcccacccgcacctacgaccgttgatgaagcacatgtacgaccaggaagccggccatctcaggacgttcaaccagatgattgctaaacatcgagtgcggccaacagcgatgtatccgatatgggaggctgcggcgacgttcctcggttggtcaacgggtgtcatgggacgggaggcagcaatggcatgtaccgaggctgtggaaacagagattggaacgcattataacgagcagattcgggaaattctggcgtgggaggcggatcgcatagtcgtggagaagagctggacgacgagttgaaggatatgcttgcgacttttcgcaggatccgcgacgaggaactggaacatctagatcatgctgttgagaatgattccaaggaggcacagccgtacgacccgctggtcaatgttatccggcttggttgcagggccgccattaa

SEQ ID NO: 18636 - DNA, 526 bp, Emericella nidulans
ctcccccttgtcggcgacctcgcgccccccgcgcgccgcgcaaccgccctctcaattgtctcctcagggcttgttctgggtcttctcttcgcgcggcttctatccggtatcatcgccgagagctcctcctggcgcaatgtctactggctctcgctgggactgcagtacctgatcttcttcctgctctggctgttcatgccagactacccctccacaaacacggatatctcctacttcaggatactgggctcgatcgcggtcctcttcaccaaacatccagtcctcgtacaggcgacgctgatgggcttcctgacgagtgcaaccttcacctccttctggacgactctgacattcctattatcgggaaagccgtataattacgacacgctcacgatcggcctcttctcgatcgcaggcttgtcacccatgatcttcaacccgatctactcgcgccttgtgatagacaaatacgtcacccagctctccatcaccatcagcctcctcacctccatgaccggcatcgcaa

SEQ ID NO: 18637 - DNA, 526 bp, Emericella nidulans
gcatccgtctcgcgcgttttggcaacaagcaccagcctttctacaatatcgtcgtcgcccaagcacggtgcgtaccgtttactatcaattccggttattgtctgcggaacctacattggatctgctctgggctagaattgcccagcggaaatatgtgaatatcagaattcagctaatcattattcggctatagatcagctcgcaactcgaagccgatcgaagtcatcggaacgctgaaccctatcccgcaacgacctacgaacttgtcagatgaggaggcacgcaacgcaaggccatacaaggaaatctcgcttgatcggtccagggcaaagtactggcttggtgttggcgcacaaccgagtgatactgtttggcggttactgagcttggtacgttgaatttgttgccttgacttcccttctcggaagtttatgtagataagcggatgctaatacgtttgcaggctggcctggtcaaaccgaagtacgagccttcgaagacacagtaatatactcgagtcccatag

SEQ ID NO: 18638 - DNA, 526 bp, Emericella nidulans
cggcaaacagcgtcggaagggtgtctccgggggttgatttgaggttatcagatgaaggagagatcttggtgaaggggcccaatatgttttccaagtacctccatgatacaaacgcaacatcaaaggcacatgacaaggatgggtattttaagacaggtgatatcgcatcctgcatgggggagagctactttattcaggggcgggcttcgcttgacattatcaagagtggcgggtacaaaatctcggctcttgatattgagcgggagatactaggccttgattatgtctctgaggtgatgattgtcggcgtcgaggacgaggagtttgggcaacgggttgcggccgttgttacgctaaaagatgaacacagagcaagcgggttgtctctagagaagctgaggggggatctaaggggggtgctagcgggttataagatgccgactgtcttgagggtagcggggggcgagattcccaaaggagcgacgggaaaggtacagaagaaggtgctggggccaagatatttccc

SEQ ID NO: 18639 - DNA, 526 bp, Emericella nidulans
ctcggcgcggaccagaacacgcacacgttatcgctgtccgaagcccgtctggttattgacaaggttcttgagaacaagcggaggggagggaagaaatatgaggaaccggagtgagtagtccgccggtcctgccgtttctacctgcgatgtagaacttgcaagcaacttgcgataagatagtagcagataactaacggtattaccacgtaggaacctcataaaaacgctggagtacctctcactttttgcccgattcaaagacgaggagaatatcaaggcagttgagcgactgttgaactcgcatacggagttggagatgttcgagaggtcacagctcggtacgccaccacatcggccactctctcctcaatattgagatgctatctcttctgctgatatgggcaggatgtttgctgatgcgttaacaaataggaagtttatgctgcgataacgccgatgaagcgaaatcgcttatccccagtctgcagaataaaatttctgatggggagctgcaggaattgctgga

SEQ ID NO: 18640 - DNA, 526 bp, Emericella nidulans
tggggatcaatgcccaaagtgcacacagggcgtgcttaaatctcaaaccaccgttgagttgggccacacatttcacctgggcacgcggtacagcgaggttctaaaggcccgcatcgtgaacagcgaaaatgacagggtaccaatgcaaatgggctgccacggtattggggtctcgcgaatgatcaccgcagtcgccgactctcttgcggacgctaagggcctcaactggccaaagattatagcgccatgggaagttgtcatcgtcccagcgccaggtaaccaagaggatgccttgggggtctacgatttgctagcttccgataaagcctcgccgatcgatgtgctccttgatgaccgcgacaagacaacgggctggaagctaggagacgcagacctcatcgggtatccggtgatcgttgttgtgggcaatggctggaagacgaatcgtatcctagaggtccaatgccggcgcttagggatccgtcaggatgtgccagatggaggattgctgccctttgtgcagtcg

SEQ ID NO: 18641 - DNA, 527 bp, Emericella nidulans
cgcagagccatcggtgatgctagttcaatcagaagacgatgacaccaacaaatcacgctacatacctgaggttttctatcggaaaatcaacgagtatggagtatcggcccaggtaaacgctaagccagccttcccggtcgagtaccttttggtcaccctgacgcacgggttccctacggaatcgaagccacttttcattgacagcacatatccgattgaaaaccgcgaggtcataggcgaaggacaggaattccactccctcgctcggaaactagtttcacacggtgatccccaaaaggcaattcgggcagtatctgacttccatcttctgtgcttccttcgcacgttctctactttcagcaaggtgagctggctaacctaccgcgagatcgctcgacccgcacgagagcgcatactaactacactccatgcttaggaagaagaagcactcctttgccgtgtagctacgactcagaaccccacagacggactacaactcatcaatactcccggatgggcaacattgg

SEQ ID NO: 18642 - DNA, 527 bp, Emericella nidulans
ggggattcgaggcggaaacggtctaccgcatcaccggcgacggcgccttgactgtcaaggcacacgtcaagcccagcggcgcaaagccagtcgacgttccccgagtcgggttcgacctcgtccttgcagacgagctggacaacgcctcctggttcggcctgggcccgggagaatcttacgccgacaagaagctgtctcagaagataagcatctattctgcaacaacgtcggagctgcagacaccctatgaagtgccgcaagagggcggaaacagaatggagacgcggtggctgcgattgctcaacaaccgcggccgaggtgtttgcgtcacccgtgatgcagatggagacgaggagcaggcattccaatgggtcgcgacgcggtacagcgccgagtctgtcgaacgtgcaaaacacccaaacgagctctccccggagaagagagtccgcgttaggctcgatgtcgagagcgcaggagtcgggactggagcttgcgggccgaggactctggagcagtaccgggtgccc

SEQ ID NO: 18643 - DNA, 528 bp, Emericella nidulans
gcggcaactatcccctcgcaatccttccacttcccgccaaactactcctttccaccattcttctcccttcaaccgaacgccaacacccgcgccgtacaactccagaggtggtcatccctgattcaatcgtggtgtcggcaccaccgcatctacaaaatcaaccttgttgaagcaattgcctcgccgttatttcggaacacgacgctgaagaagcagctggggctgagcgatgcgcggaccgtgctggattggatgggtaaaggggaggaggagggtggtggagggcgacgagcggagtgggttgacgggaccaagaatattgcgtggatatggtggaggcggccggaagaatgggcaggggttattgccgactgggtatggctgcctttttctcgagactgagatttgaaggctgatgagtttgtgctgcagattgagaacacagggcagaagaatgtcgtcttacggtttatgagttgattgaaggggaggctaccatttctcagggtatgtcgtcaagactggtgg

SEQ ID NO: 18644 - DNA, 529 bp, Emericella nidulans
tgccttggacgcaaaagacatttactctgccctcaaaatcgcgcggctcctacctcataactgaccacatcctttcatcgctgccggaaatccgcgagtacaaggtcggcatgttgaacctcttcgttcagcacacctcctgcgcgctctcgctaaatgagaactgggacgaggatgtccgcgaggatatgtctgatgcgctggaccgcattgcgcccgctgacaagaaggggaacctttatcggcacagtgcggagggggaggatgatatgccggtatgcaaccgctatgtttctaacccttgtgcttttctctgaggagaggcatatatttcaaggacgcgcagtgtgctaatgttcgagttggataggcacatatcaagtctgcgctcattggagcgtcggtcaacatacctatttcgaacggcaaattggcgacgggaacgtggcagggcatttggtacttggaattccgggctatgaggcatacgagaaaggttgttgctactattcagggggagaaggagtga

SEQ ID NO: 18645 - DNA, 529 bp, Emericella nidulans
tccccgtcaccctgctctcggggttcctggtacgccagtctacatcctcccagcctatcgcacccaatccgtgagaaacgccgggcagtacaaagactgacaccacaatctaccagggaagcggcaagacaaccctccttgaacatatattgaaatccccctcccacggtctacgcattgcagtgattgttaacgacatgagctcgtaagtcccacgccttcgtttattcactctacccgaccctccaagacagccagctgataagcaacctattcagtctcaacattgatgcagccctgataacgcaccataaagtctcccaaacgaaagaaaagctcattcagctgcagaacgggtgtatatgctgtacattacgcggggacttgctcgccgagctggcacggcttaccaaacagaaagaagttgattacgttgtcatcgagagtacgggtattagcgagccgatgcaggtagctgagacttttacggcggagtttagtgctgctatgctggaagttgaaggggccc

SEQ ID NO: 18646 - DNA, 530 bp, Emericella nidulans
atgaccccaaacaccgaactagataataaagttctgtcgcatcccgcccgtgctcaccagttcgtgcgcaatcctccattgaccatctcccaactgcacccaacgaaccccctctaccagtttcatgcgtggttccgcgacccccggctagagcgctcgtcagcgccggagacgtgcacgctagctaccgcctctctgccaacaggacgcgtgagtgctcgcgttgtgtacctcaaggagcttgatgagagaggctggacggtatacagcaattgggggagtcgggaggggaaaggcggacaggtttttggatcgagcattggccaaaacggcgatagtggtttccctgactctatgccttccggggtggatgagccgcttgtccaagacctggagttaaaggagcatgggaacaagtgggctgctctgacattctgctggtcggtgttggagcgccaggttcgtattgaaggcaaggttgagccgctaagtcgcgaagagagcgagatgtattggcggacacgggagcg

SEQ ID NO: 18647 - DNA, 531 bp, Emericella nidulans
tgcagcgaaccctgcaagaggtaacgcaggagcagcaacagcgggaagttgtgtcggatccctgcgttatctgcctggaacccatcagcgaacccgctgtagcaatatcttgcaaccatgcgaactttgactttctctgcctggtgaactggctggagcagcggcgcaactgtccactctgtacggaacttactgctgttcgtttctactcgttcactactaacatcgctgggtccaggcaagagtgaagtatcctcggtcaagtacgagcttgtgcatcctgacggaccaaaaatctatcagcttcctgatactttcccttcaaccggtgtatcgtcaacaggccatatcaacccacatggtcgactacctcgaaatccccgtcggccgcgacgcgcgcgaagcccttcccttcaaacgcccaacgaccccctccttcgcagacagcatgtctaccgccaccggctctactccctccgtgtgggctctaatcgcctttctcaataccgcgaatttacaccggaaatgttc

SEQ ID NO: 18648 - DNA, 531 bp, Emericella nidulans
cctgggggctctattgctacaatgctcaagcaatacaacaccttccaggagccattgataaagaatttcgtacggcaaatccttgcgggtctgtcctacctccacagcaaggatattatacaccgtgatattaagggggcgaatgttctcgttgacaacaaaggtggcataaaaatctcggattttggtatctccaaacgagttgaagcatctactgttcttggatcccgagcaagcaatggtgggggccatattcaccggccttcgctgcagggtagcgtttactggatggcgcccgaagtcgttcgtcagacggcgcatacaaagaaggctgacatttggagtctgggatgtctcgtcattgagatgttcatcgggtctcaccctttcccagactgtagccagcttcaagccatatttgcgattggtagcaacaaggctcggcctccagccccagaacatgctagtaagcatgccgttgctttcttggatatgacattccagctcgaccatgagaagcgacctgacgca

SEQ ID NO: 18649 - DNA, 532 bp, Emericella nidulans
agtcaacatttttctctgtatcagcatcgacgctcacatcaaaatggcatggcgagagtgaaaagcttgtgcgagctttgttcggcctggcaaagtcattagcaccctccataatcttcgttgacgaaattgactcgctcctttcatcgcgttcgtcagggacggagaatgaggcgtcgcgccgatcaaaaaccgaatttctcattcaatggtctgacctccagcgtgccgcagctgggcgcgagcaaccagtaaagtcgggtgacgccagccgtgttctcgttctagcagccacgaacatgccgtgggatattgacgaagccgcggccgccgctttgtccgccgccagtacatacctcttccggagcatcatgttcgggaacagcaactgcgcagattactgagccatcaagtacatgaccttagtgacgaggatattgaggttctcgttcatgttacagaaggtatgtatcagttttgtcgtctcctataaaacagaaagaaaagactaaccaggcgttgatggacaggc

SEQ ID NO: 18650 - DNA, 532 bp, Emericella nidulans
gccgacgagcactaccccctcagcaaggcgctcgaccaggaccctgaggtcatgaagcacatcggcttcggacgcccgctcacagacgacgagacgaaacaagtccacggtggctacttaactcctgcacctcagtcccagggctgggcacctgggtcgatacgcagaggataaacctgatccgatcggatggtggattctcgcgcctacgcctcttgatccgtctaaaccaactgagaacttcagcaccgagcgctcagaaacgggatacagactgctacgcgagcactggggaaagggctatgccaccgaaggctcaaaagaggtcatccgccatgcattccaggagctgggtctgacggaggtctttggcgagaccatgacggtgaacaagccaagcaggaaagttatggagaagctgggcatgaagcacgtcgatacttggttcaatacctatccgaccccgccgccggggattgaagaaggggaggtccgctatcggattacgcgcggggagtgggaggccatgcaa

SEQ ID NO: 18651 - DNA, 533 bp, Emericella nidulans
tgattgtcgatgttggcggaggtaagggccatgatctgatcgcctttcataaaagatacccgaatgctggacgtctggttttggaggacttgccagcggcattcgatgaccttggacaatatagtatggtgattgaaaaagttccgcacgatttccttgctgaagcccaaccggtcaaaggtactgcttttccattgatttcctcatttatactgtatagattcgttgacataaaacaggtgcaaaggcatacctatgtcaccacatcctgcacgattggcccgacaactactgcgtgcggatcctggagggaatctcctcagcaatgacacccgggtactcgaaactcctcctacacgagggcattgtgccggaaaagggagtgtgccagttccaggcaatgtcggatattgcaacgatggcgtgcaacgggggaatggaacgtacaagggaacaatggcgtacgctacttcatatggcaggcctccagctaatcaggttctggaattcacctgatgaagggggtgatggga

SEQ ID NO: 18652 - DNA, 533 bp, Emericella nidulans
ggagcgacctgcgcagtgtgtatgaggcagagggccaaactgaatcgccgggccaggtcctcaaactcggcctcaaacgtcccatcgttctcctctgcaaatccccgatcgtcctgttcgtgtccacgtacattgcccttctttacggcctgctttatctgttcttcaccacgattcccacgacgtttggcgaccagtatggcttctcaccaggcctctccggcctctcgtacctgggcattggaatccccgagtttatcgggctagcaataatcggcttgacgagcgacaagatcctcctcagactggccacccgcaacgggggcaaattcgagccggaaatgcggctgccggcaatggtcttttggtcgtgctggattcccatcagcttcttctggtacggctgggccgctgagaagaaggcacattggatcgtcccgatcctgggaatggcgccctttgggctcggactgatgggggcctggatgccgattcagatctatatcatcgattgttatcccaggtatgctgct

SEQ ID NO: 18653 - DNA, 535 bp, Emericella nidulans
cggagaaaggtcccattgacgcggactacttcaactggcactacaacatcaacgttcttgccccgcttttacttacccaagccattgcgccgcacctcccaaacaaccgcactggccgcatagtgaacgtggcctccgtctcctcgagtcttgggttcatcgggcaaagcgcgtatggcggcacaaaggccgccctggaagcaatgacaaggacatgggcgcgtgaactcgcagaccgtgccactgttaatgccgtgaaccccggccctgttagcggcgacatgtacttcaacactggcgaggggttctggaagcagatccaggggtttcaggatgggacgccgttgagtaaacttgttgatgatgttgatcgggaccctgtgctcaaggagatagggttgagtgatgagcagaaacgtttggttagagagaagatgggggggcggaggcccgcgtttacggaggaggttgcgggggtggtggggatgctttgtacagctgatggggggtggtgtactgggagcgtggtttgcgc

SEQ ID NO: 18654 - DNA, 536 bp, Emericella nidulans
agcaccgccggaggatccaacgtcagcgagaactggaaagtgctcatatgacactcacacgtcttaacgaacaagctgtctggttagaccagcagctcaagacgtataacgattacatcgagcaggcgatggtgacattgcaaagcaagaagggcaagaagaaattccttatgcccttcacgaaacaatgggaccaccagcgcgagcttcagaaatccggcaaggtgttcaagttcgggtcatacaagtattcagcccgaaacctggcggacaaaggcgtcctagtttactggaagggttatacagagcgacaatgggaccgagtggatctgaccatctcgagtaacgaagttggcgtcttcaccctcgatggaagcagtgggccgatgatggttcctggggccaatgcccaggttcccttggatgacctcctgcaagctcagttcaacaacatgcaattcctcgacttctttgacggacatctgcgagtgaacgtcaatcttttcctgcatctgattatgagaaagttctacaac

SEQ ID NO: 18655 - DNA, 536 bp, Emericella nidulans
gcaacgccatgaccggcttctatgcatacaagaaccgcgccactttcgacgataccccggcggagagagaacggttctatcagtctctgtgggaccagggaggacttgccttctggtttgggaactactcggacctgctgacttcgcgcgaagccaacttggaggcgtacaatttctggcggaagaccgtccaccgtcgagtagcggacaaggctacggcagagaaactggcaccagcaaagccaccccatgcattcgggaccaaacggccgtcgctggagacctcctacttcgagacattcaacctgccgaacgtcgacctggtagacgtcaacgaggaccccatcgtcgagatcacgcccgagggggtccagaccgccaccaaactccatgcccttgacctccttgtctatgccaccggcttcgacgccttgaccggcagcgctctagcgatcgatatcatcggtgtcaacggcatgcggctgggttccaagtgggatacgcggatcgatggtaatggagtgtcgaccgcgctg

SEQ ID NO: 18656 - DNA, 536 bp, Emericella nidulans
ccccgatttccgtccgcttcaaagccacaatggccgagcttatcgagaaggctaaacgcgccgctggaaaggccgctgtcgaaaaccactaccccaaagatgccaaatttgtcggtattggcagtggttctactattgtgtatgttgttgaggccatcaaggagctgggaatcgatacctctggcacgtgttatgtgccaacgggcttccagtccaagcagctgatcgtctcggccggcctgacagcagtggatttcgatgccattcccgaaggaacagtgcttgatattgcgttcgacggtgcagacgaggtggatgatgagcttaaccttataaagggcggtggtgcttgtcttttccaggaaaaaattgttgctctccaagccaaggagttcatttgcgttgccggttcgtaactcatgcggcgcatctataatcgaatgattgactaatcttgtgtgatattacagattcaagaaagttgcagtcccgcctcctgtctaactggaagtacattcccattgaggttgctccga

SEQ ID NO: 18657 - DNA, 537 bp, Emericella nidulans
atgcgggcgatttggtgcatgcggtaaaaaggcacgcggttagtttcgtggtgctcacgccggcgatggttcatccagttgcagacgagttgaagggtagaaatggcgcagctgattctgtcaggacagttcaaatcggtggcgatgcggtgacaagaggcgcacttgagatatgtacgcgattgtttccgaaagcgagagttgtcgtgaatcacgggatgacggagggtggaggggcgtttgtttggcctttcaacaggcccagagatattccgttctatggtgagatgagtcctgttggatccgttgcacgaggcgctgctgtcaggatccgtggcgcaaacgcgacagtggcaagaggagagctgggcgagctccatgtctcctgcccaagtattatcccggggtatctgggtggagtttcagcccagtcgtttcacgacgaggatgggcgaagatggttcaaaacaggtgatgtgggcttgatggacaagcagggcgttgtttttatccttggccggatgaaggatatgatta

SEQ ID NO: 18658 - DNA, 538 bp, Emericella nidulans
ccacttctgctctcgcccggtatatccctctaagggcatccagatggttagactggacgggaaagccttccgattctgccgctcaaagtgtcacgccaacttcaaactgaagagacaaccgcgcaagctgaaatggaccaaggccggccgcgaccccagcggcaaggaaatgattgtcgactcatcgctcgtgctctcccagttcgccaaaaaacgaaacgtccctgtcaagtacgaccgaaatcttgtcgcggcgaccgtccaggctatggagcgggtggaagagatcagcagcgcgccgcgagcgggcatttacgaagcgccggctggcgggcaaacttgcgcgggaacgcaagcgcgaggaggacaggaaggtcgttgcagagggcgagcatcttattcgcaaggaacttcgcgagagagaagaggggaggtcgcttgccgaggaaggtgtcaaggtcgcgaacagagtgcatggggaggagaggctccggcagaagaagaagaccagattgttggtggatgggactacgcagga

SEQ ID NO: 18659 - DNA, 538 bp, Emericella nidulans
cgtcgttgccaagggggacattcagatgcatatccccgacaagatgaggtttgaagaagccgcaacgctcggtgtcggcatcatgactgtcggccaggcactgtatcagagtttaaagcttgccctgccgactgaacccaccaagacgcccgagccgatcctcatctacggcggctcaaccgcaactggagcgctcgcgatccagttcgctaagctgtccggctacacggtgctcacaacttgcagtccgcacaattttgatctcgtgaagagtctcggcgcggacgcagtttttgactacaaggatgccaatgcccccgccaagatccgcgagtacacgaacgacaagctccgtcttgtgcttgacacaatctcgctcgagcccagcgccaaattctgcgacggcgccctctccaccagcggtggcgagtacagcgcgcttctgcccgtcagcgtcgaccgcgccaatgtcaattcaagagccactcttgcctacacggctattggcgaggagttccagtttggcgacaagacgacc

SEQ ID NO: 18660 - DNA, 540 bp, Emericella nidulans
cgccgctgaatcgtcgtggtatgtcaccttgcatggggatatggtacaggactaacgttgtgtagacgtttcgacggaggccctaaatcaactgaccctgttcgcggagtattctgcggcatcgtactgcacacccaatattgggtcagtcggggacaagctgacttgcgcatctggaaactgcccgacagttgaggcagcagacacgacaacgctggctgaattctatcagtgcgttaagccctgcattcggggttccaaacagatccaactagtctgacgagtcacagggagaacgaatacggggatgtagcaggcttccttgccgcagatacaaccaacgagttactcgtcttgtccttccgtgggagccggacgattgacacgtggattgcaaacctcgactttggcctggagtcggtcgaggagatctgtagcggatgcaaagcccacggcgggttctggaaggcatggcaggttgttgcagactcgttgacctcagcaattgagtctgctactgccacatatcccggctacgcc

SEQ ID NO: 18661 - DNA, 540 bp, Emericella nidulans
cgaggccaccaacgaagaacgcaagctcacgaaagaacaacgccatgagaagctcgcccggcaacatgcgcaagacgccgaaaagggtcttatcatgacagtatatcgaatcgacagtcttgccaacggacgacaccgattcaaaatcagcaaaaatgcggaacagaatgcgctcactggcgtgtgcgttatgcatcccaaattcaatctagttattgtggagggtggcgcccattcatccaacaactacaggaaactgatgatgaaccgaatcgactggaccgagaatgcggggccgagtgccgtacgggaaggaaaccgcgaagcccaggcttcatggctcgccgctgaagatgagaagggtgaactgaaggatctcagttcaaacacatgcactctcctctgggagggtcaggtcaaggctcgtgctttccgtaaatggttaggtgctcgggtgtgcgagaccgactctcaggcgaaggatgtacttgcgcgagcaaagttggagagtttctggactttggcgaagagcgcaaagca

SEQ ID NO: 18662 - DNA, 540 bp, Emericella nidulans
actcttcacctctctttcatcagaccctcgtatccaagaccccatccttgttcttgatggtggagaatcgccctctgggctcatagcctcgctcatatcttaaatccacgcgcaatacttaagtccactggtgccctcgggttcctggggaacggatttggatataccctaggcgcgctatcgcagcaccaaggaccaaagttataaatgtgcagggtgacgggtctgccggatttcatcttatggagctagatacgtatgcaaggctgggtgttgaggttattactgttgtgatgaataatcattgctggggaatgagcagtaatggacagcagctggtttatggggacttaaacccgaaaaggccggtcagtaccctgtccgccgttacagagtatgcagacgtctcgaggggcttagggaataggggtttcaaggcacagcgagttgaggaggttcttgatgctgcccacgagcttctggaacgggaaggcccggcgtgtctggagttgattgtggactcaaagcccatccacccgg

SEQ ID NO: 18663 - DNA, 540 bp, Emericella nidulans
gcatcgactcagggaaaagccagagctcttgaaggagttgctacctgattatcctccgctttgtaagcgccttacgcctgggccgggatacctggaagctcttacgtcgccgaaagtgaatgtgatcaccaatccgatcgtatccgtcgatgaggcaggaataactacatcatgtggaacgcaccgtccagttgatgttatagtctgtgctactggctttcagatcggaggaggcttcccagtcatcgggcgagatggagtcaacctccgcgataaatacagacagagagccgagacatatttgggcctggccaccgacgggtttcccaacttcttccaatccctcgggccgaactcgttccagggcgcaggaaacctgctgattatgatggagcagattcattcctatcttgcgcagctgatctcaagaatggcctacgacaatattggccttgtggagcccaagcgggcccaggtggaacgtttcacaaactactgcgacacctactttgaccgaaccgtctacagtgctgactgtgt

SEQ ID NO: 18664 - DNA, 541 bp, Emericella nidulans
cgagaagctgccctccgtaacgaactacgaattgtgcgcaacgtcaatcaggttatagaggggctgctgggcagtctcgacaaggcaaaaggaaatatggaggtaagttcatgtcgtatcctgacaattgaagctcaaattgacggtaaatcagactgtctcacgtacggtcaactccgcctctaccctccttaacacctggacgcgcatcctgtctcaaacggaacataaccaacgggtcatacttaaccccagttggcagggcgcgtcacaagatatggccgacctagaaaacgaggagcttctcagacaacaagctgcggaaaggcgggaaagagaacttcaacaacagagggaagcggcggcacgaaaggctgaggaggatgagagaaagagggcacagtcaacgagcaccagaggcacacggattgtttccaggggacgggtgattcggagcggaatagggaggtcaccgagtgtatctcactcaaagaccagcacaagcggcacaagaactacatctaaaacgtcaggaacgaac

SEQ ID NO: 18665 - DNA, 541 bp, Emericella nidulans
gctcgtttgcggacgctagggttcggatatcgcgcgaagtatatatatcagacggctgttattattgcaaaacagaaagagaacgggtggttaaactcactgcggaaccctgaagcgcctgcttttgggctggaggttgttgctgggcaggaaggggagatgccgccggaggggcggagtgggtatcgcgaggcgcatgagaaattgctagagctacaaggagttggacccaaggttgccgactgcgtggctctgatggggctggggtggggagaatctgtcccagtggacacccatggtgagtctttccattctccctttattaccaaactgactggtgtagtctggcaaattgctcaaagagactacaaattcggcaagggatctcacaagtccctgacaaaggctacgtacgatgccgtggggaatcacttccgcaagctttggggcaaagaggccggctgggctcatagcgtgttatttacggctgatttgaagacattttcggatcgattggttgctacaaccaagcaggcaaagg

SEQ ID NO: 18666 - DNA, 541 bp, Emericella nidulans
gcgcgcctatcgatgcgactggacactttgtccacgggaacaccgaagctcctgcgcaccccagcctgatggccatgttctctctgaaaggcaaaacggcgattgtcaccggcgccgctgctggtattggcctcgcagttgccgatggtctggctgaagctggtgccaatgttgctctgtggtacaacagcaacacaaaagcccatgaacgggcgcaggagattgctgctagatacggcgtgcaaggtgagtatggtttatggatagacggcaggctcccgttaacaacttaaagccaaggcttatcaggtcaacatcacggactccgaggcagtcaaacaggctcttgagcagagtgtgaaggacttgaacggacggttagacgtcttcattgccaatgccggtattccatggactcagggtccggccgtggacggccagttgagccactattctgacgttgtggacaatgacctgaacggtacattctactgcgcaaagtatgctgcctactactggaggaaacagaaggaggaaggcg

SEQ ID NO: 18667 - DNA, 541 bp, Emericella nidulans
tcccccagctcgtcctccctgcgcctgggagacccaccccagcatcaggatcgaagaaccaaacccaaggtaaaaacgcaagcgcaacgactcatctggatcctcctccaaccaaccctccacaccctcatcattaacatcagcagcaacgccgtcaacatccgaaaacgacactcccatttccgaaataactcaagatcgcctcctcaaactctcaaaccttcagttccgaatcgtcacacatgcactcgccttccccgccgctaggaaggtgacatacagcacgtgctcaatccatcttctcgagaacgaggccgtcgtgcaacggatactggaaagtgatattgcgaagcggagaggatggagagttctcaggcgggatgagcagcctgaaggcttgaagaagtggattcatcgcggtgtgaagcgagaggagccgagtgcggatggtgccattgagggtggtgaggtgaatttgtcggatgaggagttagggggttgtttgagatgttggcctggggatgaggaggggacaggcggg

SEQ ID NO: 18668 - DNA, 542 bp, Emericella nidulans
cgcaactgcaatcaacgcatccctctccaggattgaatctcaagcaaagtatatccacgacagccacagcagacgaaacctttcatcctctgaagacgaactcgacgaatctagactgtcccaagtcgcacctgaagagcgtctaacactaactgttaacaaagacgactttgcgcgcatgcgcatccatggccaattcaacctaggcttcattctcgcctcgcgaaccacatcaacatcgcatcgcgcagagtccgacccagcctcgggcctagggttcaaagacgaactctttataatcgaccaacacgcctcagacgagaaaatcaacttcgagcgcctccaatccacaacgaccgttcaaaaccagcgcctcgtccaccccaaacgtctcgacctcacagccgtcgaagaggagatcgtcatcgaaaaccaggtcatccttgagaaaaacggcttcgtcgttgacgtcgacgacagcggtgacaagccgatcgggcaaaggtgtagtcttctttcattgccgctctccaaagaagtgg

SEQ ID NO: 18669 - DNA, 542 bp, Emericella nidulans
ccctccaccatcaaaaacaccaccaaacgtacatcacgaacctgaacgcctcgctcgaggcacaagctagtgccacgcaagcaaacaacgtccccttgctcatctctcttcagcaaaaaataaaatttaacggcggcggtcatattaaccactccctcttctgggagaatctggcaccgtataattcgcccgccacggacattgtcgcgtccgctccggagttgaagcgcgcaattgagggccagttcggctctgtagaggcgttcatcaaggccttcaatactgttctactgggaatccaggggagcggatgggggtggcttgtcaaagactcggcgggcaaactggacattgtgacgacaaaggaccaggatcctgtcacggggcttgtggcgatctttggtgttgatatgtgggagcatgcgtattacttgcagtatttgaataacaaggcggcgtatgtggagggtgtgtggaaggtgctgaactggggggtagcggaggaaagattcaagagtggtgttccaattgaggtcagtgga

SEQ ID NO: 18670 - DNA, 542 bp, Emericella nidulans
tgtcggtcccgtcggatcaagtgcgacgaaactcgtccggtctgtgaacgatgtcgaaagggtaaccgggaatgcgtctatcctagttcaacaacaggtccagcgtcaaagcccgcgcctcgttctgtggccaaggctaaagcttctcggccgcaatcccgcggaagtgattcatcgggtcctgtcagtgtcgatgcggaggaagctcgcaacttcgatctaacgccaattgcggatgaggaagacgaaggaagccccggctcaagtacccagcaatcaccaaagactaccgagaccaccgctccagttgcatcgaagcccccgctggctaaaaagaagagtgcccagtcgttatcccgacgtaaggtggtgaagcaacagaccgtcacggccacagagtccttgcccggtcggagggaggacagcagctcaccttccactgaggcatcgtccaggttcggatcgttgagcacacgttcggacagtattggaattcactttgttgataatgctggagacccgagcacgggccacttacctga

SEQ ID NO: 18671 - DNA, 542 bp, Emericella nidulans
cgcccgcacaactcagagagattcgggaagcttttcaggttctggatagggacaacgatgggtttgtggataaggatgatgtggccgatgtgctttcgaatgttggtatgtggagtttttgttccagagctcgacgcagtgaaacccttttctaatagcagtgatgatggcaggcctagactcatcgtctctatcgcagttcttccctccgggcagtgcttcaacgataaacttccctactttcttaaacactctctcgcaactcctctccccgctgtcttcaagacaagaactactcaatgctctagcagcattcgatgaagacgacagcggtcagattgatgttgaagaactacgtgatgcccttctacacacagccccagaagacggggagcgtcccctgacagagcgcgaagtcaatgaggttcttaatgggtttacaagccgtcgggcctttagagggaagggtggcaagactcagggaaccggaaaaagaggagaagtgctgaattatcaggagttcctgaatacagtgatgggcg

SEQ ID NO: 18672 - DNA, 543 bp, Emericella nidulans
gctgtcgtgatgcgcaccgtcttttacaacctcctctcgcacccatcaaccctccagaagctccgctctgagctactctctgctggccccttgacgcagccctatccctcttggaaagacgtctgcaacttgccttatcttgacgcatgtatcctcgaggcactccgtttgcatccacccttctgtcttccctttgaacgcattgttccacagggtggaatggtgctgggcgatacgtacttccccgagggcacggtcgtgggcatgagtccgtgggtggtaaatcgacacaagcccacattcggagaggattccgatgtctggaatccggagaggtggatggtgagcaaggaactgaagagtaagagggaggcggcagttctgacggtaagtctttcgttcgcctgcttcacttccacaatcggcaatgagatgcaatttgaaatgctaattaagtgacttggcagtttggagctggtcgtcgcgtctgtctagggcggcacattgccatattggagttgaagaagattgttcctgcgctgg

SEQ ID NO: 18673 - DNA, 544 bp, Emericella nidulans
acgcccaacgtgctgagctggtacaagaagagatgagcagtattgctggtagcgaaagtgtccttaacgatcagggggagaaacagcctcgcttcgctgcaatacgcgcagacctggcaaaccgagcggacatcaagaagttagttgccgagacagtgagcatgatgggcaggctggacgttgtcgtttcgaatggcggttggactcgcattaggaaattcgatgatttggaccagaacgtggatgaggaagactgggaccggtgctatgagatcaacgtcaagagccatctatatctcctgcacgaagctcgggtacaccttgatgcagcgcagggatcgttcgtgaccgttgccagtgttgctggagtaaaaccaaatggtagttcaatagtaggttgtggtgtacgcctacctgggcgcagtttatttttccttcttttttcttaaccgtcaactaacataattcccagccgtactctgtaacaaaagcggcccagatccacatggttaagtgtttagcacatgcagttgggcctaacatc

SEQ ID NO: 18674 - DNA, 544 bp, Emericella nidulans
cggatcctcgtccccgtcaagagggtgattgactacgcggtgagttttgctctacatgatttggattggattatgagctccgttctcggctcggcgcaagttcagcacatgtctttccaaacagtcgtttgattgctgaaactcggctatcttcattctaccacccattttcctagtataatgtgctgacttgtaacttaagataaaaccccgcatcaacaaaacacgcacgggcgtcgaaacagccggcgtcaagcattcgctcaaccccttcgacgagctttccattgaagaagccatccgcctgcgcgacgcaaaggccctctgaaagttgacaacatccttgccctctccgctggtggccccaaatgcgttgatactctgcgcaccgccatggctatgggcgccgaccgcgcattccacattgacgtccctgacagcaatgacggcgggctggagctctcaccgtcgcaaagacactcaaggctgttgtggagaaggagaatattaaccttgtcatcctgggaaagcaggcgatcgacgg

SEQ ID NO: 18675 - DNA, 546 bp, Emericella nidulans
cccgccattcatgagcagcaaggccaccgtccgcgagaaccagctgctgtacgaggagtcaatagcgcacgatatcgggctcaagccgggcgaccgcgtgctggatctgggatgcggccgtggccgtcgccgcgcacatgtcgcagtactcgggcgcgcaggtgacggggctcaatatcgaccctaaccaggtcgctcaggcccgctcatttaatacgcggctcgggttcgagtcgaattcgttcattgtccaggatttcaacagcttgccgctcccgttcgccgacgacagctttgatgctttctatcagattcaggcgctcagtctgtgcaaagacctgccggcgctcttccgcgagatctaccgcgtcgtcaagccgggcgcgcgcatctctctcctcgactgggtcagcttgcccgactatgacccatccaatgccgagcacgccgagctcatgcgccgcgtcaagccgttgatcggcgccgtcggcacgccaaccccggagatcttggagaatgcgctaatggaggccgggtttacggtcc

SEQ ID NO: 18676 - DNA, 546 bp, Emericella nidulans
caacgaggacagggcccttggagttttctctctctctaacttgcccacttggcttgaccgcaatgtgtaccaggacaatctcaaggagctggccaatcatcccgatggctcgggacgtgatgccgaggatcttcctggactcaaggatatgaccgtcaaggccatcgacattctggacacccgtcacagcaaagagggctggttcttgatggctgaagccgccagcattgacaagcagatgcacagtctcgattacgaccgctcacttggtgagctccttgagcttgacgacacagtccgcgctaccatcgaaaggctggacaagctcggtattcttgaagacaccctcgtccttgtcactgctgaccacggccatggatttgatgtcactggctccgtcgacaccgtctaccttgagcaacaggaggatgaccgtgataagcgccgggccgtcggtgtctaccagaattccggcctttcgcagtacactattggtggttctaatgctcttcgatactcagaaggcgttcacttccccgcccgctg

SEQ ID NO: 18677 - DNA, 546 bp, Emericella nidulans
caatcattgtcactggtgcctctcgaggtacgtttacctacatgctttcaagcttactccaattgcttgagctaacgattcaggcatcggcctcgccatcacaaaatacctcctctccgccccccaatcgcacaacgtcgtcgtgatcgcgcggagcgtcgagcccctccaggccctgaagaacgaatacaaggaccaagtcgccatcttaaacggcgatatttccgacttctcgctcgcgacgagagcagtcgagctcgcactgaagagcttcggacgcatcgacggtctggtcctgaaccatggtatcttgggacaggtgggcaaaattgcgaccgctaatattgaggagtggaagaagggctatgatgtgaatttcttcagccttgtctcgttcgtgcaagcggcactgccaaagttgcgggagagcaagggaaagattgtgtttacaagttccggagccgcggtctctgcgtaccgcggatggggactctacgggtccacgaaggccgcaatgaatcatttggctttgagcttgggtgagga

SEQ ID NO: 18678 - DNA, 547 bp, Emericella nidulans
tggagaggtaacactgccaacgtcatccgttacttccctactcaggccctgaacttcgccttccgtgacacctacaagtccatgttcgcctacaagaaggaccgtgatggatacgccaagtggatggctggtaaccttgcctccggtggtgtatgtattagcttattttacctttgatgcagccgctaacttctcttagatggctggtgccacttcccttctcttcgtctactctctcgactacgcccgtacccgtcttgccaacgacgccaagtccaccaagggcggtggtgagcgccagttcaacggtctcattgatgtctacaagaagaccctcgcctccgatggtatcgtcggtctctaccgtggtttcggtccctccgttcttggtatcgttgtctaccgtggtctgtacttcggaatgtacgactctctcaagcctgttgtccttactggtgctcttgagggctctttcctcgtctctttcttgctcggctggggtgttaccactggtgctggtattgcttcttaccctctcgacaccgtc

SEQ ID NO: 18679 - DNA, 549 bp, Emericella nidulans
tcggactaatcaatttccaaagctcaacatcgtccgaaagatgcttcctcagtacgggatactgtccccgaccgagaagtcagcggccccgtgcttgggccgatgcacgatatggggccggcacagacaagtgacggacagccattatcgaaccgtacactaatccatgacttgacgctgccgccagtaccgaacctcgatataccagcatctccgcctggatctccgaactccgcggcgaatgcaaaattccagcattttctgtcgttgaagaaacaaggcattcatttcaatgacaagttagccaactctgtttctctcaagaaccccagtttattgagccagatgatgcagcacgctgggatagatgatcgcgcgcagtactcaagctccctgccgaccgagatgtggaacacttcagacttgccgagctggggctacaaggaagagcttctgaaagcgcagagggaacttaatgctaaagtcgatgagactagggcaaaagggcaaagggacacaatcgaatttgtatcagacacaggccgatcc

SEQ ID NO: 18680 - DNA, 549 bp, Emericella nidulans
tactccagtcctcgagcctcaagtaagtaccgttaaaggcgtctttcctggagtagggcagggagaagtctggtacgattggacacacaaactgcagttgacgcccagccgggagtcaacacgacgatcgacgcgcccctcggccatataccggtctatgtccggggcggaagtatcctgccaatgcaagagcctgctttgacgacccgcgacgcccggaagacgccgtgggcactgttagtcgcactcggtaaagacggaacagcttcaggccatctatacctcgatgatggggagagtatccatccaaaggtgtcgcttaacgtcaaatttagggccacacagaccgccctaaccgtatcatccgaaggcgagtggaaagaagccaacccattggcgaatgtaaccattttaggtgtccttgaaaacccggtctcggtcacatctaacggacagcaagtgcctgcagaatatgacgcgcagtcgcggatcctggttattaccgggctgaaccaatttacaaacaatggtgcttgggggcaagattgg

SEQ ID NO: 18681 - DNA, 551 bp, Emericella nidulans
tgctcactcatgggtctggtgcagaactatgctggcttgcttgttgcccgtgcagcgcttggtattgctgaaggtggtctctttcccggtgtcacattttagtatgtctctccattgtaaaccgatgaattggggtttacacctaacatcggtcaaacagcatcacaatgtggtataaacggcacgaatgcggcctccgcatggctatcttcttttcagccgccacagcagccggtgcattcggcggccttcttgcacgcggcattggcgagatggacggaattggtgggaagggaggatgggcctggattttcatcattgagggtatcctcacttttgtcattggtatgtccgctacgtctacacctccaaccaacctaacagacccgtagcaatcgcatctttctacgtaatgaacgactatccttccacagcgaaattcctcacctctgccgagaaggccgaagttcagcgccgcctggaagaagaccgctcttccctcgcggatgaatataacatgaagttcttctgggacgccatcaaggactgga

SEQ ID NO: 18682 - DNA, 551 bp, Emericella nidulans
cgaaacccctccgcgtcctctcttcactgaacaccgacctgactcaccaacagcagacaaggctgtcgatgaagtaaccgacctcttcaagggccttgcaaagaagaagaagaccaagaagcccaaggacaccgacgccggcgacgatgaatcctcccccgcccccgccgcggacggcgagtttgaccccacagcgctgaagaaaaagaagaagaagaccaagaaggtcgacgccggcgacttcgaagctaagctcgccgaggccggtattacggagaaggaggcagaagagaagaaagaggatgaggtgcctgagggcgatctcgaagccggcacaggcatttgggcccacgacgccacccaggccatcccctactcgctgctcgtctcacgattcttctctctcatccagagccaccaccccgatcttttgtcgagtggaaccaagtcgtacaagattcctcctccgcaatgtcttcgtgaaggtaacaggcgtacgattttcgccaacattgccgatatctgcaagcgcatgaagcgatccgacgacc

SEQ ID NO: 18683 - DNA, 551 bp, Emericella nidulans
tgacgacgggcgtcttctctttccctttcttctcccggaacaaacatcctcaagctcgctcgccacggctacggcttcgcgactgaagttcagtccgaagcaacgggacgcatcatttctggacccagacgagattctagtaacgcggcttccggctacgtgcctgatgatgcagacgctgcactccgcggtgggctgaaggaccttttccccagtttgggtgatcggccttggttgaatcgccggctgtgctggtacaccgatacgccaaatggggactttatcattgatcggcatccgacgctgaatgggctttttgtcgctacaggcggttcaggacagtacgtctattccgcaacgactgctaaccagatgaggtgctaaaatctaacagtgcattcaaatttctccccgtgctgggaaaatacgtcattgattgcttcgagaactgcgcatccagcgaacttcgccagaaatggcgcctgaaggcaccggagaaggaatctgcccagggcccagtggttatgtctggagatgggagccggggagga

SEQ ID NO: 18684 - DNA, 551 bp, Emericella nidulans
gtgggcgcctttgctgacaaagtcgtcgcgtcactcgataatacctccgccgagtgggcgctcagcgcaaacagcgccatcggcgatataaacacagaactcaacgataaggtctttggctgggtgaactccaccacaacaggcgtgaacgatacgctcaacaccttcgtggataaaacgactggcgtcctaaatgatacattcggcggaaccctcctctacgaccccctaaaggacgtgttcgactgtctcatcggtctcaagattgcgggtattcagcgcggtctaacatgggtacacgacaacgcacatatcgatttcccagaactcagcaacgacacgttttcgcgcggcgcacgagaaagcctgtcagacgacaatagctcagagagcttcctctctgacgcgggcgcctcaacctcaaacaagatcacagaagtcgtctttcgcgtcaccagcgcaattgagtccggcatagccacggaggccctcatctctggcgctatcctgctcatctggttcctaaacctgcttttcggcctcattcgtgc

SEQ ID NO: 18685 - DNA, 551 bp, Emericella nidulans
accatagcaaatctaacacctgcaggaacaaacacttatctgatcggacaagggcctcgtcgtatccttattgacaccggcgaaggcaagcaatcctgggccgcgcatctaaaaaaagtgctgtcggatgaaaatgcgacagtccaccaggctcttataacgcactggcaccacgaccatgttggtggtattccagacttactcagactgtgccctgaagtaacaatctacaagcatcagcccggagaagggcaggtagatattcaggatgggcaagtctttcaggttgaaggagcaacgctaagagccgcccatacgccaggccatacagttgatcatatggtgtttgtatttgaggaagagaatgccattttcacgggtgatagtgagtggtcatactccttggtgatgattcttacatccaaggcgctgattcggtaatatatagatgttctaggccatggaacagcagtgtttgaggacctaaagacctacctcgatagcctgaagcgaatgcaaaatcgggtctcaggtcgaggataccccggtca

SEQ ID NO: 18686 - DNA, 552 bp, Emericella nidulans
ggccacgaagccagcgacataacctggaaactaaccggcaactttggcggcgaggactacgtcgataaagtacgcggtccgctgaacgagggcgggctgtacgccgagcgccacggataccaccagccctacccgccgacaaaatccaaggattggaaatcatccactcccctcaccggcctctcgaagcccggaataagcttttacacagcgtcattcgacctagatatcaagtctggttgggacgttcccatatatttcgagttcggaaacagcacaacccctgccccagcgtacagagtgcagttatatgtgaacgggtggcagtacggcaagtacgtgaataatatcggaccgcagacgagattccccgttcctgaagggatattgaattataaaggaacgaactgggttgctgtgacgctttgggcgttggagggtagcggtgcgaaattggatagctttaagttggtgcatggaataccggttcggacagctttggatgttgagggtgttgagctcccacgttatcagtctaggaagggtgtctat

SEQ ID NO: 18687 - DNA, 552 bp, Emericella nidulans
tgcgcaatgttgtcaaaggggatactgacgatggtacagggctatcaggaggacttgattgtgggagtggcccttggagcggacatgttcgactgtgtatggccgacaagaactgccgtaagtatctttctccagcactgaaaacgatgctaaccccaaaagcgctttggaactgcactggtttccacgggaaatctcaaccttagacacgcttcatttgcgcatgatttcaggcctgtagaagaggggtgcgactgcatgacatgtaagccaagggaagaaggaggttccggcattacgagagcctatctccaccacctggctgctaaagagacagccggggcgcatctgtaagtagcctctgatcgtttcgaggcatcaactaacttggcaagccttacaattcacaacgtacactatctcctaaaattgatgggaagagcgcgacaggcaattttggatgatcagtttccagctttcgttcgaagtttctttatgaagctatatggagacaagttcaaggttcctctatgggtggtgaacgccttgcga

SEQ ID NO: 18688 - DNA, 552 bp, Emericella nidulans
ccgcccacgctatccccaattcaccggcaccggcacaagaactcgagcagcagcgagttcgcttcttggtccccgacaacgtgacagtcaaacaggggagctccaaatgcggcgaccaagcgcagctatcatgctgaaatgaagtggaatacgcaggtgatactaccaaggtgactagcgggccgctgagtggccttttgggcagtggatctggtgcagaagggctgggtctgttttcgcagtgctcgaagctggatatggctcgtgagtgcacactcgccatacctatcattgctgcttttaagaggtgattgtgattgtgatgttctaacattagctatcttgatgcgttttagtgcttctcgcggaacatatcctgaatcaacagtgcaagcagaatatcgtttgctgtgtagggataagcattcggcggtatgtcctgcccctacttcattgccatatccgctgcaagtaagtatgtaagaaatgaagcggactgactctgaaacaggataatgatctcatcggtgtctcactgccctgcattgcgct

SEQ ID NO: 18689 - DNA, 553 bp, Emericella nidulans
atctcggccgggatcggctcgctgtacgtcgcgtcacgcacaatcctattcatggcgcggaatggcaaagcacccaagatcctgggccgcacaaacgcagccggcgtgccctgggttgcgatcatcttctcaaatatcttcacctgcatcgtctttctgacgctcggcgaaagcgcggggaaggtttataatgcgctgatcacgctatcgggagtagccaccttcctcgtctggacgtccatctgcatagcgcatattcgctttcgggctgccctaacagcgcagggtcaatcgccgtcaacgctccccttccgggcggcgctgtatccctacgggacttattttgctctggttctcaatatctttatgatttttttccaggggtacacggcgttcctgaacccgttcagttcggacgactttgtgataaactatatcctcttgccggtgtttgtgctgtttgttgttggttggaaagtttggcataaaacgaagattgtcagactcgaagatatggatatctggacgggcaggagggagagggcgcctgagg

SEQ ID NO: 18690 - DNA, 553 bp, Emericella nidulans
gcagcgcgggaggtgaaagatgaatacgagatccggatgattcgcaaagccaacgagatctctgcccttgcacaccgaaacatcctacaaaacatacaccgcatgtcaaacgaaagtgaaattgagggactcttcctagacacatgcgtgtcgcacggtgcgaagaaccagtcatatgaaatcattgctggatctgggcccaacgcagcggtgctacactatgtgaagaacgacgagcctcttaacgggagacaacttgtctgtctggatgcgggcgcggaatggaactgctacgcgagtgacgtcactcgcacaattcccctagggaaagactggcccagctcgcacgcgaaagacatctacgccatcgtcgaagaaatgcaggaggaatgcatcagacgtgtaaagcctgggctaagatttcgagacctgcacgagcttgctcatatcatcgccatcaaaggactgcaagaactcggagtcctcaaggctggaactgtagaagaaatccgtcgatccggagcatcctccatcttctttccccatggcctcg

SEQ ID NO: 18691 - DNA, 553 bp, Emericella nidulans
cgagacaaacgaagagaaaggagcagatccagggatcgccgcgatcgtgacagggaccgaggccgtgacaggagggaacgtgataaggatgggcgggatgcaagagtccgtgacagaagtggcagccgcgacaggtacacagaccgacgaggtacgtactccaggaatttagctacaaaaacgggtttctaactgatagggaaggttattcgttcaagggtgacaggtatcgcgatcgttcccggtcaccgacccgaaacggcactcgagacagagcatcgccaggccggggctcgcgaggtgatcgcagaaacgaacgtagggaccagcgagaccgacacaacattgcgccagattcaaaatatcgagcggattggacaaaagatgaaatggacatggatcttgatgaagcagaagaggatgacatcgacgagctcatgcgacggtgcctgggattctcgaaattcaggagcaccaagaatacaaaggtacctggaaacaatgcctatggtgtgcgaaaggagaagaagacggagtatcgacagtacatgaa

SEQ ID NO: 18692 - DNA, 554 bp, Emericella nidulans
tctgtagcttcacttagcaacatgtgatggcctcactccacacatttccctaatgtcctacacatatctgccctcaacacccttcgatccgtaccccacgattatcatgaccaccaattcctcgtctcggaagaccactcatctacagacgaacccacgagtctcgctactagtacacgattgggtgtcacatcgtccgcctacccgtgcttcaaaccccgggaatactcgcgatggatcacctccacccgcagcaacccggtcctctctggctagtctgctactgaacctcaacacgagtgcgctgtccagcatttccactactattacgggggaagctcgctttttgcagccgaattccgaggaggaaacatggtgtaaagagagacacttggaaaataacacattcgaggaagaaatgagcacttttggccaggcacagcaacctggtcagcgccggcccagtctttcaattgacgatgatgtccgagtcatcaccatccgggtgcgcgagggccgactggctgattggaaaggaggcgtgcgagattggc

SEQ ID NO: 18693 - DNA, 555 bp, Emericella nidulans
ccatcgcaaccggcaaatccaccgtctcctctcttctctcctccccgccttactcgctccccataatcgatgccgaccaactcgcccgcaaagtcgtggaaccaggaacccccggctataacgcgattgtaaactactttggtcccagcacaccggacctccttctccccgccgaacattcagacgggcaaaacacacaagatgcgtcagtgccaccgaaaccacgccctctgaacagacccgcccttggccggcgcgtctttgggacgtccgaagaacgaaagcgagaccgcatgatcctcaacaagatcgtccatcctgctgtccgatgggaggtctacaaaagcctcctatactactatcttcacggctactgggctgtcgtgctcgacgtgcctcttcttttcgagtccggcatggacctgatttgcggcaccgttgttgtcgtaggcgtcagtgacccgaacgtacaaatggctcgtctccgcgcgcgcgacgcacacctttcagccgaggacgcggagaaccgcgtgaagagccagggcgacgtgaagg

SEQ ID NO: 18694 - DNA, 555 bp, Emericella nidulans
ggactgcccggccgactgttacacaaaagtatctataaaagcgatagacaccaacagggacccagattccaaataggctgtctatatataaagatttacacaatgccagccatcactgttaagccactaacaccgccagccgggtctgcaatcgacttcggtgccgtcattacagatgttgacctggagcatttgactggtacctgtgtccctcgagcaccctgtgatttattgtgtacaggtactaaatgcaatgacagacggagacttctcctcgatacgctcagccctgtacacacaccttgtagtcgtgctcaaaaatcaacaccaactcacccctaaagcgcaatatgaactcacccgccgattcgacccatccgctacacagtacggccacggcaagacccttgacgcaaagcgtagcatccttcacccagacttaaagactatcccgcaccagccacaagtgcaagtcatcgggcacggattcattgactcgtacgaggggttggagaatatcactctgaaacacccgcaccaccgcacattccaccg

SEQ ID NO: 18695 - DNA, 556 bp, Emericella nidulans
gtaacactggtatggaacccggtaagacctctttcttccaggctctcggtgttcccaccaagatcgctcgtggtaccattgaaattaccaccgatctcaagctcgttgaggagggcaacaaggttggtccttccgaggccaccctgctcaacatgctcaacatctcccccttcacctacggtatgaccatccagcaggtctaccaggaaggccagaccttcagcgctgccgttctcgacattgaggaggagcagctcctcaaggtcttcagcagtgccatcaacaccatcaccagcatctcccttgctgtcaactaccccacccttccctccgttatccactccgttgtcaacagctacaagaaggtcttggctgttgctgttgagactgagtacagctggcccgagattgaggagctcaaggaccgtattgccaaccctgaggcctacgcttctgctgctcccgccgccgctgctggtggtgctgctcctgctgctgccgctgaggctgctcctgctgaggaggctgaggagtccgatgaggacatgggcttcgg

SEQ ID NO: 18696 - DNA, 556 bp, Emericella nidulans
ccctctcccgccgtctccttcactgacttccctcctacggcctcccttctccaccaatacttcgcgaccgaccactcccgatagctctgacgtggagacgcccaatgacactgaagcagccgtcgcaaagtctgcgaggagagcgacgactgtgcccagggcgagcccaaaggttccgacttacgagtattatggcttcgtcctctacctcgcatcttcactggcattctgtgagtggagtataattctcaactgggatgtcttttgagtactgacttctgacgcagtaatctacattctgtggtcttacctcccttcgcccttcctacatcagcttggaatatattactatccaaatcgatggtggtcgttggcttttccttcctggctagtcatgtcgatcatctatatctacgttgccttagcatcgtacaatactggatatttgactctacccatgaatagcgtggagaatattgtcgatgaagtggcaaacgtggcggtcatagacgggaaggggagacgccggcctggtggtgctgcgaaaatgcgccct

SEQ ID NO: 18697 - DNA, 557 bp, Emericella nidulans
ccaacccgaaattgcccattgagttgcattattctctaacatctgctctcgtcgcacagcctacgccgtgtattttgaccacaagagacagaccgaccccgaattccgaaaagcattgaagcgcaacaaccgacgactggcacgcgctgtcaaggaggaggccgaagctcaaggagcccagcaacgcgagaacatcaagaaggctctgcagcaggcgaaggaagagggattccccacggatctcgaggagaaggaggcgtacttcatgggtcaagtcgccaagggcgagggcctctgctctgacggtatgtctatcagacctctgataataagttgtatcaacaattaacttgaaatgatctaggcgcaaacaaaattgatgccgcgttggccttctacaaggcactcaaggtctatcctcagcccaaggatttgatctccatatatgacaagaccgtccccaaggaggtgctcgagattctggccgaaatggtcgccatggatccggccctgaagctcggcactttcaccggcgaaagtggcggtgctgaccacca

SEQ ID NO: 18698 - DNA, 558 bp, Emericella nidulans
gaacgccgcccgattcttgacagctgattctcactactgacgaagatgacgggcctcgacccgacgaccgaccacatcctccaaatctgctgctttatcaccgatgccgacctaaacctcctcgacgcaaccggcttcgaggccgtgatacatgtcccgcagagcgcgctcgactcgatgtcgcagtggtgcatcgacacccacggccgtactggactaacgcagcgcgtccagaactcgaccgtgacgcccgaggccgcggccgccgacctgctcgcctacatcaagcggtacataccaaaaccacggactgcattgctggcgggcaacagcgtgcacgcggataaagcgtttctggcctgtggaccgtatgcggcaattctggagtggctgcactatcggatagtggatgtgagtacaattaaggaggttgtcaggcggtggggaggggaggggctgttgagcgcggtacccccaaagaaggaggtgcatgaggccagggaggacattctggagagcattgaggagatgaaattctataaagagcagctgtttggt

SEQ ID NO: 18699 - DNA, 558 bp, Emericella nidulans
caacgcaccgctcagcctcaatccttcagcgcgcgcttcgtcgaagactccttcccctcccaacccttctccgcaccaaacgctcaaagcgatgcaaatcatgcaagcacatcctcgtcaagccggagttcaaaccacagtctgtccgctaccgcatcaaactcattgcaatcagttacatccccctccctacgctccggccgctcgttcttcccccctcagcctcccaacctctcccaccaccaccaccagacctcaactcccttcagccacaaaaaccaattcagctcctcctcacgcttaagaatcacatgttcgaccccgtccggatcacactggcaactccctccgtgacacccggccgcgttgcatcaaaggtcacaatcctgtgtccgcagttcgatatcggcgctaataaagacgcctggagcgaagcgcttgaacccgtcgcaccgccctatgaaagggtagctgaggctggaaaagtgtgggagaagggccgcaactggacgacggttgtgctagaggttgtgcctggttcgttgcctggtctgggcg

SEQ ID NO: 18700 - DNA, 559 bp, Emericella nidulans
tccagaacataatgacgacccgatctcatcgtcagaaaacccgctcctgcaaaaccagcctccgccacgcatgcgagaacgccgacctgaggacttccaaatcctctgccacgtgaagtacgccggagacattcgcctatcgctaacagctgagatccttctcgactacccgatgcctagcttcgttggccttccgctaaaactgaatgttaccggcatcaccttcgacggcgtcgcggtcatagcatatatccgcaaacgcgttcacttctgttttctttcccccgaagacgctgaagcgctggttggctccggctcatattccggccagcaggagaccccgggtccatctactggtagcagtggaggcggcaatccaagcccgcatcagaaaggcctcagtcttctacaagaaatccgagtcgagagcgaaattggccgcaaagaggatggaaaacaagtcctcaaaaacgtgggcaaagtcgagcgattcgttctggctcaggtccgtcggatattcgacgaggaacttgtttttccaagtttttatacatttctt

SEQ ID NO: 18701 - DNA, 560 bp, Emericella nidulans
agaagctttcagtcaaaggtcatactgaccgagtgggtggtttgtcttggttccccggacgtacgctacctgagtcgaacgtatctgagtcagctgtcaatttcgtgtccggaggcggggagggtaatgtgtgcttatggtctcttgataaggatcaaccacttgctacacttgaagccattccggccgggtgtgccgaacagagttccacccgtcggggaaatacatcgcatcagcatcttatgatacaacgtggcgactatgggatgttgagacaacggcggagctacagctacaggaaggccattcacgggaagtctatactgtcgcattcaacaatgacggttctctcctggcgagcggtggtctggacagtattggacgcgtctgggacctccgaacgggccgcactgtcatgatcttggagggacatatcagggagattttcggcctagactggggagtagatgggtaccgagtgctttccgggtccggtgacggctgggtcaagtgctgggacctgcgtcaggtgaagaatacaggcggaattggagcacaca

SEQ ID NO: 18702 - DNA, 560 bp, Emericella nidulans
ccaaatggacggagtaggcaacgactccaagggcgtccttatcttaggcgctacaaatattccttggcagctagatgcggccatccgccgaagattccaacgacgagtgcacatcagtcttccagatattaacgcacgcatgaagatgttcatgctagctgttggctcaactccctgccatatgacacaggccgactaccggtcactggcagagcagagcgaaggctactccggcagcgatatcagcatcgccgtccaagatgcacttatgcaacccattcgtaaaattcaaacagcaacacactacaaaaaggtaaccgctcttggctccaaccctatcagctcagaactaattcaggtcccaggtactgcatgaaggtcaagaaaagctaacaccatgctcccctggtgacaatggcgccatggagatgaggtgggagaacatcgaggccgaccaattactagagccttctctcgtgctcaaggatttcatcaaggccatccgcaattcacgaccgacagttagccaagaagacttgaagaggaacgcggaatggaca

SEQ ID NO: 18703 - DNA, 560 bp, Emericella nidulans
tgggttgattggatgggttgtggacgaggccacgtatctgagtttctatcagggactgaaggtgcaggggtaaaatagaggtggtatgtctgaatcattatcagttgttgttcagcgtattctatgaaaaaggaaggtgttttgctgataccaggctatggtaagggcttccatacagaaactttatgcaaccatatgcggcgtgggcgacgctatttatggttgtcatggtgcttttgttctccggcatgctctgtccatctcatgtgtatctggtacctctatattgacatctgatcttgcacaggcttcgacgtcttcacgaaaggcaacttcacagcgtctggctttctaacctcgtatctcaacatcggcatatttgcaagtatgccaggctctgtccttccctaatcgggatatcaggctgatttcgactaacaaaatcctcccactagtactatagatcttcaaagtcacccttgagtccaagctggttccgctgagtgatatcgactttcaatccgaactcgatgccatcgagcaggagaagacgagcgggg

SEQ ID NO: 18704 - DNA, 561 bp, Emericella nidulans
cccattattgggagcacccttgcggcatttggggcagacgttattcgcgtgaactgtagtcggttggtggatttgaatgtatgtttcttttttctttatcctcccatcgttcttcgttctcatctatagcatcaagcaggcttgctaatgataataaattacaggtccttcagttaaccctcaacgccgggaaacgaacgatagacctcgatctcaccctcgagtctgacaggactcgactacgtgaactcctcgccgacgcagatgtcttcgtccaagggttccgccccaacgccatcgcgcgcaagggattcggcgtgaacgacctcctcgagatcgctggccatcgtggcaaagggatcgtctacgtcgaagagaactgctacggtcctgacggcccgtatcacgaaaggcccgggtggcaacagatcggtgatgcagcttcaggatcgtcgtatgttatgggccggagtcttggatacaaagatggcacgagcgttcttccgcccttgcctatctcagacatgaatactggtcttattggggcgctgggaacgctca

SEQ ID NO: 18705 - DNA, 561 bp, Emericella nidulans
tccccaaggaagaccgcaagaagatccatgagtacctcttccgcggtatgtgaacgaacctcgacagcgcgacgagacaagacaatcaaatgggattggcttggttgcgaaattccttacggagtactgattactgactcggtctcttttagagggtgtgctcgtggccaagaaggacttcaaccttcccaagcatggcgacattgacaccaagaacctctacgtgatcaaggccatgcagtccctcaactcccgcggctacgtcaagacccagttctcctggcagtactactactacaccctcacccccgaggtacgcttaattccagtcgcctgatggaaaggcaacaacgccggtttactaacagtgtcttcagggtcttgactacctccgtgagtggcttcacctccccgctgaggttgtccctgccacccacatcaagcagcagcgttctcacgctccccctcgtggaatgatgggtggtgaagagcgcgagcgccgtccccgtcctcctcgtgagggtggctaccgtcgccgtgaggaaggcaaggagggtgccc

SEQ ID NO: 18706 - DNA, 562 bp, Emericella nidulans
cctcccattcacgccagactcctcatctgacggcagaagaaggatactaggcgaccttcggcgctcctccttcaacgttccgcgcctgcaaacaacaccgttgatcttgattgcagcggggacaggccttgcccccttccgcgccttcatagcagaacgccgccaagtcctcaaaatcggccgcgaggtcggcgatgtgctcctcttcttcggctgccggtctccggaggaagacttcatttacaaagacgagctgagcgaaatggagggtgcgtttggcgggaagttgcggatcgtcacagcattttcgagatacggacagcgtagcgagagggcatatgtgcaggaccgagtcttggaatataaaaatgaggtgagggagatcctggttgcccgaagagggaatctgtatatttgtggacgcgcgggtatggcgagggaggttgagaggcgcgttaccgggttcctgacggaaatggaagacggatggagtgatagagatgccgaagagtgggttaggagtgtaaagaggaggaataagtggcaggaggatgtttggggg

SEQ ID NO: 18707 - DNA, 562 bp, Emericella nidulans
tccaacgccccacatcctcctcgtcactatatcacgagagtctcgcatgaacgcgatccccacgcaaggccacaaagacggttacgcaatttggaactggtttgacgaggagccctcgctacgggtcggcataatcacaggcgcagggagcaaggcgttctcagcgggcgcggatctgctcgagcagcttgagttcaagacgaagaatgatgatgcatcttctgcttcaggtaaagggacagaaggggtgagacgggaaccaatgccaaatggctttggcgggatctcgcagcgcagaggcaagaaacctgttattgcggctgtgaacggactcgcgctgggtggggggtttgagatttgcttaaattggttcgttctctgcgtcgctctatatttgtcgttgatgatgcgattctaacgggataatcactagtgatatggtcgttgcctcaccaaccgctcaattcgccctcccagaagtccaacgcggcctctatgcgggggccggcggcctcacacgtattatccgcacagtgggaatgcaggttggcacggagctcgc

SEQ ID NO: 18708 - DNA, 563 bp, Emericella nidulans
tcggcagaggctgtctacagtgaagtcggctttcctcatatacttctcgcttctcggactgagtcccatcctaaagtccctcacaaaatcgaccgccagcgactctatctgggcgttgagctgctggctactaatcatgaacatattctcctttgactacgggagcggagagggcgctggcgccaccaagtttcctgcatccttgtccacaaacgcggccgtcatggcgtccacagtgctcgcgtctcgccttccgtccacaacccacgttttcagcttgatgctgttctccatcgaggtgtttgggctcttccctatctttcggcggcaattacgtcatatttcgtggacaggacacatatttcttaccctgacactggttatgctcgccggtggagcagtgggcatcacattgcggggtgggtggatgggtgcgataatagggtctatcttgggaagcatcctaacagcactggcaatgggcgggtgtagttggtggcttattagccttcaaaagtataaaaatgttgtctcagggccatgggaccctgctcggccgatta

SEQ ID NO: 18709 - DNA, 563 bp, Emericella nidulans
tcctggaaacgaggcctccagatcaactacaacataactcgcatcgaggaatggtgcaagagccatgatatgccagaagggacattacaattggagcatctgatggtaagtttatttggatcctgaatgataaaatactgaccaaagtagcaagcgaccaagcttctccagctgaagaaggccaccctaaatgatattgaaatcattcaggacatttgttggatgtatgtttctgcttcttggacattctctggttctaacaaatgtttaggctctctccaaaccaaatccaaaagctgctaaaccaataccttgtggccgactacgaacaacccataaatggcgaaatcatgaaagctgtagcctctcgtgttactgagaagagcgatgtgctccttcttactccggttgatatggaggatagtgggccgtatgaaatcgccgagcctcgagttataactgcgttggagacatacaccccatcttgtgagccccctcactgcatgttagacgtgctctgctgactgtctagggcttcaaacaccacggttgaaacgactcgc

SEQ ID NO: 18710 - DNA, 563 bp, Emericella nidulans
tgcgtccgcttagcccacgttgaagcaagccgtggcggaacttcgctctgcgccagaagtaggtgtcgcctgcgtcgttggcttccatgaaggcatgtacgaaacctctgagaaggaagacgaggcccgtaaagctatctcgttaggtgccacggagctcgacatggtcctgaagtaccctctgctcaagacaaagcagtatgttgaagtctacgaggatatcttgggcgtgcggaatgctgcccctgcgccagttggcctgaaagttatcctagagacctcgcaattgacgcgtgacgaaatcattgctggctcggttatttcgtgcttggctggtgcggatttcatcaagacgagtacgggttttaatggggctggggcgactgttgagaatgtggcgttgatgtatgaggttgctaaggctgttgggaaggggacgaaggttaaggcgagtggtggagtacgctctgcggcggattgtatcaagatgttgagggctggagcggagcgcattggggctagttcgggggttaagattgtacaggagttggagggcgagcagg

SEQ ID NO: 18711 - DNA, 564 bp, Emericella nidulans
tccatcgcagctctgaccatcatcaagggagtgcgcatgcccatcgatctcatgtccgttacgcagggaagcactcgcactctgtccttcttatcacagtctttcggcatcatcgcagactcagatctgggcacggaacacattcgctggatgggggctcaccgctttacctacggctttttaatgcgccttatgtcccgagcaatatacccttgtgaccttgctataaaagtggtaatggacgacaaaagctctataaagcatcattataatgcatatgtgaacagccccccaccagatccctcgcgtcaggactccgaatacaccgaaggtcttcccaagcttgagtatggaaccgttctcgatgagcttcccaaagactgggccgtcgtaccagcagacacaattggcaacttctttgcgggaaacatggccatagtatcgaaggataccaacttcttcccggcgtccgtgcccaacgatggccttatggacatcgtcacaattgacggaaaaactcctcgtacccgcatcttgaaaatgatgtccgaagtcccggagggc

SEQ ID NO: 18712 - DNA, 564 bp, Emericella nidulans
cagtttatcgtcaacgagaacggtactgcaggctttatgggagagcacagcatgatggatggcagcccaacccaccgtctcaacgaccacctcaatgcccttatcttcaacaacaagattgatctctcagcgaagcctgtgcgatccaacctgcccgatccccggcccatcgacttccacctaaatgaagaagttcaggaagcgattgacgttgcggccaaggaacaccgccagcagattgccgcccacgaactgcgcgtccaagcttaccagggctacggcaagggcctgatcaagaagttcaagtgcagtcccgacgcgtacgtgcagatgatcatccaacttgcctacttcaagatgtatggcaagaaccgcccaacctacgagtctgcctccacccgcaagtttgccgagggtcgcacagagaccatccgcactgtctctgacgagagcgttgccttctgcaaggcaatcaccaactcctctgttccccgtgaggaagctgtccgtcttttcaggactgctctcgccgctcactccaagtacactgccgaagccagcgac

SEQ ID NO: 18713 - DNA, 565 bp, Emericella nidulans
tcgcgatgggccctcaaatcaaaggagcgcactcgagaaagcgaaagttgaccagccgagtggaggaaatcaacttcgacgatactgaccgtcatcaattcctgactggttttcgcaaacgaaaacaacaacgtatcaaacatgcgcaggaagtcgctgaacgcaaggtgcgagaggcgaagagagaagaaagaaagagggtgcgttacgtgactgcaggctcctctcctatgacgcatattgatcctttttgatgtctagatgcgcgaggagcgaaaagcagagtttgaacgggcacttgcagagcacaagaggcagctaaaaagactcaacgaggaaaacgaaagcggtgatgaagctggtaatacgtcaagcggcaacgaggaggaagacgaatgggacggattcgaagagcccccgaccgtagactacgaggccgagtatatagacgaggacaaatatactacggtaactgtggaggaaatggatccatccaaagagggtctcctgcaatccgatgaagatagctcagacgaaagtccaaaagagcgacctgatacctccg

SEQ ID NO: 18714 - DNA, 565 bp, Emericella nidulans
ggactggcgacccgatccactttcgctacaaccaccagggcctcctccagctcaacctcagcattggcctacaaggcgctgcaccgacgttccccgctcacactccccgtaacggatgtctcgcagcaatgggacgcccagaccgccgtctcgtcaattctctacgagacccccgttcggccgacaaacccgcccaagcgtcatgtcttgaactgtctggtacaaaacgagcccggtgtgctctcccgcgtttcggggatcttggccgcccgcggcttcaatattgacagtcttgtcgtttgcaataccgaggtggaggatttgtctcgcatgaccatcgtgctgcagggtcaggatggcgttgtcgagcaggcccgccgccagctggatgatcttgtccccgtctgggctgtcctcgattacacggactctgcgcttgttcagcgtgagctgcttctggccaaggtcagcattttgggcccagagtacttcgaggagcttctccagcatcaccgcgagatcgccacccccgttgagtctatggaggcgcagaagaagagcaccg

SEQ ID NO: 18715 - DNA, 565 bp, Emericella nidulans
tccaggccgctcacatcctgcagtcccagcacggcatcaactgcaacctgactcttatgttctctcttgttcaggctattgctgctgctgaggctggtgccttcctcatctctcctttcgtcggccgtatcctcgattggtacaaggccgctcacaagcgcgacttctcgaaggaggaggatcccggtgtcaagtctgtccagagcatcttcaactactacaagaagttcggctacaagaccatcgttatgggtgcctctttccgtaatgtcggtgagatcaccgagctcgccggttgcgactacttgaccatctccgtacgttgccacccttcaactataatttttgagggcgtatcactgacgaaccacagcccggtctccttgaggagctctacaactccaaggacgccgttcccaagaagctcgacgctgcctccgccaccaccctcgacatcaccaagcgcagctacctcaacgacgaggccctgttccgcttcgacttcaacgaggaggctatggccgtcgagaaactccgtgagggtatctccaagttcgccgccgac

SEQ ID NO: 18716 - DNA, 566 bp, Emericella nidulans
ccgtcgatgtcatttccgctcagcaactcccccgaccacaaaatatgtcttcggacgggaacatcaatccatatgtcgaaattgagatgtttagtgcggacgatcgtggtcaaagctttgcattcggcgaaggtggcatgaacgcttctgcccgaaacggcatgtcaggcatcggctttccgcatcgccggcgcaccaagattgagcaacggaacgggtacagcccaaacttcaacgaaagttttcgtctgtcactggagacaaaatacccggatttggtgtttgttcgctggactgtctggagctcacttgatggccgaagcacgggaaccaacggcagtgttcaactggccacgttcaccgctaagctcaccagcctctcccaagggtaccggtatcttcctctgtatgatggaagcggtgatcaatatatcttttcaaccctgttctgcaagatttcgaaagaggaacccatttctgttcgccgactgaatgccgacgaactcagagccgagcggttgggtatacttcgtcaaatcggccaaacggtcttcaagcgcacctcg

SEQ ID NO: 18717 - DNA, 566 bp, Emericella nidulans
atgattaagatgggtgttctcttggtccttgtatcaaccgcaattccctaccagttcgcgtacttagtagcgtgcatcgtgcaactggcgacttgtgtgcgggcacagtggcatgccaaagagactgtacgtagtcgagcctccccgatggattgtactgacagcagcagaggtcgactgcccactataattttgcaaactatgcatactcggtatttattttaatgctctgggtcctcccgattaatatactcgttctcctggtctgggcacataaccttgttgtgcactggttcatgccattttcgtcgcatcacaacgtgctgtccatcatgccatttatcattttggtggaaaccatgaccaccggctctatgattcccagggtcaccacacggtatgtctcttttcaatgtctggtcaatacatctgctgacccatgcagattcaaacacgtcacctccgtccttctattctgtattgcggtctactcagcggtatacggagtatcctatgcctacatctcacatcacctcgtcaacatccttgctggctggctcgtcagc

SEQ ID NO: 18718 - DNA, 567 bp, Emericella nidulans
cgctggaccacctagtccagcttatggacccgcagctctatttgcatctccaatccgccgacagcacaaactttttcttcttctttcgcatgctgctcgtctggtataagcgggaattcgaatgggtggatgtcctccgtctctgggagacattgtggacggattacttaaccagtaatttccacctctttattgcgctggccatcctagagaaacaccgcgacgtcattatggatcatttgaagcagttcgatgaggttttgaaatacagtatgttccctctccatctcacgtacctcactcacgtaggtgacggcctatgttcggcctgcgctaatcgactggggatagtcaacgaactctccaacaccatggacctcattccaatcctcacccgcgcagaaactctctttcatcgctttggtcggcagattgaagccattgacaagaagaataatttccctacgccgccggggcagcctcaagctcagcgacctacgcctgctcagcctcagtcatcaaagggaaaatcacctgagcgacaattagcagccagcacgggtgtca

SEQ ID NO: 18719 - DNA, 567 bp, Emericella nidulans
tggcgaagggcaagctagcaggctgctttggtctgactgagcccaaccacggttctgacccagggtcaatggaaactattgcgcgtgaacaccctaccaagaagggtgtttatctgctctccggcagcaagacctggatcaccaactcgcctatctctgacattttgattgtttgggccaagttacaaagcactggcaagatccggggattcgtagtggaacgcagcaagtgtcctccaggaacgctagagacacctgccctcaagaacaagtcagcgctccgtgcatccattactggcatgatccagctggatgattgccccgtgcccgtggagaacatgttccctgatgtcgagggactcaccggaccttttacctgccttaacagtgctcgtctgggtattgcctttggggccatgggtgccctggaggattgcatcgaccgtgctcggacctatgccttggagaggaagcagttcaaggggaaccctctggccaagtaccagctgattcagaagaagctggcagatgcagtcacagacgctacatacggcaccttggccgcaa

SEQ ID NO: 18720 - DNA, 567 bp, Emericella nidulans
ggcggctatgaccctcgcataacagaaaatgtgcaataccacaaagaacttgatgccctcgcaacaagcctcggcttgcaaaccgccacatcgaagaccgtcccgtctgccctctccatcccctcctccatcgacgtcctctttcttccctcagtgtcctctgccttccgcgacagctcctggctaaatcctcgcttctcctctacaccccggtgaacgaacactttgggatcgttcccattgaggcaatgcgcgcggggattcccgtccttgcatcgaacacgggcggtccgcttgagacgatcgttgaagggaagacagggtggctccgtgacgtggatgacgtcccagcttggacaggtgtcattgagaaggtgttgtatcagttgggggcggacgagcttcggcagatgagtgtggcggcgaaggagcgcgtcgaggctgagttctcgctgcacgctatgggtgatagacttgagggggagattgggaagatgctgagtactgaacggagacagtttaatggcgcgcaacaagcattgttgcttttgggaatgctgggggtgg

SEQ ID NO: 18721 - DNA, 568 bp, Emericella nidulans
attctcgatactcgagttgcagaaactactcgtgccgctgcaacggctgaaggccagcatcgtgatgccatcaatgcgattgcttttaaccctgccgccgaaacggtcctggccacaggatctgcggacaagactatcggcctatgggatctacgtaacctgaagacgaagctacacacactcgagaaccataccgactccgtcacatcgatctcctggcatccgttcgaagaggccgttctggctagtgcaagctacgaccgtaagatcatgttctgggatttgagtcgagcgggcgaggagcagacgcccgaagatgctcaggatgggccacctgagctgtacgtgctcttagtttcctgtcgatgatttgatttcacaaggctaacttcatcatatctacagactttttatgcacggcggccacaccaatcgtatttcggatttcagttggaatctcaatgatccctgggtgctctgctctgccgcagaagacaaccttttgcaagtctggaaagttgctgatgcaattgttggtaaggacatggaggacgtgccgaccgaggaa

SEQ ID NO: 18722 - DNA, 569 bp, Emericella nidulans
gcgggctgaccggaattggtcgcgtacgtatcccactcaaccccatcgactcctcaaccccgcagaccatcgatcaggaatctctatagcagaagactgctaacatagtttaggcgatcgccctcgaatacctccgacacggcctacgtcgccgtcaaccacctcggtggctccaacgacgagccccttctgaccgccatgaaaaaggacgtctcagagctcctacaacaaacctcccaaacagacaaagagcgcttcatcaccgtatcaggggacatctccaagcccgagacagggacggaattcatcgagaaaactgtgcaagcgttcggaagactcgatgtgttcgtaagtaatgcgggtgtttgccgctttgaggagttcctcgagtaagtgttcttttccctttagattactgtaagcggaagggttaagaaattactgatcattggacagtgtaaccccccagctcctcaaccacaccataaccaccaacctgaccggcgctttctacgccgtgcaagccgccgccaggcaaatggccttctcgcaatctccgcccgggggct

SEQ ID NO: 18723 - DNA, 569 bp, Emericella nidulans
cccggttccggaaagactgagctcgccatcacaatggcgagacgtatcaatgagaagcacggcgcacaaaacggcgacctaattcgtgccgcaatccccatggacggataccaccttacacgggcacaacttgcccaaatgcctgatccagaatacgctgctgcacggcgaggtgcggcattcacattcgacggagagaagttcctagccctagtgcgtgcgttgcgtgagccactaacacccaaaacgcaaacgttacatgcgcccagttttgatcacgcagttaaggatcccgtggataacgacatccccattgctgctgcgcgacgggtgatattcttcgaagggaactatctgagtttgaataaggagccgtggagctcagcggcgaagcttatggatgagctctggtttgtggatgtcgatttcgacacggcacggcaacgcttggtcaagaggcatgttaaggctgggatagcaaaagatgaggctgatgccgagaagcgcgcggatgagaatgatttggtcaatgggcgggagattgtggattgcaggcttgacgtgcagga

SEQ ID NO: 18724 - DNA, 569 bp, Emericella nidulans
cgaacgtaagcgttgcccaccatacaagctcctctaagttcactaacgccgattccagcccaaatcaagtccgtcgacatggtaagagctctgatgctatgcgaatatattgaggctcacgaggggatagtcggaggacatgcagcaggaggctgtcgaagttggtatgaatatcctctgcgatttatgaggttcgaggctaattgtttagctatcgaggctatggagaagtatcatattgagaaggtatgttcttgctgcggacttttgggcccgatacatgcctgtcgatactaacggcacctaggacattgctcaatacatcaagagagaagtgcgcgccgcccaaccaaacctacgatggctcggaatcttacaatggaacagtttgactctcgcaaaggcgctacatggcactgtgtggtgggaaggaactttggaagctttgtgacgcacggtaatgccgcattgcaagtgatgccgagtatagacacttgctgattgatgcctaccagaaacgaagcacttcatttacttctacctcggccactgcgctatccttttattca

SEQ ID NO: 18725 - DNA, 569 bp, Emericella nidulans
ccgctcaaagtcgccgaggaagaacgcacaaagtattacctggaaacggaacagctgaaagagcagaatcgcggactagagacccagctgcaacaagcgacaagtacaaacgcagagcttcgagaggagatgtctcgtttagcagggcacgctggttcggccactgatcgcgttaacgagctgtccacgagtctggctcaagcccggcatgagctcgaagagctgcagcgtacatcgcaggatgctctctccatccagcgagaatcgtttaaaactagagaacttgaccttgtggcgtccctcacggaaagagaagagcgcctggacgaacttcaagaagagatcaaatgtcaaacggtagccaatggagaactgagggtgaacttggcagacacctccaaagttagagagtcccttatcggagagatagctgcatttaaggctgaggtctcttccttacaaacaaaacttgaagagaataaggcttctctaacgcaaaaggacgaaagcatcaaacagctggtggtagagaagggaagagcagatgagttggcgaaagatctgcagca

SEQ ID NO: 18726 - DNA, 571 bp, Emericella nidulans
ccgcagccagtctttcaggtccagacaaagcgtgtgaagccaaagaaagccagtcgtatgttcttacccgtcgagatcaagtacgaggaggatcagttgcgaaaagagttcttccgcgaccatccctgggaactggccaggcctagaattctggtagagagttcaggcaaagattctgagcgttacaactggagtagaatgcagcagccaggcaagaagctggatggcgagaggtatgtattggtagtttggaattgtccttctatgttatcctatagtggctaatgtctcgttctcaaagcgtcgtgcaacgacagctgtggctcctgaataacgttcccgatatgacaaaaagtcgtgcttacgatattgcgcgacgcgaattctatcgactccgcctacaggaggatattgagcgtcgcgtagctgttgaagaggcagaggctacaggtgcggtctttggaccttctcgcctagagattggtatggaacttgaaaaccagcaattcgaagcctggaagtcatgggcgaagacggaagcacaaattgtcgatcaggcgtcaacatcgga

SEQ ID NO: 18727 - DNA, 571 bp, Emericella nidulans
cttgaccggaacgcccgctacgccagtatcaacacccatctgggtgtggagcagtcccgccgggatgacatggagtccctaggttacgttatgctgtacttctgccgtggcaccctcccctggcaaggtcttaaagctgctaccaagaagcagaagtacgaccgtattatggagaaaaagatgacgacccccactgaggttctctgccgtggattcccaaatgagttctccatctacctcaactacactcgctccttgcgtttcgacgacaagccggactactcctacctccgcaagatattccgtgatttgtttgtccgcgaatcgttccaatacgactacgtttttgactggaccgtttacaagtaccagaagaacgctgcgatgatgtccgacgccaagaaggacaaggaggccgaggagcaggcacgtcgccagggtgcgactatgcctctaactacctctggtgccgccaagcctggtgctatctccagccagcgtcgcaagatcatggaacgtggagccctcgacaacaccccggacaccaaccgtgctgtgggagggagcgaca

SEQ ID NO: 18728 - DNA, 572 bp, Emericella nidulans
accgcgtaccagagtttgaagaactatcttgatttgagcaaattcgagggcgggagcggaccgagagtcttcataaacggcggtagcggtggatgtggtgtgttcgcgattcaaattgcgaagatgctaggctgtcaagttacgacgacctgctcgggtcgaaatattgagctagtcagagatctcggtgcggacgagatcatcgactatacaaccaccaatgtcaccgaaaccctaaagaccaagggcttagtctacgaccatgtcatcgaccatatcggcctccctgggaatctgtatgctgaatgccaccatttcctcaagccatcgggggtctgggtgcaggttggtgcggggagtatcctcactgcattttggagggcgatcacgccgcggtttctcggaggcggacggaggtggtttgttccgctcatgatggcgaatagcaaggaggatctggtggaggtcggaaatctgcttaaagagggaaagcttcgaactgttaaggatgggaatcgggtttgggaatttggggatgttaagaaggcgtatgagttgctggcgagcgggag

SEQ ID NO: 18729 - DNA, 572 bp, Emericella nidulans
tgagccgccgtcccttcatacataatacacccgcttatattggctcagttcgcacaattcgagcgcaaattattcgactccgttacgatcataaggaggtcatggctcacattgagaagggcattcacgctcatttcgccggtcttcagagtaacacagctggcagtacacccaccagcagtacaaatggcttatctatagagccttccgaaatccacccaccagccgcagggacgagtgtgttgaccccgtttgcgaaggtgaatagcgttgtacctgggagtcctgctgtccaagctgggttgcagcctggcgatttaatccgaagttttgggaccgtgaattggctcaaccacgagcgcctttccaaggtggctgagttggttcaacagaatgaaagcgtgagttaccgttggcttcttcagtggcatcccggcgtccggaccatacccgactgacttgaatcgtctagcgccccatcaccgtcaaaatctcacgtggcggagtaactcctggcgattctgccaacttagacttggaacttgtgccacgccgtaactggggtggccgtg

SEQ ID NO: 18730 - DNA, 573 bp, Emericella nidulans
cgccagtcgctcgggttgatgaagagtaaactcaaaggtgcggagaccggccacagtttactaaaaagaaagagcgaggctttaacaaagtgagcctcctatgtctaattgctaagtccccaatactgatactatgtaggcgtttccgaggtacgcccgtctagttctagtttccgacgacttctccgcatcaacagcattaatcaataccagagataaccaggcgaattgatgaggccaaacagaagatgggcagggtgatgcaggttgctgcattctcccttgcggaagtgagctacgctgtcggtggtgacatcggctaccaagtccaggagtccgccaaacaggcgcggtttcgagtgcgagcgaagcaggataacgtttccggagtattgttaccacacttcgagagttatacggaagaatcaatcaatgactttggcttgactggtcttgggaaaggaggacagcaggtgcagcgctgccgcgagacatatgctcgcgcagtcgaaaccctggtggaacttgccagtttgcagacggcatttgttattttggatgaagtgatcaagg

SEQ ID NO: 18731 - DNA, 574 bp, Emericella nidulans
tgtgcctgcaccaccatgctctttgatgatgctaatccttacagcggcgccctccgccaatccctcgttgtgggcatggttgcacctcctctactgttcggtaacatatgcaaccacctctcgagagataaagaactccagaacaggctgcgctccaatccctcccttatcccagccgctatcgaagaatttgtgcgtctgtacgtgccctatcgcggcttctgccggactccttcccgagacgttgaactctgcgggcgaacaatccccgcgaagtcgcccatcaccatgacctatgctgcggccaatcgagacccaagcatattctctcagcctgatgagttcatcctgcaccggcctaatatcacctctcatctgggattcggccgcgggaggcaccgctgcgcggggatgccgttagcaaggatgtaagttactaccttagtgtctaagaatgagggcactaacacctgtactagggcactgcaaatcggtcttgtcgttatccttcagcagtcatctgattttgaggtgaatggcccactgcagtatgcagggatgccggagatgggga

SEQ ID NO: 18732 - DNA, 575 bp, Emericella nidulans
  unsure (1)..(575): unsure at all n locations
gctgccctgagcgatagttgcatttgacgatgattatttgcttttgattttggtctcaagaagtcatgggggtagcnntcactccgcgtgtcccttgacggatgaagaatacagcaggggtgatgagtcgtatttttgcggattttgattacacatttgatttgagcgtggctgacgagacgtttagtatgactccaagtacatttcgcggctatccaagcgcctgacagacggtctcttggccatggagcacacctctctcaacggtgaccccgaacgccgctaccccggatgtgtcaacgtctcgtttgcctacgttgagggagagtccctgctgatggccctgaaagacattgcactgtcctccggtagcgcatgtacctcagcgtccttagagcctagctacgtccttcgggcgcttggcagcagcgacgagagcgcccacagcagtatccgattcggaatcgggcggttcacgacagaggctgagatcgactatgtgctgaaggcggtgcaggagcgggtgcacttcttgcgggaattgagtccgttgtgggagctggtgcaagagggga

SEQ ID NO: 18733 - DNA, 575 bp, Emericella nidulans
ggcggttatccgcgtcaactcacaggggggcaagggtggtgctgcctgggtcattctgcgcactctggagctggatctcccgcgcgcactccaggtcgagttcagcaagattgtgcaaaagcgtacggaagaagccaaccgcgagctgcggcccgccgagattgtcgccctcttcgaggacgcgtaccacctcaagaccaacccccgtttcaatctggtcgactacaacatcaccacagaccgctcgcagtctcccgctcctccagagcccggcaaggcgctcaacacaaagaacctcaagcgtcgcttcactggtatcattgagattgatggccttcaacacgcgatcaccggcgtcggaaacggtgccctttcctccctcgccaatgccctcgcaaccctgggtatcgatctcgatgtcatcgactacaaggagcactctatcggtcagggggccggtaagggtcgtgatgtcaaggctgcgacatacattcactgcagtgctgctggtagccagcagaaagtatggggtgtcggtatccaccaggatgttgtccaagccagtttgattgccc

SEQ ID NO: 18734 - DNA, 576 bp, Emericella nidulans
gaggcggcccgcattcaacggctgcccggcgaggcgttctacatcccggattttgtggatgaagaggaggaggagaggcttttggcgaaggtatgtatgcttccaattggcactcgtacttctgttctataccgggacaacctaatcaaaatatcgatctatgcatccctctcacgtccacagaacccgtcctccgcagctgatggctgttccaacccctcctacctgcttgctatcaggccacccacactcactccacatcatatctctaccaactaaacacctactaactccgttagatatcatccgctcccctgccagtttggaaacatctctcccaccgacgtctacagacctacccatccgctctaaccgccacaaacacgctgctctcctcgcccctcccgccctggctcacaacaacaccgcctatcgtcgagcgcttcagagccctgcacctcttcgatgactcgccacacaaaggtcccaaccatgttctcgtcaacgagtacaacccaggccagggcatcatgccgcatgaggacggcgctgcgtatcatccgctcgtggcgacag

SEQ ID NO: 18735 - DNA, 576 bp, Emericella nidulans
tccgatcctgcgtctcaacccgtttagcagcaactctcacaaggcgaaggagatgagagacaggcgtgacaagtacctcagttcactcaaccgggaccttgacgatcgaatggagaagggcacccacaaaccttgcatccaggccaacgtaatccttgacaaggaggccaagttaaactctgaggagctcacctctattagtttaaccatgctttctggcggtcttgataccgtcacaactctcgtggcttggagtatctctcttcttgctcagcgtcccgacatccaagacaaagcagcgaaagctattcaggaaatgtacagcgaaggccaaccgctgtgtgaccctgcagacgatcaaaaatgcgcttatgtcgccgctctggtccgtgagtgtctcaggttagtattctctctcactttgccttcgtatttgtgtcggtatccttaactgagacgccactacagatattacactgtgcttcgtctggccctgccgcgcacgtcaattagggatattacttacgatggtaaggtaattcctaaaggaactgtattcttcctgaatgcttgggc

SEQ ID NO: 18736 - DNA, 577 bp, Emericella nidulans
aacggcggcgccacattaggcgtctcaggaccagatttcgccatccttgctggcgatacccgctcaacagcagggtacaacatcaacacacgctatgagcccaaagtcttcaccatccaggatgcccgggaccgctcgatcgttatctccgtcattggctttgctgctgacggacgggcgttgaaagagcggctcgacgcgatcgtagctatgtacaagtaccagcacggaaagaacatcggtctgcgggcctgcgcgcagcgggtctcgaccatgctctacgagaagcggttttttccctaccagctgcagacgatggttgccggtattgatgcagacggccaaggggccatctattactacgaccccgccggctgtattgagaagcggagccactgtgcggccggagaggcgagtagtctgatgctgccgttcctggacagccaagcaccgcggctacagccgttgagcttacagacggcccagcagctggtgcgggacgcatatacgggggcgacagagcggcatattgaggttggagatcacctacaaatgttggttgtaacgcgggaagggg

SEQ ID NO: 18737 - DNA, 577 bp, Emericella nidulans
cagcaacccgagactctccctgaggaaattcttattacggagcccggtgagaagaacgaaattgatcccgaaactatggagggagagagttataacatgtgccatttctggagtaactttgaaattgcgcgcttggacttcttccggagcaaagagtacgaggatttcttcgagatgatggataggagtggtggtttctggatggagagagtaagtgtcgctgttcttcgttctctttgcgtccaagactaacgcagctttcagtggggtgatgctcccattcattccctcgctgctggtgtgcttctgtcaccgagtgacatccactatttccgtgacttcggttaccgacacaccacgattcaacactgccctgcgaacgcacctgcccgacaactaccgcgcattccgtaccttgaaatgacgaccgaggacgagaaggagcgtattgaagaggatgagtattgggcaaaccccgatcctgtaaaggaaaatggagttggctgcagatgccggtgtgataccgatattgtggatgtcgaaggcaagcaaggcagttgccttgcggaatgggtgg

SEQ ID NO: 18738 - DNA, 578 bp, Emericella nidulans
cgccagctgtgcttggggacaagtcaaagccgctgctgcgtacgcgatctagtcgatcccttagccaaaacttacctcgtcgacacggacactcttggaacacccgcaggtgaggtcccaacggctcgcgaatcgttaacccgattgaagcaaccctctgcacacagctcgtagaggcattcatctcatgcggcattccagcccgcagcattggcgtcatcacattctaccgcagccaactctccctcctgaaacagaacctccgtcatcacctccccgccctggaaatgcacacggcagataagtttcaaggacgcgacaaggaagttatcatcctaagttgcgtccgaagcaaccaggaaaattacgtcggcgatttactaagtgactggcgccgtgtgaatgtcgctttcacaagagcccgcacgaagctgctcgtcctgggaagcaagaataccctgcgcaacggtaatgagctcctcagcaaatacgtggatctagttgagaatcagggctgggtatatagtctcccgaaaaacgctgtggagaatcatatctttgacgaagttcctctttcg

SEQ ID NO: 18739 - DNA, 578 bp, Emericella nidulans
aaatgactacaaatattatcttggggttactgcctccagtagaacaaaggaagcagagtcggtttggtccggcctcgtcgagtccaaggttaggcacttagtcggagcattggatcgaaagcctaccatcgcggtcgctcatccattccccaaaggatttgagcggattcatattgtcagcaacgaggaggaggccgaggcggtcaagaatggttccctcaaataccaagataagggcacgaaaacagaaacaaccgacgagatcaaagatgcggctcaccaggctgcagctcaaagtggaagagaagacaccgacgttcccggtgcagcaaacaacaccgctgctaatgatggtcggataatatatacaacgacttactatattggtttggagttaaagccggtcgaaccaggtatgagtgccgcattatcttaccgaactcactgactttccacaggagcgtcccggtcattggatatctcttcagatgcacaattcttcaaatccatgtgtacgtcatggcctgggtatcagccaggcatcaatgatctctccattactcatgttcgcaagtgag

SEQ ID NO: 18740 - DNA, 578 bp, Emericella nidulans
cgcttctgccgtgaatgctcaaatctgctctatccgaaagaagaccgcgtcaacaaccgactgatgttcacatgtcgaacctgccatgttggcgagcccgcaacgtccaattgcgtttatcagaacaagctcaccagccaagtcggcgacactgctggtgtcactcaggatgtgggaaacgatcctacggtttgtctatccggtctctgtctgctttgtggcgatgtgattgcttgctctgcatgcgattcgacgtcctagctgctggcctggtgcctttggcttgcaatatgcttggaagaataatgcggtccgaatgtctggctaacgcgcaaattgtctttgcactttctttctatagcttcctcgatctaataagacctgtccaaaatgcgcgcacaacgaagctgtattcttccagtctcaacaacgatcagcggaaaccggaatggtgagcatattgagtttgtggaatggatggtcctggtggctaacagtcttagaaactttattatgtttgctgccattgtggaaatgtcttcttataaacttgtcattcttgcccattctatatcacg

SEQ ID NO: 18741 - DNA, 579 bp, Emericella nidulans
cccaaccgagcccgaaatcagccccggcagcgccaccattgtcccaatacagcatcgcaccaacctcctagaatgcgacgacgacgaatgggaggagattcgcaacttcatgaagagcctcactcgcatgtatcatgaccaaggccgcgatgtcatcttctacgaaaacgctgcggcaccccaccggaagcgccacgcatctatggaggccgtccccctcccctacagcctaggagaaacttcaccggcatttttcaaagaggccatactctcttctgatgaggagtggacgcaacaccgcaagctcatcgatacgctcaccaagtccaagcagggtctcggccgaaacgccttccgccgctcccttgccaaggaaatgccctacttccacgtttggttccagcttgacggcggattgggccatattgttgaagatgccaatcggtggccgaaagcggatctctttgcgcgcgaggtcattggaggcatgttagatgttggccccgaggtgattaagaaacagggacgctggacacgaggaggagaccggcgagttggcgggttccagagccggtggag

SEQ ID NO: 18742 - DNA, 580 bp, Emericella nidulans
ccagcttggtgacaaggcccacgttgtgcaatgtgacatcacctctttatccaatatcgagaagcttgttgaagagtccaagttcgtgttcgccgaccaaatcgacttcctcttcatcaacgccgggtacgcatgccttgagcccgtggcggcagtcaccgaagagtcctttcaccgaacaataaacaccaacgtctttggcgcattcttcgttgctcagaaattcatccctcttatccgtgacggcggcgcaatcgttttcactagctcagtatctaccaagcacggcttccccggtttggcggcatactccgcgtcgaaggccgctgtctcttcgctcgtgcagacgctggctgccgagctggtggaccgccagattagggtcaatgcagtgtgccctggattcatcaagacgccgaccatgggtgtgtctggcgtgacgccagcagacctggttgcatttggagaagagggtgagaagctcactccacttgctaggaatgggactcccgaagaggtggccaaagctgctgtctttcttgcatttgatgcgacatttaccacgggcactgaccttgca

SEQ ID NO: 18743 - DNA, 580 bp, Emericella nidulans
tggcggatgtgttttacgccaagtggacaaagctctttgacgcgaagaatataactgcgtgggaggatatcgtcttgcagtgggataagattgaagccgtgacacgggatcccggtggcactgggctactcgttcatgggtttgatgagagcaaggccgccgtctgggcggacccggttacaggagcttcgcctcttgtctggaaccgtgctgttgggtggtattttgtctccctgatcgaggtcctggatatctaccccaaggacctacccggatacaaacgacttttaggatactacaagaggctcgccaaggcgatacttcgcgcccaggacagggagacagacggttggtatctaatcctgagcaagcagtatgttggtgccgaagggaactacttcgaaagctctgcggccgctatgttcacctatggctggctcgccggcctgcggaagggttatcttgacaagaagacgttttcgaaaccagcggcaagggcgtacagacatttaattgacgattttgtcacgaaacatcgcaatggaaccctgacttatgaagggactgttcaggttggatc

SEQ ID NO: 18744 - DNA, 580 bp, Emericella nidulans
tcctctgaaaggttatacgccttctctccggagaccaaagagaagctgcgcaagtttcgcttgacaacatcccgggcgaaagagccgcaagcgatcatctgtatgtggtgtcatgcctcgcaccctctggactatatccattttcacatatggccatattgtgaggacgatagctgattcctctccagatatcatcgatgctaaaagccaggaaatccgagcagaagatggcgaggtgtacacaaagatggaagacctggcggacgagctcccagagtcgtctccccggttcatccttcttagctaccccttaactctggtatgcatcttcatatcgccgcgtggtctccgccgcgtggtctctatcacctcaagtgtactgactggtctagggttctggtcgccttgcggttccttacgtcctgctctactatctccccgagaactgcaacccgaatcagcgaatgatgtatgcgggcgcggtcgagttaatgcgaaatacggcagaagtcaacagggttatcgaggtcgagagcgaggaggatatcatatctatcgagtcgaagctgcagagtgcgga

SEQ ID NO: 18745 - DNA, 580 bp, Emericella nidulans
ttatagtcttctaagtttctgcctccgtgcttcagggatgcagcagttgcctcggtcatatatctacagcagatgctcgcaggacatccaggagtatctaaccctgttttgcagaatgccctgcaaactaatcgcagtggtccacttaatgtgattgagcttggctcgggatgcggaatttttggcattgctctagcagaactactgccccagtgctccgtcctactcacagacctacctgaagtcgaggagattatcacgaagaacatcgcagttgcccagccagcgcacgcgtccaagatccaatatcggccgctcgaatggggagaagaactgccagacgacctcttcggtgctcatacaattgatttgattctcgtctcggactgtacctataatgccgatagcctgccagccctcgtgtcagtgttaggtcgactgatcgagctgtccccacacgccatcgttcttgtggctttaaagcggcggcatgaaagcgagagtgtattcttcgacctgatggaatccgctggattacatgatcttcactcgcaccacatgcaactcccatcgcagcacg

SEQ ID NO: 18746 - DNA, 580 bp, Emericella nidulans
agcccaatcatcacctaagaatgtgatcttcctgacaggagcctgtggctcagggaaatccaccgccggacttcacctctcgacaaaattcaggatcacaacaatcgaaggcgacgacatgcactctcgtgtctcccgcgcgaagatggcgtctggtatcccactttcggattcagacagatgggaatggctctctcacatacgtggagccgttatggaccgcctactccaaccatccacctcggcgggaattgtcgtcacctgttccgcactcaagaggtcctaccgcgacgaattacggaaattgatgtatctattggaggaccccgtaaatgttacatttatccacttgtttgttggcaaagaaaacaagacggagctccaggagcggttgattctgagatcgaaagtggaggcgcattacatggcgtctactatggtcgattcgcagttggaggctttggagagcccagaggaagagcgggatgtcgtagttgtcgatgcagctgggatgaaggatgtggtcctcagggaggtagaggagattgtgagagggattctggcgtaggttctaatgttt

SEQ ID NO: 18747 - DNA, 581 bp, Emericella nidulans
acaaatcaaggatatccgtgtggaagggcgatattaccaccctatctaatgtgacggctattgtcaatgccgcaaactcggcgctgctcgggtgcttccagccgtcgcaccggtgtattgataatgttatccattctgctgctgggcctcgtctaagacaggcatgtttcgagttgatgatggagcagggccatgatgaaccggtgggatgcgcaaaagtaacacctgggttcaagttgcaagctccgtatgtcatccatacggttgggcctgaccttggacacggacaattgcccgatcgcaggcacagggagcagctgcgtgactgctatgtatcttgccttgaggccatggaaactgtccctgcgctaccagacgggcgcaaggtcatcgcgttctgctgcatctcgacgggccttttcgcgttcccgtctgatatagcggctcagatcgccattgacactgtgttaagttggtgtttggagcatccaacgacaaccgtcactgacattatcttcgacactttccttcaacgggactttaatctatacaacgacaagatctctacccttgtttccagt

SEQ ID NO: 18748 - DNA, 582 bp, Emericella nidulans
ccgaccgtgacccgatccatatcacaatcgccgaaaccatctccgcctccctcacacgtgatggtgcgctcaaatccttcgaggtcaaaggcgaccttcagcttcgtattagcgaccctgctttcaccaagctgagacttgaccttctcgccaatcccacgcatggcgcgcaattccgcactcatcctaatgtcgacaaggctgcattcagcaattcttctatcatccagctgaaagatacatctaaaagattccctgccaacaactcaatcggcgtcctccgttggcgtgttgcgggctcaggctctgacaatgccgatgtgctcccaatcacgttcacagtctggctcaacaaaggctccgactctactacagtgactgtcgagtacgagctcacgggctctgacagccttcgggatgtcgtcgttaccatcccatacggcacggctgagccagctgtctctagcttcgacgccgtttacgaggtctcgggagacagtcttgactggaatattggaaatgtggatgagaacagcgcatctagtagctttgagctcgagtcgactgccgatgacgagaacg

SEQ ID NO: 18749 - DNA, 582 bp, Emericella nidulans
tgtcgtcaaatcggcgggaagttcctttattctttctcttgcgaaatagatacagcggtacgttatggacacacccagtaaccagggccgtcgttattgacatattgcagcttgatggtttggaagctgtgaacaaggttcaagacggctccaaatacgacctgattcttatggacattataatgcccaatctggatggagtttctgcatgtcatctcattcgtcaatttgatcggacgcctatcattgctatgacatccaacatccgaagcgatgatattcagctttacttccagcatggtacgcggcttccgtaatttgttcagtcaaatgtgcaatgctgactgttattaggaatggatgatgtccttccaaagccgttcacgcggaaaagtcttttggaaatgctagagaaacatctagttcacctcaaaactgttccacagggaatggaaggtcatcaagctacgacgccggtaacaatcgcgggccaaagcttggctgcgcacgctgtcaccatcaaagaagatacatcctcccccagccagtggcccgcagccgccatgactgcctggcaatccc

SEQ ID NO: 18750 - DNA, 582 bp, Emericella nidulans
ccgaagaggccaaacgtgccagtgtcccaatatctatccatctcgaccacgcgcaatctgaggaactcatcgagcgcgctgctgagttaccgttcgacagcattatggtagatatgtcgcatcatgagaaggaagacaacctccgcaaaacgaggcattgggtgcgacattgcaatgagcgacatattgtcactgaagcggacgcgggtcggattgagggtggtgaggacggtgtgatggatacagctggactggaggctcgttttaccaccgcagaggaagtcgatgagtttgctgcgacaggtgttgacaccctggctccgtcttttggtaacgtacacggtgaatatggtccacaggggccaaggttggattttgagaggtaacacactccgcacaatcaatgtcctacctaggctaacgcagcataaggtttgcgaaggttcgagaacgcgcgaatggcagagtgcggttggcggtgcacggaacgaatgggttttcactgagctgatgaagcaatgcgttgctgctggatgctgcaagatcaatgtcaacaggtgtgtcctagacgactactacgag

SEQ ID NO: 18751 - DNA, 582 bp, Emericella nidulans
aaccgtcctccgccctcgtcacgtccgcccccgagcgcgcagccgctaggccttcccaacgacgatcagctctttcccctagttcgcgccgcgaacgcatcgaattccggggcacttactgagcaggagctaggatctgctctcgtgaacggcgactatacctcattccacccgaagacagtgaagatgatgatcaacatgttcgaccggaacagaagcggctcgatctcattcgatgagtttgtggcattatggcgatatttggcggcatggagggacttgttcgacagattcgacgaagaccgtagtggacgcatcagtctgcgggagtttgagaaggcgctggttacgttcgggtatagtctcagccagccgttcgtgacggtccttttcaccacatttgagaacaaggggcggcaagttggcaagcctcgagcctctggcatgagtttcgatctttttgttcaggcgtgcattagtcttcggcgtatgacggaatcgtttaagcggtacgacgatgatcgtgatgggtatatcacggtcagctttgaggagtttctaacgggtgagtacttcagtcaa

SEQ ID NO: 18752 - DNA, 582 bp, Emericella nidulans
tctgtttcccacgtgcactgacactcgtgcgcgaactctttccaaacccttcactatcatgcgtgactccctcaagtgaaagtggcagtgcaagtcctcctacagttcaacaagtcatcactaaaaatgagcagactttacgagatattactgagatcatagagtgctcctgctcggaagacggctacaccatcacaatcataactcttgctgccttcaaagtactagcctggtatacgccgtagcgcatatctcccctatatctgaagacagccaagcattagaagagatcgacaggacaccggctgttgtcaggggctacaatatcgatggtgaagatcaagccgcatggccgcacagctagttctcagcgaactgcatcgcgttcaacgattagtgggcaatctctatcagcgactgaaagaccaagtctcaggcgggaagcctgctaggttgagtaccactggggtcaatgacagcaatcattactctctcccttttcatctgctggaaaggctggcggttgatctcggagctcaacttcggagcctgtcaagtgagattgtcgaccgattgcggagg

SEQ ID NO: 18753 - DNA, 582 bp, Emericella nidulans
ccgccgaggctcatgcttctctttggaactggacagtttgtatgctttctcgtcattaccatcttgctccgcttcgcgaaaccgatacagatacagattaagcatacggttctgcttcggttgccttctttttttaccatgttgcctttggaattggaatgctaggggtaccctggttgtatccgactggatcaactcattgcccatgaggacgaagggggcggctgttgcgacggcgacaaattggtacgttgttcacactagccctaattaccctgcagttggaaagttaccactctgcctcgcgaaaggataaccaacttcgccattgtcgagataacaccaatcggaattcagaatatctgctggcgtttttggattgtggggaccgtgctgaatgcagttttcttgccggttatatacttcctctacccggaaacaggttcgtgctttcagaactctcacaccagaccacacactacagctggtgtccatacttggcatgatatatttgggccttgttgcacagtactaacgaagtccagcaaaccgtaccctggaagatgtagactcgtactacag

SEQ ID NO: 18754 - DNA, 583 bp, Emericella nidulans
agccgcctggtatcggctcatcaacacatacaggcctggtaccatcgagctgacggggtcgatcgctactcagaccgttggcttcattctcccagcaacgctttacctgctgatcgacactctgtttccggagttctccaagcggcacaagatccagagtgcgggccgacaaccgactcgtccacagatcttgcactgtgtgaaagtgacattgttcaaccatgtgtgggtggtggcaatccacgctatgctggtctactgggctggcctggaccatgccatcatgaacctggatccgatcgtgccgccgtggagagagtttattgtggactttgtctttgcgctcttggcccgagaaatattattttactacatccatcgtacgctgcatcacccgcgaatctatgcctatatccataaaatgcaccacaaatatactacgcccgtgcgttcgcgggggagtatgcccatcctgtcgaacatgtcattgcaaacatcctaccgattacgctaccgttatatctcaaaggcgcccactacctgtccatcatcgcatttgtcagctttgagctctgggaggctg

SEQ ID NO: 18755 - DNA, 583 bp, Emericella nidulans
gccattgcagcggctttccttttctggaccctctcctcaaccacaacgtccccttttgcccgcacattcccgcagctctacaacaagcggatatgtctgctcatcgcgcaccccgacgacgaagcaatgttctttgcgccgacattgctggctttaacaaagccagagctagggaaccatatcaagattctgtgtttgagtagcggtatgctggtctccttcattctatggccttgattccgaaaccaattgatgggttgtgctgtaggggacgccgacggcctgggccacatccgacgcggcgaactccagaaaagcgcaaaacgcctaggcattcgcggagataacgacgtgctggttctcgatgacccacggttccaggatgggatggggaacagttgggcgaagaacgagatcgccgcgctacttactgcaacgtttgcgccgaacgcatcagcatccgcgtccaagtcgatgtcgcgcaaacaagcaaaatctagagacgaagcgcccaccgctacaatcgacgtcctcctgacctttgacgcccacggtgtatcgaaccacatcaaccaccgctcgc

SEQ ID NO: 18756 - DNA, 586 bp, Emericella nidulans
tcaggcttgcccctgggattcaaggctcgttggtcgtgctttgacactgtcaattctcttcaactataccgaattgtttgaatacttgttttcatgggctcctgatatcaaccaagagattgcgatccaccatctggacactgaggacgaagaggggttatttgtttcagggtatacggaagtggtaactccgctgcaagttgcatcaagagaccaacgggtatccgtggtacaaaaactgcttggacatccaaatattgatgtcaactacctgggcgcaggtccccggcgtcgcacagctcttcagcatgccgtcgggaatggaaacatggaattaatcaatctcttccttaaccgtggagccgacatcaacggccgtcctgcccgagatggtggagcaactgcactgcagatagcagcaattcaaggatatctcgggattgcccacaggctgattcatctgcatgccaatatcaacgccccccctgcaagaataaatggtagaacagccctggaaggagcagcagagtatggccggattgatatgctccagatgcttcttgatagtggcgcttcggtcactggg

SEQ ID NO: 18757 - DNA, 586 bp, Emericella nidulans
tgtccaacgccgccaacatcgcgagcgaggacaactccagggccgcgaaaaatggggtatcctagaaaagcacaaggtgcgtctttccttgcgtactttacttcctgcagacagtgtctgacttgtttcgttggttataggactactccctccgcgcgaaagactacaacatgaaaaaacaaaaaatcaagcggctcgaagaaaaagcacgcgatcgcaacccggacgaattcgcctttggcatgatgtcctcgcactcatcgacgaagggaaaacatggtacagggatgcgcgagtctgcgactgctcagggcctctcccatgaagcaatcaagttgcttaagacgcaggatgccgggtatcttcggacagtgggggagagagttagacggcagatcgagaaagtaaaggaggatttgaggattcaggaatctatgggggaggcgctaggagttcaggaggacactagacaggaggacgacggcgacgatttcgacgatttcgactttggggccgcggagaagaaagcgcggaagttgcttttcgcggacgatagggaagatcagaaggtcttgaagagggtttt

SEQ ID NO: 18758 - DNA, 586 bp, Emericella nidulans
cgttcctttccggcgatttgccagctccactggccgctgcgctcagtgtgagtgcattcccacgatattcgagacgatggttactccagaaagaggcggctattcgatcaagggcagagaattcatcgcatggtgaaccatggcagatttggagacatcaaatcggagaatggcgtttggctaggaatcatgctgaccgtattccagctaagcagtggggtgttgcccgtgcccgttggcctgttaagtccgccgagttcctcctcgaccttctgaagaacgccgaggccaacgccgacaccaagggcctcgacaccggcaacctcgttgtcaagcacatccaggtcaaccaggctcccaagggccgcagacgtacctaccgtgctcacggtcgtgtatgtttcaaaccgctgacttgtccccgcttgtcaacaagactaacaaatctagatcaacccttacatgaccaacccctgccacatcgagctcatcctgactgagggtgaggaggaggtcaagaaggctaccgtcgtcgagcgcacccgcctcagctcccggcagcgtggtgctcagatccgcaaggccc

SEQ ID NO: 18759 - DNA, 587 bp, Emericella nidulans
tgacggcgtgctcctcgttgatgttggcggcaacgtaggccaaaatctgctcgagtttcgccgcaagtggcccagcattcctggccgactcgttctccaagatctgccggaggtcactgaacaggcgaaatggcggaaccaagatatacaagaggacattgagctaatgaatcacgatttcttcaccgagcagcctgtcaaagtttactcctctccctcttttctctctcttctcctcctttcctcccatactactatcacacatcatttacaaaataggtgccagatcctactacatgcactccgtcctccacgattgggcggatgcggactgccgccgcatcctctccaacctcgtgtctgccatgatgcgtggctacagcaatatcttgatcaatgagaacgtgatcccgtccaccaacgcgaagagtttggtatcatcatcatggcagacttcgcgtcccaggagcggacggaaaagcagtgacatgcgcttgtcgagtcggttaggctgaagattgtgaagatttggacgaggagaaggggagtagagagtttgatcgagtgtgagcttgcttaggtagggc

SEQ ID NO: 18760 - DNA, 587 bp, Emericella nidulans
gtcttccagttttcaaaatcgttctctggaggagtatgtcgccactggtgtcaccccgaagaaacggaagtacgactatatttctgtcttgcctagcacggagtctcatgaggtcctcaagtctcgcctgagaacaacaaaggagatggaagtccttccaataaacagcgacgaccagttgtccggcccttccagctctcccggaggttctccgtcgaaaggcttcgtttacaatgacgtcgaggacgaggtaggaactcatgcaccaaccgtgaccaacgtcaacccttccaacactggacttagggaagtcgatgcaaacgtcgccgcaagaccgctcgtgtatagcacgggcgagaaatccacggaccaggatggttccccagttgtcagcccggatagcgcgacagaagcagaagggatgaacggaccaccatccaaaaggcgacgctcaaattcagttgttgctgatactaagttgccaaacaagatgctcgctaggaggatggctggcatgatggaggggagggaaaacgttccgcctcctggtatttccaatgggcgccgactgagggggcgaccttcgc

SEQ ID NO: 18761 - DNA, 588 bp, Emericella nidulans
tcccaccaagcaaccgctcaaaggtcaaatcctcagtacagcgcgctctgcgccaaaagctcgtcgaggctcacccacgatgcgaaccatatattgacgagatcctacctaagaaagcgcagctcgatgccgtgaaactgtacattgcttccctctccccaacgacccattcctccccttcctgatctgttgcaaaagaaggaagtaaagcaaactaactctctctgaactcaataggcccgacagagttactctctacacgattgattcaactccgctcttctaccaacctcttgatggcccacccatcccgcatctaaaactcctccaccagttcccggacatgctaccaacaatccaaatcgaccggggtgccatccgattcgtgctctcgggtgcggcgcttatggcgcctggtttgacgagcccaggtggaaggttgccggatgcagagcatgcgctagagcaggggactgttgttgcggttaaggcggagggtaaggaggaaatttgtatggttgggacgttgaaggttggaacggaggagatcaaggctaaggggaagggggttgcaattgatgatgggca

SEQ ID NO: 18762 - DNA, 588 bp, Emericella nidulans
cgttgtggcgaatgcgatccaaagccatgttgagcgtctcatcgccaactctacctttgccgcccacccttatgcccaaaaacagattggcgatgcctgcaacagtatcctcaatgaccggtttttcagcaccagcgaccaggtcgagaactgcatcaaaccatacaagtatgagattgaagttgaagatcccgagtggactaaagggcgggaaaatatcagcaaaacgctgaaagaggaactaagagcctgtgaagcggcattaaaaaatgtcgaagacagtgtcgggaaaagaaaactcaaagatgtcatctccttcatcgataaggttcggaaaggagaagttatccttgacggcgacggctctggcggtgcaggcggctttagcgcatctctcatagcacgaggtacgtccttctttacttcaaccttcgaccaaccactaacagatctccaggccgggaaggcgtcttcctccgcgaccgcgccgacatcctgaagatgcggcttcttgccatccggtccaagcaatgcgctaccaaaaataacaaatactactgtcccgaagtcttcctcgacgtcgtcgcg

SEQ ID NO: 18763 - DNA, 588 bp, Emericella nidulans
agtcgccgtacacatagtgagacaagcgaatgttactccgggtcaaaccgttgtagtctttggagctggtccagtgggtctattgtgctgtgcggtagccaaagctttcggtgcgatcagaatcatagccgttgatatccaaaagccaagattggattttgcaaaaaaattcgccgcaacagccacattcgagccgtcgaaggcccccgcgaccgaaaacgctacccgcatgattgcagagaatgaccttgggaggggtgctgatgtcgcgattgatgcttcgggtgttgagccgtcagttcacacgggtatccatgttctccgccccggtggcacctatgtacaaggtggcatgggtcggagtgagatgaatttccccatcatggcggcttgcactaaggaactgaatatcaagggaagcttccgatatggtagtggtgattataagctggcagtacaactcgtggcttctgggcagatcaacgtcaaggaactgattactggcattgtcaaatttgaagacgccgagcaagcttttaaggacgttaaaaccggaaaaggcattaaaacgcttattgctggccctgg

SEQ ID NO: 18764 - DNA, 588 bp, Emericella nidulans
ccaagggagcaccgcttccaaaagctacgagcacaggtacaacaattgttggctgtatattcgacaatggtgttgtggtgagtttgtttgggtaatggtggcatcatagttgatggggttgaccatcagcacagatcgccgcagataccagagcgacctctggccccatagtagcagacaaggtaagctagcgggctcatattttagtatagaagggattaattcaatattttcctttctacagaattgcgagaagttacactacatcgcacccaagatctggtgcgctggtgctggtacagctgctgataccgagttcaccaccgccctgatcagctccaacatcgaactacactctctgtcgaccggccggcccccacgagtgatcacttgcatgaccatgctaaagcaacaccttttccgctaccaggggtacattggtgcctacttggtcgttgctggtgtcgacccaaccgggtatcggcctctacactgttcacgcgcacggatcgacagacaagctcccctacgtgacaatgggatcaggatcgctagccgcaatgtctgtcttcgagtcgacgtggaagc

SEQ ID NO: 18765 - DNA, 589 bp, Emericella nidulans
agcgagtcggcgccttccattacgtcctcaacgaaggcgcagaggatctccgcgatacagtcgtcaacaacctttgccacctcatccgcggagagtactccatgggtcccacggcaggctgcaacatcgtcaagaaagtcctcacaagtcctgagctcacggcaaaatggcaccaggatctgaaggtcatgagttcgcggataatttccatgcgcgaagctctttacaatgaactagtcagactcaaaacccccggaacttggaaacacatcgtcgaacaggtaccttgcccaaaccgaaactatagcatcccaacggtctcaggtgctaacactctacgcagaacggaatgttctcctacacaggacttacaccttcacaagtctacgctcttaaagataaattccacatctacctgctcaagtccggcagagcctccatcagtggacgtaagtttagcaagttctcttggcacttcacaatgcctacctttttccgctatgcggtgcaaagctctgggtcaaactaacgatacttttgcttatagtgagcccgaagaatgtaaattacgtcgccagagctattgacg

SEQ ID NO: 18766 - DNA, 589 bp, Emericella nidulans
tcgacgagcagacgttgcttctaacatcgagttgaatagtgaaggcaagcttccgcttgctgtagtatctcttgcatttccgactatgccaattggacttcatatctttgaaccgcggtaccgtcttatgatccaaagagtcatggaaagcgggagtcgaaaatttggcatggtgatgcccaaccgaagaggccatcttcaacagggacttggaagggcaccgttcatgcggtatgggactatactggccatcaaccgccatgaactgctacctgatggaaggagcctccttattgctaccggaacatcccgctttaaagtgctcagttgggagctggtggatggctaccacgttggtaagatccagcgggttgacgatgtttcaatttccgaggaggaggcccaggaatcaagagagactgctactattgaaccaggaagcagcacttccgacaggtccatagattccatgtcaacccaggaactataccagttggcgctggattttgtgctcagagagcgcagactaggagcaccatggttacaccctcgtgttttgctagcttatggggcattaccgactgacccc

SEQ ID NO: 18767 - DNA, 590 bp, Emericella nidulans
tcagctcctcccgctcatgctagcaaccgtggtctcgtccgtgctaactggcattcttgttacgatcttcggctactatacgccttttctgattgctagtacagccattgcctccatcggtggaggcctaataacgctctactcgattgacatctcctcggggaagtggattgggtaccagatcctccttggagccggggtcggcgcagggttccaagtcccaatgacggccgttcagacctcgcttgcctccaagcccgacgatatcccgcagggtacagcggccgtgatgttctttcagacgttgggcggcgcactattcattgcggttgcgcagtcgcttttccagaacgggcttattgaaggggtagtcgagtatgcaccgtctgtggatccagcggcaatcgttgaagcgggcgctacggagatgagacatgtacttgagcagttggggcactcgatcagttggagaatgtgatattggcgttcttagacggattgagggacacctatcggctcagtttggcgttgtttctggcggcttttgtcgtatcttgtttctttgagtggagaagtgtcaaggaaggggg

SEQ ID NO: 18768 - DNA, 590 bp, Emericella nidulans
ccctctcggaggaggccttggtactctacgtcaaggcattgtctctacttgccaagtcgatggacattgcgggcgcctggtggatgcgcaaaaatcgagccgaagccctgggtgaatctagttttagtcgactggaacccgtctcgattcggatcaataaggttgtgcaatgggtccgcagccgattcaacgaggtgctcgaaaaggctgagtttgttcggctcaaattgcttgaagcgcagagacgactgccgacagatcatccatcccaccccaacaacctctcgctcgagtcagccggttcaggcacctcggtggacgtcatggtgagccctggtgtgacggctgagaagctgatgtacgatccgcggattagagatgagccgggcggcagcgatctactgagctcacgagtgaagatctccctggctgtgagattgcttatgtgactgccattaggatgctggaggctgttttggagacagacgaagtgcagcctgtcaggaagggcactgacaaggttacactggacggcgtgcaggttgaggagcgtgaggtcttgttgaagtgtaagtttgcggactttgatg

SEQ ID NO: 18769 - DNA, 590 bp, Emericella nidulans
accaccgcagccgccaaagccgcgctccgacggaaaaaggtgcacgagaagaacttagaacagacgcaggctcagattgtacagcttgagcagcagatatactctattgaagccgccaatattaaccacgagaccctggccgccatgaaggccgccggtgcagctatggagaagattcacaacggcatgaccgtcgaacaggtcgacgagacaatgtacgtcccttactgtaccgctggtgacatagcggaattggcatgctaacagactcagggacaaactgcgggaacaacaagccatcaacgacgaaatcgcgattgcaatcacaaacccggggttcggcgagcaggtggacgaagaagatctggaggcggaactcgagggcatggagcaggaggctatggacgagcgcatgctccacacaggcacagtaccagttgcagatcagctcaatcggctacctgcgccagcgaatgcagaacgtaaggctctccctttcccacctcaaaagcgaactccgactgacagccttccagccgccaaagcgaaacagaaagcagaagaagaagacgaggaagccgagttggaga

SEQ ID NO: 18770 - DNA, 591 bp, Emericella nidulans
cgccgaatattcaaggcaggagctaagacaagcacaggtgctgcacaacggagctaggttcagtacgccaccggccgatgacgggtttgcttccgggagtcttgattcggcaccatctgccaggtggccgtcacccgcacggagacaacacgcctcacgggcacgggtgttaaggtctcccagacagcgacgtagggcaaagaaccgcagcagtacagattcaagtttcgtcctgacggaacccctgagtgttttgaccaaagacatgacgcatgtccccctcaaagatatggagagccatgtaaacagaccaattgaggaacgccttgcagatacagccaagaacgacgggaaaatccctaggcccatgaattccttcatgctctaccgctcggcatacgctaatcgggttaaagagtatttcagacagcaaaaccaccaagttgtttcctcagcatcaggcgccagttggaacaaggaaacaccagagatccgggcaaagtatgagcgattagcagtgattgagaagaggaaccacctgaaggcatatcccgggtacaaattcactccggccaaagacaagaagaaacg

SEQ ID NO: 18771 - DNA, 591 bp, Emericella nidulans
gcgaccttggtgccgttccattcgtatgcgcatattcccaagtcgctgattgtgtacttatgcgaccaattgaaccgggagattgaaaagggcgacacttatgctatggtcgacccgatcccagtacggcattttgcgccgtactggttctcgaactttggcgcgatcatgctaattggggacatcaaaaatgtcaatgatgtccaggagatggacggcaatgtgaattgggccaaagtctgtcttgggagtttcaacgtcaggccaaactacccggggcgaagtagccatgtctgtaacggcatgtttcttgtcacggatgctgcgagaaataagggtgtaggtcggttaatgggagaggcctatctagattgggccgctcggctggtttgtgttatgtcgcccaaaaccgaagtgctgtgttgacaagccagggatacacatatgccgtcttcaacctcatctatgaaagcaatgttgcctcatgccgactttgggaaggtctcggcttcaagcggattggtagagtgcccaatgcaggccgagtgttgtcgagccctggagaatttgtcgacgccattatctacgggc

SEQ ID NO: 18772 - DNA, 592 bp, Emericella nidulans
caaagggctgtgtgatgtatttgttaatgctgggtttgcatttgcgggaaccgagttggttggccttgctgcagccgaaactgccaaccctcgcaagtctttaccgacggccatcaaacaggttttctggcggattacgctcttttacattgtttccctcacgctagtggggcttttgattccctataccgaaccccgacttatcaacggaacctccactgtcgacaccaaggcatccccatttgtgatcgccatcaaaaatgctgggatcgaagtgctagattccgtgatgaacgttgtcatcatgattgccgttttgtctgtcgggaactcagctgtgtatggctcttctcggactcttgctgcgcttgcagagcagcagcaagcccctcggttcctaggctatattgaccgtaagggccgacctttgtgggccatctgtattgcctcggcgatgggcttgctgggctttttagccgccactgacaagcaagaggtcgcttttgagtggatgatcgcgatatctggcctttcgtctatatttacctggggttccatttgtctagcccacatacgctttcgtcgcgcatgg

SEQ ID NO: 18773 - DNA, 592 bp, Emericella nidulans
gccgaagaggagaccgagcctcttgcctctaagggctataagtaccgccgcttcgatctctctctggagagcgatgaggagcctcttaacatgatcgtccgtactgaggttgacgccctggtcaagaaccccgtcaacggcgaggatcagcaattggtcgtcaaggctcttaacgagttcgacagcaaggcccagggctctggtggctccctggactggcgcacaagctctactctcagcgcggtacggtcgtcgctacagagatgaagaacaacagctgcaagcttgcccgctggacaacgcaagccattctcgcaaaggctgatggaatgaagcttggtttcgtgtctcgtgccaacccccgttcagccgccgctcacgtcgtcttgggtgttgcgggatacaagccccgcgaattcgctgctcagatgaacctcaatctcggcaacggttggggtatcgtgcgcacgatcgtcgatcgcatccgtgcccttgatgcggacgaggaggaggacaaggtcaccaagtacatcttggttaaggaccccaaccgtcctgtcctccgtctgtacagtgttcccgccaacgcgtt

SEQ ID NO: 18774 - DNA, 593 bp, Emericella nidulans
atctagtagcttattaggaagtctttatggcagagaatattcaaagcagatttaaagcaactaggatacttccttcaactcccaaggtagtgcttgaaaaattaaatattaacctgggtactccaaccccccctctaagctataggggtgcttcaatccctttatcacagcttggtacgccttatactgtgcgctatgtacattgaaaaggctctttagttaaaaagctgctttggagaaggtctaaaagtcctccaactcctaccaaaaaagtcctagatgagttagtgaaagggtgtgagttggtaatctataatgccagcttactagcaaaggaaaattgtgatctctgctcagctatagagaatgacaggcagaaaaaggctcattctaaatgccagatgtcccctatagaaggtcttttatttcaggaagccagagacctgattttgttgagaaataaggaaataggggcaagataggggggttctggtggaggtacgccccaatctttaggtataccaaaacatactccaccaacatattcagaatataatattcaggggcataagagaaccagctgtcctaaacat

SEQ ID NO: 18775 - DNA, 593 bp, Emericella nidulans
cgcagagtatcccccgctggtaccaatattggtaggaagcacctctaaagcgacagaagccgcctttggcgctttactcgctccatacctggaagacccaagtaatgcatttgttgtcagttcggacttttgtcactggggcctccgcttccgatacacatactacgttcctcaagcccccgtgccgggcccgagactgccgttatcctcatatgatttgccccagccagaagatgatgaaacggaaatcgaaagcaaaattgaggtcgcctgtgcgggctaccatctcaagcggcgggaccccatccggagaggcaagccgcttatccatgagagtatctcgtcatttgacattgcgaccatggccgccattgccacgggaaagactgagcgcttcaccgatattcttgaaaaaactgggaatacagtctgtggtcgtcacccaatcggtgttattatggctgccattgaagccgctggaaagcaggaaggaggaaagggcaagtttcactttgctcgttacgagcgcagctcggatattggggagattgtcgaagatagctcggtcagctacgtttcggcgtttgcagtgg

SEQ ID NO: 18776 - DNA, 594 bp, Emericella nidulans
ggacgcatcgctttctgtgtcgtatctgatttctctaccaacatgtacgggacgtattggggccacaggcatgtgtctcggtggacatctcgcgtacagatgtgcacttgatgaaagagttaaggcagctgtttgttattttgcaacggatattcattcgcataccctagggaaggggaagaatgacgacagtttggccagggcaggagacattaagggagaacttgttatggtatgcatgtttcgagtttctttgatgatgaacgtatggctaacgggcatcctgcggacagattttcggcaagaatgacacgcatgttcccccagaaggacgggacttgattcgctcgacgctccatgagaaaggcgtgctgtttagcttttatgaggttgcttgggcgcagcgtaagttgtgactatctgtcatccgccggtgcactatctcagaccaagctgacaccaacaacagacgcgtttatccgcgacgagctcagcaaaggccgctacgaccctgccatcagcaaggtgtgtttcgaaatgctcctcgagctatttggacggacactgaagctggaccttggcgatcatgatggg

SEQ ID NO: 18777 - DNA, 595 bp, Emericella nidulans
tcgatggcttgcgctctgctcgtttgaacggcttcatggaaggctttggtatcatctctcttcgcctgaaggagatgtatcagatgatcaccatgggaggaaatgccgagctagagctagtggactctcttgacccgttctcggagggtatcttgttctcagttatgccacccaagaagagctggaagaacattggtaacctgtctggtggcgagaagacactctccagtctggcactggtctttgctttacatcactacaagcccacgccgctgtacgttatggacgagatcgatgccgcgctagatttccggaacgtgagtacttacgatagttgtcttttctggtctcgactgactcccacatcaggtttctattgtggcgtcctacatcaaggagagaaccaagaatgcgcagttcgtggttatttcgctgcgaaacaacatggtaagtcccagccaggccattaccgtctgtccacggcctttgttgacttagtgcacttagttcgaacttgcatctcgcctcgttggtgtctacaaggtcaaccacatgaccaagagcgtgacaatcgaaaacaaagattatatcacgg

SEQ ID NO: 18778 - DNA, 595 bp, Emericella nidulans
cctggagggtcgcacagagcaggaggatgttatgctgcgggatgatgggcacggagccgaggatgcgttcttgatgctgcctgatctgaactgggatcgaaaaacgctgggatcgttgcatttgctggcgcttgtacatcggcgtgatttatggagcttgagagatctgaagaagaagcatgtcccctggctaaagtatttgaggaagagggtgcttgagggaaccgtgaaaatgtatccggacctggaagaagatcagttgaagctttacgtgcattgtaagtgaatctaattttttgtccgttttgattaccggcgagtgctgacatgctccagatcaaccgacctactatcatttccacatccatattgtcaatgtcatgcttgaggcaggcgctacgcaggctactggaaaggcattcggtctggagaatctcatttctcagcttgagactctctctggcggcgaagaggcgagcatggcagacgtcagcttgacctactatttgggcgaggcgagtgagctttggacggagatctatgcgcctttgaagcgcggggagaagctggcaggcaaataaacgtaaatattcct

SEQ ID NO: 18779 - DNA, 596 bp, Emericella nidulans
ccccgctggctgtcactgctacgcctgcttcgttctttggatacacccaggacgttattgcggagggagcacccgtccggggtgataacccattggagtactgttcagaaccctctggcgacattttagaaatcaattcggtggacttggcaccgaaccctcccaaggcgtgagtcactgatttctgattattgcagcgtctttacgctaactcccccaccatagtggtacaactctcaagatcagggcggcaggcaatctgcatgagcgaattgaagcgggcgcctatgtcgtcctggaagtcaaatacggattgatcaccctccttagggatacggccgacctgtgtgcgcagctcacaaatgttgacttgcaatgccctctcgaagaggggccaatggttttgaccaaggaggtcgacttgccgtcacaaattcctcgggtacgctcattatattctcaaagctttaagaatggctggctaactagcaatcgcgatatagggtcgttacactgtccatgccgatgtttacaccaaagacaacaagcgaatcacttgcttggatgctaaaaatatccagttctaagggatctga

SEQ ID NO: 18780 - DNA, 596 bp, Emericella nidulans
ggctcagcttgatcttgctgttgagattcaacttccactcttcctgcattcgcgggccgccagcgaagactttgagaggcttttgacacagaggctggagaagcttccgaagcgaggactcgttcatagctttacagggacaatggaggagatgcaaagactggtcgcacttggtctggacatcggggtcaacgggtgcagtctgaagacagaagaaaacttggaagtggtaaaggccattccattggagcgtattcagattgagacggatggtccttgggtgagaaagttcattgccatattttatctatggttactgattttttaaactttcagtgtgagatccgtccctcgcacgcctcgtcgaaattcttagatggggcaccccccttaccgaaggcagtcaagaaagaaaaatggcaaaagggatgcatggtcaaaggccgaaatgagcctgttgccatagctcaggttgcgcatgtcattgctggcgtcaagggaatcactgtggaagaggtttgcgaagcgtgggtcttctttcccatctactgatattttcactgctaatcctcactctcagtgcgtgggccaattcg

SEQ ID NO: 18781 - DNA, 596 bp, Emericella nidulans
cccggccgtttcgacaagatgctgtaccttggagtttctgatactcatgagaagcaagccaccatcctcgaagctttgacgagaaagtttgctctcgctccggacctctcgctcgcccgcgtctccgaacggttacctcttacatatactggtgccgatctctatgccctttgctccgatgccatgctcaaggcaatcacacgcaaagctacagcagtagatgaaaagattaagcaactcccaggcggtccggtcagcacagcgtacttcttcgaccatctttccactcctgatgatgttgccgtgatggtcaccgaggaagattttgtcgcggcgcagagcgagcttgttcctagcgtcaggtatgttccactgaaaacacacttttgccagtcagcactaacgattcctacagcgccaaagaattggagcacttcgaacgcatccgccaaatgttcgaatctaccgacaaggacaaacagaaacaggacgccaatccagcacccacgccgaacacaatcggcgacgcaattgaggccctcaaacttggacacgatataaatggctacatcggagaccctgtcacaaatggcggc

SEQ ID NO: 18782 - DNA, 597 bp, Emericella nidulans
tgctggatgctcaagcgcagaaccaagaccacatagacgagacattgcttgagcaaaagcggatcatcgttgtatgtactccagatattttctttatgactgttctgccctatcagctgtggaatgaacgacggtgccgtatcaagactattctaatgcggataaattagttacccggagccacggacacagcagcgtcgtttcagtttgagggtgaaggacatacattagggaatgcgctgcgtttcgcgattatgaagaagtatgttcctgctcgcactgcgccagtgcttctatctactttgaacttctttaaggagcttctcaggacgctggaaaggtcgcagtatgggaaagcattgtgctaatgggtgtttacaacagccccgaggtcgaattctgtggatacacgattccgcatgcttcggagtcaaagatgaacattcgaattcagacttacggtttgttcccctgaaattaccgtgtcggagtgatggcaaagactaactcagagacagactcaacaaccgcagttgaagccctagaaaaaggccttgacaccctgatggatctgtgtgatgttgtgacggataaatt

SEQ ID NO: 18783 - DNA, 598 bp, Emericella nidulans
tgggctctcgttccccgttggcttcaagaacggtacagatggctcgttagacgtcgcggttgatgcgattggatccgtaaaacaccctcatcacttcctgtccgtcaccaagcctggtgttgtcgccattgtcggtaccgttggcaatcctgattgctttgttatcctccgcggcggcaagaaagggccgaactacgatgctgctagcatcaccgaagcaaaggagaagctcatagctaagggtctggcaccccgtctgatggtcgactgcagccacggcaactcacaaaaggatcacaagaaccagcctaaggtggcagctgttcttgcggacgagattgctgcaggcgaaaccgcaatcatgggcgtcatgatagagagtaatatcaacgagggtagatacctccccaacctaatcctaaacctttttccgctaacattgaactctcaaaggcaaccaaaaggtcccacccgagggcaaggccggcctcaaatacggcgtcagtatcaccgacgcctgtatcaattgggaagacaccgagtcaacgctagagacccttgcaaaggctgttgcgactcggagagaaaagctcgcccc

SEQ ID NO: 18784 - DNA, 599 bp, Emericella nidulans
tgctggccgggctagctcctagcgaagacgtcacaggcggcgcatggttcactgacggcgtacttgacgagaactttattggcgtggtctccgggttcatcgagttctccgttagcaagaagagctggtacgaggtgcctgcgtcagataagtcgcggcacaagcgtttaaaaacagccgatggcagtgctgcaacgaccgttaagaaggaaggctcgcaaaaggaatacctaccgtatcccccgggatacacgggataccctacgatcgccatgctcacagccgccgtcaatcaaagtggtatcacgcccgtccgccttggcgaagaaagcgtcacccagctgctcgagatgctctgttacgacaacaagctcgtcgctctgaacaacggggagtactataagtctctcaaaaacccagaggaagtcaaagcgcgtcaagcccgcaaaccagacgaggagctcgccgcagcagacgaccggctcgtccgcaatggcatgactgaagttccttgtggcaattgcccggttttcaacctgtgtgtgcccgggggtgccgttagtcctgaaaactgcgagtactttgagacttggattcat

SEQ ID NO: 18785 - DNA, 599 bp, Emericella nidulans
gcagcgtcgccctcttgtacctgttcaccgaatcgctacctacgatctacgagtcgatgggcttcgcacagccagagtccaacctacctttcattgcgatgggcattggcttcttgcccagtatactgattcggctcatagatgggcgcatcgcagcgcagcggcaccgggacggactccctttgctaccagaaaacaagctggctgggatctgtcttggggcaccgttcctggcagttgggctctggtggttcgcatggatggtgcctcctactatacgcggggtacattggcttgtgacattgattccgctattcttcgtcggctttgcgctcaatgagtttgggaccgtgctcgcaggatatctcgcagacagctatcatagctatgcagcaagtgcgtttgctgcaatgtcccttgcacgttcattgctgtcgtcaatctttccacttgtggcgcctaagatgtttggtgcgctgggagcaaacattgccttgtcggttctggccgctggtgctatgatattctgccccgtgccattcatttttcggtattatggcgccagtcttcgccaaagaagcaagtttgcacagtatagt

SEQ ID NO: 18786 - DNA, 599 bp, Emericella nidulans
ggagagctgtacaagcacctacgcaaagagcaccgattccctgaatggaaggctgcgcattatatcgcgcagatggcatccgcattgaagtacctccacaagaaacatgtcatgcaccgtgacatcaaacccgagaatatcctggtagggattcacggagagatcaagatcagcgactttggctggagcgtccatgccccgaacaaccgtcggcaaacaatgtgcgggacactggattatttgcctcccgagatgctcacttcaaacccccagggcaacttctataatgagaaggtcgacttgtggagtttgggtgttctgacttatgagttcctggtcggagaggcgccattcgaagacactccggttatgacacaaaggaggattcagcgaggagatatgcaagttccttcttttgttagccccgaggctaaggatttaatcaaaagggtataccactgtcgtcattatatgcttttcattgggtgactaaccttccttagctgcttgtgcttgatcccgaaaaacgcatttcgcttgatgagatccagaggcatccctggattcttaaacactgcgtcaaagatgatcggaccatc

SEQ ID NO: 18787 - DNA, 599 bp, Emericella nidulans
ggcgagaagggcttgggagcaggtaagcaagaggcacaggatcatctgatgtaagagccaagctgatgtagtactgcgtttctaaacagaggcgtgctcttatggtctcgcggatggcgaggacatgatgatgagcaactggaacggaaccgtccttggcccccctcacgtatgccgcataccaatttatgtcccatgcttggaggtctagtgtactaaactggcaccacacgactatagagcgtccacgaaaacaggatatacagtcttaacattcattgcggtcccgagtatcccgatcaacctccgactctacaattcatctcgcgcgtcaacctcccttgtgtcgatgcacactctggcaaggtccgaaatccccaaagccgaagcaatagcactcgacgaagctaacggctcctaggttgacccctccaagctgccctgtcttgcccagtggaagcgcgattatactatggagacagttttgattgaacttcgaaggtaagctcccggtagtcctagaccttggcggcggtatcttaaacatccaggtacatggctttaccgcaacataaaaagcttcctcagcctcctgaggg

SEQ ID NO: 18788 - DNA, 599 bp, Emericella nidulans
tccgctcgcgctaccttttttgtcctcggcgatgcagcggcgcagaacccaggccttctgcaacgcatgcgcgacgaaggacatcaagtcggcgcacatacgtacgcccacccaccaagcttatccagttaaccgtctttgttacacgtccgcttatcaatcttgtctctagatacgaccacgtctccctcccctcgctgggttacgacggaatcgcctcccagatgacccgcctggaggaggtcatccgtccagcgctcggggtagcgcccgcgtacatgcggccgccgtacctcgagactaatgagcttgtgctccaggtgatgcgcgacctcgattaccgtgtcatctcggcaagcgtcgacacaaaggactatgagaaccaggatgcagacgcaatcatcaatacgagctttcagctgtttttagaccaactggatgctggtggaaacattgtgctggctcatgatattcattattggactgttgcgagtcttgcagagaggatgttgcaggaggttaatgctcgagggttgataggtaagttgtgtctgtcttcgaaatgaacgggtagtgtttgctgatacgaaactcgcagc

SEQ ID NO: 18789 - DNA, 600 bp, Emericella nidulans
gcgcgtcctgcgacaattcagcttcggcaatgccttcttcgagcagccgttggaggaaaaaagagtctttccatgcaactttgccctgggggagtactttggataccgcgagaatgagcggtggattggtgatacgggggttaaggataatatcgagatggtatttttctccagaaagctgagacaaccggaatagggctgatatccttctgtccagctgaacatccctaaggcaatccccgagtgggatcatctgccgcgtcatcgcatcgtgcgcgagaactatgaagagattgccagcttccatcgcgaactattcgacaaggtagcgcgtaaactctttgtcctcatgtccatcattctggacctaccagagaactttctcgccaacgcgcatgcatatgacaagcgctcggacgaccatctacggtatatgatttacaatgtcagaagccaggaagaatgggaccgcgcccaggtgtacacgaagggcggacacactgattttggaagccttacactgctcttctcgcaacaagtggctggtctacagatcaggacgcccgaaggtaaatggaaatgggtgaagcccgtggaagg

SEQ ID NO: 18790 - DNA, 600 bp, Emericella nidulans
gccaccacaccatatttgacgagattctggagcatgacgagaaccgcgacgaagaccgtgacaaggaagaaaaacgcgccaagctcactctcaccgaatgtttgatcgcaatcgccatagccctaacttttgtctgcatgtcggccgtcttcctcgtcaacgaaatcgagcatattgttctcgagcaaggcgtgccggacaacttcatgggtctcatcctcgtgccagtcgtcgagaaagcagcagagcacctcaccgctattgacgaagcttggtaaacaacctatcctctagccgttcaagccatgaaacttactaacttgtgcatttactcagggataatcaaatcaactttgccctcttccactgtcttggaccatcaatccagacggccctcttaaacgcgcctctggccgtgatcgttggctggggtctcaacaaagacgtaagcctgaattatgaaatattcatgatcgtccttgtggtcctggcaattcttgttgtcggcaatttcctacgcgatgggaggtcgaattatctcgagggcggtctttgtgtcctggtatacatcattatcgccgttaccacgtggtactatcc

SEQ ID NO: 18791 - DNA, 601 bp, Emericella nidulans
cttattacctcagtctcatctctactcgcctcgttctcgtgcagactaaacgtcacgtcccatccataaaaatgaagttcatcggccttgccaccctctccctctttgcgctcgccagcgccgacaagttccccgtccccgacagcatcaccgtcgccgaaggaagctctaagtgtggtgaccaagcccagctgtcctgctgcaacgacgtcaagtacggcggagacactaccgttgtacaaaagggtatcgccgctgggctgctgagtgacctgctcggtgccggctctgccgccgaaggcctcggtgctttcagcggttgctcgaagcttgatatctctcgtacgttttcctatttccttgagttttggttttcggttattttcttcgggttgcgtgcagggtgctaatgacgactacagtacttatcggcatcgaagatatcctgaaccagaagtgcaagcagaacattgcttgctgtgcgaagagtggcggcagtgcggtatgttcacattgaccctataactctaaagattagaagacggtgctgatgatctcttaggacggcgacctcgtgggcgtacgctcccctgcattgccc

SEQ ID NO: 18792 - DNA, 601 bp, Emericella nidulans
accatgtgcgcagcacccaccgcaaggcgccgaaaagcgagaacgtctacttgcaggttctcgtgaagctctaccgcttccttgcccgtatgattcgaccttccaattcgcgaaatttcgattataggacttaattattaactactaacttcaggccgcacggaatcgaacttcaacaaggttgtgctgcgccgccttttcatgtcccgtatcaaccgtccccctgtgtcgctgtcccgcatcgcctcgaacgttaccgaatctcaccagggcaagaccatcgttgttatcggaactgttaccgatgataaccgtctccttactgttcccaagctttccgtggccgctctgcgctttaccgcgacggccagagcccgtatcgagaaggctggtggtgagactctcaccctggaccagctagctttgcgggcgccaactggagccaacactcttcttctccgtggtcctaagaacgccagagaagcggtgaagcactttggcttcggaccccacaagcacaaggtttgtatcgtcttatgttcagtttctgcaggtttggggctgaccttgtttagaaaccgtatgtgcgaagcaagggtcg

SEQ ID NO: 18793 - DNA, 602 bp, Emericella nidulans
agtagaagaaggactcaatcatcttccggttgttgaaaactccgtcactactcctgttggtcggtcatatcttggcgttaagtttgaggggaaaatttgcggcgtttcaatcatgcgagcaggagaggctatggaacagggattgagagattgttgtcgctctgtccgaataggaaagatcctcatccaaagggacgaagaaacttgcatgccgaaactcttctacgaaaaactacctactgacatttcaaatcgatgggtccttcttctcgatccaatgttcgcgacaggtgcgtgtcattcttcggcaccgcggtatgaaacataactaaaggaaacagggggatctgcaacgctcgctgttgagactctaaaggccaaaggtgtgcctgaggaacgcatacttttccttaacctcattgcaagtccttcgggtgttgcagatttcgcgcaacggtttcccaagctcagggttgtgaccgcctttatcgaccaaggtctggatgaaaagaagtaagcgcccagtaatgacagtgaagatcgccccaatgctgagatttttcaataggtatataattcctggcctcggggactttggcgac

SEQ ID NO: 18794 - DNA, 602 bp, Emericella nidulans
cgcgccacccctccatactgaccaagctaacaatcacccagatggagaagcagttcgccgtcaagggttcgtgacgttcccttcactttcgcttacattcgacaatccatcactcaccatctcgcagccgtggagcacctgatgacatactggtccatccttgaaaaagtccccggatcccagctgcgcctgacgaaaatcgacgacgagatttacgagcacttcaaggcggaattccccgatttcgacccggccgagacgattgatgaggacaagatgaagagcaaggagggcaaggagaagtggcgtaactggatcaaccagtacgagaagaagattcacgacttcaacttcggcacaatgctgcgggcgaacccaaagaccgaatacgaaagggacaatacgatttttggtgagtcttccgaggctctggagttactgaatatggattgggatgtttggctgactgggtttttgcttctagcgatgaggatgcagttctatgctattgagattgcgaggtaaggcgtctcgctatgcattaagtcggctgcttgctaatctcgtttgcctcatagaaatcgcgctggtctcaacgattg

SEQ ID NO: 18795 - DNA, 602 bp, Emericella nidulans
caggctctggcggagcaagcggaaattacaacgtatcccaaggcttctatcattatgatcactcggaagcaatcctgcggaagatggcagactatgccttcatgcttcgtgactggaagttggctgcatcaacatatgagctcttgcgttcagactatgccaatgataaagcttggaaataccatgccggcgcctacgaaatgtgcgcagtcagcacactactaaaccctcttggggcgggttcaaagataaaagtcgagagcattgaccaaatgtttgacactgcctgctattcttatttgactcgatgttcggacgcccctatcacgttacgttgccttacacttgccgttgaattactgaaatcgcggggtggctccgcggccgaaagcgcagccaaatgggccatgcgggccatggaccttggcttggtggagtctgtcggccagggcctcctaagcgaaagaatctcctcatgctacgcttcaagagcacctcctaatgggttacgattcggcggccgccgtcgcaaggctggtatgtggagtcttttcgctgcggatatgtggctcaagcttggaaagccatcactagcctcagcc

SEQ ID NO: 18796 - DNA, 602 bp, Emericella nidulans
ccgcaacacccgtatgctttcagcaactgctttcagagccgaaacgtccgttaagcccagcagcagcgttgctgacgctccgaccactcctctttccgagagcacactgatccagaaggagactcccgcagaggcaatgactcgtcatcagcctgattatgacgcgacggtcgatcatggcacctcgtacgaaggcccctatactttacgtggagtttgactgacccattcaaagcaaattttctcctgtgcctaagcgtgtcatggatggaagcgagcctggcgagacggttcctgctgctgttctctctggtgcccccaccgaccttcaggcgcgcactgtcaggtatgaaattggttccagaaggattttgatataacagctaacaacatcattcagaatcttccggccttcgaagcccgctacgcagtctggagagtggcacagccaccactggaggatggattgggacattttacagaagggccaccgatgggagaaccctttgatgggttggcaatcttccgctgatgccatgcagggcacgcacctgaacttcaagaccaaggaagatgccattttattcgcgcagaagcagggc

SEQ ID NO: 18797 - DNA, 603 bp, Emericella nidulans
ggggctccgcagacggactttccctcctttttctcgtcgtgtggctcgcaggcgatgtcttcaacatcctgggttcagtgctgcagggtgttctgccgacgatgataatcctggcggtctattacaccctcgccgatgtcgtgctactagcgcaatgcctctactatcgcggatttacgttcaaggacgacgcctctacagcatttacgccagaagagccagatgaaatcgagacgccgtccccggtcatcgcgagaaaaccgaccgagcgcacatctctcctacccactctcgaaacccaaaattatgacgctggaactagcgcagctccctctcaccaagatgacaacgccgcctcggctcccctcctcgcaccaagtcacgcccgacaccgcagacactctatcgacgggacgcacctctcccccgcaacccccttcgtcgagccctcagcatctggcaaaagaaaaaccacctcaaccctgcaaaccgtcctgttcaatctgtgcgccgtggcgcttgtctgcgtagccggaatactaggttggtacgtgagcctctctacgccagcaacgcctggtaaacacacaacgcaccgccacc

SEQ ID NO: 18798 - DNA, 603 bp, Emericella nidulans
tgcaacaaaacagacactctttttatcctcgtctgttctgttttctgctggctcatcattccagcggtcggcctcgcctactctggctactcaactcgtttcaacagccttgcctcgttctaccccggtcttcttgctgtcgctgtctgttcggtacaatggtggatgatcggatactccctagcatacagcgagggcaatgcattcatcggcgggctctcgaaagcattccacattggcgtcctcgctgaacccattggcaccatccctgagatcctcttctcggagtttcagctcatcttctgtgcgaccgtctgcgctatcgccattggtggtgcttgcgaacgtggccgtcttctccctctcatcccatttatcttcgtcagttgcgcaccctttctatataaaacactgctaactgccccagctctggagcaccttcatctacgcccccttagcgcacatggtttggtcagacaacggcttcctcgcacaactcggcgctctcgacttcgccggcggcaccccggtgcacatctgcagcggcgccactgcaacagcaatgagtatctacctctcctaccccttattccgctcgcggcg

SEQ ID NO: 18799 - DNA, 603 bp, Emericella nidulans
aacgtcgccatagctatatacacgactctcttccatgcgtctggggttatctctgttttgtcgtatataagagaacaacatcagattcatggaacagcaaacatcccgtcgttaccaaaggagagtcctgcgtcctacggtggaatcaccacgggcttcctcatgccctgtcatagcaccccatggcgttcgcacctcgtagagcccactattcacgcttgggccctctcctgcgaaccgcctgtgggcttaactgcagaggagaaagcagcctaccgcgacgaagcagatcaattctatgacaacccaactcagttccttcaggacaatatggttggcggtctgcgacacatcccccgaagaccctcctatgcgacccctccgagttcccaacgacaacctacccaactctttccgcctcatgaatggccggactacctcgtcttcttcgcgcaactcgaacctacactgaaagacgccctccgaggctcctcgtatggtgaatgctggcgtaccttcaactcagcttggcacgacgactcgcgtcgtcgcggggatgtggtagtctggtgtcttgaccatgcgaaacagcaggcctggcag

SEQ ID NO: 18800 - DNA, 604 bp, Emericella nidulans
tcttgccaacaagccacccatggcctcgtcaaaacaagctgttgtctgtgtcttgtaagttcaagccccttcccatttcttcccttagcgatatttgggctcatcacttacacgctccccagctgcggggcaacatctggcaaagatgctgcccacctcgaagccgcgcgagcgctggcgtatgaatttcacaagaacaatgtccagcttgtctacggtggtggaacgacaggactcatgggcgaggtcgcaaagacacttgtgcgcctctcagggccaaaatctgttcacggggtgattccccgtgcgctcgtgcaggtgtcagggaagcgtgagggggcggaagtgaacgggggcgccaaagctgctgagcgtgtcctcgctgcgggaactcacattgacgagaaggattgtattcccgagagcgagtacggggtcacgacgatcgtgcccgatatgcatacgcgtaagaggctcatggcgacaaaggtcatggaggggggacccgggtcgggatttgtttcactcgcgggtgggtttggtactatcgaagagctgatggagatgacgacgtggaatcagttggggatccatcatgtgggtg

SEQ ID NO: 18801 - DNA, 604 bp, Emericella nidulans
ccgcaagttcctgcggctgaggtacccgcgaacacagaagaacaggcaacgccagcaccagaacaggggcaagcagcggagaagaaagaggaaggagaggaggaaaagaaaccctccaaacccacgggcccggcatctgcatacatcgctcccagcgattattccggccgaacactcccgccatccatcccgcaaaccctcgatggctccgccgctatccccttcccccatcttctaggcttcctcaatacccctatccgaatctaccgcttcttgaacaggcgctacgtcgccgactctgtcggccgggacgtcgcagaccttgtccttgcttctcacgcccgcccgtacgctgagggtcctgcttcatccagctcagactcagacagcccagttgaccccagcttgtcgtcgtcgataacatacgagcaacaatcccaactcgagcacgaagagcacgactggcacaaatccgtccataaaactgacgactcgaacccagacaaggagcgcgagtggctaaacgatgtcgttatggatccccgcattgcggcccgaatgcagcggtatgttctctccggggaagaggaggctcgtgcccagc

SEQ ID NO: 18802 - DNA, 604 bp, Emericella nidulans
cgcatccgccggagaaacagtcgtatgagtatgcgcagcgcggtgggatgattgttgcgaatacggaggtgaagattattcataccgagactggcaaagaggttggccctgaagaggagggagaaatccttgcgcgcggaccgcagatcgtcatgggatacctaaataatgagaaggctacgcgggagacgtttgatgaggacgggtggttgcacaccggggatgtgggatacatggatcgcgaggggttcatcgtgatcaccgatcgaatcaaggagatgatcaaggttaagggaattgcggtctcaccggctgagattgaagatctgctcctgggtcatccagacgttgaggacgtgggcgttacttcggtagcggatgactatgcgggagagaggccgaaggcgtatgttgtgctcaagggagacgctaagaggcgactgggaagtgaagagggtgtacaggctgttgggaaacagctgattgaatatgtcaaggcgaagaaggtgcgccataagtggattgtcgaggtcgagttcctggaagaggttccaaagagcgccagtggtaagattctgaggagggtgctgcgcgaccgagagag

SEQ ID NO: 18803 - DNA, 605 bp, Emericella nidulans
gcgtcggtgcactgccctttctctcgattggggtcggagtcgttcttgggtcagcatatattttctactttacccgcacccggatccgtcagacattcgtgtcgacggggcgaattagaccagaagaccgtctgtacccgatgatccctggagcgttcttgctcccgctcggccagttctggttcgcgtggacgtcttttccatccatctctccatggccgcagattctggcgggtgtgccgattggcgcggggattcagattatctatctccaggggctggcatatctcgttgatgtttaccttgtgaatgcgaactctgccatttcggcgaacgcgatcgtgaggtatgttctcctagcactagcatatcatgaggagaagagaaggctgataggaagcagatcaactgtggcggcgggattcactatgtttgcgacgcccatgtaccatcgactaggtgtaggttatctacaatggcatctctcccccagtacgttaatgaggtactgtaggtccgttgcgcgtcctcgctgctaggcttcctaggcgtggccttcattccaatcccgattgttttctacatctacggcgagagggtccgca

SEQ ID NO: 18804 - DNA, 605 bp, Emericella nidulans
tggagcagtgagtgggcacgaactctctcacggtaagctcaggccttctatccaatgaaatatgtaggaacttacgcatatatcaaagccttcgattctacgggacgtcattacgacgagacagggaactacacggattggtgggatgagaaaacagtgaaggcatttgaggaccgcgcacaatgcttcatcgaccagtactcgaatttcacagtccatggcaaggactctgagcttcacgtcaatggtcgcttgactcttggtgagaacatcgcggatgcagggggattgacagcggcctatcacgcctggaagaagcgcgacgaggcacatgctgaccccattctacctgggctttcatcgttcagcaaagagcaggttttcttcatctcttacgcaaattggtggtgcagcaaaacgacccctgagaaggcccaagaggctatatataatgaccctcatgcgcctaagccagcgagaattattgtaagtcgaatccgtaccctgggcactgcagttgtaatgggactgaccctaggcttgatagggtaccatggcgaattccctagaattcaaagaggcattcaattgccccaacaagcagc

SEQ ID NO: 18805 - DNA, 607 bp, Emericella nidulans
agaaaagctgtacgttttctagccacgaattcgataatatcctaactatcgcaggaatggaacgcctcggaggacaaggtcccccaggatgtcatttcctggctgttcaaggcaagtgacgagaaggatcagtcggctccgcaggagagcaggccctgaacgaggatggccaactgctcatcatcaccggcagtacggttcattctgactcctctgcggaatcataatgactctacctggcagcgacaccacgagcggacgtttggcaaacgcattctactacctggctaagcatccagccgtgtataaaaagctacaggcagaactcgataatgctttttcaagcgggaagcagtcccctaagattaacaacgaaaccctacgcaaactaccatacctcgaagccattatcaatgaaactctgcgtttgaagccggccgttcctagcggccaacccaggcagacaccaccgcaagagcttcagattgacgaggtatggatgccaggcgataccatcatcatcgttccccagtacgtgatccagcgcgacgatcggtacttcccctcaggagacgaattcattccagagcgttggttagatgagaag

SEQ ID NO: 18806 - DNA, 607 bp, Emericella nidulans
ggacgccaccttgaaccttggaagcatatgcttatccacgatatgaaacggaaaatgtttactactgcctagattattgatactactgagtgcagtgaacgtactattaggattattcgtacaaacctacgcttattctgtagcgaaagcccaccactgaaccgtggaggtcgaccacgaagtataactccgctgatgctgagatctccgcaatcacctcacaaaagtccggtctatatctggaagagatggcagtctgcctatatgacgaattcggtatctcagtgtcgccttcagcataaaacggaccctttcctccgaaggttggacgccaaagaaggcccagcaaaaagcaatagaatagaagcctgatctacgagattctatttccgtaagctgtctagtttggttcataccaaccttttcacgttgatgagtctggatgtgataagcgaataggtatttgaaggacaggttggtctccactgggaatggcaccagtccaagaagtggccaaattctatcgtggccaacgttatcagatattacttgcctgcacccaagacggtatacttctttctcatgtcttcactgcctcaacggatgc

SEQ ID NO: 18807 - DNA, 607 bp, Emericella nidulans
tccctggcactgctccacccacagaaattgccgcccagaacaaatccaccgcccgcagggcctgtcccgcgcgaccgaacatactcgtaccacttctctgagcagcccgcacatatcgtcccgggtgggagcgtcaagatcgtggaccccaaaaacttccccgcggccagtaacttcgctgcagcagtggtgaccgttaagcccggtgcaatgcgagagattcactggcacccaacaagcgacgagtggagtttctttatcaggggccagggccgggcgacgcttattgaagcaccatcgacggcgacgacgtttgacttccatgctggtgatgtgggatactttcctatgtcgcatagccactatatcgagaatacaggggaagaggatctggtcttgcttgaggtgttgcaagctgaccactttagtggtatgtgcatttttccgtctgcaagtaagctttgacgctaactgggtatagatatcgctttaggccagtggctcggctcaacggataagcagatagtcggtgatacgctgcgtttgcctgaggatgcgctcaatcaattgaagtcagaaaagcagtatgttgttgctgcaccgagca

SEQ ID NO: 18808 - DNA, 607 bp, Emericella nidulans
gagatgcgcgcttcggacaatctaccaaccgcggttgactttacgaaccatctcgtcaattatatcgaacttagtgccgacgatgtaaatcgttcaaggagagagagtgacaaatccgcaccctcaggggtccaccctccgcaggtacttcccgaagaagttgcggatgggaaggtcgaaactgctgttgatgacgagaagccagaaaaagaagaggagccggaggaaattcctatcggtgacttccgtggagtcgtccctcagtttctgctcgaccttgataaagacgaggagagcccgtgctatcagcaagcagtcaatatcatcggtgacgcgccaacaccaccgagccttccgcttttccttggaaagtctatcctcaacggcactacgccgatgaaggatgatagcagtcttctcaataaccctaatcatactgtactaaaccaccttgctacaagcagcataaagaatggtgtcctagctaccagcgtgacgaccaggtacaaacgaaaggtaagaatcatacaacatcctggtccgaactagtttactaaataggctgctctagtatgttacaaccattttatacaagccaacagggaat

SEQ ID NO: 18809 - DNA, 608 bp, Emericella nidulans
ccagaatctgctctcgccaccatcttcagaaatgcacataaacgcctactgtcgaaacaagcccaaactcttaaacctcttgcccgaactcaacgacacgaaaaatgtgactatctttgaaggctccatcaccgacttatccctcatcaccgcatgcatacgcaacacacgtgcggtcttcttgaccgtcacttcaaacgacaatattcccggttgccgactgagtcaggactcggtgcagacggttctcgaggcactcaagcagattcgtacagcggaaccgaatgcagttgtgccgaaactggtccttctctcctccgcgacgatagatccgcacctaagccgcaaaatgccctcgtggttcttaccgattatgaaaacagctgcgagtaacgtctacgccgacctgatcaaggcagaggagatgctgcgagcgaacgagtcctgggtcacaagcattttcatcaagcctgccggcttgagcgtcgacattcagcgtggtcacaaactcgactttgacgagcaggagtcgttcatctcgtacctggatctggcggctgccatgcttgaggcggcaaatgatacagatgggaggtatgatgggagga

SEQ ID NO: 18810 - DNA, 609 bp, Emericella nidulans
ccgggtttcgatcgattctccttcgtccctttcctacgaaagagctatggcttcggcctcgtcaccgacgttcccgtatgcaaagcctacagcgaaggccactgcccattgggccctgcttgtccagaccgacatccgacaccgtcgcgagtaaccacatccacgaccacggcctccggtttggcgccttcaaccacacatgggtcacttgtctgcaagcacttcctcaaaggcctctgcaaaaagggcatgaagtgtgaatatctccacgaatacaatctccggcgcatgcagaatgccaatccttctcccggtctgggtattgtcctaatggggacgactgcctgtaccagcatgtccgggagcaggcgcgccttcctccgtgcgagcattacgaccagggattctgtccactgggcccgttgtgcgcgaaacggcatgttcgtcgtcgcctctgcccatactatgttgctggattttgtcctgaagggccaaactgtgcgaacgcccatcctcggtggtcggagaatctacccaagccaacaatacgagtagagaagacggaagaagaattggagcatgaaagaaacctgatccgcgaagagcagg

SEQ ID NO: 18811 - DNA, 609 bp, Emericella nidulans
accaccgcagccgccaaagccgcgctccgacggaaaaaggtgcacgagaagaacttagaacagacgcaggctcagattgtacagcttgagcagcagatatactctattgaagccgccaatattaaccacgagaccctggccgccatgaaggccgccggtgcagctatggagaagattcacaacggcatgaccgtcgaacaggtcgacgagacaatgtacgtcccttactgtaccgctggtgacatagcggaattggcatgctaacagactcagggacaaactgcgggaacaacaagccatcaacgacgaaatcgcgattgcaatcacaaacccggggttcggcgagcaggtggacgaagaagatctggaggcggaactcgagggcatggagcaggaggctatggacgagcgcatgctccacacaggcacagtaccagttgcagatcagctcaatcggctacctgcgccagcgaatgcagaacgtaaggctctccctttcccacctcaaaagcgaactccgactgacagccttccagccgccaaagcgaaacagaaagcagaagaagaagacgaggaagccgagttggagaagttacgcgcggaaatggc

SEQ ID NO: 18812 - DNA, 609 bp, Emericella nidulans
cgctccgggtctgcaggtgtgtcaacaacagcagttagaaaaagcgagtcaagtaaaactaacggctatgtgtatggcataggaattataacttccatcctaaccaaccctatctgggtcatcaaaacccgcatgctcgccaccggctccatgtcgcccggcgcgtatacctccttcacagcaggcgcaatgcagatacttcgctcagagggagttcctggcttctaccgcggactggttccgtcactcttcggcgtcagtcacggcgcactgcagttcatggcttatgagaaactaaaatttcatcgagcgaacgcacattccgggggtctgcaaagaaaagagctcagcaatatggatttcttcatcatttcaagcgtctcaaaaatttttgccggctcaataacgtacccgtatcaggtgctccggtcgcggctacagacgtatgatgcttatctcgcataccggggacttcaggacgcaattgtaaagatctgggctacagagggcttgggagggttttataagggtctcgggccaaacttgtttcgtgttttgccaagcacctgggtcactttcttgatgtatgagaataccagggcatatcta

SEQ ID NO: 18813 - DNA, 610 bp, Emericella nidulans
cgccaactatcgcgaggatgctagttgcgtatctagtggtcacagctcccagatgtcgtccagcaacagcgaagactccgacttcccttcgagtacagatattagccaattgtcacttgagtcgccgacgaacaaagctgccaagctgcccaaaaaagagtcacgcacccccttcacccgctctaagacggttgttgattccccaatggacatacaaatggccgagccgtcgcccatctcaatagcgtctctttctctgtcgcctcgccgcacctcagcaacgtactctggaaagaatatattcgccgaaggggaacgaaagcgtcccaagttcgagcccaccctggcgtactcggacgacgaggacgacacaccggagcttccatcgcccactcgaccaaaggtcaagcccgatcctttcaaagctccctcgcgcccacttctacgacaaaacacgactgcattaatgcagaagctaagcacccaacctcccatcttcccggccaatccttcaagactccctcagatgtcggcgcctgatgtgagggaatcaaagtcacggtccccccaccgacggttgtctaagatcccatcgtccgccaacctcgct

SEQ ID NO: 18814 - DNA, 610 bp, Emericella nidulans
ggcacgctgtggtgggctcagccgaacgttcctccccctgtccttcagaatcggcaggatatcctccttgagttcgaagagtctagctcttcgaagcgaggcgggaagactacgatcaccaaggacgtgtacgtcctattccgtgattactcccagactgtgatttctgtgagttttgatgcccgcaacccagcggacgcagtgctggaacaacgtcatgagcagcctcctctacctcctcgccaggatcagcttgagaatgcccatgtccaagtcggtactcgtgtttctgagggcgttacggctattcagaacaccactgtagctgatggtacgccgttcggacttgttaagcacttattagaccccttgtcagacgcacttcgccctgtcggtaaccgtgcgtacggtgctttggtttactccaatatggccaatgcttccgtgcagcaacatgacgagatccgccccggcgatatcgtaagcttccgcaatgcacgcttccaaggccaccgcggtacaatgcatcaaaagtacagtgctgaggttggcaaacccgaccacgttggcgtcgttgttgactgggatggaaagaagaagaagattcgtg

SEQ ID NO: 18815 - DNA, 611 bp, Emericella nidulans
ctggcgggacacgagaacccccagttgttgctggtatcaagtctgttcttgttggctgaacatccggtgcgctttgtattctctatacaactgtgcttttaatgggctaacaactggtaggagatgcaggaaagcctacgcgcggagatctccgccctcaacgacctggaaccggcttacaacgctttatctgccttgcccctccttacatccacaatctacgaagtcctccgcctgtacccaccaatcagccagctgattaaccgccgcacaacggctcccaccctcctcgggggagagatccccattccagcaggcacatacgtcggctacaacgcgtatgctacaaaccgggatataggcttctggggtccagacgccaacgagttcaagccaagccggtggggaaataccatggaagaaataaatgcactatttagaagggcgaacgcaaagggcgcgtttattagctttcacggcgggcggcgcacttgcttaggacagaggttcgccttgcttgaggggcgagtgacacttgcgaaattgctaatgtgtgttcgatgggagattgatcctagctggcagagggggatgacaccagccgggccgtt

SEQ ID NO: 18816 - DNA, 611 bp, Emericella nidulans
gctgtgcaaggcttcgatatctcccactatcaggaaactgtcgactaccagggtgcctacgactctggagcgcgcttcgtcatgatcaaggtcttttccctattacccgggatttctaggttgttcatttgactaacgaagccaggctaccgagggaacaagctacactgatcccaagttcagcacgcactactcgggcgccacgtccgcaggtctaatccgcggcggataccacttcgcgcaaccaggctcgtcctccggagccgaccaggcatcttacttcatcgagcacggcggtggatggtccggcgacggacaaacgctccctggcatgctggaccttgaagccggctgttacggcctttcaacttcggccatgtcctcctggatcaaggatttcggcgagacttacaaggccgccacgggccggtaccccatgatctacacgactactagctggtggcaggagtgcacgggcaatgacagcggtttcggcgagtacccgcttgttgtggcgcgctggggaagcagtgttggtactctgccagcgagctggagtactcattccttctggcagaatgctgacacttatgagtttggcggggactcgg

SEQ ID NO: 18817 - DNA, 611 bp, Emericella nidulans
gatcgaaccaaaggccgacccgcgtgtgcttgcgtcagagccggactcggaacctgacgccatcaacatcagcggtccccgtccagaaggcggcaacttccacccggccgtgctattctggcaggcgaagcggctcttcttccgcggtattgagaaagacgtcgtgtcaatgcagaacaagcgcaatatcctcaccggcgacatagagatgacccatgcccacgctgaccacttcgaaaaccgtgctgagtacatgttctcattcctgcaagtattgaccgcttcaactgcttccttcgctcacggcgccaatgatctgtccaagtatggcgacccttactgttattccttcgtctctaccaatgcaacaaagtgctgacattgacagtgccgttggtccttacgccacaatctacagtatctggcgcaccgcctctttgagtggatccggcggcagcgggaagactgatgtcccctattggatcctgtatgttcccaatccttagccatattattcctctgtcactaacagatggtagtgcctttggtggtgcctcgctggtcatcggtctttggacctacgggtacaatattatgcgtaacctgggaaa

SEQ ID NO: 18818 - DNA, 612 bp, Emericella nidulans
ctctcgggcttgcccatcgtatgatatcaggcagtcccttgaatttgcgagtcttgggtcctgcatccccggcatgcacatgcgtattatgagcatcacagagcccggaaagctagctgcacccggcgagtctggagagctccaagtcgcaggtccggtcgtatttgaccactactacaacgatgagacggcgaccagaaacgccttcacgccggatggctggttcataactggggatttgggctggatcgacgatgccggcaacttgaacctggctggtcggaccaaagacaccatcatcgtcaatggtgtcaaatggagctcgaccgagctagaagcggctattgaggaggaagcggtttctggcctggtgcgttcgttcacagtagttgtgccgacccgccctcctggctcggccactgaggaaattgctgtcgtctactcgccggcgtacgcccccgaggactatcacgcgagatatgagaccgcgcaggtcatttccaagacagtctcactgctgacaggcacaaagcctgcgcgccttatccccctgcctcagtcacttctggagaagtcgtcgcttggtaaaatatcgcacagcaaggtgcgtgc

SEQ ID NO: 18819 - DNA, 612 bp, Emericella nidulans
gtcggccgatgacggctctcgcatcttcgcgaaatactactcaccacctcaccccccagccggcgctgcccccaattccaccgactacccaggagccaatccctatccgacgctcaaggaacagaaggctttcgagaaaggactgttagagaaaaccaataaacagaccagcgacgtgatcctgtacgacaatcgaattgtcgttttcaagctggagagcgatgtgatgctctatgtggttggcggtgcggaggagaacgaagttctactctataatgttgttctctcgttacgtgatgctttggggatacttttcaagtgcgtttcattatagctataaaggatccgggcggacggatactaacacaatatttgtttaggggcgccacggacaagcgcacaattgtcgagaattacgacctggtcgccctggccattgatgaattgatcgacgacggcatcattcttgagacggaccccgttttgattgcttcccgtgtcagccgtgctcctcaaccagacgcaccgaacctaaagagtatcgatctttccgaacaaggcctgctcaatgcctgggagcttggaaagcgacgtctggcggagggattgcga

SEQ ID NO: 18820 - DNA, 612 bp, Emericella nidulans
gcgtcaacgggcgacacaagaccagctagtacttctggagatggaattcaacaagaatcccaccccgacggctgccacgcgagaaagaatcgcccaggaaatcaacatgactgagcgctcagttcagatctggtttcaaaacaggcgcgtaattagttgccttgccttttgttctatactaacagaggttacaggcgcgcaaagatcaagatgcttgcgaagaagagcatcgagaccggcgagggctgtgattcaattcccgagtcaatgcgccagtacttagccatgcagttcgatcccagcaaacccggtgctcgagacccctttggccgaactggcggatacggagcacaaggcggagctcttactctgtagaacaggatggagccagctaccaatcacaggaattgatgagcaagaagagacctcggccagcctggctcatcatggtgaagtcgggttagttccggtgcttcggacctcgaatagccctatttcatgtgcctctccacacggaagcagcgcagcaactgttggcttataagtagcgacaccccaccctaaagattaagaatacaatcatggatcttcactccaagctgcaagccgcct

SEQ ID NO: 18821 - DNA, 612 bp, Emericella nidulans
cgtccgccgctaccagtctcctgatgagtacccgttcttcccgtctgcgctggagaaacccatcctacaaccgctcgactaccctaagatcctccacgacaacgacgtcaatgtcaacgagaccatcaaaacgcggtacgtgcaggatattctacctgcgatttgcccgcaatttggcgggcgcgaggaccgtggggagacgcaggaaaattatggatcagcggcgacgtgtgacgtgagctgtttgcaggcgctatcacggcgcattcacttcggaaagtttgtggccgagtcgaagttccagaaggagacggaaaagtttgttgcgctgattaaggcaggggatcgcaaggaaattgatgaggcgattacggatgcgaaagttgagcaaaaggtgctggagcggttggcgctcaaggcaaagacttacgggacagatcctggctttcctgagcagtcggggccgaagattgatgttcaggctgtgcaggacatgtacaaggtaccttccctcttacctcaccctgccgttcatgatctaatcaagaacaggaatacgttatccctttgaccaaggttgtcgaagtagagtacctgatgcaacgccttaag

SEQ ID NO: 18822 - DNA, 614 bp, Emericella nidulans
ctctcgctcttccatttcctggagtactacataactgccgcgcacaacacgcgctacgccgatatctccgctttcctgctttcctcgaacgggtgggcgtataatgttgcgcactcgtcggccgcgcttgaatgcttactgggttatgtcttcttcccgcatgattcgtactttaagtttactgcttccgtgggtggggtgaaagtccaggctgttctgggtctgttccttatgatattaggtcagacggtgaggacgctggcgatggcgcaggcggggagtaactttaatcatacggtgcaggttgagcggaaggagggacatacgcttgtgcagcatggggtttacagtgtgctacgacatccgagttactttgggttcttttggtggggccttgggacccagttggtgctcggtaatgtagtttgttttgtgggatacgccgttgtgctgtggaagttcttcaataaccggattcagagtgagttctctcctttcttttaccgtcgtttgatggcactgatggtgttattaggggaggagcgattcttgattgcgttctttgggaatgagtatgtggaatacaagaagaggaccatcattgggatcccagg

SEQ ID NO: 18823 - DNA, 614 bp, Emericella nidulans
  unsure (1)..(614): unsure at all n locations
gccctccatcgtgcacagcaagcccctgccattcnncgcaacggcctccgatcctgcatcaggaatccccgagcgatttcgattctctggagaagctcttctttgcatgcatacaatctgcagacgacaaatctgctttagcgtgtcttgaacgtctagtgcatcgtttcggtctttccaacgagagagtctcagcgctacggagtctctacgatgaggcggtcgcacaagaccaaccaagcctagagcggtgtctcaaaacttacgacgatattctgtctcaaaaccccgtcaacctggtttgtctgtattcgccagttgtagataaagtacttaccatggtgaatagccgatactaaagcgtcgaatcgctctccttcgctcgctatctcggtacgcagatgccatatctagcctagtaaagctccttgaggccacgcccacagatgctgaagcttggtgtgagcttgcagaactgtaccaatcgcaaggattgagcccacaggcaatatttagtcttgaggaggctttgttaattgtaccccatgcgtggaatgtgtgtctcgtaaccacattgcgtctgaaatagttgttgatacttttaggttcacgct

SEQ ID NO: 18824 - DNA, 615 bp, Emericella nidulans
tcaatcaagtcgtacgaccgagccagttgggtataatcggcgagggcaaaacaatgcttattggtatcgatgttacgcacccatctcctggttctgctaaaggcgcgcccagtgtcgccgccatggtcgcatctgtcgattcttctctccgccagtggcccgccgagattcgtattcaaaaggaagctcgcaaggagatggtcgacgcccttgactccatgcttaaagcacatctacgccgctgggcagctaatcacaaagccgcataccccgagaacattattgtctaccgtgatggagtctcagaaggccagtatgaccacgtaaccgatgaggaactgcccctcctcaagaatgcctgcaagaatatctaccctgcgcccgacacagcaaggaaccttcctcgtttttccatcatcattgttggcaaacgccatcacacgcgcttctacccaactctccaggaggatgcagatcgcttcaacaaccccgtcaacggcacagtggtcgatcgcggcatcacagaagcccgcaactgggactttttccttcaggcccatacagcacttaagggaacagcccgcccagcccattattacaccgtatgggacgaga

SEQ ID NO: 18825 - DNA, 615 bp, Emericella nidulans
agcaagaccttcaccgccagcaacactgccattcccacatgcccctccgtcggcaaggcctgggaagccagctctgaccttcctccttcccctaacgcgaacctctgctcttgcatggaggacactctcacttgcaaggtgaaggacaacgtcgacgaggaagaatacggcgaaatcttcggctacatttgcggccttgagggtggcaagtactgcgccggtcagaaggctgatgccgtcaatggcacatacggagcctacagcgtctgcaccactaagcagcagctttccttcgtcatgagccaatactacaaggcgcagaacagcgatgatgcttgtgactttgacggccgcggtgagaccgttgacgccaaggactcaagcgacagctgcaagaccttgcttgacgaagctggcacagacggtaccggcaacgttaatacacccgacggcggtgttggcggtgatgcttcgggctctggctcttcgtccagtgagacctctgatggtgctgccggacttggaccccgtcctatggctgtctacgttggcaactggcagctcggcgcctacatcatgaccagtgttgttgctggtcttggtatgcttctgctg

SEQ ID NO: 18826 - DNA, 615 bp, Emericella nidulans
tgcagaagctgcgaaggactaccagaagtccatcgacctcgaccgaactttcatctattcacacatccagctcggtgtcacacaatataagatgggttctgtcgcgtctgcgatggctactttcagaagatccgtgaagaatttcgaagatgttcccgacgtctacaactactacggtgaacttctcctggaccagcagaacttttctgaagccatcgagaagttcgacaaggccgtcgagatggaaaagcagagcaagccaatgagcatcaatgtccttcctctgatcaacaaggccctcgctctgttccagtggaagcatgactttgcagaggccgagcagctgtgccaaaaggctctgatcagtgagtttatcttctgtcattccaatgatttcaattctaacaatagtagttgaccctgagtgcgacatcgctgttggtaccatggctcaattgctcctgcagcagggcaaggtttcccaggcgctcaagtacttcgagcgtgctgcagagcttgcccgcaccgagcccgagattgtcaacgccatctcgtatgctgaggcaacccgcacccaactcgaagtccaggaaaaatacccacagcttgccgcgc

SEQ ID NO: 18827 - DNA, 615 bp, Emericella nidulans
ctcaggcgtcccgcaatcgtggcattggaccctcctggcccagtacatctcctcctgccccgagaacaacacccgcctcgtgtggcagaacttccccaacctctacgtcaccaatcaggcaaacccgaaccgaatcaaccccaacacaacggaatttaatgagatctcggacgcctcccacgtcaaccgcaccggcaaccccagctcctcgcacattccagccaatgagtcctgcgtgcacgtcaatgaaacaggctacaactgcgggccggccatctcgcgcgacaagtacgaacctttgaccttccccggccgaaaagttttccttacctgggatgaccccggtcgtcctgttggcccaaacaacagttacattacatcgacgactgccggcgagcccaagttcgtcgcctgggtgagtcagttgaacacgacctatacggagttgacaacaaccgggaagaatgagggttttaccttccagccggcaagtgaggtgtacgagacggatcctgcattgaatgggacggcgtttattgcgctgacggattcgaatccctatgtgacgccgtataatttgaccatgttaaaccccaatgtccgggctctcgggct

SEQ ID NO: 18828 - DNA, 615 bp, Emericella nidulans
tccctacgcctcaaccagggagacagtcagcaactaccgttttctcatctcagctatcacaccgcggccaatcgagtttgtcagcactgtttccgcgtcattagcgaaatattgggaggttgtcgagaatctggctccattcagctacttccagctagtcgaccatgatccgcccatgctaattctgggcttctcgggccgacctgggcgggagaaagatacgtttcggaatctcaaagagacaggagatgtgtgattaacaacgtctctgagaatatgattgaggctgtgaatgcgatctccctcgatgcgctgtatggtatatcggaatgggagatctctggtctaacaaaggctccagcttgactgtacgtccggttcgagtgagagagtctgtcttctcgatagaagaagttatcgatatcaaacaattcgtagcccgccaggagggaatgaatgggagtggagtggtgctgatcaaggcgacaagattctagtcaagaagggcgttgcaaatgaagacctcagccacattgagctggagaatctgaggcccattgcgcagctgggtgatattttatatggaaggatcacatctacattcgggaggccgcg

SEQ ID NO: 18829 - DNA, 616 bp, Emericella nidulans
gtgccaagcgcgcccactaccgcaagaagaggtatgacgaggattgactcgatacaagtatcaagggcaggattgacgataacaaacagggctttcgagaagggtcgccagcccgccaacacccgtattggcaccaagcggattcaccttgtccgcacccgtggtggtaaccgcaagttccgtgctctccgtctcgagtccggtaacttctcgtggggttctgagggtatctcccgcaagacccgtgtcatcgttgtcgcctaccacccctcgaacaacgaactcgtccgcaccaacaccctgaccaagtctgccgtcgtccagatcgatgccgctcctttcaggcaatggtacgaggcccactacggccagcccatcggccgccgccgccagcagaagaccgctgaggccactgaggagaagaagagcaacagcgttgtgaagaagcaggctgctcgcttcgccgagtctggcaaggtcgagtccgccatcgagagacagtttgagtctggtcgcctgtacgccgtcattgcttctcgtcccggccagagcggtcgtgtcgacggctacatcctggagggtgaagagcttgcgttctaccagcgtgccatccgca

SEQ ID NO: 18830 - DNA, 616 bp, Emericella nidulans
tcgcagggcagccagacctttgaggcgacctacacgatctctggcaacgagacctttgacggcggcatgaagacctatggtcggggtgtcgactgctccggccaggccgagggaggcgactcggatgccgtgttcatagtgaaggacggtggcactcttaaaaacgccatcatcggtgctgatcagattgagggtgtccactgcgagggatcctgcacgatcgagaatgtctggtgggaggccgtctgcgaggacgctctgtctctcaagaccggtgatggccctttcaccgtcatcggcggtggtgcgcagaacgccgacgacaaggtacctacctctcctgctgaggtctcgagtaagtgaaatgctggtgctaaaagaggagaataggtcatccagcacaacggcggcggcacggtcagcatctccggcttcacggcctacaacttcggcaagctgtaccggtcgtgcggcaactgcgacgagatgtacgagcgccatgttacgctggagtcggtcactgctgtgtctggctctgcgtcgctggttggtatcaacagcaactacggcgacactgcgaccatcaagagcgacacttgcgtgaccgacgtggaca

SEQ ID NO: 18831 - DNA, 616 bp, Emericella nidulans
tgccgacgaccgcatcgttatctgcgggtctgccaacatcaatgaccggtctcaagtgggcgaccacgactcggaaatcgccgttatcatcgaagacagaacgcccgttccatccaagatgaacggtcagcagtggacagccagtcgcttcgcatcctcgctccgccgccacctattccgcaagcatcttggcctgcttcccccccaggactacgagcatgttaatgatcactttgacttcgactcccctgaaagccaagtcgtggcggatcccttggcggacaccctcctcagcctctggaacacccgtgcccacaaaaacaccgaggtctaccgtgaagtcttccactctgttcctgatgacaccgttcgcaattggaatacgtacaaggagttctacggctactactttaagaacgcagacaagcaggcgttcggcgagaagatagacggccctcccccaacatacaagtacgggcacgtggtcgctgagaagttccccggtcccgacggcgtaaagcgagtcaaggaactgctcagtcaggtgaaggggacgttggtggagatgcccctaatgttcctgtgcgaagaggatgtggctgaatctgggctgacg

SEQ ID NO: 18832 - DNA, 617 bp, Emericella nidulans
tgcaggccatgaagaatgcacttgtagaggtccgtatctagacgtgttcccgcttttgaacaaaaaccttgctaattcttatatccagaaactggaagagaatggcagcattaataacattaaagaagccattgacaagggccgaccaagtacaacggacatagtcccagggtcagtcctgcatcactttgtatataaatcccgcgtcaatgtccaattcatcatgtccgcgtatgacccggagttctcaaccatcacccgacgccgaaggtatgtcacgtcgaacttaagagtcaataacagcacctaactaggataaaaactagactgatatcaacatataataatctccacgcaagcgtccacgccaaacacacccatgtcaaagtccaccactgcgtcactcagtcctcaagctcctttgcatggataacgccagttttcgaactctactgtgtagctgggccgcatgcgaaccggaatgcgctggcgcaaagcgccagcaaggttgtgcaatgggtgcagaaggaagaagagcggctgtttataattagtggagcggtgagtcatgctttatttgtgatcgtatatgcaccgactgatttgttacaggtctt

SEQ ID NO: 18833 - DNA, 617 bp, Emericella nidulans
ggcgacataaggcttatcgtctcagatctgcagacgatcgcagatatcggtgtaaagcagggcttccgctttgtgtacgaggcgctctgctggtcgacgcatgtcgatacatgggaagcagcgtggaatgtcgtcaagctggttgatagagagaatttcgggatctgcctggatagcttcaacatcgctggccggatctacgcggaccccgcttccgtcactgggaagacgccggatgctgagcaagccgtggccaagtccatggagacgctccgttctctcgtctccagtggagaactggacatcaggaaaatcttctacatccagcttgtcgatggcgagcggttgtcggcgccgctggacgagaagcacccctttcatgtggagggccaacccccaagaatgagctggagtcgcaatgcgcggttattcccctgtgaagaggagaggggtgggtatcttcctgtgttggagatcgcgagggcgttctttgaaatcgggttcgaggggtgggtgagtctagagctgttttcaaggacgtgtaatgatcccgatgtgaacacggtgggggagcatgcgagacgtgggatggatagttggaggagggttgttgcggc

SEQ ID NO: 18834 - DNA, 617 bp, Emericella nidulans
cccgccttcaacggaacccttcgcgtctccccgctgcccgccccccggacgccgtagcaccaccctcctacgatgcaaatcctccactcgcaaacgagtctgtcctctttccacctggcttccgcatcctctcaaagtacatttacccctaccttcctactctcgaagccacgactcctccccctccaaacccagaagccagcggagcgctaccgaccaaaaaccccaccgcaccaaaccctccgacgcaggcggcggggccggcggaaacccttccctttacgaagaggttgcacgcattgacctaacggtccagaataccggcacacggtccggccaacaagtgatccaactctacgtctcctttccccacaccgtcactgaatcatcgggtcagaaaagtcatgaaaacattgacttccccgatcgtgttctgcgtaatttcacgaagatttcgctggcgccggggcaaaaaatggatgtgaatatgactcttaccaggaaagatctgagctactggagtgtgcgtgagcagaattgggtgctgccgaaggatgagttctatttttgggttggctacagttcaagaaacctgccattgggtaaaccttttgatc

SEQ ID NO: 18835 - DNA, 619 bp, Emericella nidulans
tcgaacacgcgacaatcaatagcgcaagtgctcaattttgcgctcgttctttcaacagcttttatgctttggaagggcctttcggtagtcacggcttcttcctccccgatcgtcgtcggtacgtgaccacaattccccattatctatacatacctgacacacctgctacagtgctctcaggatccatggaaccagcatttcagcgcggcgatctcttatttctctggaaccgcagccctcgtgcagaagtcggtgagatcgtggtctacaacgtcaaggggaaggatatcccaattgtgcaccgtgtcgtgcgcacgttccccgaagttgagggaaagaaggagaagacagtaaaggaggtgaccgtgtacgtgatctaggctttccattactgggtattcagaaccgcttggctaactacatgatggtttaggtccacgccgacaccgccgaacatgctgctgaccaagggcgacaacaacctcgcggacgatacggagttatatgcgcgcgggcaggaatttttgcatcgcaaggaggatattgtggggagtgtacggggatatatgccgatggtcgggtatgtgacgattatgctgagcgagcatccatggctgaa

SEQ ID NO: 18836 - DNA, 619 bp, Emericella nidulans
ttggtgctggcgctttccactcctttgccgtacaccagtccggcaaggttttcgcctggggcttgaacagctttggagagacgggaattcgtgaaaatgcgggcgatagtgaggctgccatcgtccaccccaccgtggtggactctttgtcaaagaagaacgtcacgcaaatctgcggtggtgcacaccactccatagctgccacccaggatggcgaatgtctagtctggggtcgactagatggatatcaaacaggcttaaaaattgatactctcccagacgatgcggtcatcaaggacgagcgtgaccgtcctcgtatcctcagtcagcgtacggctgtccccgggataaaagccaaggctgttgcggcgggttccgatcactcaattgcaattgatactagcggccgtccctggtcttggggcttctctgctacttatcaaaccggccaaggcacacaagatgatgtggaggtcgcaactgtcattgagaatacagccgttcggggcaaaagtctcaattgggctggtggtggtggtcagttctcagtctttaccgaaccagttgagttgtgaaccacttagaggtagttttgagagttgcttcgtaaagattgtgg

SEQ ID NO: 18837 - DNA, 620 bp, Emericella nidulans
aaagctaacctgacagtaagtgggttacacaaccgttgccctttcgcagactatcaacggaaaactccccccaaaccctaccccgccgccgcttcccagcgacgccccgaaagaccttacgctcctcacgcgcctcaacatacccctctcagaccccgcgcagaatcagcgccttaccagtatagctcaggcttatgatctggttgccgtgcgcccaaccaacgagaaagcgttactgaatgcatgcaccaatgcagaatgcgacatcatttccttagacctctcaatcaggcacccttatcacttcaagttcaagatgctttctgctgtatcgctcgcggtatccgcttcgaaatatgctacggcccaggagtcacaggaagcggactagaagcacgtcgaaatctgatcggcaacgcgatggccctgattcgcgcagcccgtggtcgcggaatcattgtgtcgagtgaggccaaaagggcattaggtgtccgcgctccgttcgatgtgattaatctggcatgtgtatggggtttgtcacaggagctgggcaaggaggcgatcagcgcggaaacaaggaaagttactgctctagcccgactgaagcggaccagctggcg

SEQ ID NO: 18838 - DNA, 620 bp, Emericella nidulans
agttactggctggatgactataacccatgtcttacatatgggcagcgtggagtggtccacgcgaatttaatcgtcaccagcgaccacccagatttgcacagcggtattgacggcagttcgctgctagatgagcccttgaaggacttgactatgctgctcggtactctagtgggacccaagggcaaagtcaaccttcccggtttccaggaccctgttttaccattgaccgatgtagaaagggagcgatatggcgcgatcgccgagattcttctcaaacaacatccacaaattaaggatgctggcgccctgattgattcactcatgcatcgctggcgagaaccgtccctcaccatacactctgtcgaggttccgggtagcagcaagagtacaaccacaactatttcgcgcaaagcaaaggctagtctttccatccgcatagtaccgaaccagtcagccgatgaagttgccgccgcattgactctatacgcacaagagcaattcgatcaactggaatcgcagaatgaactcactgttgaaattaccggaacctctgatccgtggctaggagacccagacaatgagatcttcgagacattatcggaggccatcacagcagcctg

SEQ ID NO: 18839 - DNA, 621 bp, Emericella nidulans
gcgagcctggccgtgagaaacaccgatctgccaggcaagaaacccccaagccaaacggagaacttgtcgaagaccgtgctgcgcgctaagcagcagatctgggccgccaaggagtctgctcgcctgcgtgagatgaaccagactctggcgatgatggagcagctggtcgaagcggacttgaaccgtgcgttaggcgatctgcagagacagctggatcagggtgagattgggcagacagggttcttggagagccagaaagagctgcgagaggatgcggagaaaaacatccagaacctgagagaggcgttccgtattgcatccaagggcgaaattcaagaacgggtaggtcatagaatctgcgttgatattgcgctgcatactaacaagccagatcgtccctgactacctcgttgacccaatcacctttgagatcatgcatgacccagtcattgtgccgtcgggcactagttttgaccgaatcgggatactcaagtacgttgagcaatccggcgtggacccgattacgcggacgccaatgacggtgaacgacctacgtccgaactacgcactaaaagcagcgtgcgaggactttttgacaaagaacggctgggctgtcgactg

SEQ ID NO: 18840 - DNA, 622 bp, Emericella nidulans
ggtcgctcaaatgcggaccttaatgcaatcaagctttcctatgagcgcacataccgccgctctctcgaacgcgatgttgaaggcgatctctcctttaagacgaagagcctcttcgcgcacgtcctccgcgccgcacgccatgaagaaaacgcccctattgactaccgcaccatcgaatccgaagcccagaacatacacggcgccacagcggcacgcatggttaacaatgcagacgaagtatgctctatcttcgcacgcagctcgaacaacgaacttcgagcccttagccaagctttctcagcgcgctaccatacttcacttgaagcacatattgagaaggaattctcaggccacatgaaggatgcactgctgcatatgctccggacggcgttggaccctgctatgcgtgatgctgtgaatctggaagaatgcatgaggggcatggggacgaaggatgagagacttgttgtgagggttgtgcgtgttcattgggaccgccaacatttggagaacgtgaagagagcttatcaacataagtataagcaggatcttgtgaaaagggtgagaggtgaaacaagtggagattatcaaaggttattggtggcgatgttggagtgattca

SEQ ID NO: 18841 - DNA, 622 bp, Emericella nidulans
ccacacgccagcagacacagccaaaggacgacaagaagggtctaattgagaccggcagagaagtagtcaacagcgaagatggatggtccggtttgtggagaggcctcaaagcgagcttgatcctcgtcgtgaacccggctatcacatacggtgcttatcaacgtctcaaggacattattttccccgggaagaagagcctcaagccttgggaagcatttcgtgagtaacatcatgataccgcttatgggtacttgaaatactgattccggtcacagttcttggtgctctatccaaggccatggccaccatcgcaactcagccgttgattgttgccaaggttggccttcaatcgcgcccgccaccagcccgtaatgggaagccattcaagaccttcagcgaggttatgcgatttatcgtcgagaatgagggaccgctatctctattcaagggcattgggccccagattttgaaaggtcttctagttcagggtctactgatgatgacgaaagaaaggtatactgtttctcctatagcattattatgaacatatgctgatggctccaggatggaactccttttcattgtcttatttgcatatctcaaaggtctcagagagaagaag

SEQ ID NO: 18842 - DNA, 622 bp, Emericella nidulans
gcatgctggcccgtcagttacaacatatgcaatcagacaaagacctccccgggattagctgtggacttgtagacaacaatgtgttcgaatgggaggtcatgctcatgatctctgacgatgttaaactatatggcggtaagttcaatgtcttccatatttccgaaccggcagcattcagcatctcccgttccaacattacgaccatttattgactatggacgccatatcaggtggtttcttccgtgctcgactttccttcccccccgagtaccctcatatgccgccgaagatgaagttcgagccgccgctttttcaccccaacagtacgtgttgatctcccttctgtgaacacaagcccagaatgcactgttccgtactcaccagtcacgtcagtctaccctaacggcgaggtttgcatctccatcctgcacccaccggaagaagataaatatggctatgagtctgccgccgagcgctggtcacccgtccaaacacctgaaacaatcctcctttccgtgatttccatgctctccagcccgaatgacgagagcgcagcaaacgttgaggccgctcgtctgtggcgagacgatcccaaggaattcaagaggcgcgtccgcaagtg

SEQ ID NO: 18843 - DNA, 623 bp, Emericella nidulans
ccctgatgcggtccagagcaccatctcgaccgttgtgaaagactttggcaagatcgacgtcttcgtggccaatgctggtacgttccccgagacccctatcaagctcgtcttcctctcctttccccttccgaactgtcgacgctggacatggcacaaattaacaagtgcaaaggaatggccatctcaaaacccatcctctcgcagacactccccgaatataaagcgcaactctctgtcaatatcgacggcatcgtctactgcgccaagttcgccggcgaagtcttcgcccgccagcgcactggaaacctgattatcacttcgtcaatgagcgcacacattgtcaacgtccccacggaccagccgatttacaacgcgacgaaagcgttcgtcacgcactttggcaagtccctcgcgcgcgagtggagggagtttgcgcgcgtgaatattgtttctccgggctttttcgacacgaagatgggggcgagtccagagacggtgaatgaggcgtatcgaatggcggtgctgggcaggcagggatctacgaaggagatcaagggaatttatttgtatcttgcaagtgatgcgagtagttatatgacggggagcgatgtgctgattgatgg

SEQ ID NO: 18844 - DNA, 623 bp, Emericella nidulans
cattcctccggccgaagcctcatcccctgcagcacgcgaccttgccgtgcgtgctctgacctcagcgctcacccacccggccgtcttcgacttcaccccgttaaccgccgccgatgccgttcaggccttgcgatctagcgacgcacccctcttcgagctgcttgagattttcaccgctgatacccttgatgcctacgaggatttcatctccgccacccctgtcgaaaacatcctccctgacaacgccttggccccccatgccgaagctctgcagaccaagatccgtctactcactctggcatctcttgccgcggccgccacaaccacaacaggtccgtccgcgcgctctctgtcatacgagactattgcgtccgcccttcgcgtgccgcaggaggaagttgaaaagtgggtcattgacaccatccgtgctggtctggttgagggcaagctttctcaattgcgttctgagtttttggtccatcgtgccacctaccgtgtgttcggtgagaagcagtgggccgaagtccagggtcgtcttatggtgtggcgacgaagcctggagaacgtccttggtgtcattcgcagcgagcgtgagcgatttgtacgggaagctgctgctgctg

SEQ ID NO: 18845 - DNA, 623 bp, Emericella nidulans
atcacaagaatgagtaaactaacatttgaggcatctctacaggtgagccactgggccgtctgaagttggaacttttcgcagatgtgacgccacggacagctgaaaatttccgtcagttctgcaccggagagagcaagaaccagcaaggccggcctcagggctacaaaggaagtaaattccatagagtagtaagtgccctctaactaaaaaacaaaattcttgcaaatcactgaatttcccttagattaaggacttcatgatccaaggaggtgatttcgtcaatggtgacggcacaggttcatgtaccatatatggcactccgaagttctcagatgagaattttactctccggcatgatcgtccaggtctgctaagtatggctgtaagcatgcctatatttctatcggggatcagcgacagttaacgccgcctagaattctgggccgaatacaaatggctgccagttcttcatcacaacaactgcaactccatttctgaacggcaaacatgttgtattcggtcaagttattgatgggatggacattgtgcgaatgatcgaaaacacccgcaccacaagggacaaaccaaaccaagatgttgtaatcatccagtgcggagagatg

SEQ ID NO: 18846 - DNA, 623 bp, Emericella nidulans
cagttccctttagagcaatggttttatgaaatgcctcccgtcacacgtttctggactgccgctacagtggtaacctcagtcttgatccattgtcgaattttgactccgctgcaattgttctattctttccgcgcagtgtacgtgaagtcgcaagtaagtaaatacgccactgcggtttacagaggtgcaggtggctaacaacggggcagtattggcgtctagtaaccacgttcctatactttggaccgcttaacctagacctcctattccatgtcttctttcttcagcggtattcaagacttcttgaggaatcatctggccgatcccccgcccatttcgcctggctactcttttacgctatggtgtcgctcctaattatatccccctttctctccttgccctttctgggaacttcgttgtcctcgagtctggtctatatctggagccgtcggaatccagaaacaaggctcagcttcctcggcgtgttagtgttcacagcgccgtatttgccgtgggttctgatggcgttcagtcttgttgtgcacggggtcattcccaaggatgagatctgtggggtggtagtgggccatatttggtacttcttcaatgacgtttatccgtct

SEQ ID NO: 18847 - DNA, 624 bp, Emericella nidulans
aatcgccaacgccgagggtcgcatggatggcttggtggctgctgctggaattcagcaggagacccctgccctggagtacacagcccaagacgccaacaggatgttcgaagtcaatatcaccggtgtcatgatgaccgcgcatgcggttgctaaacagatgattcgctttggaaacggaggaagcattgcactgattgccagtatgagcggcactattgccaatcgcgtaagtccttcatatcttagccccctcacccgcacaccccgggtcactcccccgctttggcgccctatcactgcatgtctctagggatagttcactgacatttccacgtatagggtctcatctgctctgcctacaacgctagcaaagcggccgtcatccaactcgcccgcaaccttgcctccgagtggggccagtacaacatccgtgtcaacactatctctcccggttatatcgtcaccgctatggttgagcagctcttcgtccagtaccccgagcgccgcgacgagtggcccaagcacaacatgcttggacgtctgtcctctccgcaggagtaccgcggacgagcgtgtcttccttctcagcgatgctagcagtttcatgaccggaagcgacctgcg

SEQ ID NO: 18848 - DNA, 625 bp, Emericella nidulans
ttgtgcacgggcacctacgctgccagtctagccttgcagtaccagactatctctaagcgctacatgcccgagtttctgaactacgtccttaacgcgctgtgtattctcagtcctggagagccttcctctaagctcggatccttccctctccgccaaccgacagaactcctacgtatcagaccttcaaaacctctaaacatccgcaaactccagtttttggacgtatccgcacgatcagaaatagatccagaggaccttaaactctccctcatcacaaccctttcctccctcctcaatacagcatccgatctctggtccagcaagtccgcctcagttgagatcttcaaccaagcacaggctgtccttcaacacgtctcgagttcctgcgtcgacgtcaacaagaaagcaaagaaggcaaagaatcccttgatccctgccgccgctctggacacgctccaatccaccctcgacaagctctccactgtcctctctcaatctcgcctcacacgccggccactcctcttgcacaaccacagaccacttgctgtcaaaacggcgattccgaagttcgaggactcgttcaaccctgacaagcactacgaccccaaccgtgagcgggctgagg

SEQ ID NO: 18849 - DNA, 626 bp, Emericella nidulans
tcatctttcaggtgagccctttgtgcctgagattacgaatctgtttcccaacggcaaaccgagagctcctttacccctcccggagtatgaagggatagtaaggaagatgaaagactaccggcatcgatatcttgactactggatatcaactgctgaacgaaccggcggtaggcacttcctgtgcaatgtcggagaaaaccactgatgatgttttcagaccgtcctgttgaggcacttctttcccctgtaacgccatacgcaggcgtccttcccgggaaattctacccttcaagtaagcggaagacaatgtcaagtgcaagaggccttggtggactgactgactgcatttaagcatataccacttccgtcaacgtattggattatgcttcagttgttattccggtgacgctagcagataaaacgatagacgttgtcagtcccaatttcacggccctcaacgaggtggatcagttgaatatggaatactgtgcggctcccgcttttgtgttcgagaatatgcttttgacacacgacagatgacccggaaaaataccacggtgcccctgctgctgtgcagcttattgggcgcagattggatgaagaaaggttgctgtcgttggccaagc

SEQ ID NO: 18850 - DNA, 627 bp, Emericella nidulans
gcgcgtccgcaagcacagattgctacgtcatgcatcaacgcaaagaacacaatctctgtccgctccaactcgaccacctccacctccgcccgtgaggaggccgccaaactcgactggaactcatacttcaagctccgtgcttcccgtcgacggtacacactcgcttcttccatcgtgagctcggcagtgagcaccgtggttggcgttcaggtcctttcaagccagaacctagagaatctgggcgcccaggttatgggcttggatccgtttgttgttctgggaatggccacggcggcctgcggtgctgttggctggctcgttgggccattcttggggaacgctgtttggggactcgtcaatcgtagttacaagaaggcgttcttggtggtatgttattgattggcgtttcgtcccagcagtattggaatatgaaggctgacaaatttgcagaaagagaaagagttctttgacagaatcaagcgataccgtgttgatccttcttccaactcgatgacgaaccctgtccccgattactacggtgagaagattggtagtgtccagggttaccgacaatggcttaaggaccagcgggcatataaccgcaaaaggcgcagcttcatcaaatga

SEQ ID NO: 18851 - DNA, 627 bp, Emericella nidulans
cgcccaaccctacatcgacccgcctctccttctcccctctctcaacaaccgcaaattccacataagaacctacgtcctcgcgacaggctctctgaaggtgtacgtctttaaggagatgctcgccctcttcgcatcgaagccttacgtctcccctacctcgcagaacaatgagaccgaagactcaatcgccgacctaacccgccacctaaccaacacttgctttcaagacaaatccctgccagagtctgaaaccgtccgccgcttctggtgtctcccctccatcccgcctccaaatacacatctaaccgccacctggaaagaagatatttacgagcaaatctgcgccgtcacaggcgagcttttcaccgctgcggcgcgcggcatgatgatccatttccagacgatgccgaatgcgtttgaggtctttggagtggactttttggtcgatgacacgggcaatgtgtggttgttggaagtcaatgctttcccggattttggacagactggtgaggagctcagggatgttgttgtgggcggtttattcaaaggtgtgattggtgtggctgttaaggggttctttggtgaggagggtaagacggaagagaatgggatgaggctggttgcgga

SEQ ID NO: 18852 - DNA, 627 bp, Emericella nidulans
tgcccccaaccttgctgctcttatcggagacatcgtcggcgctcgccttatctcccacgctggaagcttgacaaacctgtccaaatatcccgcttccactgtccagattttgggtgctgagaaggctcttttccgagccttgaagaccaagggtaacactcctaagtacggtcttctgtaccactcttccttcatcggcagggctggtcctaagaataagggtcgcatctcgcgcttcttggccaacaagtgctccattgcttcccgcattgacaacttcagcgacaccccgacaacgaagtacggtgatgccctcaagaagcaggttgaggaacgtcttgaattctacgcgaccggtgctcctcctactaagaacgaggttgccatggtatgttcaccctcaatttacatctataccctgaatagcgaactaactggtatcagaaaaatgctatggatgctgttttggccagcatggacgttgatggcgacgatagcgacgccgaaatgaaggatgccaatgttgagaagaaagacaagaaggagaagaagaaggagaagaaggaaaagaaagacaagggcgagaaggaggagaagaagaagaagcgcaagtctgagggcggcgag

SEQ ID NO: 18853 - DNA, 627 bp, Emericella nidulans
gcgcgctccaggaccctcttcgggctgtcaaactgcgacggcaaatcgtctcccagcatcaagccactggcaacatcgacttcacaacggacggctccgcgctcccgtacgaaggatacgactacaaagcagtcctcggagcctgctgcgagaacgtgatcgggtatatgcccatccctgtgggcgtcgccggtccgatcaaaatcaacggaaagatggtgtttctccccatgtccacgacagagggcgcgctggttgcgagcacgaatcgtggctgcatggcgatcaacgccggtggaggcgtgactgctctggtgctgggcgatggcatgacccgagcgcctatcgttcgatttcccagtctcgaagaagccggcgccgcaaaacaatggctgggctctgatgcaggatttctcatcattgaggacgcgttcaatgcatccagccgcttcgctcggcttcaaaacattaaggccacggccgttggctcggacctctatatccggttcacggccagcacgggcgacgcaatgggcatgaacatgatctccaaaggggttgagcaagcgctggaggcgatgcaaaagcacgggttcgagtctatggatgtcgtctcgctgtcgggga

SEQ ID NO: 18854 - DNA, 628 bp, Emericella nidulans
tcagtggtcgggcgcaaatgccattactcagtattcgccaacgatcttcggatacctgggcattgtcggagaggaggccactttcctggcgacaggcatctatggtattgtcaagtttgcgagcacgctggcctttgccctggtcattgtagacttcgttggccgccgccgatctctcctggtagggatcagcctgcagattctcacactggtctttgtcggagcatatttgggcgccaccaaagatatgacaatcgccggggttaaggcctctcgacatgctgaacgagcatcgacggcggccatcgttgcgatctacctgcatgccgtagcgtggagtataggctggttcagcattccctacctcattgggcccgagattttccccacgcgcatccgatccctgaatatgtccatctctatggccttgcactgggccttctactttggctgctccaaggcgatgcccagtttgctcgcggcgacacatcgctggggtgcattcctgtttttcagctgcatcggtgtgctggggttgatctatgtatcgcttgccatgccagtaagatgactctatcggtgacactacatgcgagtatactgacagtgtgcaggataccaccgggcg

SEQ ID NO: 18855 - DNA, 628 bp, Emericella nidulans
ccaacgccaaaactagcccattcaagatcagtgtgaagccacctgtcttctatcactgcgacataacagacctccacgaattaaaggctactgcatcgaaaatcctagacgagcacggtcccgtgcacgtgctcattaacaacgcggccgcaacaggctcactagcacgccaggccagtctagatgtcacacctgaaacctgggattttaacgtgaacgcaaaccttcgacacatcttcttcctcacacagtgcttcattccatctatgaaaagctctggtggcggaagcatcgtaaatctcggctcgattagctggcggattcctgaagcaacgacgcccatatatgggacatgcaaggcggctattaacggcttgacgcgtatccacagcagggagttcggtactcacaatatccgcgttaattgtgttatgccgggcgctattgcgacagatagacagagggcagaagtactcacggaagagtaccggacgcatgtgtttgcccagcagagtctgaagagggacttggagccggaggatgtggccaaggtcattgtttttctcgggagtgaagaagcgagtggagttacggggagttgctatgtcgttgatgggggatggatggg

SEQ ID NO: 18856 - DNA, 629 bp, Emericella nidulans
ctggacgtgccctgccgaatgtgactatacctgccaacatgttgtgacagaccgtcgactcgctcgcgatccgcctatgcttagccctgtggtccagtttcatgggaagtggccttttcgcagaatcctgggcatgcaggaactgttttcggtcatcttctctggccttaatttccttgctcactggtatggaatggctcgattacgtgaaatgactccctcatggcatcctctccagaaatattatatcgcgtttggatacagcggcctggcagcctggacttttagcatgctcttccacgctcgagactttccgttgaccgagaaactggactatttcggagccggtgcgagtgtattgtatgggctatatctcgctacagtgcggattttccgcttggataaagaacaaccgagatacaggcccacgttgcggcgtctgtggaccacagtctgcattcttctatacactattcacgtgtgctatcttagcttctggtcgtgggattatacgtataatatgattgcaaacatcgtggtgggcatgattcagaataccttgtggatttgcttcagcgttgtccgctaccaaaaaacgggtaaaacctggaccctttggccagcactga

SEQ ID NO: 18857 - DNA, 630 bp, Emericella nidulans
ccgactccagacacctcgcatgtctccttcgacacaatctacgagccctccgaagactcctacctcttcctcgacaccctctcctccgcctccgaatccgcctggctgaaatcacgattcccttcttcaacgccatcgcctctccttctcgaagtcggctccggttccggagtcgtcctcgctttcctaacggcaaattcacctcttatcctcggccgcgcggatgtccttgcgcttgcgacagacgttaacaaaaacgcctgcgctgcgacacaaaaaactgttactgtggctgtggaagagcggcaatcggagatagataaggatgcgggtgcgcaggcggaggcaaggtccgtctgcctgtccgcggttgtaggggacctctgcacatccctccgcgctggaagcgtggacattctcctctttaacccgccttatgtgccgacggaggaattacccgctataccgtccacttctgatgctgcggcgaacgaattggaactgtcacggagcgcaaaattcgagcgcgactcctactacctctcccttacctatgctgggggccgggatggaatggagacgacggacaggttactcgagtcgataccggaggtgctggatccggatcgc

SEQ ID NO: 18858 - DNA, 630 bp, Emericella nidulans
gcccacgccctccgtcaaatccagaccgaatccgccggtgaatgccccatctgctcagaagaacccatgatcgaccccgccgtcacagcctgctggcacagcgcttgtaagggatgtctcaaggattatatccagcaccaaagggacaagggcgttcagcccgttgtttctcttgccgcgcggacttgaacccgcaggatatcttcgaggtcgtccgctaccaatctccaaataccacgcctactgaacaaacgctctcatctatagggggcgacaacgtatatagcagctcgcaaccaccaccaccaccacgcatctctctgagaagaatcaacccgctctccccgtcagcacatacatcagccataatccatgcgcttctcgcgcacctcgtgcgcgtcccggccggcaccaaatccgtcgtcttctcccagttcacatctttcttagacctcataggtccgcagctgacgaaagccgggatctcgttcgtccggcttgatggaacaatggctcaaaaggctcgcgccgaagtcctggcccagttcacgaagtttgaaacatttacgcaggaagagctggaccaggccgaatcgacgtcagcgccgtagggactcaccccaacaccga

SEQ ID NO: 18859 - DNA, 631 bp, Emericella nidulans
gttttatcatttatacttgttcagaaccgtcagtaagtgattctctgtcgcttacttgctgaactgttcagaagcttacaagaataaccaggggcaagacccgacttgcgaagtggtatgcgccgtacagtgtaagacccccacgaagttcaacaatgcgtcgacgatgacctaatagcgacttctgattgaaggacgaggagaaagtgaagcttaagggagaggttcgttctgcgaccccttgcagcccgtcccggtctctgtatgtgcggagaagtaattgtactaggtccatcgcttggtggctcctcgggatcagaagtatcagtcgaactttgtcgaattcaaacgaagcacgaagatcgtttaccggagatatgcaggcctcttcttctgcgcgtgcgtcgacgccacagacaatgaactagcatacctcgaggcaattcatttctttgtcgaggtcctggatcaattcttcggcaacgtgtgcgagctggacttggttttcaatttctacaaggttggtaatggcggattagaacttcgcgcaccgctgacggttgtacaatgcgctaactctgtggtttgtacaggtatatgcgatcctggacgaagttttccttgccgggga

SEQ ID NO: 18860 - DNA, 631 bp, Emericella nidulans
aaattgctgctaactcgtaatctaacagtcacatgggcccagcgctcctctgggaccgatgccgagcgcaactacctctacgtgagcatcaaagctgctgatgtggctaagtccgatgcgaaactcgacattactcccagcaatgtcacatttacgggaccttccaagaagggcgtaacataccacgtttcgctcgacctttatgcggatattgaacccgagaacagcaaggtgaatcacagcgatcgcgaggttgaacttgtcctgcgcaagaaggagctgaaggaggagtactggcctcgccttctgaaggagtctaagaaggttcacttcctcaagaccgatttcgacaaggtacgggctttttgtttatttcggcttcttattgagcgagtagaatgctaaccacgggtagtgggtggatgaggatgaacaggacgaggcgccagaagatgactatggtaataactttggcgggtttgacccttctgaccagggtggtcttggaaacattgacttctcgaaactcggcggtctttccgggatgggcggcgcccccggcgatttgggcgctgagggagaggacgaggtacgttccaaaaatgttgttgaaaatattgaaactttgccg

SEQ ID NO: 18861 - DNA, 631 bp, Emericella nidulans
cgaagtccgcgacctggaccgcgacctcgcccacctcctggccccatttgaaggttccttcaacccatctcaagaacccgccgtcgcgtgtgccctgctagtcgaccatctctgcatccggcgcaacaagcgctgcctcctagcctatcaccgcgtgcgcacagagaaactcgaagagctatgttggaagggaattgatgttctagagcaccagcaggcgactgcggcgggagacgatggaggacaaatgggaggtcagaactcagagagcacaggcgcgcagggtactagtgggaacgagagctcgctgagccccgaagaggaagagtatttccgggagtacagcgacatgctagctacatacaaggggcagtggacggatatcgatcttacggggagcttggagccaccgaaggatctgtttattgacgtgagggttctaaaggatgcgggagagatccaaacggagtatgggtatgttctccagcgcttgcatgatgtcttgcgttcggctttgttttttccgcgtcggcaagatgtgtcgctaacctgtctcgctgcagggtcatcaacctaacgaagaacagccagctttatgtgcgacatggcgatgtggaacggctcattgcgc

SEQ ID NO: 18862 - DNA, 632 bp, Emericella nidulans
gacagctcgtccgcccatccgcttctcttcgtctttccgctacatatcagcaaacaataagccggagatggcagtccacagaggctcccgctgcccctgccaaccccaagatcacgcagattgtcgatcagatcagccaattgaacttgttagaaaccgccgaccttgttgccagtctgaaggtaagcctatccaacatccccagtcagcccctacatgttgtgatccgctgccccggttgcctacgcttgcgcatagaaacttcggttccgaaaataataattcaaaaactaataatccgccgaaattagtcccgccttaacatccctgacctcccagtcggcggcttcgcatggcccccggtgccggcgcacccggtgccgctgctgcgcccgccgaagaagaagaggccgctcctcccgctcaggaaaagaccctcttcaacttgaagcttgagtctgtcgacgccgcccagaaggccaaggtcatcaaggaggtcaagacgcttctcggcctctcgctcgttgacagcaagaagtttgtcgagtctgtgccgaaggtgcttaaggagagcgtccccaaggaggaggcggagaagcttatcgaaacacttaaggccgtcggtgccaagg

SEQ ID NO: 18863 - DNA, 632 bp, Emericella nidulans
cgggcggacatccgacacattccccttgatctcgcgtcgttcgcgtctatccgtgcggcacgaaaacaattccaggcagagtgcgaacggttggacatcctgattctcaatgccggcgtcatgggccacccgccgtccctcacagaggaagggtacgagatccatctcggaacgaaccacatcggccactttctcctcaccaaactgctcctccccactctccgcgaaactgtttcccgctctgaatccccggatgtgcgagtcatcacgctaagctcgctagcggccaacaccgcaccatcatacgattccatcacgtccacccccgcgctgctaagtctcggttgggcttcgcggtatggggcgtccaaggctgccaacgtgctcttcgctgcggagctggctcggcggcaccccgagattttgtcggtgtctgtccacccgggcgcagtggtgacggatctataccagcagactaaaaaagcaggccttttctacgaggcgggcgttggtcttatgatgaagttctttcgaagcattcgcaccggggcattgacccagatttgggccgcggccgcgccgagagagcagctgatcaatggcggatactacgttccgatcgcggtcaaggg

SEQ ID NO: 18864 - DNA, 632 bp, Emericella nidulans
ggagcaggccttatctcctcctggttcacaaaggacatcagcctaccccgcaaatcccctgctgcagtacataaaatccaggcgattggctcgtcatctctcgagaagggccgtgtctttgtcgaaacgcaccttgcaactctcaaccccaagccaaccgtctattccaactacggggacgtctacaacgaccctgaagttgatatagtgtacatcggcactccgcacggcctgcataagcaacactgcctcgacgccatagcggccgggaaacatgttctctgcgagaaggcctttacgcttaatgccactgaaggccgcgaggtccttgccgctgcgcaagctaaaggagtattcataatggaagccatgtggacgagattccagccactcgtctcaaagctcaagcacgtgcttttccaagagaaagcgattggcgacgttcgtcgtacattctgcgatttcggacttgacaaggatattgcttctctcccgagcacatcgcgcctaagagaccccgccatgggtgctggaagcctcttggatatcggcatttatgctttaacatggggcctcctcacacttgaatcggatccagcaaaaagtgaaagaccaagagtggttgcagcgca

SEQ ID NO: 18865 - DNA, 632 bp, Emericella nidulans
ggcccggaacgtcaatatggtgattccaaagaatcttaacgtcccgcccccaaagccagtgcctatggctccagatcggccgacattgtctagtgggcctagccatggtgctatgggtatgatgggccaacccgctatacagaaacatcccgggtatgttcttgaaggagagggccagcgagttctcagcaagaagatgcttgatgtcttagtccgccaggttaccggcggaggtgaaggtgaagggctaacccctgacgctgaagaggtaagctcaaatatctctgacccattaaccagtccttgcacactcgtatatcagctgaaggcactcactaaaatatgtggaaattacagttcatgcttcaaatggctgatgattttgttgacgatgtgattactgctgcctgccgactcgctaagctccgtcattcgtccagccttgaaatccgagacatacaactagttctggaacgaaattacaacatgcgcatttcaggattctccactgatgatcttcgcacagtcaaaaagccgcagcctacgcaaggttggactcagaagatgtcagctattcaagctgcaaaggtgactcagggtaaagccgaataattcccgggctgatggtgtgc

SEQ ID NO: 18866 - DNA, 633 bp, Emericella nidulans
cagacctgacggcacgcaccttcctgctcctttcactatgcgccgtggtcttcactcttgtatgcctcggtgctcttctcgtcagtgagcgccgaagccccagctccttaggccatccgccgacctcgtggcgcccagttcttgcatttctgggcttcattgttgccattttctggattgcaaccattgccacagaggtcgtcagtctcctcaagacccttggcgtcatcctcaacatcagcgactctctcctcggtctcaccgtttttgccgtcggaaattctctcggcgacttggtcgccaatatcaccgttgcccgtcttggttatccagtcatggcactaagcgcctgcttcggtggccccatgctcaacatccttcttgggatcggcctcggtgggctatatatgaccctacacactacgaagggccataccagcgatgccgccgacatcacctacgacatcgccgtctccaaagtccttgttatcagtggcgctacgcttttaacgaccttggtcgggttactgattataataccttggaataagtggcggatggaccgcaagatcggttgtggtcttattattctgtggtgtgtgagcactttaagcaacgtgattgccgaaatcg

SEQ ID NO: 18867 - DNA, 634 bp, Emericella nidulans
cttcggcgactgacggtatgacttctggttacactgctgcgtcaagtgccgccccgccttccactctcggcgggatctttgacaatgacgagcgtcgtaggtacactggaggaacattgcagcgagctcggcccgcgtcccgtgctgcctcggagtcgatggacctgtccagcgacgacaaggagtctggggagcgaactcccaagcagatctccgccagtttgatcgacccggctctccattcaggatctccgggcgaggatgatgtaactcggactgccaaggccgcaaccgaggtggcgtagaggtcggacgtccagtcggagtgggttgagaaggttcggctgattgagtacctacgtaactacattgccaaccgtcttgagcggggcgagttcagcgacgattcggagcaggaacaggaccaggagcaggaacaggaccaggagcaggaacaggaccaggagcagggacaggaccgtgtttctcggtcgccagtgtccaaggcggatgttgacatggagggcgtagagagagattctcttccccgttcaccgcgcacggttcctatcaagactgatggggaaagtgccgaggacagtgtgatgtatcccactttacgaggcctggatga

SEQ ID NO: 18868 - DNA, 634 bp, Emericella nidulans
ctgcgaacgctggagcaacgaccaatcgggcttcgaggaggctatcgccgcggccgagaagtctgacgtcgcaattgtcgtcgtgggaacctggtcccgcgatcagcaggagctatggcagggcctcaacgccacaacaggcgaacacgtcgacgttaatgacctctccctcgtcggcgcccaaggaccactcatcaaagccatcatcgacacaggcaaaccgactgtcgttgtctttagttccgggaaaccaatcacagagacctggctttcgaactcggccagtgcgctggtccagcagttttacccctctgaacagggcggaaacgcactggctgacgttctgttcggcgactataacccctccggcaaactctctgtctcgtttccccggtacgtcggtgacttgccgatctactacgactatctgaactctggccgttcaatcggagactccggatatgaggctgagaatggcaccctcgtcttcggacaccaatatgtcctgggcagccctgaaccctggttccccttcggacacggactcagctatgtgaacttcacttacggcgaggtgtcgctatcgaaaacaaacgtcacagcgtctgacacaattagcgtatctgtggatatc

SEQ ID NO: 18869 - DNA, 635 bp, Emericella nidulans
cctccctctccacggcaccaaacccataaccgtcctgggaggcctgacctcattcggcggacgtgggaataattactctatgcatgtatgtctctcacttgggcctcttccgttatgcccttctgtacttggctaagcacaataatgtctacaggcgattacagaaatggcccgccaacttcgcacccgcaagcaagcttcatccaaggcacaaaacggcctcgtcctcgccaacggcggcgtcctctcctatcaccacacagtcatcctttcaacacggccgcggcaggacgcagattatccgatgtggaatccacttccatcgaatgtagacgaggaacatcctcctatcaaggagcaggcagaagggggtggtattattgaggtatgttctctatcatacttcgcataaactcgttattagtaagaaaatgcacttgagctctaacgaagaatccagacatatacagttcagttcggccgcgatggttccccggtcatgggtttcgtggtgggccggctccttgatagatttggaaatgggaatggggatcggtttattgcgaatgtggaggatgcaaacacactccagcagctttgcagtggtaccgaacaggttgggaaacagggctggg

SEQ ID NO: 18870 - DNA, 635 bp, Emericella nidulans
ctcgcccgtgggatgaaccagatctgctcagaaggtgagttgaattgtgctctgtgaatcgaacgagttcctgacccatataacagaatgcgcttcaacgatggggcggtcgacagcaagggccgtctctgggctggagccatgaacgatcccaaggtccaaagtctgatcaatgaaggggtgcttttccggctagatccagacctgaaactgagtcgtatggttgagcagttgacgataccaaacggtattggctggaactccgccaacgatacgatgtatctgacagattccccaacggggaagatcttcgctttcgactttgacgagagcactggagagatcagtaacaggagagtccatttcgacactggagagccaaaagaacctgacgggttcgccatcgacagtgaaggatgtatctggagtgcaatctacggcgggggtaaggtgatccgcatcgatacccaaggcaaagttattggcgagatctcacttcccacccgaaacatcacctgtccggcttttgtggggacagaactattcatcaccacggccaaggacgacaaaaatgacgacaagttcccggagtcgattcggtatggagggcatctctacaaagttgatgtgggagt

SEQ ID NO: 18871 - DNA, 637 bp, Emericella nidulans
gtcaggctgcaacatgtcggtaggcttgtgggccgtctaatactagatcggcgcctgcagacatggcgaccggtgctcacgcaaacatgtcaagccatcatactctcagacgatcctcatgccaaacatgtaccaaaaccccgcctacgatcccaagagcaaaatgaacccaagccaactgcaaaaccacttcgatgcgttctacgaagacgtctggtgtgagatgtgcaaatacggcgagctggaggagctggtagtctgcgataataacaatgaccgtgagttcttttgcctcattgctaatattgtgcaaaactaaccttgcttctcagatctgatcggaaatgtctacgcccgattcaaatacgaagaagatgctcaggctgcctgcgatgcgctgaactcccgatggtatgccgcgcgaccgatatactgcgaattatcgccagttaccgattttcgagaagcttgctgcaggctgaatagtggcgagggctgtgtacgcggcgggttctgcaacttcatccaccgaaaagaccctagtagcgagcttgaccgggagcttcgcctcagcacgaagaagtggttgaaggagcgtggccgggatgctcggagcgtcagccgcagtcctagcccg

SEQ ID NO: 18872 - DNA, 638 bp, Emericella nidulans
cagcctctgttgtcctgtttgggaaccgaatcatcccgtccctcaacaaattttctctcttctatctccagatcggctggtttgtcgtcctcgtcacagtggtcgcgtgcgctccgacgcaccagagcaaagaatttgtcttccggacctggatcaataataccggctgggataacaatgccatttgcttcatcactggcctcgttaatccactatacagtctgggtggcctggatgggatcacgcatataacggaagaaatgaccaatgtgagcaccacttgatcttcggcgaaaagcctttgctggtactgacaaggggagaagccctcgcgcaacgcgccgttggcaattgggataactctgactatcgcatttatcaccggcctcagttatctcattgccctcatgttcagcgtccaggatttcgccgcgttgtcggataccaaaaccggcctgcctctgaccgaactgtttcgccaggtgaccgagtccgtcggtggtgcctttgggctgaccttcatcctattcattgcgttgggcccatgcgtgatctcgtcccaactgtcctcgtaccgtgttctgtgggccttcgctcgtgacagcgcgatgccgttctccaatacatgggcccgggtc

SEQ ID NO: 18873 - DNA, 638 bp, Emericella nidulans
caacaccgcgtatttgtagtcgaagacaaatccacccagttcagctacggcatcgagatgatgttgggggggatcatcccaaaggtgaagaagatccacggtaacgacggcctcatcttcacctgccgcagcaccccgtaccgcatcggcacagacgagcacattctgaagtggaaacctccctctgagaacactatcgatttccgtctacgtctcgaattccctgtcctcgaaccagactctgaagacgaggcagacggcatctcggaaccttacccagattacgacgcccttccgattttccatctcttcgttctacataataatgaccaatatcaaccttttggtgaaatgtatgttacgccgtcagaatgggaggacctcaaagcgctgcagatgccgctcgacgatgcaatcgtcgaatgctccaaagatgagtccggccgctggcgattccatcggattcgggatgacaaggcggatgcaaaccattataccaccgtcgacaaggtattagagagtatagaggaccgtgttaccgaggaagaccttatccgtgcggcgccggcgataaagacggcctggaagaagcgggcgcaggctgaggctgaagagcgtaaacgcgccagtggcagagc

SEQ ID NO: 18874 - DNA, 638 bp, Emericella nidulans
caccgagcaaatctacgacatcttccagctccttccccagtccacccaggttgtcctgctctctgccaccatgccccaggacgttcttgaggtcaccaccaagttcatgcgtgacccagtccgtatcctggtcaagaagcaggaacttaccctcgaaggtatcaagcagttctacatcgctgttgagaaggaggagtggaagcttgacaccctctccgatctctacgagaccgtcaccatcacccaggccgtcatcttctgcaacacccgccgcaaggttgactggctcactgacaagctcactgcccgtgacttcactgtctccgccatgcacggtgacatggagcaggcccagcgtgatgttatcatgaaggagttccgctctggatcctctcgtgtcctcattgccactgaccttctggcccgtggtatcgatgtccagcaggtttccctggtcatcaactacgatctccccgccaaccgtgagaactacattcaccgtatcggtcgtggcggtcgtttcggtcgtaagggtgttgctatcaacttcgtcaccgctgacgatgtccgtatgatgcgtgagattgagcagttctacagcacccagattgaggagatgcccatgaacgttgctgacc

SEQ ID NO: 18875 - DNA, 638 bp, Emericella nidulans
atggccgacatcctcacccagctacaaacatgccttgaccaggtctgtactttccgagtcccctctctcattccagtcccaaacagtccaacgtattgatcaacccagcttgcaacacaattctacgccacaatcggttacttaacaacctaccacgacaattccccagcaataccgccggacaaccctacgtccgcacccgccctcgccaagatccagaaaaactcgacaaacccgcctatccccgccggtgcagccgcaatactcaacgcatcacaaggttctccatccggcgccgcaacaggcgcagtgacgcccggcccgccagcacctaatgcaagtgctggatctggagccggcgaagcaggagcagcacgacaagaagaagggctcccccctcgtccggactcaccgcgaacattcacggcgcgacagcgagaattggcgcgtgatttggtcatcaaggagcagcaaattgagtatttgatttctgtattgcccggaattgggtcatccgaggcggacgaggaacggcggataaggaagttggaggaggagttgagggcggtggaggaggaaagagagaaaagggttagggagttgagagtgctgaggaggagggtagaagaggttttggg

SEQ ID NO: 18876 - DNA, 639 bp, Emericella nidulans
tcagccgatccgaactacaagcctgtggatacttaccccgggaaagttgaacactacacgggaggcagacagcagcatggagcgcagaagccagaacttgaggttggtgagatggagggcatcacgttcaaggttgagccactgaggcgggttggggaggatatatcaaccatgagggctcgcctgctgtgttagttaatctctggccctctttgtctttcttaccggacgtcgtttaagacggaagctaacttacttgccggaactcagaccagagtcggaagcgaggtattctcgagtccgacctgctgttgtctacttttgccgacgtttatttagccgacatgaacaaggagcagctgcaagaatacgatcggttccttgacgagaatgactgggacatctactactgggcgacccaggatcccccggctgagggcggcgctaaatcagacgtttccaaggacaccccaaccgaaacatggcaacgcaccggggccaaaagtggcgagtgggcgcaaacagttggtgcctttaaggctgcgtaccggccagtaccgtcgcgatgggcggactctgatatcctgagactattgagacagcatgttcgggataacagtgccaatggtttccatgcgg

SEQ ID NO: 18877 - DNA, 640 bp, Emericella nidulans
tccgctgttgccagtaatgatgaggatcctgtccttagcgcagtgcagctgctgtgggtcaacctcatcatggacactttcgccgctcttgcacttggtatgcttcccctcgccgccttttttttttttgttttttgtattttttttttttttttaaaaaaaaaaaggatgcctaatgctgctatagcaacggatcctccttcgcctcacgttctcgagcgcaaacccgagcccaaatctgcgcctctaatcactctgacaatgtggaagatgatcatcagtcaggccatctatcaactggcagtgacgctcgtcttgaactttgctggccagcacattttcccaaagtgggatagcagatgtattcagacagtggtgttcaatacatttgtcttcatgcagatattcaaccagtacaagtaagtaatagggttccatcttagtagagtcacttactgactgatccctgcagctgccgtcgggttgataaccgtctaaatgttatagagggcattttaaacaacagatggttcatcgccattcaggtaatcatcatcggcggccagatcatgatcatcttcctcggtggtcaagtcttttccgtgcagcgtcttgaccagccctcacagtgggcagcgag

SEQ ID NO: 18878 - DNA, 640 bp, Emericella nidulans
aagaaggccgcgaacgcaaattgctgcactggatctacagccagccgaacctcgacctcatccgcggcagcccccagaaagttatcgacctgatcgatgagttctcggagacctaccatttcatgactgtcggtcaagagaagggccctatcgtcaccgagctcattgacaagcacaagcccaaaaagatgatcgagctcggctgctacatcgggtactcggccattctgttcggcgacgcagtgcgtcgcaatggagggacccgctactacagcctcgagctcaacccagagtttgcggccattgccaatatgcttgttgaacttgcggggctgcgtgactttgtgcgcgtcctcgttggacggagtgatgtactcctaaaccaactgttcaagagcggagaagtcgagcacgtcgagctgctgttcatcgaccactataaaccggcgtatacgctagatctgaagctgtgcgagcagctgggtaagatcgtccctggtgtttcgatcattgccgccgataatgtaatccgacctgggaacccgccgtatctcgagtatgtcaggagctcggtggagaggaagcgcgaggaggcggcgaaaggaccgtccaaggcctatacgacggacgggttcgagga

SEQ ID NO: 18879 - DNA, 640 bp, Emericella nidulans
tgcgttgattgaggtcaccgaaaattctgaacatgagaggcataacctgctgggaaggcttgttgccgcacgaagagaggaacaaagtgtacggtgctctggctctgggcctggtctctccaatgcagagattctaggtaacacttacatattctcgcttgcgggccatgagacaacagcgacaaccatgcgatttgcgttgcctctacttgctatccaccaagatgttcaagatagattatataaggaattggaagaggctttgcgtgatcagcccgctaacccggctgagtgggagtattcaacggtcttcccgagactggtgactccactgtgtattatggcaagtccaaaatctccctcaatatattccacactcgctaacagacacagcttgagacccttcgtttgtacccaccggttgtaagtattcccaaaatgacgacaacgcacatggcggaaattacctataagggcgaacggcattgcttgcccccaaatgtgcgagtcaatctcaacgccaatgttctccactactcagaagcatactggggcccagacgcggacagttttgatcctcgtcgttgggacaaacgcaacgctggtagttttcttgcaagaaacgccagcgctagagggc

SEQ ID NO: 18880 - DNA, 640 bp, Emericella nidulans; identical to SEQ ID NO: 18879

SEQ ID NO: 18881 - DNA, 640 bp, Emericella nidulans
tcgcctaacatgccctgattccagttccaagccatccgtggcgccttcaccgtccgctcgggcatcgactcccttcccatggtccttgccaatgtaatcggcattatcctctccggcgccttgacgactggcctaggttactacgcgccaatcttcgttgccagcagcatcatcacctcgttgggcgcgggctttatcacaacgttcactgtcgacgtctcccagtcccgttgggtcggatctctttctctcaacggactacgtctcggctgcggatttcagcaaaggtggtgtggccgcccaggctgaccttacgctcccagacgtatccgtgggcactgcgattatcatgttcctgcagattctcggtggtgcgctcttcaccttcgttgcgcagagtctcttcaccaccaagctgacagagaatctggctgcgctggagatttcgagtcttgactcatgctggcgcgactggactgcgggactggtgatcgaagagcagttgcctgcagtcctagatgcgtataatggagtcctgatcaacgtctttcacgtggcgctaatcatgggttgcttaagtactgtgggtgctcagggtattgaatgccgcagtaggaagaagagcgatggcgttgcttcg

SEQ ID NO: 18882 - DNA, 643 bp, Emericella nidulans
agtagtgtttctcgtgatgctaacaataattctacagttgcgcgcatcatgaaattagcattgccagagaatgcaaagattgcaaaagaagctaaagaatgcatgcaagaatgcgtgagcgaattcatctcttttattactagcgagggtgagtgttctattcgcaaatagttatttgatggagactaatccctctgaagcttccgaaaaatgtcaacaggaaaaacgcaagacagtcaatggagaggacatcctgtttgctatgacctcgcttggctttgaaaactatgctgaggccctcaaaatctatttgtcgaaatatcgagaggtaagacctgtgcaacgtttttggacgatcctgtctatcccagacagcctttgtgctagggcaagtgttgctaataaatatcagactcagtctgccaggggagagcatcagaatcggccgccaagtagtgggtatgccgggggcggacccgtcggcggagctgccagcggcccttcagtcgtgcgtgccgggggtgctgcagctggaggcgccttccccgaagcctctgataatgcaggcagcattatgaatcagggcttggacccatctgagcaggacgcctcagcttatggataccctcccatggttggccaa

SEQ ID NO: 18883 - DNA, 644 bp, Emericella nidulans
ttctgcgaagcgccatctcgatgttttttacattgaatcgtctctgactgaggtattgactccgaatgaaccaaagtctcggcaatcgctaactctgatagatggtcgacttgaacactcgggcgctagacttctcacggcattatgcaaacagagcacaccagtctcgctccggtgctgtagtcggatcagctctgccctcgctccatgaggtggaagagatgctcaacatccaacgacggaaccacgacgctctgatgcgcataagagccgtggttttcagccaggaacatgccatggccgagcaagtggcacagcgaaaagccttcaaatttgggggagcccacgatgacgaccaccgtatggcaatgtaccaggaggaattcaagagcagcggcgggttcggccccgactcgaagaaacgacgtggtgtatgttctaaacccggactactgtttacgcttactggtactaacaattccaacagaaagctgcccctcctggtcgatgccatagttgcaaccgtgccgaaacgccagaatgggccgcggccccgatggcgcgcggactctgtgcaatgcatgcggcttacactacgcgaaattgactcgcaaaatgggcgccaaacaggcggcagggttggg

SEQ ID NO: 18884 - DNA, 644 bp, Emericella nidulans
tctccttcgacctctcccttgcccgaggcttggattactataccggtctcatttacgaagttgttacaccactgtcctccgcagaagggttcgctcagtcccagaaaaagtcaaaatcgaaatcaatcggacaggaccagaacattggcgttggcagtattgctgcaggtggacgctatcacgacctggttaacatgtttgccaagaagcgtcaaatcccctgtgttggtatctcgttcggtgtcgatcgaatcttcacaatcatgaagcagcgccttgagaacgaggccaaagagggcaatgcctccatgcgcgccagcgaagtggatgtcttcgtcatggctttcggtggtaagggcttcaatggccttctcctcgagcgcatgtctgttgccaatcagctatggaaggcaggcatcaaggctgaattcgcccagactgttaagccgtagctgccgcaacaattcaagctggctgaagccggtggtattccgcttgctgtcattcttggggaggacgagttagcagcgggcaaggtcaagctaaaggaacttggactgcccgaaggccacccagaaaaagacggcactttaatctcacgagaggatcttgtggaagagatcaagaagaagctaaacaaaatt

SEQ ID NO: 18885 - DNA, 644 bp, Emericella nidulans
gggaggatggggcggtcgtactcgcgatttcaggagaaacggccgtatacgacgcaggtgtgcagttcgattgttatctatctgtgcggggatctgagtgcgcagtttttctttccgccagaaaatccaccgcagagaagaatggagtctcagccggaaaaggacgataatggaggtgttgctgagaagaaaggagggtatgacccgtggaggacaatgcgccatctaactgtcggtattgggtccagcattccgtcgtataactggtgagttcgcccgctcctctataccctcttagagagattcttcaatgtcaacaggaagccaggctaaccgagatcatctaggttcatgttcctccacaacaacttcaacttcgcctctaaacccctttccatcctcacgaaagtcgtcgtccagcaagccgtcttcactcccgtcttcaacacctacttcttcagcgtacactctttgctctccggcgcatcattggaagagacatgggaacggctgaaggtcgcgctgcctcggagtattgtgaatagcgccaagttctggcccatggttacggcgttcagcttcatgtatgtcccgccgcagttccgcaacgtgttctcaggttgcattgcggtcgggtggcagac

SEQ ID NO: 18886 - DNA, 644 bp, Emericella nidulans
aagttctttggttatgagatggagtcgctgacgatacgtaggcaggaagagcgcaaaccactcgcgaaaatcgacggtgctacgatcgatgtcgatgcaatatgggctcagatgaatgcgccagattcaaaattaggtctggcgccgatcccagacgctcaaaaacaagacgaaaccccggcctctgacaccgaagtgcgcgaccaggagaatgcgaatccaacggagcccaatggaccggcagaaaagggatttcagcaaacatctgaaatggtcaaaatcaagcgcacctacaagttcgcgggcgagatgataacagaggaaaaaattgtccctcgcgattccgccgaagcgaaactcttcttatcgggtaatggcgatggcgaagtcataccagttactgaagatgaagtcgcaaatatgactggcaaaggcaatgaaaacacaagcacaaacaacaccctccgtatccgccgcccacttcgtaaaatttcccgattcgatccgaacccatccggcatgatcaagaagagctgggggaagcagtcgcttacagaaactggagctcgaactggagccggccaggagaacatccgcgggccgaaaatcaacaccgtcgaaaaatcacgcttggactgggttgc

SEQ ID NO: 18887 - DNA, 645 bp, Emericella nidulans
cagactggacgtccaccgacgaccgcgtccgtggcggttcctcgcactcctatttaattccatcgcacgacgggaaaaccgcgacatttaacggtcatctcgacacccgcaccctcggcggtgccgcgcttcgcatcgcagcggaccaccggagaccgaagctgggatctatcctcatactcgggggtggaattggatattgacactgcgaactcggacacgaaactgtacacgctcatcgtgaaggatgagaaggggcttctcccgcctagagacgacggacgcgagcggagcgggttgagctgggaggcggatttcaggcctggttataacaagggcaaagtggctttcaaatgggaggatttcaggccgacgtatagaggaaaagaagtgcatgacgtcgagccgttggactgcaaggctattaagaggttcagtattatgatgcgaaggttcgtgttttttggtgagtaagtgctgggatactgactcttgagtagtttcttcggtgagcaggagggcgactttactctttctatcgtatctatagctgcttggaaggatagcagggaggacaacctggggctggagaaagaagagggtgctattattgtggagtccaaagaggcgcctgactatggcagc

SEQ ID NO: 18888 - DNA, 645 bp, Emericella nidulans
tttagacgtcttaactgcaatatgtcgcaccttaggaagctgagggcagcagcaccaagtgtgcgagaagtcgcgctatggagccggcaatccccttactcacgttctttttccagtcacaatcgcccatcgccgaaatacccgcatcatgtcccgctcggattctttgagaagggatttcttgccgttggctccgcggtgggagctctacttaaccctcgaagagctggtcagtctaagcatttgctgagcatcgcatgttgaaggactaactctgaatctccaatttcagacctaattgcaacgctcggcgaagtaacagcaaccccatactttatctaccgactccgcgatgccatgcttcaggaccccaccggtcgacaaattctccgcgatcgcccacgcataacctcccagaccctcccacttccctatctccgctctctacctgaaaactccgtcggacgcacctacgccacctggctggatagggagggcgtctcccccgatactcgggataatgtgcagtacatcgacgacccagagtgtgcgtacgtcatgcagcgttaccgtgagtgtcacgacttttatcacgccgtgaccgggctccctacttttgtggagggtgagttagcgctgaaggcg

SEQ ID NO: 18889 - DNA, 645 bp, Emericella nidulans
tgcccaaaactcccacgcttacttgggaaactggaataagaacaccaatcactggctgcggaattatgtctacttgcgcgtcactcccaaaggaaagaaaccagggttccgcgccagcatggctacatttacaactagtgccttctggcacggcttttatcctgggtattacttctcatttgttctaggctccttcgtccaaactgtggccaagagtaagtataacaccttgcgtatcttcccctttgtccatattgctcattctgcctagacttccggcgttatgttcgtcccttctttctgtctacggatggaaccacacctggaccttacaagcgttattatgacgtcgttagttggctcgtaacccaggcagtcatgtctttcgttgtcctaccattcatttacctatcattttccgattccatccacgtttggggaagcgtctattactacggtatcatcgccgttgctgcctctcttgctttcttctcttcgccagcaaagggcttcctcatcaagaaattgaagtcccgcgctgatcgccccaaggccgtgcgatcaccaagcacagaaagcattcaggaaccaacacttggtcttcctgacgatgcaatcaaggaatttgatgatgtagtgcaggaa

SEQ ID NO: 18890 - DNA, 646 bp, Emericella nidulans
gcaacccttcgacccagccacgaaaccaagcaatgtatcctcagatcatactcaccaatggcgtgtttacgtccgcggggtcaacggcgaagacatttcctactggattaaaaaagtccagtttaagctacacgaaacatacgtgcagaacgtccgcacagttgagcatccgccctacgaggtgacggaaaccggatggggtgaattcgagatccagattaagatctacttcgtcccggaatccatggagaagccacagaccctctggcacagtctcaaactacacccgtacgggcctgatgcggaggggaagaaggagcggagagaagtggtggtcagccagaactatgaggaggtcgtgttcaatgaaccagtggaacagttctatgactatcttactggaggctccggaacgcagcagatgcagaaggggaagagtgggaagaatgccaaacaggcacaacaacagcgcggtggcaggacggctgaaattccgtttaacgagacgccggagaacccttacagtcggacggccgaaaacaaggagcttgatcgattagctgaggcaaataagaccgtggagcagatgattaaggatgagaaggagcggcttattgctcgggagaaacgattggcggagttgcgc

SEQ ID NO: 18891 - DNA, 648 bp, Emericella nidulans
tctttcatacgcccggtggccggcttgctggatgggagttgttaccttggaagagaataccaaaggggaagaaggagctgagggataacacggtacgtttttgactacattttttggctatattctcgactgcgatcttgcctgcttgtaaagcatgtagaccccctcgtcaattgtcgggacatcgtgcaaaatcttgagagttactactagctaacctttgcaatcacgccctagatccacgtccgcttagcaggcattgacgcgcccgagctcgcgcactttggccgtcccgaacaaccgtacgctcgcgaagcgcacgaatggctaacgtcatatctgctgagtcgccgtgtgcgcgcttatctgcatcgaccagaccagtaccagcgtgtcgtggcaaccgtctatgtacgtcgcgttcttgatttcccaatcccgttccgccggcgggatgtatcgtacgagatgctgcggcggggacttgcgacagtgtatgaggccaagtctggcgctgagtttggaggtgatgctattgaagctaaatatcggaatgcggagtggtgggcgaagttgaaggggaatgggatgtggaaaggattccggcggaataaagagttcgaaagtccgagggaatacaagacccgg

SEQ ID NO: 18892 - DNA, 648 bp, Emericella nidulans
tgcagcagcggaattgggaaggacctcgcaattgcttttgcagccaaaggcgtcaccgtgcttgctactgcacgacgtaccgaatctctcagcgacttaacgagccaatatgacaacattgaagctctttcccttgagctcggcaacccaggcagcattgaaaagttaagggacgccgtattgaagcgcacagacggtcgtctcgatttcttggtcaacaatgccggaacgcactacgcatcgaccgcggtggatctggagattgaagaagtcgcgaagctcttcgaagttaacgtctttgctgtcatgcgcctgtgtcagatcttcgtgccactccttcgccgcgcacctcgtgcgcgaatcgtgcaaattggtagtgtgactcggagcgtaccggttgtttggcaagcgccgtataatgcatcgaaggcggctcttagtcagtattccaagactcttcgactggtatgacaggcaagagcgccacgcatgacgtggtcaaatctactcatcgctaactgatctttaggagctgaagcctcttggaattgaggtgattgagatagtgaccgggttcgtgcaaagcaacatcctccatcatggactacatgctccagaggattcaatctaccttccaatcaaaagcac

SEQ ID NO: 18893 - DNA, 648 bp, Emericella nidulans
ctataatgctcacctcgcttctcacggacatcattaaaaatgcggttggaagaccccgtcctgatttaatatcacgctgtatgcctagaaaaggaactcctgagagtacgcttgtctactggactgtttgcacacagaccaacgaacatattctacaggaggggtggaggagtttcccaagcggtcacagcagtttctcatttgctggactggggtatctatcattgtaagcttggtgcgaattcccatagctagccacccactaatcattcatgtcaggttcttctctggtcagatgcacgtgtttaggcctagaacggacttatgccgctgtcttttggtcctgattccgatcgtctgtgccctcatggtcgcgatttcccgcctagatgattaccggcacgacgtgtatgacgttacatccggcaccatcctaggctccgtggtcgcctacttctgctaccggcgctacttcccacctctgcgctctttccgatgcgacactccatacagcaaggatgacttcgtcccagagggcttctctaagcttccagacgacgaagagcaacagctgtctggccgcagggctcagtcgtgggggggcgaagaatcttaccaactagatgtatcggtgtctcacgaagaccg

SEQ ID NO: 18894 - DNA, 649 bp, Emericella nidulans
tctcctgcaagccaaagtctctcagctgcggtcctcgtcaaccacaacccgcgagacacgcagcctggtcaatgaaatcgcgacgattctgggcgtagaggcctttgctacctggaaggctgcgggcactggaaagactgtacgcacatacattccggaaatgtaacccatagattagacagctctaacagcagcaggattccaccccgttaggtatcgagtacgagacgaagacaatcgaccccgcaaacattgcactggtaccaatcctccgttcaggactgggcatgattgacggtagacgaccgattcgatagataccggccggctaggtagctaatcagtgtgctgcagcgatcaatgatctcctaccgtctcccgtcccaatctaccacctcggcctcttccgcgagcgcttctccctccagcccgtcgaatactacaacaacctcccctacaaccgccccgagcaatcgtcttcttcgtccggaccaagtcccagcgccgtcaacacagccgcggcctcggtcgctatcctactcgatcccatcattgcaacaggcggcacggccgaagcagccatccagcttctccgcgagtggggcgtgcagcgggttgttatgctgagtgtgcttggctccgaggatgg

SEQ ID NO: 18895 - DNA, 649 bp, Emericella nidulans
gaatagtttcgtcaagaccctcacgggtaagaccattacccttgacgtcgagtccagcgacaccatcgacaacgtcaagaccaagatccaggacaaggagggtatccccccggatcagcagcgtctcatcttcgctggaaagcagcttgaggatggccgtaccctgagcgattacaacatccagaaggtatgaggcctggtctaccgattgagttttgcgcgtggtatagatttgcggttgcggaggcggaaggacggttatcttgtgtcatagttttgacgccagttagccgctcctagttagaaggagaaggggtgtgtcgcaaggagaatttgcggaagaattttgattgggatgatgacggttggctgactatgcctctctcaattttataggagtccactctccacctcgtcctccgtcttcgtggtggtatcatcgagccgtcgctcaaggccctcgcttccaagtacaactgcgagaagaacatctgccgcaagtgctacgtacgtctaccggattaccactcgactcagttccatcttcgacgaaggatttgagaactaatactagaataggctcgtctccctccccgtgctaccaactgccgtaagaggaagtgcggtcactccaaccagttgcgcccca

SEQ ID NO: 18896 - DNA, 650 bp, Emericella nidulans
ggggcgggggtacgtctctgaccatcaccgattgcgacacaatcctgaccgatgtgcagctgggtgatagcatcagtgtcaatggtacgaaattgatgtccaatttctctacatatatatccgcctgcgctcaaatagccatctgtgcatatcaagtctgatgttgacgcaaccacaggagcctgtctcaccgtcacagcttttgagaagaactggttcaaagtcggcgttgcccccgaaaccctccggcgcacaaacctcggctccttaacagaaacatccaaagttaatcttgagcgcgccgtgaaaggagagacccgaatgggcgggcatattgtgcagggccacgtcgacacaatcgcaaagatcattgcgatgacccccgatgagaactcactggtccttcgtctgcagccgcgcgaccctgcggtgttacggtacatagttgagaaggggtttatcacgcttgatggggcgagcttgactatcacccaggtgaaggatggcgaagacggatggtttgagattatgcttattgcgtacacgcaggagaagattgtgacggcggcgaagagggttggcgactttgtgaatgtcgaaattgatgttgtggctaagtatgtcgagaagggggtacaggcgtactttgc

SEQ ID NO: 18897 - DNA, 651 bp, Emericella nidulans
ctggtcctcagcccggctccgctaagaaggccggcttcgtcggcgccaaggtagccctcccccacgggcccgacgagggtgttgaaggtctcctcaagaatatcgagtacctccgcaaacagcgcgaagccgtgggccctaacttccccctccgcgtcgactgctacatgtcgcttaacgtcccctacaccatcgagctcgtcaagcgcgccgagcaggagggcctccacatcgactggtgggaggagtgtctcagccccgacgacttcgacggccaagcgctcctcaagcgcgcccacccgaccgtcaagttcactaccggtgagcacgagtactcccgtttcggattccgcaagctcgtggagggccgcaacgtcgatatcatccagcccgatgtcatgtggctcggtggactcactgaactcctcaaagtctctgcactcgcggcggcatatgacattcctgttgtgcctcacgcgtcgggcccttactcctaccacttcgtcgtctcgcagcccaacacgcccttccaggaataccttgccaactctgccgatggacacaccgtcgagccggtcttcggtaatctattcactaacgagcccattcctacaaagggataccttgacgtctcgattctcgataagcctg

SEQ ID NO: 18898 - DNA, 652 bp, Emericella nidulans
cggcacccgggtatgttaccgcaagcatgcttttattcgcatcctgtacggtcgctaatgaagagatcagtatgccttctcccgcaacttccgtgagaagggtcagatccgcctctcgacctacctgaagacctaccggtacgacgaaatctctcatatataccagctggagaatcgaggcaacagagactgatcgtgacaacagggttggtgacattgtggacatcaaggtcaacggtgccgttcagaaggggtcagtgaaatctccgtttccaaggcgaaaaaccgcaaccgcgacgagttctgcatgaccggttttcgacctaatctgtggttttccttttggataaaatgctgagattataaaatagtatgccctacaaggtctacaacggtaagaccggtgtcgtttacaacgtcaccaagtcctccgtcggtgtcctcctctacaaggtcgtcggcaaccgctacctcgagaagcgtatcaacgtccgcatcgagcacgtcaagcactctcgctcccgtgaggatttcatcaagcgtgtcaaggagaacgccgagaagaagaagcaggccaaggagcagggcatccaccttcacctcaagcgccagcccgcccagcctcgtgaggctcacaccgtcgagggctcca

SEQ ID NO: 18899 - DNA, 652 bp, Emericella nidulans
attttcccacaacgtgcctatttggctaagctattcggtgaaaaggctcttcactttttagcgcagtgctatctcggagtaggcaggacaaaaattcaaccagctgaaagctacgagcgcaaaagcgtcggcaccgagaggacatttcatgagatcagtaaacgagaagagttcagagagaaactctggtcctgtgctcaagaactagagaaggacctgtcacgtactcaatttatgggtcgtacactggttcttaaggtcaagttggctactttcgaggtgttaacccggcaatatcagcccgcaagggccgtgtctacggccaaagatctctttacatctgcccttccgatgttagagaaactcgagaaggagattcccaatatgaagctccgtctgctcggtattcgatgtaccaaccttgtgagcaccaagaaattcgacatgaatttcttcggtgccgctgcgcggagacaacctgtgccagatactgcaatcgagtctcccgtggaacaagaaataaatgcagaagaagccttcgagaaggcggcccgcgaggagctccagagcgatatgcaggctctagaaaggctcagtcaagaaacacccgaagctggaggtgaccagattgagataagcccaacgccgacca

SEQ ID NO: 18900 - DNA, 653 bp, Emericella nidulans
tggtggaatgccgtgctcgttgatggtgactggcgcttcatggattgctctctcgctaatgcaacgaacccaataagaaaccaattcgtgaccacgaatacgacggtggccgagtcttggtatttcttagcccgacctctcgagctctgctatacacatgtgccgcttgagcctgaggggcagcatatttgtccccctatctctccggatgtcctcctcgcacttcccacagtttgtccgacatatttcaaaatggggctgcaatttccagattatgacaccagcgtatttcggatagaaggactggaagtccttcaggttcgtattttggttccagcagacgtagaatgtgctgcggaggtcgaggcgcctggattcgctcgtgatgccgacggggacttctttgagagtggagaaatcgtgcggaaacgagcgcttgtccagccagattgggtcaatggtcaaaaacgcataaccattaaggctgttttacccggcgacgaagggcaaggtatggtcaaagtttatgccggccgaaaggggctcatgcactccagccgagacatacctcacccgcttgcctttgcactcccaatcatccacaccggagaaaatcctccatatgaatttgtccttcgccatcccacccctca

SEQ ID NO: 18901 - DNA, 653 bp, Emericella nidulans
tggtcccgatggcagaacgaatagcgaaagatctcgcagcagatgaaagattactggacgacgaagaaacgaaagaaacggcgttttcccgcctcgagtccctgggctatagagtcgggcaaggtcttgcggaaaggtgcgcacacagtagtttcaaactctttcaggtttcgctgctggaaaccaatatagaagaaaccatgcctagaagatcttacatgctaatgagcacattttgcattacggcaggttctcccgggatcgaccgcgattcacagataacttggatgtcatcaaattcctgtgcaaggacttatggatgacattgttcaagaagcaaatcgataatttaaaaacaaatcatcgcgtaagtgctacttgagagctggcctactttttgaggtctctagctgacattgagatttcaatttagggggtttatgttttgacagacaattccttccgtcctttcgcgaaaatgagcatgtcctcaaggaacgaggcactatccagggcgcaacgggtaagaaacccatgcattcatgttgagttagtctaatctgaaatagtatctctggtttccttgtggtgtcattcgtggtgcattatcaaacttgggcattcatacgactgtccaggcggaaaccacggaa

SEQ ID NO: 18902 - DNA, 654 bp, Emericella nidulans
cgcaactggcgattcgttgctgttgatattccgtacgttgtaaccatcacgcatcgcgatacaatcaagcgcttaatgcgcccacataatactgaaatggatctttccatcgcgtgtgcgttatactttgcagcgcgcggccaaggcacagcaattgacagccagcgccccgatgccagacctttccagtacaaaacacctgcccgcgtcctcctttctggcctgggtgcggatgagctattcgctggttattcaaggcacggaatcgccttttctcgcaatggttaccggggtctcattaacgagattgaactcgatgtcagtcgcctaggaaagcgaaatctcggccgcgataaccgggtaattgcacattggggacgcgaagctcgatttccttacttggatgaagattttgttgcttgggtagttcgaacaccagtttgggagaaatgcggcttcggagtcccaggagctccaatagatgccggtattgactctgagaagaaaaccctccgccttctagcgctcaaattgggcctggaaaacgtctcgcgtgagaagaagcgggccatccaattcggttcccggacagcaaagatggaaaaaggcaaaactaaaggaacagatgccttggactgaataccagttacaatt

SEQ ID NO: 18903 - DNA, 656 bp, Emericella nidulans
cggagcgagcgccagtggtaatggagccggcgctgggttccagcgacagtcgcagcgggcgccaactcctgaaccgacggtcgtggagaagcagttgccgctgacactggaggagattatgagcggttgtaagaagacggttactgtgaagagcaagacgttcgacgcgagtgggaaacggactgtgcaggatgttacgctggaagcgactatcaagcctgggttgcggaccggatcgaagatcaagtatcggggtgtcggcgaccaggaagaaggtggccgccaggatgtgcatctcattgtgacagaggtaagttcacggctacatgaagcaagcccaataactcccttgttatagaactaggcactaactccaccatagaaagaacaccccaacttcaaacgccacggcgacaacctcatcacaaccgtcgacctatccctcaaagaagcccttacaggttggactcgcatcgtgcgtaccattgacggcaagtcgctcagagtctcaaagcccggtcccacgccgcctgggtacgaagaaaagttccctggtctgggcatgacaatctcaaagaagcccagcgaacgaggcgatctcattgtgcgggttaacgttgaattcccaaagacgttgagttcgagtgcgaaggagg

SEQ ID NO: 18904 - DNA, 656 bp, Emericella nidulans
aggcgcccggttcccaaaatccatgtgctcgtctggtgtgtgggctggcgagatcccactccagcaggcctgggatctgcgcgacatcaccgacgacagagtcacgctgcggtcagaacttgagagacatgggtacctcggtgaaaccccttgttcacatgtcgctaaccccctcgctgcgcattttgagctgcatatcgaacagggcccgatcttgcaggattcaggacggtcagtcggtgttgtcatgggggctcaggggtatagatggctcaagttcactgtgaccggacaggacgcgcacacagggacaacgccgttgaccgcgcgacgggatccgctgcttgcggcgagcaagatggtggttgccagcaatcagatcgcgaagcgttttggggcgctggcttcaacgggtatccttaagatacctgaaaactcatccacaaacacggttgtctcggaggtggtgtttaccctcgatatcaggcatccagaagacgctgttgtccgcactgtcgaggaggagtgtctgcagtcgttcaaggccatctcggcagaagacgggaggggtgttgggctcagttggacggtcgagacggactcaccggcagtcaagttccatgatgactgtactggagtaatcaagaacgcagccg

SEQ ID NO: 18905 - DNA, 657 bp, Emericella nidulans
cgcccttttccgaccctggatcttcctcttcctggagccaatcgtgcttattgcgtccctctatatggccatcatctacgggacagtctacatgtttatgagcgccatgccgattgtctataacgaacagcgcggctggtctgagggcatcggcggcctatccttcttggggatcatggtgggcattatcttcggactcatctacgcgatctgggacaacaacgggcgatacacgagactgttcaaagcatccatggctgagtcgcgcctccccccggcagctgaggctcgtcttccaccagcaatcgtcggcggaatcgcgctcccaatcgggatgtttgcgttcgcgtggacaaattaccctagtatccactggtcggtcagcatcatactctctgcgccgtttggatttggatgcgtgcttgtgatcctcccgatcatgaactacctcatcgactcgtacaccatctacgcggcgtctgttctcgctgcggcggcgatcttccgatccattatcggcgcagtcttcccgctattcactgcgaagatgtaccataacctgggcatccactgggcgtcttcgatcccagcgtttctgaccttggcctgtgcgccgttcccactggttatgtatcggtatggccgggaagtgcgcat

SEQ ID NO: 18906 - DNA, 657 bp, Emericella nidulans
ttcttgcagcctgccgctgacgataatgcggagtctatcgaaacaaagatggaacatcctggcgaagcagaccaaggccaccgcgtaatggcagtgactatgggaatgataggggtccttggtgcctcgtccgcatatgcatcaatccgaatgatcggacagcggtgccacccgctggtttcggtcacatacttttcactggtcacgacagttgtttctgccattgcaatcgtgttccttccttcaatatccttagaactgcccgggacgccgttggaatggactctgctcattctgctcggtgtctgcggatttctgctacagtttcttctaactgccgggctatcatatgtaccacccccaccgcgagttcgaaatacgtctgcgcttcatcagcatttcaacgaagcggataatgcttcaaagtcagaaacaataaaacccgcccgctcttcatctggaacaaaagctaccaccatgctctacacccagatgctgtttgcgctgttttatgatgctgctgtctgggggagtacgttgtcggctgtcagttggatcggatccgcgttgatcctctccagtgccttctatgtggccaccgcgcgagattctccagcaccagcacatgcatccgaaagtgaggagaacgcggggcag

SEQ ID NO: 18907 - DNA, 658 bp, Emericella nidulans
gagaccccagctactgccgaatcaagcgctcaagatatattccgcaaattcttcgaagctcagttccagcctttggaggtcaaaagggtcaacactgccaaaaatgaatctgattccgaatacaccgacaacgagcatgatgggaatagtcaagaagatgactccgcatccgagtctgaatggagtggaattgaagagcaggaagaaaacacccctgttgaggtagttgagtatcaggctccttctcgcagtcctgaagacctgatagacaagaaagctcgaaaggcgtttatggtaagtgggggttggattatgcgcgtattgatctacgctgattttatcctaaagaccgcaaagccgccatccttctctatggacttaaaccctatcacggacagctcgaaaaaagccacgaacgacgaagatgacaaagatatcgaatcgcttaacttgaagaacgacctcgcacttcagcgacttctgaaagagtctcatctgttggaatcagcttcagatctcgcgccgacaggcaagaatcgacacaaggcgctcgatttgagaatgcaggagcttggggctaagaactcgctttaccaccagaagaacatgccatcgtcaatacgaaagggtatcaaagctaaggctgtttcaaaggaag

SEQ ID NO: 18908 - DNA, 658 bp, Emericella nidulans
ttccacgaaaataatatacaactcgtctatggcggtggtacaaaaggcctgatgggcgagattgcacgcacgttagtttccctctcgggacccgaatctgtgcacggcatcattccccgcgccctagtaagcatcgaaccggggtataaacagaacggtaatggtactaccggtacaccctcgacgtcctccgcatccgctggtggcgcggggaaagtagccgagcgcgttgttggtgaggcgcagacggtaacgtcccgtcgtcggagtacggcgtcaccacgatcgtggcagacatgcacacgcggaaacggcttatggcggaaaaggtgcgcgaaggaggaccaggaagtggctttgttgcacttgccggcgggtttggaactatcgaggaggtgatggagatgacgacatggaatcagttggggattcatcatttgggggttgtgctgttgaatgttgctgggtattgggatggcttgttggagtgggtgaggaactcagtgagggagggatatgtgtctaaggagaatgggagcatcctcgtggaggccaagacggttgaggaagtttggccgaagctggtgcagtatcaggttagcgagggaagatatcagttgaaatgggaggatgagtaaacggagatggatgcgttcga

SEQ ID NO: 18909 - DNA, 658 bp, Emericella nidulans
tggctcgtatgtcgccctactcaccgtttagtctaaaaaacagacactaacttggttgactagaatacggcgattgccatagttgcatcgtcccgcctcgtcttcgccgtcgcccgtgacggggtccttcccttctcctcctgggtctcaaaggtgcataatggccagccccggaacgcggtcatcgtcgtctggacggtcgcatccatcatcacctgcacacttctgccctctgacgtggctttcacgtccctcgtctcagcggctggtgtcccttccgctgcagcatacggtctcatttgtctcgcgcgtctcacctgtacgcggaatcacttcccaaaacccgcatggagccttggacgcctgtccaaaccattccagttgattggcgttttctggaacggatgggttgttgcagttctgttctcaccgtacgcgttccccgttactggcgagaacctgaactatgccccgatcatcatggccgccgtgacgattttcgcgttagtttcctactttatcatgccggaggatgcgtggttgcccaaagaccgcatctcgaattttgtcgacagcaagggcgtcgttacagagacagtggaagaggtctctacatctcgctaagcttgctagactcaccaagctcactaagctcact

SEQ ID NO: 18910 - DNA, 658 bp, Emericella nidulans
tccaggcccctgttcataccgactccctaacagtctacgaaaccgaccttgctgttctcacctacaccaactccgcctgcccctccaacgatatcaccaaagagcccgaaatccgttacccaatcacaaaagcgacgtctgtgacggagcagcgcgtttcacattttctcatgggcattgctttaataggaaccatgactggccccttgcttattgtcctgcacttaatacccgctgctgtcactgcgggtgtattcttcattgtaggttggggctcgattgagtcgaatgggatcgtgaaaaaaattgtcttcctactacgggagaggagatttattccaaaacatgaaaatctgctacaggtcaagagaaggaagatcatcctatatcttatttgtgagatcgtaccagttgcggcttgcgtggccatctcgcagacaatttccgctatcggtgtgttcactcaactaaagcgattaatgttggcgctaattttacctaacaggttttcccatcctgatcatcgcaatgatcccctttcgtgtctggatattgccgagatggttcagcttcggcgaactgcggattctggatagcctgacaactagtaatagtgccgtaatggagagtctaggtgggaagccgcaacgcctggaga

SEQ ID NO: 18911 - DNA, 658 bp, Emericella nidulans
gggatgcagacgggcaactgaatcgcaagggaatagcatgggatagaggattacacagtaccatcgagggtaaacgcgcgctgacctgcaattgcctacagcgactacatccagatccgctctcccgtctacctgcctcacaccgctggccgctacgccgccaagcgcttccgcaaggctcagtgccccatcatcgagcgcctcaccaactctatcatgatgaacggccgcaacaacggaaagaagctcatggctgttcgcattgttgcccacgctttcgagatcgtatgtgtacccacatacggcaaactggttgagtatttgaataatggatcagaaaactgacttgatatcagatccacatcatgaccgaccagaaccccctccaggtcgccgtcgatgctattgtcaactgcggtccccgtgaagacagcactcgtatcggttccgctggtaccgtccgtcgccaggccgtcgatgtctctcctctccgccgtgtcaaccagtccatcgctctcctgaccatcggtgcccgtgaggcctctttccgcaacatcaagagcatcgctgagtgccttgctgaggagcttatcaacgccgccaagggcagctccaactcctacgctatcaagaagaaggacgagcttgagcgtgtggc

SEQ ID NO: 18912 - DNA, 659 bp, Emericella nidulans
cggagaatggcatccttggaatggtaaggcaagagcggcgcggtaatagaacgtaagctaaataagtcaagggaccgtacccaactgatgatgaagtcgatgcgtatgtggagctccatctttacggagccatcttctaactgtttacagggacattatcaatgccggtaaagagaccgttaccttgctgccaggcgctgcaactttcgacagcacagagtcctttgggatgataaggggcggacacgttgatgtttcaatcctaggggtcagccaatactttccctgtgcaaattcatactaacatctgaacacaggctcttcaagtaagcgcaaacggcgacctagctaactatatgattcctggaaaggtctttaaagggatgggcggagctatggatctaatctcaaaccccgaccaaaccaagattgtcgtcgcaaccagtcacacagcgaaagatggcttacccaaaattgtcacagaatgctctcttccactgacaggggctaactgtgtcagcacgatcgtcacggagctggtaagacacttggctgaatcaaaatttgctgccctgttgctaacaaacaacagtgcgttttccaagtcgaccgccaaaagggcgagcttaccctgaccgagcttgcgcctggagtggacg

SEQ ID NO: 18913 - DNA, 660 bp, Emericella nidulans
ccagctgaaggactacgaggacatcctggatatactagatcgggcctttggagacccaaaccgtgttaacaatgcccgcaacgagctgttccgcttccggcagaataataaagagtttggcctgttcttcgccgaattccaacgtcttgccctagagggagagatgcctgaggagaccctatctatacttctggaacaatcaataaatcgagagcttaaagggatgcttatgcataatcaaccacctacccaagattaccatgaatttgctaagttcttacaggaacttgagaaccgccgccggcattatgaaatcaacctgcaatcagccagcagaaactaccctgcaattactagaactgctactagtcagctgtcaagaacaaactacactaccctgcctaggactatagagaacccagccccacaacgcacacagcctgatgtacataatgatgccatggatctgtcatctatccgccaacataaccctacacgtcgcgagcagggagaatgcttccactgtggatccccagaacatatggtcaggaactgcccacaccctgataaccgccctcttagcatccgctctgcctacccagcatccaacataaccccatcaattaaatctgagtctaccgctgtctccgaaggctcccg

SEQ ID NO: 18914 - DNA, 660 bp, Emericella nidulans
ggacgccgacctgcaggctaatcgggatcgctgtagggaggcgtgcaagaggtttaatgaagccggccctgtctcccgacgacgtcgagcagcgctctggagagagtgagtgcggttcacccatgcctatgtctaatcctaatcattaacagtataatcggcgacactcgcccacttccacctgtcaaacaggacccagcagcagacgagaagcaattcgacgagacagaccccattgttgatcctccattctccgtagaccacgggctcaatctcaaagtcggaaagggcaccttcatcaatttcgatacgacaattctcgatacatgcctcgttacaattggagagcgcgtactttttggcccgcatgttcgcatatacggggccacgcacccgatcgatccggctgtgcgtcggggcctagaggggcctgaggctggaaaagaggtgcatatcgaggatgatgtgtggattggaggcagtgtgattgtacttgccggggtgaggatcggacgagggagtacggttggggcagggtccgttgttacgaaggtgactacctagctattcctcgatctatgctccgttgcccggcccactgatcactgactggtgcggtttaggatgtcccacccttccatttcgttgccggaaacccgg

SEQ ID NO: 18915 - DNA, 660 bp, Emericella nidulans
gccccttccgtcttgccttccgtactataggcgcagtcgcgcccatcgtccccatcggcctatacttctccgaatacgttggccaactcctcctggtcaacggaccttccatgacaccatacttaaatgaagactacgatattatgcacacaaagaaggatattgttctagtcaaaatgtggcctggtctttcggcgttccgctggggtcagaggaagatgcgcattgagcggggaatgctcgttttgtttccgtatgtgccctgtctcacctcacatactctatctagaattatggctgaacggttctgatgctaattgtgtgatatcgtaggtcacccgggaatccagacaacgtcgccataaaacgtgtcatcggactccccggggacagaatcacaacacgcgagccctgcgcaaagccctcgcagattgtccccttcaaccacgtctgggtggaaggcgacaaccccaagaagtcgctcgacagcaacacatacggaccggtcagtatatcattgatctcggggcgcgtgatggcggttgtttggccaaggttccggtggttaaattgggaggagtgggagagtggagatgtggacggcggacggtttggggaagggtacctggcagaggtgagggagagggttgagaaaggggc

SEQ ID NO: 18916 - DNA, 660 bp, Emericella nidulans
cacccaagccgacgctggagggcgccatttctaatgtatgttagtactcgttttgcacaaagatcacgccgcccccacattatcttccttcatctgcctctccccgctttctcatctttggctaataatgcttccaggtcgataaccgcatcgccagtatagatgtcaaactcgcctccctgaacacggagctttcctcatatcagtccaaaatctccaaaatgcgcgatggcccaggcaaaaacgcgctcaaacagaaggcactgaaggttctccaacgccgaaagcagtacgaagcgcagcgggagcagctctcccagcagtcctggaatatggaacaagcagggatgatgcaggacaatctgaagaacgtcatgacgacagtcgacgcgatgaagacaactacaaagactctgaagaaacagtatgggaatatcgacattgacaagatcgagcggatgcaggatgagatggcagacctgatggagattggaaatgagattaacgagagtatctcccgagcgtatgacgtacctgaggatgtggatgaggcagagcttgacgcggagctggaggctttgggcgaagatagcctgttcgagagctcgatgggtgaaagcgccgtccctagcttcatgcaggatgaggtggcaccgccac

SEQ ID NO: 18917 - DNA, 660 bp, Emericella nidulans
cggcagaccgtgctcacctgggacatccaagatatgcacgcccgcgcagccagatacgacaatagggcagaatatatgtacagttccctgcagattctgacggcagccacggcctcattcgtccacggggccaacgacgttgccaacgccattgccccgttcgcgaccacctacctggtgtggcagaacgggaacatcgcggacgaggtgccggtgccgacctgggtattgtaagtgcgccgtctaggaacggtggtatgcagtgctaatgggcagtagggcttttggcggcggtgccatcgtcctgggcctgctgacctatgggtaccatctcatgcgtaacctgggcaatcggctcaccctcatgtcgccctcgcgcgggttctgcatggagctcagcagcgccatgacgatcctgatggcgacaagactccggctgccggtgtcgacggtatgtctgctctctcgctttctgagtggattagaagagaaagagaaagaaaagactaacaagtatagacacaatgcattgcgggcgcatcaatcggagtcggcctggccaacggcgactggcgctgcatcaacatgcgtctagtagtgtggatctactttggttggatcatcacagtgccggtgacggcgttgttggcgggaatgctg

SEQ ID NO: 18918 - DNA, 661 bp, Emericella nidulans
cccactgcggtatttgcggttcagacctgcacactctgcgcacggactgggtatgttctctccactcctgccctctttttgcctttcagagatctcgagactaacaatcgtgatcatatagggccccacaaactacccctgctgcgtgggccatgaaatcgtcggtacagctgtccgcgtcggctctcaagtgaagcacatcaaagttggcgaccgcgtcggtgttggcgcgcagacgtagtcctgcgtcggccgcaaaggcgagtgcaacgaatgcgcaacctccaacgagccctactgcaccaaacacttcgccgggacatacaacggtgttttcatgaacggaggcaagtcctacggtggctacgccctatacaaccgctctcccgcgcacttcgccatcaagatccctgacgctattccctccgcccacgcggcgcccatgatgtgtggtggtgtcaccgtctactccccgcttaagcactacggctgcggacctggaaagacggttggtattattggaatcggtggacttggccactttggtgtccttttcgctaaagccctcggtgcggaccgcgtcgttgcgatctcgcgcaaatcggataagcgcgccgatgcgctgaagctgggcgcagacgagtacgtcgcgaccgccgag

SEQ ID NO: 18919 - DNA, 661 bp, Emericella nidulans
ggtcgccaaaccgttcctacgattacgatcttgaggatgaaagtgatggtgtggatagcgatgatattgatgatgatgatgatgacgggagcgatgaggatgcgagtaaccagggcgaacttgaagaagactacgaggacgacgaagatgatgatgaggatgatggatatggtgaaggatatgattactccgagtcagaaattgagtctgtttctgaaggggaatcttcaccgagagctgcaccaaagaatacggcccctgaagttattgttttggacagcgacagcgaggatgatttagccgctcctttagccgccgctgatccaactgacaccgctaatggacaaacacaagatacatcaggagaaagctcgtatgactcggaagaccatggtccatcaggtgatgggtttagtgacgaagcagaccatgaacgcgagcccatagaaaaccaggagggcgacgacgtgggtttctcagaccggatggcagtacatggaactgcagaggaatcggggagttcgaatgctgaaggaaagggcaatcagcatattgtgaatgagcaccctgtagctggatggcagtctgaaccagagcggatggaagaagatgtacatgacgacctcgctactcaccaagaggagggtttccatgtgcagca

SEQ ID NO: 18920 - DNA, 662 bp, Emericella nidulans
gtctgatagaccgagagcctctttcacacctactcccaatatgcttccatgaccaagctgcctccgcagcccgcagaagaggagatccgcaatgagcaccagatccgagacctcttggaaaaggtactccctttatataagccaaagaacttggaattaacctgctcaaccagcgcgaatccctactggcccaactcgcccgcctcctcgattccgaggcaacactcacatcctcagctctcaaacagaacaacctagcccgccaccgtgaagtcctcgcagaacacaaacgtgaactatcccgcctcacggctgcgatagctgagttgcgggaccgcgcaaacctcctctccaacgtgcgctccgacattaacgcttaccgctcctcgaaccctgccgccgcggaatcagagtacatgctcgaggagcggcgtcgtatcgatgagagccatggagtaatagatggcgtgctgagccaggcgtacgcaatcaatgagaactttggaatgcagcgcgagacactttcgagcattaaccggcggattgtgggcgctgccagccaaatcccgggggtgaatgcgttgatcggaaagatagggaataaaaggaggagagatgcgcttatactaggagcttttattggggcttgctttctgatgctg

SEQ ID NO: 18921 - DNA, 662 bp, Emericella nidulans; identical to SEQ ID NO: 18920

SEQ ID NO: 18922 - DNA, 664 bp, Emericella nidulans
tgcgcatcctgcccattgaggctattgtgcgcgggtatatcaccggctccgcgtggaacgagtataagaagactggcacggttcatggcattccaattaaagagggcctgagggagagtgaggcgttccctgatgggccgatttatacgcctagtacaaaggcggagcagggggagcatgatgagaatatccatccggataaaggtgcgggatcctctatcacattgctttgcttctcttcagattggtgttgcggtacaatagtgcttgataagtggactaattctcttctctcgctgcagccgtcgaaatcgtaggggaaccgtacgcatcgaaaatcgccgagctcgctgtgacgctttacaagaccgcgcacgcctacgcgcttactcggggcgtgatcatcgcagatacgaagttcgagtttggcgttgacgaggagacgaacgaggtcgttctggcggacgaggtgctcacgccagactcgtctcggttctggccaaaagattcgtacgaggtcggccgtggacagcagagcttcgataagcagttcctgagagactggttggtgaaggaagggcttaagggcaagtctggcgtgcggatgacggatgaaattgcgcagaagacgagtgaaaagtatagggaggcttgggagcggatc

SEQ ID NO: 18923 - DNA, 664 bp, Emericella nidulans
aaggctggcaggcggaggaggtcgagcagtatcatctaccaggagcctcccgagtccattgagcacaccagcgaccaggcggccctcccaaacctgaatgcgaactgggttaatgctaagggtgagtgattgcgtgggctaccattgcgctgctattgggccctgctcagaatcaaatcaagcaagcaccaactaatgctcacatatcgttacaggtgcttggactatccatttcgtcttgattgcggccttgaagatcttctacgatatcctccccggcgtttcgcaagagacatcatggaccctcaccaacatcagctacatgttcggttccttcctcatgttccactgggtgcggggtattcccttcgaattcaacgcgggcgcctatgacaaccttaacatgtgggagcaaatcgacaatggggaccaatatactccggcgaagaaattcctgctttgcgtgccaatctgccttttccttctcagtacacattacacccactacgacctgacttactttgtcatcaatttcctagctaccttgggagtggtccttcccaagttacccttcgtatgtatcccctacaccattccaaacggatggcgcgggctgggctaacccggagtacagtcgcaccgattacggataggtctcttctcc

SEQ ID NO: 18924 - DNA, 665 bp, Emericella nidulans
tggccgacagatattctttctccctgaccaccttttctccaaggtaagcggacgtctaatgatgaggcaccacggcttgctaacaaccttctagcgggaaactcgttcagattggtatgagtcttaactgccaatcttaagcgaccgtgctaattgatatagaatatgcattgaacgcagtcaaccaaggagtaaccgctcttggaattaaaggtgcagttggctgacctccgactagacgtgacagctactgatctctcgctgcagctacaaatggaatcgttttggccactgagaagaagtcttcctcgcccttgattgatcctccctcgctctccaagatctccctcatcacacccgacatcggcatggtctacgccggtatgagccccgactatcgagtgcttgtcgacaaggcccgcaaggtctcacacaccggctataagcgcatctacaacgaatacccccccacccggatattagtgcaggatgttgcccgcgtcgttcaagaggcaacacagtccggtggtgttcggccatatggtgtcagcttgctgattgcgggttgggacgagggtgtcgagcctgagaccgcccaggctcagaagggagaggaggaagagcccaagaaggctactggaaagacaggcggcattctgaaggga

SEQ ID NO: 18925 - DNA, 665 bp, Emericella nidulans
accgaatccgcggccatcttctcctacggcgtgacaacgtcttcctcgagcacctcggcggttggggtggggcctggaccgccaccgaccttgagcacgtatcaatcgccgtcctgttcttcgggggtggcttgtgcggtatgctattcgagtcgaaacgtgtcaggaactggctgaacagcaccgtcttgcgtgctccatctcgcctggaagcgcacgaaaccgccaatgcctggaatgcccctgacactcaggaggtgtcgcttaatccgatgcctgcgctcatcattctccttctgggtatgatgatgggagggcatcaccagactagcatggtctctagcatggtccacaagtcgtggggtaacatgcttattggctttgccttggctcgtggggtcacgtacgtcttgatgtatctgaagcctccaacctcgtacctgccttctcgtcctccaactgagatcgtcgcatcgttctgcttgatttctgggggtctcatcttcatgctgagtgtaagtctctgcaagtgcaagaccagataggacaattagctaacttcgccagacccgcaatgttgtcgaggcgctggagtattacgagctcgatgcaatgttcgcaaccagcatcgctctgggcttgactgctttcatcatggcttggga

SEQ ID NO: 18926 - DNA, 666 bp, Emericella nidulans
ccactacgcacgtcgatgaacaggacaagccattctggaagcagtataagttgttccatgccactttcgcgcaatttacgtacactggcgcccaaggttcgcttcccagctcacctactgtaccagattgttgagcccatttgctaactatgccctgtagtcgccatagcctcctattttattaactacgcaaccgaaacctggcccgcggtcgacaactcgacgggttctaaatatcttgccggcgcacaggcagcctttaccgttgggcggttcctaggtgccttcttaatgaaatatatccgcccgcgatgggtcttcctcggctacatttctggtgtcgtcgccttctgcgcagcgtctacaacacagcgcaacgagactggcgtcgccatgctcttcctaaccctgttcttcgaatcagtatgcttccccaccatcgtcgcattgggtatccgcgggctgggacggcattacaagcgtgggtccggcttcattgtgggtggtgtcagtggtggcgcggcgatcccaccgctgcttgcacatgttgcggatttgcgcaatgatacggggtttgcgtttatcgtgccgacgatgtttatggttcttgcgtggacttatgctgttgcagtgaattttgttccagcatatagggacaccgttgat

SEQ ID NO: 18927 - DNA, 666 bp, Emericella nidulans
caactcggaacgtcagttacgaatgtctataaaccagaaaaccttatccgccaccctccctttccctccgacatcaccctagaactcctcctcgccaaccaaacccacctcggccactccacctcccgctggaaccctcagaactcgcgctacatcttcggtattcgcgagggtattcacatcatctccctcgatatcacagcagcctaccttcgccgtgccgctaaggtcgtcgaggaagttgccgcgcgtggcggtctaatccttttcgccggcacacgaccaggccagaagcgcatcgtcgttcgtgcggcagaactctcgaagggttaccacattttcgagcgctggattcccggatctctcacaaacggcgaacagatcctcggtcactgcgagaagaaagttgtgaatgtgcttgatgaggagctgccggatctcaaggagtcacttgctgaccacgccattctcaaaccggacctcgtcatttgcctcaacccgctggagaacgagcctttgcttcacgagtgcgggctcaacaatgtccctaccattggaataatcgatacggatgcggaccccacgagggtgacttacccaattcccgccaatgatgacagtctgcgttccgttgctgtcatcgcaggtgtgctgggacgggctggt

SEQ ID NO: 18928 - DNA, 667 bp, Emericella nidulans
cgtcgttgctggtgctggtgagctccacctcgaaatttgcttgaaggatcttgaggaagaccacgctggtgttcccctccgtatctccgaccccgtcgtctcctaccgtgagaccgtttctggcacttccagcatgactgctctgtccaagtcgcccaacaagcacaaccgtctctacctcactgccgagcctctggatgaggaggtctccaaggccattgaggagggcaagatcaacccccgcgacgatttcaaggcccgtgctcgtatccttgccgatgagtacaactgggatgtcaccgatgctcgcaagatctggtgtttcggtcccgacaccactggcgccaacttgctcgttgaccagaccaaggccgtccagtacctcaacgaaatcaaggactccgttgtctccggtttccagtgggccactcgtgagggtcccgttgctgaggagcccatgcgctccatccgcttcaacatccttgatgttactcttcacgctgatgccatccaccgtggtggtggtcagattatccctactgctcgtcgtgtcttgtacgccgctactctccttgctgagcctggtatcctcgagcccatcttcaacgtcgagatccaggttcctgagcaggctatgggtggcatctacggtgtccttacccgccgc

SEQ ID NO: 18929 - DNA, 668 bp, Emericella nidulans
cgctcgtacgccagcttggttgatcagaaaatgcgccttgacgtcagccatattgacaaacttgatttacttgcaggctatccacaagctcgaatcagcacatttaggctggatacaatcagaaacagtttccaagcagcaggactagtgccattgaattctgaaccagtgctttcaaagattagtattcaggctcgtacgcctacaccccctggaagccgtggctgccaggaaagcactttttgcccacatataccagcaaatgttgatgagcttctaaagcaagcttcttcattcagagattttcttaaacagcactcaacaagtccaccatcactgtcctataatgccctaaaccagctaattaagggctgtcaaattgcaatgcaaaagggcatactattggagcaagagaatagggcgctacatgctgaaaatgccatacaaaggcgaaacgagctcgtacgcatagatggatagctcataataatggtctgtctggagaagaggccacagagctctaggaagctcataatgcattttttcaggcaatacctggtccatgcgggccactagcagaaggtgcacaagcaccaaagacacgggcattacctacatgtagtacttgtaatagaattgggcatagaagaaatacttgtccaaatgga

SEQ ID NO: 18930 - DNA, 668 bp, Emericella nidulans
ggccttgccacccctttctcagcgcctgctcccatgagcttgcgacgcgcctatcttgggaggatgactgcctgctacactcgtggaaccagctatttagccattctgcgagtgcgagctgcaagaagaagccagctccctgcttagtctgcgttatgcgatctgcgtgggcccttctggcggggtaattctggtagagatcccaggctgacacgtgctcctatagaccccttcgccgaagctgacgaagacaccggcgagactaagcagtctcaaaactacatccatatacggattcaacgtacgtgcgacttcccctttatcgctacgagctccatcgcacctcaccgcttttggacctgagactaacgtcactccagagcgcaatggtcgaaagacttgactacggtccagggtctccctaagaagttcgatcagaagaagatcttgaaggtgatcaagaagaagtttggtatgctctttgtgccttgctagccttccgatatcgtagctaacatgagccctagcttgcaatggcaccatcgtcaatgacaccgagatgggtgaggtgattcagcttcaaggagaccagcgcaaggatgttcaagagttcttgaccgacaagaaggaaggtcttgagcttgatgccaagaccattaaggtccacg

SEQ ID NO: 18931 - DNA, 669 bp, Emericella nidulans
gcttggaatgcgcgtcaacttcgacgcaactcgggatatcctcgacaggctccgcgccgtccagcccggggtcaaagtcgtctttacgtctagcctagcggtctacggacttgcgcccaagggcttcgtgattgacgagacaaacttcccacccgtaccttcgtcatcctacggcacacagaagcttatgatcgaactgctactcaacgactactctcgtcgtgggttcatcgacggtcgcgccgtccgtctccctacggtgactgtacgagccgggaaaccaacgcaagcggcgagtagcttcgcgagcggaattatccgagagccatttcacggcgagaaggcgattctgccagttagcaaggacacagagatgtggatctgttccccgtatacggttgtcaagaaccttatccatgcggccacggtccctgctgaggcgtttggtgattccaggtctgtcaatctgcctggtcttgtggttagcgtgcaagagatgttggatgccttggaggagatcggtggcaaggagaaacgggcgcttgtcgaggagaaatacgatgcggatattgatcgaattgtgcagacgtggtcgccgcactttaacccggcccgagcactgagtttgggattctcggaggatattcccatgattgaaaatgtgcggca

SEQ ID NO: 18932 - DNA, 670 bp, Emericella nidulans
gccggaggcgcagctaaataccgacacctgagccgaaagtcctcgcacagacaagcccttctccgaaacttagttacatctcttttcaaacatgaatcgattacgacgacatgggccaaggcaaaggaggctcagcgactagctgaaaagctcattaccttgggcaagaagaacactgagaccagtcggaggacggccttgtcgacattctatgtatgttttcctgttcgtgaagcaatgttccggaggcgaatgcagtcatccggcttaccatgaaagtgattattgtattaactggatgaccggtagacccctcacgaaatcctccctaaactattcggtcccctccgtgagcgctacgccgaccgacccggtggatacacaagagtgctacgagttgagccgaagaaggatgatcaagccccaagtgcgattctggaactcgttgatgggccgaaagatatgcgatttgcgctaacagcaaaggcggttgcgaggcgacgcagccagggactccagacgctgaatgaacttacgctcctgaatgtgcgcaaggttacgcaatttcgaaagaatggtgttgaggagttggagaaagcaatctcgaaaataaagcttgatgaagtgaattcgcccgtaaaatcaaaggcgacaatgaagaatgagaaaa

SEQ ID NO: 18933 - DNA, 670 bp, Emericella nidulans
cggtggcactttaccacggctctaatgccatcttgtccgaacgatcagccagagggcttgacaaggatgtcccgtatcctggcttgccgcacgacggggactgggaagctgcattgagtggagtgagcaccaaagaccgcgaggagctgctcgctctgcgcgccattatggagaagatcgctaccaaggcgcgcgagaataacgttcggatagtgatcgatgcggagcagacatggtaccagccgctaattgacagcctgactgacgaactcatgcagaaatacaacacacttgacgggcccgccacctgcattggttccttccaggcctaccttcgcaggtatccccagcttctcgaccagcaaatcagacgtgcggaagagaagggatacaagctcctctttaaacaggttcgcggtgcatacatggtcaccgaggctgctagatggaagagagaaggaagacaaggcttgggacctgtatggccgactgtagaagagacccacgctagttacaactacggcattcaaaggaccatctcaacgattgcagagcagatcaaaaacaatgaacacctgaagatcggcgctgtctttgctacccacaactctatcagcattgatctcgccatcaagctgatggagcaaaatgggatggccaaacgcatcga

SEQ ID NO: 18934 - DNA, 670 bp, Emericella nidulans
ggcaattgcaaagtcggcaagagacattctctcaatatttgaccctctggtagtcttagggtctccggcgaacagttatgcgcactatgtgactaccgaggaggagtatagccggcagcgctatgagggagcctcgacactttacggacccaacactctggcagcatacgttaacctgacgctgacttacctaccctatcttgatgagtccgcggcagcgggtcaatatcctgagccatcggggattgagccgccaatcaacaccgaaaaatctctgagtttcattccttccgtcgtgtacgacggtcatccgattggtaaagcgtacggggatattatcacgtccgctgggaataccagatatgcaccgggcgatgtagcaagcgccactttcatcggtgccaatccaaggaacaacttgcggctagaatcaacttttgcagctgttgagcgacagacagacgacgggcattgggaaacagtgcggactgacagcgactggagtcttgtgtatcggtggaagaggaccaataccgtcttagggcacagtgaggtgactctgcaatgggagatagaggacgactactacgccgtgggtagtcctcggcctgtgcaagctggagtctaccgattccattattacggagatgctaagggcctcaatgggcga

SEQ ID NO: 18935 - DNA, 671 bp, Emericella nidulans
cgtcattctcctggccgcaaagattgctgctttgttgatgacaaactcagtatcagttcttgcgagcttggtggacggagcattggattttctatcgactactatcgtctggattactaccgctcttatccgaagacaagaccgttacgaataccctattagtcgacgtcgattggagccacttagtgttttggtttttgctgttgtgatggttacctcgttctttcaggtggctatcacgtctgcgggccgcttgatctcctccgagcacgccgtgatccagctatcagtgccatcggcggcgattatgggtagcaccgtggtcgtcaagttcctgtgctggttctggtgccgactaataaataactcgagtgtccaagccttggcgcaggatgcaatgacggatgtagttttcaatttcttcagcatcgtcttcccgctcggtgcgtactaccaacatcctccctagtacagtaacgctaacgcaatgctctagtgggcggcttcacgaacatctggtttctcgatcccctgggaggtctgatcctctccatttacataatctggaactggagtcgtaccgccagcgagcacatccgccacctcaccggagtgccgcctcccgcgaggacgtcagcatccttctgtacatgacaatgcggttctcgcgg

SEQ ID NO: 18936 - DNA, 671 bp, Emericella nidulans
ccggcgaaaagctggaggacttcttgtccgccctgatggaggataaagcgggacaccctctaggccttgaatggggcgaggtctgcgccgaaatcaacatcatgatgaacgccggctctgtgactaccgccatcgccatcaccaacgtaatgtatcagctcctccgcaacccgcagtgcctcgccaccctccgcgaagaaatcgattcggtctacgattcggaagacgaggtggtggcctcctacgataaggtcaagcacctcccgtatctccgggcctgccttgacgaatctctccgcattttcccacccacgtcccacggcctcccgcgcgagacaccccctgagggaatggagatcctaggccagtgggtgccgggcaaaacatccgtcagcatgtccgcgtacgtcgcccaccgggacgaaactgtctttccagaagcatacctgtacaagcctgagcggtggttgggcgaggaaggcaaggcgctgcaaccgtatttcgttgcgttcagcgcgggcgcgaggtcctgcattgggaggaatatctcgtacctagaacagacggttatccttgcgacgctggtaaggaggtatgagtttgcgttgccgagtaaagactgggaattgcagagggaggagacaatgaatctgatcctgggagggatgccg

SEQ ID NO: 18937 - DNA, 672 bp, Emericella nidulans
acgcgtccgccacaacttccaccgtcggtgcctctttcgtcacaaagcgcgtcctcgacagtgcgtcagataccctggtgcggctgcagatctgggacacagccggacaggagcggttccggagcatctcgcggctgtactaccggggcgcgaacgcgtgcctgctgtgctacgacatcacggacgagtccagctttaacgagatgactgggtggttgcatgagctgaagcggaatctgacgtcggacgatgagcccatcgtgatccatgttgttggcacaaagagcgatatcgtggcggacgaccccgggcgcagacgcgtgccttttgagaggacgattgcgtatatcgctgagcagctctatcccagccgtgcgtccacaccgccgccgactgcggcgccgtctgccgcatctgggttcgcgcgaacgtcgagcgcgacactcggaatgggcatgggcgttgacagtaaacggagcagcgggttctggggacaggatatcggctgggactgctgtcatgagatcagtgccaaggacggcgagggcgtcgaggaggtgttccgggtgattgcgcggaagctggtggagcagcggaatcgacggagtatggaagcgggcggtgtcttgtcgcctggcggccctttctcgccgcttgacgggggaccctcgt

SEQ ID NO: 18938 - DNA, 672 bp, Emericella nidulans
atctcattcactgccgtatctatttgatctctctaacacatccaccaggtttgggagtcgttccgggccacttcggggctggaacctcggtaggtagtgaagcccaacaccgaaagctagcaattgctgagcgccgacattgtgtgttctcacaggctgctggacaatgtaagatcaaacgacccgaagacttgaacgtcgtcttaccaatcatcaactccaatcgtcctcacgcaaccgagcatcggtaatcaatggtcggaccgcgctgatgagtagcactccagctccgggtaaccgctgcaaagccagggattgtgaactttgaactggacattgagaagcatcatacagtaagaatcctgtgtttatgacggtagcaatgctacagatcgatggctaatgctttgtcagaatcgcctgcagatactccatggaggcaccatcgcttcgatgggtcagtagctcatgtaaaaccttcaattcaaggcgttgtatctcacatctcaaagttgatctcggtggctctctggctgttgcatcccgtgggttatatgctacaggagtatcgactgatctgaacggtaagtacgatttacagggttcaattggcctcgacatacgcctaaccatcttcagtcacgtatctcagctctggtggcaaagtggggg

SEQ ID NO: 18939 - DNA, 673 bp, Emericella nidulans
tggcttgtccgttgccagtcctttgaatcttgacgagcgccagcgtacgtctctgcttagttaaatgcctaccaggccagctaaccagacgcagtcggtagctcgagcggcaatgatctccgcgacggcgactgcaagcccgtcacctttattttcgctcgcgcctccactgagcccggccttctgggcatgtcgactggacccgccgtttgcaatgacctcaaggccgatgcctctctcggcggcgtagcttgtcagggtgttgggccgaagtacaccgcggggctggccgagaatgctttgcctcagggaacctctagcgcggccatcaacgaggccaaggagctcttcgaactggctgcctctaagtgccctgacacaaggattgtagctggtggatacaggtacgtcccatcactctgctcgttcgctcgcattccctaatgtatggttatgatagtcaaggaacggccgtcatgcacggggcgatccccgacctctccgacgagatcaaggacaagatcgcgggtgtcgtactcttcggcgacacccgcaacaagcaggacggcgggcagatcaagaatttccccaaagacaagatcaagatctactgcgctaccggtgacctggtctgcgatggtacgttggtcgttaccgccgcgcatttcaccta

SEQ ID NO: 18940 - DNA, 673 bp, Emericella nidulans
cggttgtgccaccaaagagggcccttaccgactatccggtgcgatttatccttaactcctcatccaggcttagcaaggtcatactaatatcgctttgcagctcattgactctgacccgtacgagccgaacgcccaatgttctctttatataggagatgtacacttagaaacgacccacaaattttgctaatactttgagtcttttgtctaggcacgtgccacgagtttttggatacgcaaggccctcggactatgcggttggtgctggagcagctgcggcgtctccgctcgcattctggctcatggagagagtgagcccgtcgcatgtgggcagaggaggcttttcgcctgtgatgaggctggcgacggcgatcggtctcattggtggtgtacatgtcctctatcagagatcgtgcagtacgttgtaccctcgacctctgctttactgtcctcatttcaacccgtcattaactctgatacctgtagatcgcttccatggcttcacggagaactcaagggaggttgaaatggacatgagggaaatggtggacaaggtcaagaaaggtgaacctctgtacggtgcttcgcaggtgtccccacacctgcagggtgtagctgctaggaactctcgatacgccaatctcttcattcaagtgattccgtggtttaatct

SEQ ID NO: 18941 - DNA, 673 bp, Emericella nidulans
cgcaaactcaagcatcacgagcagaagtctgtctcattcgttttgtttccaccctgtatccgatcacctaactaacctgaaatcaatcagactcctccggaaagtaaacctaacaacctacaaatccgaccacgcgcatcgagagtctcagatcatccaacgatactacctccaaaaccccgtcgactacaagaaatattccgcaattgtcggagccttgcggcagctcgcacacaagctctccgcacttgaccccgattccgaccccatccgccagaaaactgaatccgaggttctggataaactgtggcgcatgggaatcctcaaacaaagtcgtgagcaaggtgcaggattgagtagaattgagcgcgaggtgacggttagcgcattttgtctgacttcggctggctagttgttatggcgaggagtgggatggtggaaaacatcaagacggtacgtgtcccttttatttcttcagttctttctcttcctccctaatgagatttgtcggaggctaattgtggtgatagcccgtaacgttcatcgagcaagggcatgtgcgtgtcggatcggaggtcgtcacggacccggcgtacctggttacccggaacatggaggacttcgtgacgtgggtggattccagcaagatcaagcggaatatcatgcggtatcg

SEQ ID NO: 18942 - DNA, 673 bp, Emericella nidulans
ctttcatcataccagcaaatactgaccagcctagttcctgtcgttcagggtggcatgcaatgggtgggatacgctgagctcgcagcagccgtcagcaatgccggtggtcttggaattgtacgttgtgcagccttcatgaacacatggcaatctccagcgagcaaagactgacttaccccagctcactgccctcacccaaccaactcccgaagacttgcgcaaggaaattcgcaaatgtcgctccatgacgaagaacccctttggcgttaacctgaccctcctacccgccctagtgccccccgactacggtgcctacgcacaagtgataatcgacgaggggatcaagatcgttgaaacagcaggcaacaaccctggtcctgtcatccggcaactcaaggccgcaaacatcacaatcctgcacaaatgcacgacaatccgacacgccaagtcggctgttaagctgggtgttgatttcctatcaatcgatggttttgaatgtgcagggcacgtgggcgagcacgatatcacgaacttcatccttcttaaccgtgcgagacaggatctcggcgtgccgttcatcgcctctggcgggttcgcagacgggtatgggctggccgcggcgctggccgtcggtgcagagggaatcaacatggggacgcggttcatgtgtaca

SEQ ID NO: 18943 - DNA, 674 bp, Emericella nidulans
ccaacgcaggcgttgcgtatcccgcaggcacaccggcatctgtagatgtcgaggatgtaaagaacgtctttgatgtgaatgcactggggaccctgagacttttccaggcactcagggggtttcttgaggtcggttctaataatggaaggagagtgaagtgggtgagtgtgagctcggccgccggctcgattggcgggtgtgaagtgtacggtacgcatagagtcgcaccgtatgcgattagcaaggcaggagtaaatatggttacggtgttagtgcccactacctgtgttttccgctctggaacggaagaagaaaagtgttcggctgaggtgagctgactgtcacctgtgtagggcaatccatgcgtcggaagaatggctgattgcgtttgcgattcatccggggtacgtccctatttccttctgtggcattgtatattgcattgctggaacccagggctgattggaggccatgtgcagcttagtccagactgagatgggcaacaaaggcgcgcagaaaatgggcctcaaggaggcgccgaatacggtcgaggaggcgattacgaagaccttggctgcggtgagtgtcagaacatacttgagatatctagcttctgttatctagaagttaaatcgagacttgagactaatgcgaggccgtcgacagattgacag

SEQ ID NO: 18944 - DNA, 674 bp, Emericella nidulans
acgtttctgaccttatcattgtagctgggacgttgtggtaagggtgctgtgcaattggcgaaggacgtcggcattcccgagtctgatatcattcagtgggatatggaggaaaccaagaagggtttgcgctatctaccatgtgtgacttcatgcgctaacagtgcctaggtggccctttcaaggagattgttgaggatgctgacatcttcgtgaactgcatttacctgtcttccaagatccctcactgtaagtcgaccttggagaggatttctgtcaaacgaccagaaagtgcatgaatattgacacctacctcacagtcgttaatgttgagagcctttccacccctagccgtcgtttgtctgtcatttgcgacgtgagcgctgatacgtaaggcaaatcttcccaagtcttctgccgtatccactaatattgccaacagtaccaaccccaacaacccaattcctgtctacaacatcaccaccacctttgacaagcccacagtacccgttactctgcccaatggcactcaaggcacgcctctcagtgtgatcagcattgaccacctcccgtcgcttctcccgcgtgaaagctccgagatgtttagtgaagcgctgatgcccagcttgcttcagctcaaggaccgtgagaacgctcgggtctggaagcaggccgag

SEQ ID NO: 18945 - DNA, 674 bp, Emericella nidulans
ggccggccgctgaaagacattcgcatccgtcatacagtcatactcgatgatccatttgacgacccgccaggcttggtggaaccaccggagagccccctgccaacaaaggcgcagttggcgactgtaaggatcgccgatgatgaggatctcggggatgacatggatgaagcatctatggaaaaacttcggcgggaacgcgaggcacgggcgcaactctgaccttggagatggtcggtgacctcccctttgctgaggtcaagccgccggagaatgtcctgtttgtttgcaaactaaaccctgtgacccaaggtacaacagattacatcctattttggggggagcgtacgctgacagatggttacagatgaggatttagagcttatctttagtcgctttggaaagatcttatcctgcgaagttatcagagataagcgaacgggcgacagtttgcagtacgcttttatagagtttgagagccagaaggattgtgaacaggcatatttcaagatgcagggagtcttgatagatgaccaccgaatccatgtggacttttctcagagtgtgagtagccgcctctgcagcgtccttcgatccaatattaacaacaaccctaataggtatcaaaactgtcagaaagctggcgtgatgctactgtgaagaaacggagcgcgcaa

SEQ ID NO: 18946 - DNA, 675 bp, Emericella nidulans
cggcagtcgctccgtgggtaagtgttgcgcgcaaaggtcaccgcactcataactgacactaatcacaaaaggcaaatcctcacttacggttcggtttgttgaacatcattttgtggagagttattacccgacgattgagaacaccttcagtcaaatcatcaaatacaacggtcaggattatgcaacagagatagttgatacagccggtcaagtgaggacttatcgctgcgcgcattcatcgcaaacgctaaccctgagcaccaggatgagtacagtatattgaactcaaaacatttcatcgggattcatggatatattattgcctattccgtggcgtcccgccaatcttttgatatggtaagggtcatcagggacaagatactgaatcatctcgtaagttttccatgtttacaatcaatgctttcttgcactgaagcattattgtagggagcggactatgttcccctggtcgttgtggggaataagagtgacctcaagcctgaacagcgccaagtttccttagacgaaggccgacagttaggtgaagagtttcgctgtgcatttacggaagctagtgctcgtcttgatttcaacgttgcgagactttcgagttgatgattggggaaattgaaaaatcccagaatccatctcaaccaactggtggtaacaaatgtg

SEQ ID NO: 18947 - DNA, 675 bp, Emericella nidulans
gtgcgccagccgtcaaagctcgacgacctgcatccgttcgtacaggttctgacgcaatcaaacgtggacgactgtcttgctgtggaagagtcatttcccgaaaatgagcgctgcaccagagagaaggcatgcgttcctgctaatgtcactgcggactcgtactgacttcgtttgaacagttcatctatcgccttggacgatgccctgagctttgcctgggcctgttcactcttccgattctcggccctgaccagcccaaacctcgccctacactcgtcggacacgttattgcgactcggacttccacccccttcgtcacggataagtcgatggaactacccgctgactgggagaccatgcgctcaacagttgttgatggggagactgttggtcacgacgagtatggaagcacaattgcaatccactctctggcggttctacgcgaacaccaaggaaagcaggttggaagcacattgatgaagtcctatattcaacgaatccgggaggcagctatcgcagatcgcattgtgattattgcacacgataacctcatcccgttttacgaaggacttgggtttgagaataggggcccaagcaagtgtcagtttggtggcggtggctggacagatatggtaaatttatctgcgcaaaagtctgcctgaggtttgtgctaac

SEQ ID NO: 18948 - DNA, 676 bp, Emericella nidulans
actatgaagttcttcgagaacctctatacatacgaatattcctttcccgccgtctctcttgcctacttcctacgttatccaaacccgtattcgagacatgtcctgacgaccgatgtcatcgatcgctatgtcgacccggcgacacatcgtcttcatacgacccggattcatctgaagaagtcaaaagtgccgtcaggaatcctgaagctcctcccgaagggtatcggcggatccgacaattccgggcagagctatatcctagagaccacagttgtcgatgttaaggaaggctggatggagtccgagtcccgcaacatggaatggactggaatattaagtgtagtggaaaggcaagtctatcgacgccagccattggagggaagtcaagagaagcttgacggtctctcgctcgatgacaagcgaactgaacgaaccacggtgaataccactgttaccttccgctcccgcttcggacagggaaagcttctcggccgtaggaaaacagaggatctcaccggagactatgaagaagagactcccaaacggggattcttcacctcgttgtccactgcaggaatccagcggaccattgaactgattgggcttaaccgtactcgcgatgccattctaaagagcaagcaaggaatgaatgtcgttcttgagcgactgcgcagcg

SEQ ID NO: 18949 - DNA, 676 bp, Emericella nidulans
tccaggcaacccagcggtcttgtacgcaaccttatttgtgatggactttagttcctagcgcccattcactttactaattatactttgaactagtatctgcgatatgcaagagaagttcgaaaaggccatctatgaattccccaaaatgtaccgggacatgaaatatataccctccccttgctgtcgggcagctctgattaacacaacttagagtaacaactacaacaaaacttctccgcgcagcaaacaccctctccattccaatttttgtcaccacccaaaaccgcgcaagacttggcgccactgttcccgttcttcagcaacttttaaatggccccaatgtccgcgccgatattgacaagacgctattctcgatggtcacgccagagatagatgggcttctacccgttccgaagaaaggtgaagccctgatggatgcgatcattgtcggcattgagacacacatttgtgtgacgcagacaacactcgatctgctggagcgcgggcatcgagtgtatgttcttgttgacggtgtaagcagtatcaacgcggaggagagggggattgcgcttgcaaggttgcgggatgcgggagcgattgtgacaaccagtgagagtattttatttgagattttaggggatgcgaatcaccagcacttcaaggccattgcggggct

SEQ ID NO: 18950 - DNA, 677 bp, Emericella nidulans
  unsure (1)..(677): unsure at all n locations
ccgaagcgagccttgggaccaaaaacaggggttgtaccccgcctccgattcacggagtaagtaaaataacgttaaaagtagtggtatttcacttgcgccgaagctcccacttatcctacacctctcaagtcatttcacaaagtcggactagagtcaagctcaacagggtcttctttccccgctgattctgccaagcccgttcccttggctgtggtttcgctggatagtagacagggacagtgggaatctcgttaatccattcatgcgcgtcactaattagatgacgaggcatttggctaccttaagagagtcatagttactcccgccgtttacccgcgcttggttgaatttcttcactttgacattcagagcactgggcagaaatcacattgcgttagcatccgcagggaccatcgcaatgctttgttttaattaaacagtcggattccccttgtccgtaccagttctgagctgactgttcgacgcccggggaaagctcccgagagagccgttcccagtccgtcccccggccggcacgcggcgaccncgtctcgccgcggaagcagctcgagcagtccgctgacagccgacgggttcggaactgggacccccgagcccagccctcagagccaatccttttcccgaagttacggatccattttgccgacttcccttgc

SEQ ID NO: 18951 - DNA, 678 bp, Emericella nidulans
tgtaaactttaattcatgggagtacagaaagctgaagctgcagccaacaaaaaggccatcgaggaccaaaagcgtgccgctgaagaggacaagcaatgggccaagggcgcgaagagttcatccaagaagtatgtctcgaaaaacaatctatacaacggaaatcgaggtgaaggaaaagcactaacatgcttgttcaaaataacagagaagaggccgaagccaagaaggccgaggccgctcgtaagaaagccgaacgcgatgcgctccttgccgcagaagaagcctcgcagccctccaaacccaagaataacaaatcagccgctaagaagaacgctccctctcggggaacactcaaccttgaccagctcgacgatgctccctcttcgagagctagcgcattgaacgcatcgggtatcgacaacgccctcgatgctctctccctcacgagcaaggacactagcaaggtcgaccgccaccccgaaagacgatacaaggcacctatgcggcgtttgaggcgcgacggctgccggagatcgaggctgagaatcctggtttgcgacgacagcagcggattgagcttgtcaagaaggagtttgataagagcccggagaacccgttcaaccaggtgcatgttgcgtttgatgcgtcgaaggaggagattgcggctgtgagggaggc

SEQ ID NO: 18952 - DNA, 678 bp, Emericella nidulans
ttctcgccaaagcgaacggtctcacccttcccaaggacaacagttcccttggatacagccttcgcaccttccacaacgaacttatgcgaaaagaaggccgtcttggggacccgctcgagtaccaaatcgactctgtcatccaggccactctcgatattctcactcaggagcagggctacacgcgcgaggagatcgctcagcttctgtccatctccgtacccgagcttgaaaccacgtacctctcctccttccccgtccaagcggagcgcattcctcctccgccagcgagccctgcattgcttcaaggaagcccgacgcgtccttgacttcaaggcttgcctcgcgaacgcatcaaccttggatgacaagcgcattcactaccttggtcaactgctcaatgagtctcaagattcgtgtcgcgacgtctacgagtgctccgcaccccaagttgacgagatctgcaacatcgcacgcaaggcaggaacatggggcagtcggctgactggtgccgggtggggagggtgcactgttcacatgctgccgcagtcaaaagttgaggctgtaacaaaggcgctgacggaggagtactatctgaagtatttcccagatattagcgaggagaagctgaaggaggcaatggtcatctctaagccgtctaacgggtctttcttgtatgca

SEQ ID NO: 18953 - DNA, 678 bp, Emericella nidulans
ccccagagaatcttcccgacggtatgctgtatccgtctttctcctcgaatctgactaacacataaacagtgattgaggatttcttccgtctttcttccgatgctgttcgattctaccccaaggagtgcatcagttcgtctctctcagtgccgatcttctcggccgcgctcagctcccttactttacagcaaatagaccctcttatggcggtgctgcattactaccacgatctctttagctttgcctttgataagcctgccgtgtctagttttacggcaccggatggaaaggcttactcaaacccacccgaagtccaagaggccgtgaaacagcttattgcgtcgcaaggaccagttcttgttcagcgcatcctcactggaatgatgttcacattcccaggcgaatgcttcccggatgcatcaagtttgctgatgtccctgtttgagttaatgcccccagaagcaggtagctgggtgcaatcgacgctgcaaatgctgcctgccgggacaatgaaggcgggcgaggcggaacgactacttaagggcatttctgacaaggttcagtcgggagagacacgaaagatccgcgctctccttcaaggtaagcaaactcgggatctgtttggctttttatgtggttaacagcacgatagactttaccaactcgtaccgccgtcgg

SEQ ID NO: 18954 - DNA, 679 bp, Emericella nidulans
ccgcgcggtccgaagaaaaggcgcagaacgcaataagggagcttgagtctacagcccccaatatcaaaatcacctggcttcccctcgacctcgcctctacgaaatcaattcacgatgcagcagagactttcagagcacatgcctcgcgcctcgacatcctgatcctgaacgcaggcgtcatgtcccttccaccaggcgagacagatctcgggcacgagatccagctagggacgaatcatacggggcactttttgctcacgaaattgctgttaccggttctactcgagaccgcgcagaagccggattctgacgttcgcgttatttccctctcttccatcggccataacttagctccagattttgagaccatactccaccaagatgagttgaaaaagtgcaatactaacgcgcggtatggagcatcgaaggccgcaaatatcatctttgctgccgaactggcccgtcgttacccctcgcttacagcggtctctgtgcacccgggcattatcgtgacggagctttatgccgccacgagcgcgagcaacccgatcgctgccttagcagtcaagcttttgggattgatcgcgacgaaagttgagcagggtgcgtggaatcaactctgggctgcggttggtgcaaagaaaggagagctggttaatggggcgtactatactccagt

SEQ ID NO: 18955 - DNA, 679 bp, Emericella nidulans
tgaggagcgccagattggtggggagcggtacaacctgttttccgagtgccccaaggcgaaaacggtgcacccttgtgctgcgcggtgaagcagagcagttcattgctgaagttgaacgaagtctgctcgacgccatcatgattgttaagcgtgcactgcgcaacacaaccatcgttgcgggtggtggtgccacagaactgaagctgtctggctacctccatcggtatcccgaccaaaacggtgccctacaatcagcaggccgttgtgaaggcgtttgccaaggctctggaggttattccccgacagctgtgcgacaatgcaggctttgacgctacggacatcatgaaccgtctccgggtggaacatcacaagggcaacacgtgggctggtgtgcactttgaccaacgaaggcgtccgggacaacatggccgcttttgtctgggaacctagcctggtcaaggtcaacgccatccaagcggccgtcgaggccgcttgtctgattctgagcgttgacgagactatcagtgagtcctcctagcatgtactaactcttctgagaaacaaatcgctgacatctaccacagagaaccaagaatctcgtgcgcctcaggcaccttcgcgcggcctgcccccaggtgctgcacagcgggctctgggtggaggccgtggccgtggtatg

SEQ ID NO: 18956 - DNA, 679 bp, Emericella nidulans
ttcgccggcggcttatagataactttgacatacaacgtttgcaattaaaagaagagcttaaaataacatgcaagtctattgctttgtctcttgatgtttgacaagccagaaccaccttccaattcttggtattattggctactggctcacagaggactttatataccaggaaaaggtgctagagtttacagaactctatagagtctatagtggagaaaaccttgctgctgctgttcaactaactctatctgagttagaccttgaagagaagttaatcatgattactggagataatgccagtaacaacgagacaatggcttcagagctatactatactttaaagggaaatataggtgaaagcagtacacttcagtttcaaggacttgatagttatatccgctgcctagctcatatcttgaacttggttgtgaaggacattcttcgagcactgaaatctggcagtagtgaggaggcatatgctgcctgcattagtctctgcaatggacagcctatatctacacagtcagcattggcaaagctctgaattctcagtctttggattgatcgcagccctcaacgaaggcaaaaatggaaggatatttgccgattcatggacctctctgataaatacattgaatatgatgttgaaacttgatggaattctatatatcaaatgctt

SEQ ID NO: 18957 - DNA, 679 bp, Emericella nidulans
caatacaatgatacgcaggagatctatgaacggttgaccagcatctacatacagtccggcaagaacgaggtaagaatctcctgatgtcccttacccctttccgagcaacgctaacagcccagctatagaaagcagacgagctcttcaagacagctctcaagaagaaggtcttccccaattcccccaagttctttatcaactacgccaccttcctgtacgacactatggctgccccagaccgcggtcgtggcctcctttcccgcgccctccaatccctccccaagaatacgcacgtcgaaaccacatccaaattcgcacagctcgaattccgctctcccaatggcgacgttgaacgtggccgcaccgtcttcgagggcctactctcctctttccccaagcgtgttgatctttggaacgtccttctggatttggaaatcaaaaacggcgacgttgagcaggtacgccgtttgtttgagcgcgtccttggtatcaaggaagtgaagaaaggtggtggcttggcaattgaagagggtaagaaacttaaacctaaacaggcgcgcttcttcttcaagaaatggcttgattttgaggagaagaagggtgatgagaaaacggtcgaggagattaaggccaaggctgcggagtatgtcaagtccctgcagcaggaataatatcctgc

SEQ ID NO: 18958 - DNA, 681 bp, Emericella nidulans
ggtcccgatcctcagacgcaagtaggtcagacatagccgtttcctcgtcacattctgactttatttgtctacagatgcgaaaatgtaaccagctcatccgcgcaaatacgcgtcagttggatcgtgatatcgcgcagctcaaagcacttgacggcaaaacgcggcagaccatagtcaacgcctcgaagcgcgcccagcggaacccagcgcgcgcgaaacaggcgaacctcgaagcgaaaatgcttgcgcgggaacttgttcgggtccgaagacagacgactcgcctgacaactagccgggctcagctacagagcgttcaaatgcaggtcaacgaagcgttcgcagtccggaagatccagggtagcctacagaaatcgacgggtataatgaaggatgtgaacacattgatccgtctcccacagctgtcagcaacaatgcatcaacttgctaccgagttggtccgcgccggtattattgaagagatggtggacgacgctattccaaataacgaactactggaggatgaagaggcagaggctgatgaggaggtcgataaaatcctacaggaaatcttacagggaaagctatcccaggtggacgaagtcaaaccagaaagacctctggaggagcctcagcaggccgaggaagagttcgaggatcaggaagccgctcttgcgcaaa

SEQ ID NO: 18959 - DNA, 682 bp, Emericella nidulans
gagtcctccggcgccaacagcggcgacgacaccgtgaagctcgattttggtctgtcatcaggattgcttagtgaagacttcaaatcgaagtggccgcatgaatttgggcttgtctatagtgttacactttcgccggaaggattgggaacttcgctgcaggtgcagaaccagggggagagaagctttgagttccaggtgctgttacatacttattttgcaattgacgtgagttgtcttcccctcttccacggcaaagcaacggtgacaactaacagggatgaaggacatctctcaaatccatgtcaagaacctacagggtaaaacctacattgacaaggtccaaaacgcaaccactcacacagaatccaattcctccgttcaattcacttccgagacggaccgcgtatacaaggacctcgacccgtcagttccgctggtcatctcattaggcgataaggagctatttagcatcacgcgcgaagggctcaatgatgcagtggtgtggaacccgtggatcgaaaaggcaaaagcaatgggtgacttcagccctgatgacgggtataagaagatggtttgcgtggaggcaggagccgtcaatgggtggcagtcgctggaagctggcgagtcgtgggaaggtgggcaatttatcaaaagtaaatagcgcaaacgtgtctactgaaat

SEQ ID NO: 18960 - DNA, 683 bp, Emericella nidulans
tccgaacccactgcgaacaccagcacggttacagaagactaacttacgcgctgaaataactagattagagagcagcttccgccaggaatatccctgcacaaagccgatgatctgcaaagttgggaaatggacatccaggtcctagacgacaaccctctttaccgaggcgagacatataggctcaggttcacattcagctcgaaatatcctattggtaaacctttccccttcctcgctctcttctcaggcttttgcctcgcggtctatcaccacttgtgctttccggcgcagttcactaatcggccttgctgcttccagaacctccagaagtccagttcattacagactcccaatctcagccgcaattcactcgttcctccgctccatcgtcgacagcaggtgaacaccaaccatcgaatgccgagcatcaaacatcaaccgctgccgtcaagcggcccattccaatccatccgcacatctacagcaacggcattatatgtctcgatctgctgagttcagcggggtggtcacctgttcagacggtcgagagcgtctgcatgagcatacagagtatgctaacggcgaacacacgcaatgagagaccgcctggcgatagcgaatttgtctcttacaatcggcgtcgcccgagggatatcaatttcatgtacgatgacgataatgtt

SEQ ID NO: 18961 - DNA, 683 bp, Emericella nidulans
gcctcttatgaccatggtttaccaaattcagcatcagagctgaatattgaccaacaaatccttcagcatgttgggacccagaacgggatcaccgatgaaaatgcccttactacggccaaggcagcactagcagcccataatcctcagaacaagtatccgccgcctccggagaacgcattcgataacaacctggcccatggcctgacgtttggagacgatatcggccagaatatcggccagaatcacaattctactgctgccgcagtttacgcagctcgcgaggcgcagagcatgaaccaaaaaccgactgtcggttctcctgaatggcaccaagtcagaaaaaataaccataaagaaggcacgtgctcaggtctatccgcgtccagtatatactaacgtcgtcccagtggaacgtcgccgccgtgaggcaatcaacgagggtatcaaccagatcgctcgcctcgtacctaattgcgacaaaaacaaaggcgcgatcttgcaacgtgccattgagtacatcaaccaactgcatgaggaaaagaggcagatgagcgaacgatgggagcagagcaatatgacgacaagtcacgctatcaacgaaatcagtgcgcaaaactcaaagttaaaggtcgaggtcaaccgccgcggtgatatcgcgctgaagtggctgcaacgatgtcgcg

SEQ ID NO: 18962 - DNA, 684 bp, Emericella nidulans
cgaactgtctttgtcccagcaaatcgccaaaagcatagattgacccatgccgcagccgttaaggctattgcgtttgctccgtggcagccatctttattagccactggaggggctccaacgaccgggctattcatttctttcatactccctcaggtgcatgtttggctaccatcaacgtgtacgctcaggtcactagtcttatctggagtaaaacgcgaagagagctggttgcaacgtttgggttcgcgcaaccggaacatccgtttcgaatagctatctttgcatggccgagctgtgaacagattgcagcaataccctgggggcctcatggtactagctgggatagaccctccaacgatactgttgtcgattgcggacgcgcactttgtgctgttagctaccctggaaggcctcccacatatattgtcgacgacttagatatacccgaagaagcctcaagttccacttcgcaagcccagggtaaccaagcgcgagaagacagagcaagggtaactcggcgtctgacggggaggggagtggtgcgtcccagggccaaagaaggcggcctgtggtgtcacgcacagtggaagaagggtgcattattgtagcatccagtgaccaaagcgtcaaattccatgaggtatggagtagctcggccagtcataaatcctcaacgtccggccc

SEQ ID NO: 18963 - DNA, 684 bp, Emericella nidulans
tcgggatccggctctattgtgagtacacctagtccatattcacggatctgtgagacgagacttacctgaaactcgcagttactggattttgattcctatctccgttgtcatggtaagacccattctaataaacatattcaatctttcctaacaaacccaatagattctgaccggcatgctccgacactatgctacaatcctaatgaactcccctccgaagcctcccgcgaccctagcagaatcccgcgagcgcctctccctgttccgcgccgtcaacctgcgtaaccacgccccagctgtgctgtcgaaagaggcttttgagatgcgaaaaaactaccttgtcacgggctttcaaaccggcgcctttttgaaggaccccaacagtcgcggccagccacccgctaacccaatgtcagatcccgctgctatggagggcatgatgggaatgatgaagggaaatatgatgatgatgattccgcagaccctgattatgagctggataaatgcttttttttcgggcttcgtcatttgtaagcaggctatgcctgtctgtctactgtttatgaattgctaatggtgcttggtgcagtgaagctcccgttccctcttaccatccgcttcaagtcgatgctgcagtctggtgtcatgactcgtgacttagatgtgcgatgggtgtccagtctg

SEQ ID NO: 18964 - DNA, 685 bp, Emericella nidulans
gatccataatcttctcacagacaagcctctgctttcatcgtccttacctctgagccggcgggcgcgtggctcgcttcatctccctgcccctccaaccaccttcgtcaaacgaggcatgcctgtcagccttatccctgacccgcgcgtccaggtgtggacggcacagacacgcccgaacatgaatctcgacgatcctcatgttgaccttccccggctggtacacctgattgaagactcattcaaccgcaagctagacgtaaaagactatctgaaccgagtgaatggccgattggctggtttaataattgccggcgaatatgagggtggtgctatattaacatgggagcttccccctggagtggaggatgacggaagcgaatctagcacggccagaatggtgccttacctggacaagtttgcggttctcaaacgtagccagggtgcaggcggcgttgcggacattgtattcaatgccatggtgcggacatgctttcctaacggggtatgttggcgtagccgcaaggacaacccggtgaataaatggtacttcgagcggtctttggggtcctggaagctcgcagataccaactggaccatgttctggacgactcctgacctgcctgagaagccgcagaaattccgagactacgaagctgtctgtcggagcatacagccgagctgggca

SEQ ID NO: 18965 - DNA, 686 bp, Emericella nidulans
ggactcttgagcggggccgataactaatcgaatcgccaggaagtgaaactcgcctcaagctcagctgagcgcgacctttacgagtccctagctgagatctacagtattatagtgacgcttgatggactagagaaagcctatatcaaggatgttgtcacagaagccgaatacactgaaacatgtactcgacttttgaagcaatacaaatccagcctgggtgacgacactgttgccagggcatttgtcgacctagagacattcaagcggacatgggatgtaagtctcatggtttgtgagcttggtgctatactgattatctttctctcaacagctcgaatgtccacgtgccaccgaacgtcttcgtataggaatgcccgcgacagtcgaacaggcctcacacagtggtccttcgaccaacaaagctcccggaacaactggatctgctggcggcacatctggtagtctaattctgacggctacggagaacttcatcaccttcctcgatgcactcaaactgaacatggtctctaaagacgcacttcacccgctgctctctgaagtcatccagtcagtcaacaaggtgacggatgcagatttcgaaaacagaggaaagattattcaatggctgatcacattgaatcagatgcgggcgaccgaagagctgagcgaagagcaagcccgggagc

SEQ ID NO: 18966 - DNA, 687 bp, Emericella nidulans
ccacagtttcatttatcatctatcttgctcttgctacgggacagggcatggactggaaatacgatacatataaccacaagcacaagcacgttccggacactgaatatggaatcgtccgccaggtcctttggttgcgctatgtcaattggttccttaccggacccctgattctcgcaagcttgaccctcctctccggcctccctggcgcgtcgctctttgctgccattgtagccgattgggtaatgctgggaactggccttttcggcacttatgctcccaacacatcgcgcaagtggatctggttcgctctcagtgcgattgctttcatcactctcatctatcatatcggcatcaagggaaccagagccgcgaacaaccgggactcgcacacccgccgactcttctcggctatcgcaagtgtggcacttctggccaaggctttgtacccgatgtatgttttgttctatgctcttgattattcgatactgacgcaaactagtaccctggctgctggcccgctctctctcaagcttggcctcactggagagaccatcctctttgccattcacgatatcgtcatccaaggaatcctcgggtactggcttgtcattgcaaatgatgctgctactggaacgtaagaatcgcctaattacctttttcccattcttttcgattgatttgtgctga

SEQ ID NO: 18967 - DNA, 687 bp, Emericella nidulans
gaaggattggattggtctttacaaggtcaccgacaatacttctagagaggtgacccgcgtatcttcacaaggaagatgggtggccgtcaacgagggcttctacgataacctcacctgcgagcggggcatcctcatcagcgatgtggtcgtatccacgtcccaaggcgataacggggagaagcatgatatcgcaactggcgaggttgttttctctggcgacaagcttttctggactcaaggtgtatttgaattccgctaccaccacaatggtaagcacaatgtcatggccatttcacgaccatttgaagtccggatcccccgcttcgaagaggaagatcacttcgacatgtcccaaacggcagtcgaaacgagccttctgcctgtgatccagaactgctttgaccgggatccggaaatcgcacctgaaactccggaagagcagtacggtagtttggttgagcgagatggtaaatttgccaaacgggttgtttttgctgttcatcaaatgtgcgtaccatcatcctctcgtatactaaacgatactaacatgcttaaccctaggttcggcgtcgaattcgcccctgaggtcgtccgctcagatggcaacgtccgcaacctcgcctggaggatctgcaacgcaaagagggtcttggtaagccgttccccagcttctatgaactttctttg

SEQ ID NO: 18968 - DNA, 690 bp, Emericella nidulans
ccccaacactgacattccggatctttctggaaaggtgtacgttgtcacaggagggagcgccggcatcggcttcggtatctgcgcccacctcctccagcacaatcctgccgctctttatctcctcggtaagaaggaggagcacatccaggaagccactgagggtctcaagaagtatggcgatacctccaaagtccactccgtgcagatcgagctcgaagacctaaagcagaccgatcaggtcgccaaagagctggcttcgaagctcgaccgactcgacggcctcatctgcaacgcgggcctgggttctggagtcttcaacctgaccaatgacggcattgatagccacatgcaagtcaaccacatctctcagttccacttatcccgcatcctgcttccgctgctccagaagacgtcgaactctcgcctggtgctgcaatcgtctgacctgcatcgtgcaatcagcgacgtgaagtttgaatctctcgaagagctcaatacggatattggaccaaccaagctgtacaaccgcaccaaactcgcgatggtcttatatatccgagcgctggctgagcgcaagggaaagggccagcttggattcgatccaaagacggatactggaccctggatgaacgcaactcaccctggtgctgtcagtactgaccagcagaaacaggcggaggacgcatacgg

SEQ ID NO: 18969 - DNA, 690 bp, Emericella nidulans
ctatcccgggccagcgcctaggacctgctggaacttactccgccggtccaggtactcatgtttatcattctcacatatatgcatccatcgccggtccagtttctgttgactcggcacaggtgaattctccagcaaaatcgataatcagcgtctcaaggactatgaaaaaagctatagcagctgcgagcacatccacatcatctacaacgacagtgccaaaacccaagtataacacactacctgcggtcgactccgtcgtgttggcacgcgtgactcgagttcagaaacgacaagctacggtgtcaattcttgtcgttttagacgaatctgctagctcgcaagcactgaacccctcacaatcagcgtcggataacgataacattgagtcgattctggcgtctgccgcaaacccggagaatcacagcagctctgacgaacttcgattccaggcgcttatccgaaaggaggatgtgagagccgtggaaaaagatcgtgttgtcttggatgagatgtttcgcgttggcgatatcgtccggggtacggtcatttccctcggcgaccagagctattactatataacaacggcaaggaatgacctcggcgtggttatggcgcgcagtgaagcaggtaatatgatgtttcccgtcagctggaaggagatgagagaccccgtcactggggccgcagaac

SEQ ID NO: 18970 - DNA, 691 bp, Emericella nidulans
agcaacaaactcatagtatttcaacggaccccagctgcagtagacgcccgcaacaattgtcccacagacccggtgtggtgggaaaccgagacgcaggccgagggcactggatggcagaagcgccgccaggagaacttcaacgctttcacctgcaacgagaaaccccttccatcagtgaacaaagtggatgatggctggactcgaatgccgtccttcagcatcctgattggcggcccgcaggacctggatcccgactacgtcgaccggatgcgcgcggtcgatatgaatagacaagagaagatccgcgcgcgtgcacacaatattgtacagtcagaaggttcagccgatctcctgacgccctggtatcctgggtggtgcaagcggccatgcttccatgacgactatctttctgcattcaacctgcccaacgtggagctagtcgacattcgccataatggaatatcccacttcacagccaatggcctggtcgcaaacgatattgaatatgagctagacgtcatcatcctgagcacggggtacactgtccctgtcacgcgtgcaagcccgtcttcgcgcgcaaacatatgcgtctccggccgcaacgggaccaccatggaggccaaatgggcgaatggcctcgcaaccctgcatggggtcatgacccgcgacctgccaaatctctttttcgcgg

SEQ ID NO: 18971 - DNA, 692 bp, Emericella nidulans
tggcagcggacacagcttaggcccctgactttcgaggaggaaatgcagcgggaaaggatgccagtggccaaggtctccaagatagaatgggatcggtattgtcaccgagaggaatcatttatctcatcgttgtttgcggggcaacatgcaagccggcttcggtgtacaacttgcaagcgaacatcaaccacatatgaagctttctacagtatcagtgtggagatcccggcatccggaaagggcgatatctaccaatgcctccgtagctactgccaggaggaaatgttaagcggcgacgaggtctggaagtgtccctattgcaaatgtgagcgtgtcgcgaccaaacaaatcattatcactcgcgcacctcagatcctggtggttcatttcaaacgcttctctgcctccaagacacagagtgcccgtaaaatcccacccccatcgactttcaccttcacggtcttcgcatggacgacttcgtcttctcgcagcctaagcagacatccaacggcgatggccccagttcaggtccacaggatccaacttccgccacagaaccaccctttacatacgacgcatacggtgttttacgccatttgggctcgtccatggggagcgggcattatatatcactagtgcgtgatgcgtcacgtcaatgctggcgcaaatttgatgacggccgcgcaacagat

SEQ ID NO: 18972 - DNA, 692 bp, Emericella nidulans
actgcggcagagcgaccacaacgacaacggcagccaaatgagctgcgaaagatctgtatgtcactgcttctcttgctcttggtatttgaaacttacatattctaactagttcttaaaaccggcctgatcccttccgcctctgggtcgtcatatcttgaatttgaaccctcagcatctctttccgctgcgcggcatcgcctaaattcattacgcctccctcttcttccttgaagctcgcatgcacagtccatggccctaaacctctacctcgatctgcgaccttctctcccaacctcgtcctcaccacgcacgtcaaatatgccccgtttgccgcccgcaagcgcaaagggcatatccgcgatgctagcgagcgcgatctaggcgtacacctcgaaacagcgctcagaggcgttatcgtcgcagagagatggccgaagagtggacttgatatcactattaccattctcgaagccgaggatgaccggtggtggggagacgcaccagactcccatgatgccgcatggggaatgatgaatgttctagctggatgtattacggctgcttctgcggctattgctgacgcaagaattgactgccttgaccttgtcgccggaggtgtagctgccgttgtcgtggacaaactcgctgatggaaacggaaattcctgtgctagactcatgcttgatactgac

SEQ ID NO: 18973 - DNA, 693 bp, Emericella nidulans
gaaaagtatcgaggatagtctcaagcaggccaacaccgaatactttgatctgtacgtctcgtcgactaaaccatacagcccgtgaccggaaccggaggggggggagagtgagagaaaaactgacaattgacagaattctgattcacgctccctacggaggaaaagaaggtcgtctcggtacctggaaggcgcttgtggaggcacaaaaagccggcaaaacacgctcgatcggcgtctcgaatttcggcgttcaccatctcgaggagctgcagatgtacatctcatcgggtggtggcggacagattgatgtcggacagtacgagcttcacccgtggcttgcaagaccggatattgtggactggctgcgaaacgatggagccgtcgttcaggcttactgtcctatagtgaggaatcagaggggtgatgagccggtactgaaagagttggggaagaaatatggaaagagcgcggcgcaggtgttgattcggtggagtctgcaaaaggtatgtcttcccaatatgggatctgggtctcggtgctgataatgctagggattcgttccgctgccgaagtcagtgaccccgtcgcggatcaaggagaatgcagaggtctttgactttgagcttactgaggaggatatggcgaagctcgagacgggcaagtatgagccttgtgcatgggatcctacggtgg

SEQ ID NO: 18974 - DNA, 693 bp, Emericella nidulans
gccgcacctcaaagtcatgtgcggattctcgcgccggttcgatgcttcgtaccgggatgcgtacaacaagatgtcctctggtgcgctgggaacgcccagcgtcatccgcagccagacctgtgataagctcgatccgacggggttctttgtggcgtacgccgagttctcgggcggcatttttgtcgactgctccatccacgacatcgatctgaccctgtggttcttcggccaagactccaaggtccgctctgtttccgcggttggcatcacagctgttgagccggatcttcgcaagcacaacgaccgcgacaacgccgtcgggctcgtcgagttctacgacggcaagatggcgtacttttacgcctcccggatgatggccgcgggccaggaggacacgtccgagttcattgggaccaaaggcaaggtcacagtgaacgcgcagcctcagctaaatctggtgcaaacgttcgacgcaggcggcgttaagaaggagattccgcagcactactatgaccgctttgagtatgcatttgttaccgaagcgaatgagtttactgcggctgttttggagaacaagcccgtgcccttaaaactggagggggccgtgcaggcggtgcgcattggcgcatcgttgcaggagagtctgatcacgggggaaaagatcttcttcgatgagaatggacggcgggtgga

SEQ ID NO: 18975 - DNA, 693 bp, Emericella nidulans
tgggcgctcctaccccctctggagccttccatcctttaaacaaagtccgacaggagttccggaatatcttcttcgagatgggttttgaggagatgccgacgaaccgtttcgtggagactggcttttggaacttcgacgcactctttgtgcctcaacagcaccccgctcgtgatctccaagataccttctatatctccgaccctctcaccgctgaccctcctcgtgaagatcccgagtatgacccccaccgcccaaagaccgtgcttaaacccgcgggcgaggaaaagaagctggactacaaagaatattgggagaatgtccgccaggttcatgagaatggaaagtacgggtcaattggttatcgctacccatggagccccgaggaagcgctgcgccttgttcttcgcacacacaccacgtccatctccacgtacatgctgcacaagcttgccgccaatccgcgacctgcgagatatttcagtatcgaccgtgtcttccgtaatgaggcagtcgacgccacccacttggctgagttccaccaaatcgaaggtgtcattgccgactttgacctcaccctaggtggtctcatcggcttcatggaggttttcttcgccaagatgggtattcacaagctccgcttcaaacctgcctacaacccctacactgaacctagtatggaaattttcggctatc

SEQ ID NO: 18976 - DNA, 694 bp, Emericella nidulans
cgccagcgcctcatccaactaacgcactctttgggctccttgattacaagcctaaaccaatctgatcctttaccaacatggtccgtattttctatttaagccctgcttctttcaatccttttctagcaattgactaacaattaccgctcaaaggtcctctcttcaaacgcaagcaagcatcatctccaacaatctccaatccatctccacgcacctctctgagaaccacgagcttctacggagtatatctgccctcccagcgccggaattcccgaccaaaacgcatgcgaatacgctcgaacagcttctgcgcacgaaacttgatcccagggtcgaggattgggtgagcagagggcggaaggcggataattccgctattcagggatcctcagggtcgacggggatgttctcaacgttgccatcggcttctgcagctgggatgaatgcgggcgtggtgggcgccggcgctggaggtaggctcagcgaagatgatctcgcggcgctgtgggagtgggcgcctgttgaggcgaactcagaggcaagaaggaggaactggggagggaatttcacgttggaggagaaggagagggggattcagcaggttgttgcggagttggggttgaagagggttttagaggatgatgatgagagcgaggaagaagacgaagagatggatgttgggtttggagggagg

SEQ ID NO: 18977 - DNA, 695 bp, Emericella nidulans
cctaattcaggtatactgataatggaggctcggtcctaggcataacgggaaaggatttcgctgtccttgctggcgacacccgttcgacttccgggtacaacattaactctcgctacgttccgaaggttttcaagattggaggagaagatgaaaccggaaaaggcgctcacatcctcctgtcagtggtgggcttcgctgcagatggcctagctctcaaggagagactggatgcagttgtgaagatgtataagtaccaacacgggaaacccatgagtgtgagagcatgtgcgcagcgactatcaaccattctctaccagaagaggttctttccatactacgtgcaggcaatcctggccggcttagacgaagagggcaagggggcgctgtacggttacgacccggtaggctcatatgaacgggaacagtgcaggtctgctggagccgcgtctagcttaattatgccgttcctggacaaccaggtcaacttgaagaaccagtatattcctggaagtggagagggacacgctctagaagctaggaaacctgagccgatgtcaagagagacggtggaacaacttgtgcgagatgcgtttacaagcgcggtggagagacatattgaggttggagatggcctacagatgctggttattactgcagatgggatagaggaggtctatcaccccttgaagaaggat

SEQ ID NO: 18978 - DNA, 695 bp, Emericella nidulans
cgcagacgcaaacggtcacaggatcctaccgcaagccaaacgcatcaagatggggtcacaactcccaagcgacgtgagccgcgtccttagcgccttcgtccaccacgtcatggaccatcccagcgtgaaggccgccgcgcccctcgagtacgagcgcgtcaagaacgagcttcaggtcttcctgctgtcgcacatagagcaggccgacgacaacggccgcttcgccgcccaactggagtccacccgcgacgacttcgagaccgcccgctccagcttctaccgctgggtgtcttccacctcgtccgaccacacctcctgcccctactcgtttgccttctaccagtgcctgctggggttcgagcaggcgtcccacaacgccgcgtgctttcagacctgcgaagagaagtatgtggctgaagcaatgtgccgccatctcgccgtgatgtgccgcatgtacaacgattacggatcgcttgcccgtgaccgcgacgagaagaatctcaactgcgtcaactttcccgagtttgcccaggccgggccaaaatcagatgcggttcggcagaagcagctgttctctctcgctgagtttgagcggtccaacatgaagcggggcttggaggtcttgacagagatggcggcgcaggatagggccaagatgaggatgctggagaaggtgcagatgttttgcgacgtga

SEQ ID NO: 18979 - DNA, 695 bp, Emericella nidulans
tggagcgtgccgattcaagcactctgcccgaggacgaaatcgcagaaaacttctctgccatcatgctggctgggttccatacgacttcgcacgccatttgcgccaccatctggctggtgctctcgcatccaggagacgcgtgagcgtctccagaacgagctgcgcacggcctttcagtccaccgatgagatatctttagacgtcctcgccaaactcccctggttgaacgcggtcatcacggaggcactgagggtctacccgcctgttccgcttggaggagcgcgcatctcgcctggtgcttatgttgacggggtctatgttcctgctggcgtacgtatctctccctgtatcacagtttgttgcctttctgacgggtccgcaggttgaggtgtcgacctccctctacgccctgcaccacaacggcgagtacttcaaaaacccttacaaatttgcccctgagcgctgggtcaaccccgagtctacggatcgcaaggaggccgtgcagccattcttgcttggaagccggtcttgcattgcgaaatagtaagtttgcctagtctcttatccagtttccttctacaatgaaaaccaagccctaacgcgccccagcttcgcccagcaaatgctccttctcactttggcctccttttttgtcgagtttgacggacagtatgtcggcaaggtgaaggactgga

SEQ ID NO: 18980 - DNA, 696 bp, Emericella nidulans
tgcatcgccagcgaaacctcaaagaccgccacatcacatatctttggacaacctgggctctgggcttcgccggaattcatcgccgtcccgggatgggggccttttggctgccgcgcacagccaacgaagcagtcatagctttgcgacgactactggtctagtcattcacgcagcggctgatggtattgctcttggggcatctacttccgacactggacttagtttcatcatctttctagccataatggttcacaaggcccccgcgtcatttgggcttacatcagttcttctcaggcagggcctttcaagccgtgctgccaggacgcatttgtttgtttttagcttggctgcccctgttggcgccttggcgactttcttgtttgtgcatctactagggtcaggaaccactgatgaggcaagtgcacgctggcgtacaggggttttactattgttctcagctggcacattcctgtaagtcaccagctccctattgagtatccccagtaactgactcctgccctgaagatatgttgctatgcactccatgcaggaaaacagctcaactccttctcgggacttgccagtcaacggttatgatgcgagggaagtagcgaagcctgagaagtccaccagggatctgattgcttctgtgatcggcatgatactaccgctctttctccagatcgggcacgctca

SEQ ID NO: 18981 - DNA, 697 bp, Emericella nidulans
ccgacgaagaaggcggcgtatatggtgaaggtgccagcgcatccagctccggacctagtgcacttcgtgatggttcaagttcgactgaagccagtttagaggatgtccttgaatatctcgatctcatgtccaggaaaggggaggtaaaggcgacattcagcttgggtaaaatgcattacgaaggcacaaagggcctccccaagaattataagaaggcactgaagtatttcaaacaggtgactaaacggtactggaataaggacaattcgctaaacccaaaccaccctgctgggattgagaaactggcatccaaagcagcgggccacgtaggcctaatgtatttacgcggcgaaggcgtggagcaaaattttgaaaccgcttatacctggtttaaactcggactggccaacggggacgcactctgccaacaccaaatcgggctcatgtatttgcatggctatggagtacagcaagacgctttcaaagcctcttcttatttcaaagcggcggctgaccaggattatccggcagcggaaactcgcttaggtgctttattcctggatcaaggagatgtcactacagctaccaaatatttcgaacttgctgctcgttggggatggatggaagcattttattaccttgcagaactagccaacaatggcgttggccggcagagacattgcggactcgctgcgtc

SEQ ID NO: 18982 - DNA, 697 bp, Emericella nidulans
gctaccacacgccgcaaggactaccgagacgtcatggtcacctatgttgatcccactaccgcgcgtatcaagctccaacagattggaactggcacctcggcgctgaccgagcttatgagcgcattccgatcgttccatatcaacaagtcaaatgacaatagccttcctggccctcccaaggccggtgactttgttgctgccaaattcacagaagacggtgagtggtatcgcgccaagatccgtcgtaacgatcgcgagaagcaacaagccgaagttctctacatcgactacggtaactcagaagtcctgccttggtccgccctcagaccgcttagcgctcagttttccacccagaagctccgcccccaggccgtggacgccgttctttctttcattcagtttcccgtgaacctcccgcactaccttgaagaggcggtgtcttatatcgaggaacaaacttataaccgcgaacttgtcgccaatgtggactatgttgcaccagagggaaccctgcacgttactttgctcgatcctgagggatcgaagagcctggaccagagtataaacgcggatattgttcacgagggtctggccacggttcctcgcaaattgaaggcgtgggagcgtgctgccggtgagactttgtcgaaccttcgggctctggaggacgaagctagggagtcgcgtcgtggtatgc

SEQ ID NO: 18983 - DNA, 698 bp, Emericella nidulans
gtcaaggctcgccgcaccatctacggcctcaaggctgagagccccgtctccgatgacaccatcgaggccattgtccgcgatgccgtcctgcacgtgcccagctctttcaacacgcagacctcgcgcgtggttctgctgctgaaggaggaacaccagaaggtctgggacattccctccaggcaatggagggtctcgtggctgcgggtgcgctgcccaaggaggcgtttgagtcctcgaccaagccgaagctagagggattccgtgctggttacggaactgtacgattaactacccggccaataatatatcaaaatgcatgggtagtggctgacaagcttaggtcctcttcttcgtcgactacgacgctctcaaggacatcaaggagaagtttgccatctacgctgacaagtttgatccttttgctctcgagtccaatgccatgtctcagtacttgggtatgcatcaatctgcaggcagtatgtttaatatgatccttttgctgacggtctctcccagtctggaccgccctagcctctgaaggcttcggcgccaacctgcagcactacagtcccctgatcgacgagcagatcgccaagcagtggaatatccctgccaactggaagcttgatgcccagctcgtttttggtactcccacctctggtcctctggagaagacctttgctcccatcgaggaccgc

SEQ ID NO: 18984 - DNA, 698 bp, Emericella nidulans
accatccgaacccgaagcagtccgacatctcctttgaaattggcgcgatgtcaatggctggaacccttgagagctgactcgtctgcgtatatagctgccaactggagtgatgcaaagaaacgtgttctaaggtcctacagggactggctccgagctgttagtatcccatttccagttcgttgcggacgctgcgtataattggttgtggttgtagttcaatacggcgtcatggcaaggcgtcggcatctatgctatcaatcctcatccacaaccagccgcactgtcacacgagctccaggtttcggtctcagtaacatgtgccgatagctaacagaaccctcggttgctaattagtcccccgagattcaaacgatgtactctctgaacctaccggtctccgccattcgcacgaaggtccgccaggaatttgagaagcaccgctatgttagccagctgcaggtcgttgacgtgctgttgtaccaaagccactctgagttccaggtgagtcataacacgccctgtaaagattcttacataggccattttattcttcacttagagctatgcattccatgtctgctcacatcctccatttacgatgaaaagctaacatatttcgccaggaaaccctcaactactggaaacagctctcccacgtgatgaagtacttccggccagaggaagacccaggtgcccgg

SEQ ID NO: 18985 - DNA, 701 bp, Emericella nidulans
ggcagcttcgcccgtgcatataccgctctcagcgatcatgaaaagcacgcgtacggtcgaccgtacactgtcgacgtggcttgctttaacgagtgggctgttgacgagcaaccgagcagtgtaaagagcaagaagagcaccgcaagcggcatgtcccagcgccgccccccttacaagattggtaaactggagctgcagctgttatttgttccgaagcccaagggtgctaaggatgaagacatgcccaagagcatgaatgcctgcattcgggagatgcgcgaggcggagactgcatcaacccgtagctgggagggctttctttcgcagcaaggtggcgattgtccggtaagttcggctcatcgaaccttttttttggaatcatattagctgacttttgcagtactggcgtcgtcgatttttcaagcttcaaggctccaaattgaccgcgtaccacgaaaccacccgccagccccgtgcgaccataaacctagccaaggccgtcaaactcattgacgatcggagcacattgacacaaaaagagacaacggcgcgaggtggcaagcgacgcaagtctgcatttgctgaagaggaagaagggtatatgttcgtagaggagggtttccgtatccgcttcggtaacggcgaggtcatagatttctatgccgacagcgcggccgacaaggaaggctggatgaaagtgc

SEQ ID NO: 18986 - DNA, 703 bp, Emericella nidulans
tcttcggtgccgggcctgtaggtctcatggcggcatacagcgcacaaattcgtggtgcctcacgagtctacgtcgtcgatcgagtgcctgagcgcttaagagccgccgagaagattggcgctgtaccaattgattttacagccggcgatgcggtcgaccagattatcgcagcgaatgggggtgagatggtcgatcggagtgtcgatgcagtgggatatcaggctgtgagtgggacgaaggataatgcgaccgaggtgccgaatattgttcttgagaacatgattcgtgtcacgagggcatgtgggggattagggattccggggctctatgtgcctaggtctgttgtccttctttgcttggagtttggtgtgggtggctgatggtaatcttgtagtgaccccggcgctggtgacactgcaacggcaaagggtatgatcagtctgagctttgggaagctcttcgagaaggtacctcctgacccatctataacctttcagctcacacattctaaccccctatccaatctcagggccttaccctcggcacgggccaatgcaatgtaaaagcgtacaatcgacagctgcgcgacttgatcatcgctggcaaagcaaggcctagcttcgtcgtctcgcatgagattagcctcgatgaggcggaaattgcatatgacaagtttgataagaggattgaaggatataccaag

SEQ ID NO: 18987 - DNA, 703 bp, Emericella nidulans
ctacgatgacggtcttttcatcttcgatatcatccataccccctatggatgcggcacctggccagctctttggctgactgacggctacaactggccggatcatggggagattgacgtgcttgaagccacaaacaatgcgacagacggcaatgcggttactctgcataccacgcccgggtgtaacatggacgtcagacgcaagcagacggggagcacgacgtatgcgacctgcgataacaatacaaatagcaacgcgggctgtggggtgcaggggccgagcttgacttatggagaggcgatgaatgagagaggtggtggtgtacgtcccctttgacggcgttggccttcatttcaagacatgttaacgacgagatagatctacgcccttgagctccgccctgcgggcatcagagcctggttctttccacggcactcggttccattagacatagacatcagcaacagcagcagcaaacccgacccttccaaatggggcactgccctcgccgacttcccaaacacgagctgcgatgtctcctcacacttcaagaaccagagtataatcgcgaacatcgatctctgtggtcagtggggtggcgccccgaatgtttactcgaggcagtgggactgtccgggcaagtgtaaggaattggtggcaagacatccggagaggtttgaaaaggcgtactgggagtttggcggg

SEQ ID NO: 18988 - DNA, 703 bp, Emericella nidulans
ggggacgtgcccaggcttagacactaatatggaattcgatgacagaaccctgacgatcctctatctctcgtatcggcatggcttgctctcgttcctcaagcattatgcgttgtctacgttactctcgtctgggcttcgcgcgaggtggaggtgggtttgatgtttgccgggcagctcgtctgtgaggctctcaacttcgccctcaagcgaatcatcaaggaggagcggccaaagcgtatgtcgattgaaatgagggttatatgcaagacaatcttagctaatcgcaaccataacagagatgtttggaaagggctacggtatgccatcatcccacgcgcagtttgtcgccttcttcgccgtctatttgaccctattcctcatctttcgacacgctccaaacagcgcaaaccagagcatcttgttccgcatggttgcctctctggggataactcttggtgctagcgcagtggccgttagccgtatatacttgacttatcatactgtccgacaagtccttgccggatgtgctgtaggggcagtttttgccctgttttggttcaccttcaccggactgttgcgcagttatggctggattgactgggctctggagcactcgatagttcggcttctgaggatacgggacttggtggtaagcgaagatcttgcggaggcggggtggcagcggtgggaggcgcagcacaaa

SEQ ID NO: 18989 - DNA, 703 bp, Emericella nidulans; identical to SEQ ID NO: 18986

SEQ ID NO: 18990 - DNA, 704 bp, Emericella nidulans
cagattaaggaggccctgcttgatcctcaggtaagttctgctctttttctctctccctctccctctccctctccttcaaatgacatcgtgagcatggcggctaatgatggcgacccgtatagatctggtgctactgcgccatacaaattttcactactcttcccactagcggcctcggtgccttcgccaacatcgtcatcgccggttttgagtttactgtcctgcagacgcagctcctcgccatggtgcttggtttctacatcatcatcgtgctgctgacgtctgcgtatctcgttcgaaagactggacagaacctctacgtcatgctgggcttcattatcccgtacgtccattagccttcctgctatagccccctacgcagccctgactaacatgaccgcagctcctacatcggcacaattgtcctcatgaccgtggacaacaagaacctaggcacaaaagtcggcttgctgatctcctactacatcacgctctccttctggtccgctcagaccctcggtctctccatggtctcgcgcaacatcggtggcgcaaccaagaaatccgccgccattgccgcaacattcgtctcctgggccgttggaaacgcgatcggcccgcaggtgttcttggacaatgatgccccgaagtacttcattgcctttggtgtccatctaggttgctatgtctgcttgactatcagc

SEQ ID NO: 18991 - DNA, 704 bp, Emericella nidulans
cttggcgccacgcctcattcccacagctcaatacctcccactccgtttccagctcacgcgctcgctgcttcgtctttctcgcgcttcaggcacatacatcccgctcgcccccctcctcctcgaacccctgaatctcaccgaacttcgcaaagcccctaaacaagctactctgcgaccgctcgactttacgacaacaatccgcgcgcctaaatcctacctccgcacccgggtgtaccaggatggcgccgccgagcaaatcgccgaattgctgtctgaattcttcgtcctctggagcaaacacatttcctttccggaactgagcgtccctatcgttgttgctctcaagcgctggttgaaacaggtttcatctcggtctggcggcaaccggaatcagaaattaaatcaaatgatcctcttgcttgtgcagaaggtcgaggcgaatgcgaagtggattgaggaaaggagagcgcatgttacatttgcgccgaggaacaagacggaggtcgaggctttcctcaaggatgtagactgggagagtacgccgttgggtgcatttgtaaaggtgcagaggaagctgagggaggaaaaggcggctcttcttgaggagggccggcgagaggaggagaagaggaggcaggaggagagggatggcggggatgatgttgttatggatgatgtggctagtgagaacgatcacagtgggg

SEQ ID NO: 18992 - DNA, 704 bp, Emericella nidulans
cagcaacgggagctcgtcgaaagatatccccaagaaggccaccggcggcttccacgccagagatggtttaggcgtctacatcgcgaacccagaattgtatccgcctagtactgtggtatattacaatgacgaatttgttgttatttatgacatgtttcccaaatctacgctgcaccttcttctccttccgcgcgaccctgaaaagactcttgtccacccaatcgaagcgttcgatgacacagagtttctggaaaaagtgaaacatgaagttaagaaggtccgcactttggctgccggcgaacttcggcggaaatatgggaagtactctgcgcgagatcaagagcggcggaaagcgcttgatgccgaaccacccgtagacagtctgcctgcagggagagactgggagcaagacatcatgtgcggaatccatgcgcatccgtcaatgaaccatctacacgtgcacattatctccgtagatcggtacagcgaccgtctcaagcacaggaagcactacaatagctttagtacgccgttcttcatcgatatcgatgattttcccctcgcccgcgacgatccgcgaagggatcccgataggcagggttacttgcggagagattttaaatgttggcgctgcggtcgggattttggtaatcagttcaccgcgctgaaaaaacatctcgaggaagaattcgacgagtggaaac

SEQ ID NO: 18993 - DNA, 704 bp, Emericella nidulans
cctcgtccccgagaccctccttaagaagcgcaagagccaggagcaggctcgcgctgctgcccgtgaggaggccgccaagaagaaggccgtgagtgcccaaacatttttattttcctttttcctttcatacggtgatgacaccaaccatcacgcgactagattaccagtcgatgctgtcgcttttgttaaccatctttcggggctgagaatattgcttatgctgttgatgctgtgattacctgtaccggcattcgctaacttggaaatcccaggccaacaaggagaagcgtgccgtcatcttcaagcgcgccgagtcttacgttcaggagtatcgcaatgctgagcgcgagaagatccgcctggcccgcgttgctcgccaggagggtaacttctacgttcctgaggagcccaagctgatcttcgttgtccgtatcaaggggtaaggcatctctatcacggaatcagacgcccaacgctaactcgttccagtatcaacaagatcgctcctcagccccgcaaaatcctccagctcctccgtctcctccagatcaacaacggtaccttcgtcaagctcaccaaggccacccaggagatgctcaccatcatcaacccttacgttgcctacggttaccccaacctcaagtctgtccgtgagctcatctacaagcgcggctacggaaagattgacaagcagcgcgtcgctc

SEQ ID NO: 18994 - DNA, 705 bp, Emericella nidulans
ccccggaacaatcgcactcggcgctactgaagggctaaccgagaaggaagcacgcaagctgcctagctggactccccaaaaggaacagcagatgcaactagctcgggagctcatgaagacgtgttgggcaatgtacgcggttaccgccaccggcctgtccccagaaattgcttggttcagggccgatgaagccgaccttcgatctactttcgggtcatctatacgacctccaagcaagaatgacgaagcttcgtggaaacgagaccttattattaaacctcaagacacacataacttgcagcgaccagagacggttgaaagtctgttcttaatgtaccgaataacgaacgaccctctctaccgaaaatggggctggaagattttcaaggcgtttagaatgcacacggcagtaggcgataatgggggatacacatcattacaagacgtcacaaaggttccggcaccacagcgagataatatggaaagtttttggctagtaagacaccacactcccaatccggaaaatcgttcgatgtttgcagttaagctctaaatatactgatcttgtaggccgagacattgaagtatttataccttcttttttcgccgaaggactttctaccacttagcgacgtggtttttaacacggaagctcatgtcctgcctcgtttcaatcagactagatttcaaacaggatggaggcgt

SEQ ID NO: 18995 - DNA, 705 bp, Emericella nidulans
tattcacctttcggcaatgcgtgagagctctgcgtccatgaacatgccaaggaactcaacagaagaatctagcctggacaggtcttcaacgaattttattaagaatggcgctcttcctgcacttggagaaggcaggaatccggttgttcgcgccaacttgagttcccgctatccagcacaagtctcttctggccctaacatggatgacaatacagaccccaaaatgacgttgcaaaacccccaccgtcagctcttgcaatgtctcctccttgaggctggtatacttttccatagtatctttatcggaatggctgtcagcgttgccacgggcacctctttcattgttcttctagtcgccatctgcttccatcagacatttgagggtttcgctttaggctctcggattgcgtctctaatcccggatctctttcctccgtcatcaatgaagccatggctaatgtccctagcctatgggactacaacccccatcggtcaagccattggtctagttcttcataatttctatgacccagccagtgctactggtcttctcatggtgggaatcacgaacgcgatcagcagtggactattgctatttgccggcttggtagagctcttggccgaggatttcttgagtgaagaaagttacgtgattctacggggccggcgacgcttggaagcgtgtatagcagttgccgctggcgc

SEQ ID NO: 18996 - DNA, 706 bp, Emericella nidulans
aagtgagcgatggccgggtgaagaagaagaagagcaagaagagctcttcggctggcacaggtgccactactggtgttggtgaaaaggtggaggagaaaaggagcgaggatgccgctgctgaggagcgcgcaagatcggtatccggtggtgcagagggggaggatgaatcccattctacagggacatcgacaccaacgcagcctgcgaagacagaggctgagaggaaacatgaggaactgaggaggaaacgggtatgttgcattgcatccattgcgcacattgttcccagattaccgatactcgaatatttttttcctttcgctctcgcatatatcgatcttcctcggtatgagccagaagtacttttgctctgtctcatcatctcttctcttctgatgtgtttgctttttggctgggctgtaatagacctgctttatcctaccttacttacccctgggctgtttctcaacaatcgatttctagtaatggctacacacatgctgatactgatggacgtgtgtagatacaagagcgtctaaagcgcgagggcgtcaagacccataaggagcgagtcgaggagctgaataagtaccttagcaggttgagtgagcatcacgatatgtacgttttcagacttgccagcttctcttccttggcttttaatacaatgatggatgctaactatcgtgcaggccgaagattggcc

SEQ ID NO: 18997 - DNA, 707 bp, Emericella nidulans
tccggtatcatcctctccaccacatacacgaccgtctttctcacccagctcggcgtcggcgacgcattcaccttcaccgtcattgcatcctgctgtacgcttgctgggacgctggcgcgccgctcgtcatcgaccgctttggtcgccgtccaacagcttttgtcggcatgtccgtcctccttctcatcgacatcacagctggcagcctcgcctttaacaccggctccgaatcctttgtgctaggaatcgccgcgcttggattcatattcaacttcttttggggtgccggcttctactcgctgtctgcgttgatgccgtctgagatcgcgacaccgaagctccgcaaccataccatggcgtatacaatcgcgtgcgcgcagaccacggcggtgatcacgacctttgctgtgccgcagttgacgtcggcggatgcggcggggctgggcgcgaaaacgtatctggtgtttgccggatgtatggcttttgtgctagtttttgtgtacttttttatgcctgagacgaagggccggacattcgcggaggtggatgagatgtatgacgctggaattccgatgtggaagtggcgcaattataagactgcgacggcggcgaggatcggtgggaaagagggtgcatgatagttgtagctatgttcagtagcatttcatcaattgtctacttcccatcctaacgctaaaagatgcgcc

SEQ ID NO: 18998 - DNA, 707 bp, Emericella nidulans
ggccgactctctgaccgaagagcaagtttccgagtacaaggaggccttctccctatttgtaagtgccattggttactgttatatcaaaatcgaatttgtattgagagtatactaatacattccgcactaaacaggacaaggatggcgatggttagtgcatctgtccccccaggcttgatcgcattcgcccagcatgtctgctgtagctctatataaccgtttctgacaaacggcgacaggccagattaccactaaggagcttggcactgtcatgcgctcgctcggtcagaatccttcagagtctgagcttcaggacatgatcaacgaagttgacgccgacaacaatggcaccattgactttccaggtacgcgaactccccaatctacttcgcaccagcctagaaatgtactaatgctaaacagagttccttaccatgatggccagaaagatgaaggacaccgattccgaggaggaaattcgggaggcgttcaaggtcttcgaccgtgacaacaatggtttcatctccgctgctgagctgcgtcacgtcatgacctcgatcggtgagaagctcaccgatgacgaagtcgacgagatgatccgcgaggcggaccaggatggcgacggccgaattgactgtacgttggctccccgcttatccttgaccgtagaagaggtatgatactgatcggctgcagacaacgaattc

SEQ ID NO: 18999 - DNA, 707 bp, Emericella nidulans
gacttccttcgccttcatgattgctatgctatactgcactcatgatttgcaagccgtagtggagactagcactgggtaaggactcggccgtctcatcaatgctaccagccatcgagacgctaacgtatacgctgcagtgtcccaatatacgaaatctggtatcaggccacacggtcatccaccgcagcgactgtatttgttttactcttgtgttttgcagcgacattcgcccttatcggagcccaggaaaccgcttcacgtttgacatggtctctggcgcgagatgaggcgctctggggcagtaaatggattggcaagattcaggatagactcgacgtccccgtatgggcactcgtcttcaatgcgagcgtcgtgtttatcattgggtgcatttaccttggctcctcgtcggcatttaatgcctttattggcacgggcttgattctacaacatatctcctatgcgtttcctgctctgctgcttctctatcgtcgtcgggcgagtgactggttgccggaatcgcgcaagtttcgactgccagctgtggttggatgggctgccaatctcactactgtttgttttgcaatcttggtgttgatattttataatttccctactgtgatgcctgtgacgggaagcaatatgagtgagttactactcctatagtgcggactgcggtgtgatgctaactggtttacagactattc

SEQ ID NO: 19000 - DNA, 707 bp, Emericella nidulans
gcccgtcgggcttttcatgcttcggcgccgaggaagcgagaccaccatttcgatacgttgaagttcgtccagcggctcaaggacgagggatttagtgaagagcaggctgtcgccatgatgagggtcctaaatgatgttatccaggagtcgatacaaaatcttacccggacaatggttctgagagaaggttagtcggccttctcgctctttggcggctgttagaacgcgccgcggaagaggtttccggtataatactgatatcctcccgaattctagataccgagagatcagcctatactcagaaagttgactttgccaaactccgctccgaattgttgaacgcagattcaactgaggcccaactcatacgctcgtcgcatgaaaagatagccgccgacctagcgaaacttaattcacgacttcgggatgagataggacgcactcaggcctccgtacgtctcgaccttaaccttgagaaaggtcggattcgggaagaagcgaacagccaagagatgcgcatcaaggagacagaaacaagaattgaacaagaagtagcaggtctaagggagcgtgtggaggccgttaagttctctacactgcagtggcttatgtatggctttctttctcgggattctagaactcgctaacaaattttcctaggggtgtctgcactggtactgctgctttgattctcggtgcctggcgtc

SEQ ID NO: 19001 - DNA, 708 bp, Emericella nidulans
gatctgattctagtgccactgatccagctacgtcaacaacccacttctggcttctttcagttggtcgtgggattctgatggacgcgggaactggcgtgaactttgagtttgtcaaccgctcatacggtggtctcaatgctactgtcgaggatgattcggatgaggagatagaggtagaacgatcgcaagatgacacggaggcgaacgttgaagaagaggctattcaggatattagcctggccatcaaccgaggatctagtcagcagagtcatcgtgccagatcggatgagataccggaatcccagacacccatgagcaccgatacgggaagtgaaatggagaactttgggattgccgttgcctccagctcctcggatgagcatgaaaatgatgaagatgatgacgacgacgacgatgaagacatggacgacagttcagaatcagatgctgcagagcgcctgttccggagttacggcttcgaaagaagcggacgagaggacgtggagaaccatgttccgtgctcatcgcacacaagggtctatcgcggacactgcaacgtcaaaacagtaaaggacgcgaatttcttcggattaaacgacgagtatgtggtgagcgggagccactcaggtcacttattcatctgggagcgagacacctgcaagcttgtgaatatccttaaaggggacgatgaagtagtcaatgtcgtgc

SEQ ID NO: 19002 - DNA, 708 bp, Emericella nidulans
cgcaaacgaagtcgccgttgtcgcctcccacactcacaaagccgcatggctctatccgtccccaaactcaccaacgacatccgcagactcagacggcgacgttacaatgagcaataataaccatatgagcaccggtggtggtagcggtaaacccagccaagtaaacaaataccgcccgtttcgaatcgtcgaggagcaagtgacatccaatctccgacacctggtagactccaccaaccgtgatgacctagacagtggcgcctcaacaatgatggccggcgcacttactttagctcttagccacatcaaccgtcgcacaattgcctgggctgaagctcacggaggcggcgatgcctcctccttctcgcgctctggtgacccagatacaagcacaacgtccatgatagcccgacgctccacaaccacaacggcgacaaacgacggtgccgccgagggtctacagtctcgtatcctcatcatctccgtcagtagcgcgaccggctccgcgcaccaatacatcccaatcatgaacggcatcttcgcctgccaacgcctgcacatccccatcgatgtctgcaaactcagtggcgacgccgtcttcctacaacaagcctccgatgcaacaaagggaatctacatgtccctttccgaaccccgcggtttactgcagtatctaatgatggcattcctcccggaccaacggtctcg

SEQ ID NO: 19003 - DNA, 708 bp, Emericella nidulans
agtttcccaacagcagttagaagacataggcgtgacgcgcaacgtctcgtcaacaaagtcaacccggtccttctacctcccggcttggaccgaactcggcggccgaatggatcaaataaaggtccaaattcggcaggaggagcaagccatcttcgagcagttacgccgcgaagttatcttgaacctggtaaagattcgccgcaacgcctcagtcatggacgaactcgatgtcgcttgctcatttgccaccctcgcagccgaacaacaactcgtgcgtcccatcctcactgaaggcacaaactacaagatcatcggcggccgccatccaaccgtgaaactcggccttgaagaacaaggccgccgcttcgtcagcaatgactgcttcttgggcgaatccgagcgcatctggcttatcacaggccccaacatggccgggaaaagcacatttctgcgccaaaacgcgcttatcaccatcctggcgcaagtgggctcctttgtgccagctgactacgctgagatcggcattgtcgatcagattttcagtcgtatcggcgcagcagacgatctctttcgcgatcagtcaacgtttatggtcgagatgctggagacagctgcgatcctcaaacaagcgacggcaaggtcatttgtgatcatggatgaggttggacgtgggacgacgccggaggatggcaccgcggttagtttcgc

SEQ ID NO: 19004 - DNA, 708 bp, Emericella nidulans
gaacagaactgacttattggtgaaggaaaaccgatcaggaagctccctaaggaggtccagatcctttccgacgcctcgactcaggagctttacagccaactagccatagcttctggctattccattcatcgtctgcgaattaccaaagcagccgaccgggccgtggttcccagttctaaggacagcactatcgagcaaattggacttaatgacaagaccgttcttcatgtgaaggacttaggtatgcccgatatttctagctgttgcatcgactcatgattactcttgctcactgtttgcgtccctaggtccccagatcagttggcgcactgtgtttattgtcgaatacttcggccctctagtgattccaattcttttcctctacccactccgcccgtacctctattacaactttgataatattccccagccaactgacattcaacgtcttgtctgtgcgcttctcgtcgtgcacttcctgaagcgcgaatacgaaaccgtcttcgtccaccgcttcagcaatgctacgatgccggcgcgcaatatcgtcaagaacagcggtcactattggcttctagccggctgcaacatcgcctactgggttttccgacctgattcaagtgcggcaactgggcgcgtcagccctgccctagtctacactggtctcgccctctacgtattcggagaactggcaaacctcaacactca

SEQ ID NO: 19005 - DNA, 709 bp, Emericella nidulans
cgcccttccggccttttcagagcttcccaattgcctcgggcccgcgtccagactccggctgctctcatcggtcgtccggctttcagcacctccatgaagctccgctccggccagcacgacgatgagacatacgagcagttctctgccaggtacgctcatgcattccgatagccattgggcttattctggagtagccagaggcccgattggtggtcacggtcgtttgcaggggatcagctcatccgggtgcggtggagctggcttctgattacggctgattcaacgacgcaataacaattccactaacatataccttcctagattcgagaaggaattcgatggtgtgcaggatgttttcgagctccaggtatgtcagttgtcaagcgaaccgctccctcttgtgtcgtcatcgcatgaattccttgaccacgactaataaatgtcggttcccagcgcaacctgaacaactgcttcgcctacgaccttgtcccctccgttgaggtcctctctgctgccctccgggccgcccgccgtgtcaacgacttccccaccgctgtccgggttttcgaaggtgcgcttaaaaccatatcaacaaaacggtatcatgatttaatccatacttaccccatgacaggtatcaaggccaaggttgaaaaccaggaacagtacaagcagtacctcgaggcacttgagggtctccgccaggagc

SEQ ID NO: 19006 - DNA, 709 bp, Emericella nidulans
accgtggcattgcaggagccccattgctctcgacatactccgccgagcgacagccgtcggccacgggattgtaacgcgcgccaaccaggcgttcagggatcatcaccagatctgggccgcgctcgggatgctcggcgcatctctcgaggagcgacacgcgcgcttgaagagttgaccgagcccactgccgccgggcgcgacggcgtcagaccctccaaaaggctgttgcgcatacagcgcacgagtttcacggcttaggcatcgagatgaaccagcgatacgagggtccagggatctacgacgcagacgaggccgatccttttgtgctccctggccgcgcggccgaagaccctgttctgtactatgagccgaatacctatcctggttgccgattgccgcatgtatggctgaaccgggccattcccgggcagccagtgtccacaatcgatctggcaggacacggcgctttcacactattcactggtattggaggtgagccgtggaaacaggcagcggagagggtaggtggcaagcttggagtcaccgtgcatgcgcattcaatagggttccggcaagactgggaggacgtgtactttgaatgggagcgccttcgcggggtggaagaaagcggtgcggtactggtccgtccggatcgatatgtggcctggagggcagacagtgtgttgaaggatgttgctgcctgcgagga

SEQ ID NO: 19007 - DNA, 712 bp, Emericella nidulans
tccccaatgacgcctccgtttcaccaaactttcaacccgtatgttcgtcatcaacctgtccttccgcatcagaaccaactgctttacattgtcacgttcaagtgccaccgtgcagacgtcttctacatacaagaagataccggtcttcaagtaaatcctggagatctagtcattgttgaagcagaccgtggcaccgaccttggaaccatacagcatgccaacatctccttacagaaggcgcgggagctgaaacagcaatacgccgaagaacattacaaatggttgatgatgttctctaggcaaggacaaaatggtgctgcaggcggtagtgtccctggcagccggagcgctattggcggcatgggaactcatggtgcacacggtgtgcaggagtctgctggtgaaatcaagccaaagttgattaagcgacttgcccagaaccatgaaatattgaccttgcgtgacaaggaaggaaatgaagcgaaggccaagcgtgtctgccagcaaaaggttgcagaacatcgcctcaatatggagattcttgacgcggagttccagatgtgagtattaccttgttccgcttaaatagcaaacactaataaggaacagggactggaagaaactcactttctattactttgctgactcctatattaactttaattccctcgttaccgaccttttcaagatttacaaaactagaatttggatg

SEQ ID NO: 19008 - DNA, 712 bp, Emericella nidulans
ccgtgacccgtgggatcgatctcttcgagatccatcttcctgtgaactggaaaactgccgtcgctgagggggtggagtttgttttcgtaaaggtaggtgatctgcgctccgtctaccaatatcctgatactgaggcaattctcccacacatagtcaacagagggcatcgcgtaccggaacttgcgcttcaaatctcagactggatccgccgccgccgcctctacctccagtaacaccaccatcctccacggcgctgttcacttcgccctagcgtcgcagagcaccggcgccgcgcaagccgacttcttcatttcgcacggtggaaattggactgcggacggggcaaccctccctggcgttctcgaaatggagggcaatatccccggcaaactgtgccacggaatgagtgcgacagaaatctcagattggatgatggatttctcagaccggtataaggaggtcaccgggcggagaccgatcttgttcctctctgcgggatggtgggagaagtgtgcaggaaataatgagacgttcgcacaggagcatcccctctggttggcgaattgggcagatgagatgggggatctgcctgctggttggaaagaggcgacattttggcaatattcagggagtgccggagatggggttagtggagagggagatgtgttctttggtgatagaagggaactggtgagatttgcgagagcgtctg

SEQ ID NO: 19009 - DNA, 712 bp, Emericella nidulans
ccggtggagaatccctaaatcaagatatgcctccaactcgacatatatcgcacaggaccctagactacggaaagaatacctagaccctgatttgatcgtggatgaagatatcaaaaagcgtctcatggatgatggcatggacgagctactagcgacacactttgcgcatttattcatccgcgacccaattgtcatcttctcggaggaccttgaagagctggatttgaacaaagccgatcactttgagaatctgcagtcgacaaactggcagcacatgcggttcaagccaccaccaccagagaaggacgacattggctggcgggttgagttccggtccatggaaatccagatgactgattttgaaaacgccgcattctccatcttcattgtgcttgtcactcgggccatcttgagtttcgacctcaatttctacattcctattcaacgcacagcagagaatatggaaacagcacatgcgcggaatgcagtgctagaccgaaagttctatttcaggaaagatcctttctctccgtcagttcgcaggcaccacaattcgtcaggtgacagcaatacctcttcagcaaacaacactccgcctccctctccgccgctcggccctgtcgaatatgaatttgagctgatgactatttctgacatcatcaacggctctgcggatggatcattccccggcttgattccccttgtggagtcg

SEQ ID NO: 19010 - DNA, 713 bp, Emericella nidulans
ggattgtcggggtgtcgatggtgaagctcgacgccgggggtgtcacggtggacatgttggtggatggggcctcgaaggctgagtcaattgtttgggaggcttgccacatctctaagaagcgtggggcgattgaagctctccatgagaacagcagagacgcaaagctgctgcgaagggccggtacgagagacgatcgagttgcccgagtctcggctgctatggcgagagggagacagtcttatggtaagggaactgcttaccgtgcttccattctacgcccttcactgacatttgaccttagttgaccgcattacctattttcaagagtctatccccgagggaacagtatctctttcagacaatgacctttccgatcttgtcgccaggttcgtcagaccgaggcgcgatattttacatgttatggacatactgatgccatggcgtacagatatatcaatcgcagcgtgcccgagatcgaacaattacagagtgagcggaggaaaggtcggccgcctagtaagagagaagaagcactcttacaacgaacggaggccgagaacaaagagttcaagacaggtttttggatgccggacctgaccgaggaggatgtagtcagagcacttgttcggtggaatgggaattggtctggactcagtgctatgaaattcattcggttaacgaaagagggagagaaacaaacttcaacatttcca

SEQ ID NO: 19011 - DNA, 713 bp, Emericella nidulans
cgggcttacgaccgccgtttataatgattcgcatgtccagtctctcggcatcaatgttttcgctggcgcttcgtcaggtataatcggcgctgctgcaggctcaccgtttttcctcgttaagactcgtctccaatcattctcgcctttccttcccgttggcacgcaacatcagtacaggaactcattcgatggtctgcggaaaatcttcgcttcggagggagtaggtggattataccgtggagtgggggcggccatggtgcggactggtttcggtagctccgttcagttgcctacatacttcttcgcaaagagacgcttggttaagcatctcggcatggaggacggtccggcacttcacttggccagcagtacggcctccggtttcgttgtctgctgcgttatgcatcctcctggtaagttggcactgggcacctaaaccaccgaatttgatcgatctaactgttctcagatacaatcatgtcgagaatgtacaaccagactggaaatctgtacaagggcgtattcgactgcctggcgaaaacgatccggacagaaggtctttttgctatctataagggctactttgctcacttggcccgtattctacctcacactgtaagtagtttctctgggattttgcaaacagacactaaccaacctgcagatcctgactctcagtttggctgagcaaaccaacaagctgatgcgacggg

SEQ ID NO: 19012 - DNA, 713 bp, Emericella nidulans
gctaggtattggcgcaaatgggacgcttccgtggccacgcataaaagccgacatgtccttcttcgcgcgcatcacagctcgccctccctccacatctccatccatctccaataaaccccgcacgaacgctctaatcatgggccgcaagacgtacgactccatcccgccgagactccgtccactcgggaaacggctgaatgtggtgatttcaagggatccagatggaagcgttgcggagcgcgtgaaaatcgatttggagagcaaattggagagggagagggaggctgcggaggcgaaggccaaacagcagcctcagaatcaggctgagggtaggaattcgggggaggagccagtcaatgcggctgctgtgactgcagttgttgcgccccctgtgaaagaggggagcacaggggcgtttgtggagaggagtcttgaggaggcgctgagtaggcttgataatgctgctgccggtgaggaaggtgttgggaatatttacgtgatcgggggtgcggagatctataatgcgtcattgaaattgggctcgagatccgaaaacgagcggacgatccggattgtcatgacggatgtggagaaacttgatgggagtgggttcgaatgtgatacttttttcccagttgatgcggaggaacttaacagtgggaaatggaggaaggttagccctgctgaagtaacagggtgggttggtgaggagg

SEQ ID NO: 19013 - DNA, 713 bp, Emericella nidulans
tggcccacatgaatctgcctccggacatgcccgtcgccatcaattgcgaatacggtgcctttgacaacgaacatattgtcctcccgctcaccaagtacgaccacatcatcgaccgcgattcacctcgtcccggccagcaagcttttgagaagatgacggctggtctgtatctgggcgaaatcttccgcttggccttggtagatattttggacacacagccgggtctaatcttcaaggatcaggatacctcgcagctgcggatcccataccttctggattcatccttccccgcagctatcgaagaagacccttacgaaaaccttatcgagaccgccgaactcgtccaaaacatgctcaagataaaagcaacacgctcagagctcgaactgatgcgccggcttgccgagctgatcggtactcgcgctgctcgcctatccgcctgtggtgttgccgcaatctgcaagaagaagaacatcgagtcttgccacgtcggggccgacggctcggtattcacaaaatacccccacttcaaggcccgcggtgctcaggctctgcgtgagatcctcgactgggcccccagtgagaaggacaaggtcaccatccatgctgccgaggatgggtctggtgtgggtgcggctctcatcgccgccttgaccctgaagcgtgtcaaggctggcaacacggccggtattcgtgatgcgcaggccatgctg

SEQ ID NO: 19014 - DNA, 714 bp, Emericella nidulans
tctttctcattgtgctgctttttgttgcaggagatatcaacctggtcatcgagtctgctgcgacacctctgttgcagattttccatgatgctactaatagcaacgcgggatcgatctgtcttcttatgtgagttcatcattcgacccctatgaagttcaaggttgatgctaacgagatcttgcaggtttccgctggtttgcactgtttttgcggccaccacgatcatgacgacaagcagccgcatggtatatgcgtttgcgaggtgagccaagagttttcgacagaatcgctggcgtcgcactaacggccaaaaacagagatggaggactgccggcttcacctttctttagcagagttcaccccaaactccaggtgccccttaatggattgtacctgacaatgttctgtgtgattgtattcggttgcattttcctcggctcatcaaggtaagtgctttgactggtacatcttgctagcaataacaccttatagtgcgtttaatgccattacttcttcatcggtcgtcatgcttgacgttgcatatggtatcccgattgcgataaattgcttaaggggcaggcaaatgatccccgagagagcgtttgtttatgcacaggctctcggctggatggttaacctggtaaattaacaatatccccccctttccctttcttatattagacccatgagtcgctaactctgtatacctggtg

SEQ ID NO: 19015 - DNA, 714 bp, Emericella nidulans
cgccgccccagaacaaaaagccgctctactccccctcctcatctctaacaaagtactctcattcggcacctacaccctcaaatccggccgtgaatcgccctacttcttcacctcttcgctactacacacagctcctttgctccgcgccacctccgccgcctatgcaagtgtcctctccgccgcgcccttcgttactaccgccgcagacggcaccacaacccccaatttcgacattatcttcggccctgcctataagggaattcccatctgtgcggcggtcgtaaacgagctcgctgtgcgcgactcactcgctggtcaggccaagggcacctgggacaacgtcagctactcgttcaaccgcaaggaagctaaggaccacggcgagggcggcaacatcgtcggtgcgccgctcaagggcaagcgggttgtcattgtggacgatgttatcacggctggtacggcgctgcgcgaggctgtgggcatcatcgagaaggagggcggcattgtctccggagtagttgttctactggaccgtgaggagcgggttagtgagagtgaagcgaagagtgctgttggttgtgctcagcgggatctgggcgagaaggttcctgtgcgtgcggttattggtctgcatgatttgattgagaagctgggaagtgagatcggagagggagagatccaaaggctgaaagattaccgggcgaggtatggtgc

SEQ ID NO: 19016 - DNA, 715 bp, Emericella nidulans
tttgtcacgtctgctatcctccctgagttaccgtattcgatcatcgcaggctcgatttatttcaactgctggtacgtccaaacatggacccaaccactattaaacatcgaaacatactaaccagatgatgaccaggtactggggcatctggtttccccgcgactccttcagctcgggcttcacatggatgctcctaatgctcttcgagcttttctatgtctctttcggacagttcattgccgcgatatcaccaaacgaacttctcgcatctctgctagtcccatgcttcttcacgttcatcgtcgccttctgcggcgttgtggtcccctacatggccatgccccatttctggcagtcatggatgtactggctcacgcccttccactacctcctagaagggttcctaggcgtgctagttcatgacgtccccatggagtgcgtggagcgcgaagaaacactattctcccttccacccggccaagactcctgccaaagatatgcaggcagcttccttagccaagcaaccgggtacgttcgggacgtgggaaatggaatgtgtgcgtactgtatgttcagcgacggagaccagttcgcggcgaacaacttcaatgtctattataaccacaagtggcgcgattatggcatcttttgggcgtttgtgatgtttaatttcgcggccgtgtttgttctctcttggctttatttgcacggagtc

SEQ ID NO: 19017 - DNA, 715 bp, Emericella nidulans
ccaaccatgcctgtcaagttcctcggcgaggacggggaaaagaagtattttgattcgtattttgcgaggtttgacagtacgttacccctacagcccacactaaccctaagtttcagtaccctccaggaactccttgccttctgtcaaaaactaatgtaaaccagacgtctggacccatggcgacttcatctccatccatccgatcacaaagcaaatcttctttctcggccgctctgatggcgtgctaaacccctctggaatccggttcggttccgccgaaatctataacgtgattgagacgcagttcgccaatgagatcgtggactcattagctgttggacagcgacggccccaagactctgatgagtctgtgattctgttcttgcttatgaagccggggtttaaggtcaccaaagcattgatcgaacgagttaaggaggctatcaggaaggctctgagtgcgaggcatgtgccgaaatatgtgtttgagacacctgagatcccggtaggttatgctgttcccttagccttttcattgtctcttgaacaaagtagggacataaaacaggctaatgagaccctatatcttgcagacgactgtgaatctcaaaaaggttgagttgcctgtgaaacaaatagtttctgggaagaagataaagccttcggggacgctactaaatccggagagcttggagtactattaccagtttgcgga

SEQ ID NO: 19018 - DNA, 716 bp, Emericella nidulans
tcttgctgcgggaccgcttggccaagacatcaggtaccttcgcgatgcgatgtcgggaattggaacggacgaaacggccataaatgacgtgctgatcgaccgctcgaatgcggacctccgcgctatcaagtacggctacgtccagcggtacaataaggcgctggtcgacgatatcaagagcgacctctccggcaagacggagaaattcttcctcatgctcctgaacgccgtgcggcccgagagcgggacctacttcgaccaggcgagcgtcgacaaagatgtgcacgagctgcacctcgcgacgaacgcgaagaccggaacagacgaactcggcgtctcggccgtcttcctcggcgcaagcgatcagaagcttgttgcaatttcgcaagcctttgaagcaaagtaccacatctcgctcgagaagacgatcaaggatgaattcagcgggcatctggagaaagccctccttgccattctggccagagcaaaggatccgctgaagttcgacgtcgaaactatgctggctattgtgccgccgggcggcgtcaaggcagatatcaagaggctgatctactgggtggtccggttgcattggaacccgccatatcttgcgcagattaaggaggcgctccagaagcggacggggagtaactttgggaagagaattaggggggctctgccgggcggggatctgacagaggcggtgctgcgggttt

SEQ ID NO: 19019 - DNA, 716 bp, Emericella nidulans
tgccttcgctcctcctccacctctctggaaacatttcacgcctgaaaacttacagagattggaaaatattaagaaagaggcatccaagggagaggatgggcgacgaagaaagaaagaatggtcgccggccgaattgcgctctttgaaaatacccccagagcttcgattcctcgtgcctccagagattccttcggagcagtatagcatctttggggaagttcagaatgtgaggcgccgaaaccatatgctactcggaacttactaacactgcctactagctctcaacagctcttccttccctcgaggaacaagggattacccagctctacccctcgtcgcccaaacccgacacgaaaagcggagacagctcacaacccgcgcagccgctgaaccatgcgtactatctcttgaaaattagcaagtcgttactcttgaactttctagagttcgttgggatcctgtctgtggcgccggagcagtttgaaccgaaagttgaggatattcgcaacctctttatcaacgcgcaccatctattaaatctatatcgacctcaccaagcccgagaatctcttattatgatgatggaagcgcagttagcccgcacaaaagacgaaatacaacagatggacaagctgaaagaagaagtaaacgccgtattggatcagttggctgccgaaggcgctgatgtgggatctacgattcagtccactacaaaa

SEQ ID NO: 19020 - DNA, 717 bp, Emericella nidulans
cggcagtcgcatcccctcactcgccaagatggcggccactcaggttctcaaacgggcttccggatggccagcacagccgctgtggcctacagtaacaactgggccggcgtcgtccgcgaggaagcaccacctggaggcccttacacagccgtcagcgcgacatttaccgtgcccaagccgacagccgcgccaaatacagcagggttgcaggcaggttcggcatgggtaggcattgacggtgacacatacagcggggcgatactgcagactggcgtggacttttacatagacaacggacgtgtgtacaacgatgcgtggttcgagtggttccctgattatgcgtatgacttcaacttggccatcaacacgggggatgtgattgtggccaaggtcgaggcgctttcgccgagcaatggggtggctattatcgagaataagaacactgggcagacggcgacacagacgatcagtgcgcccaaggctgatgcgacgttgaaaggggtgaatgcggattggattgtcgaggatttccagtctggcgataaagtcgttgccctcgccgactttgaacaggtcacgttcacggggtgtgaggcgaaggcacagaatggagattcattggggttggacggttcaactatcattgaactcaaacagaacaataaggtgctcactgaggtgacggtgaagggtaataatgagcttactgttgccagt

SEQ ID NO: 19021 - DNA, 718 bp, Emericella nidulans
cttatataacctctctccaaataaataccaagcaacagaagctcagatcaaagaatattaaataaaaattagctctatacagtaccctgcagttctaacacgagcagatattatatatactgttagccatttatctgaagccttaacaaatcctttaccagactatattcaggctgcaaacagggtcattatatacctatatacaacatattttctggcaattaaatactcaggcaacaatactagtaaggaagttgttatattagcctctaatacagcatttgctgaccaacctgaccagcaaagctctgcaggatacctttgcaagctatataatagcctgattaaatagaaatctggaaaacaatatatagtcatgactttaacaactgaagctgaatatctagctttatctgatacagcaaaggcaacacactggtggaaaagggtattcagaaccatgggttttgatccgcaacatcagatagcagtatactgtgacaaccaacagaccattaacttgcttacctccaaaaatatcaagcaacaatctaagctctgttatgttgacatatatagatcctggctttgtcaagaggttcaggaaggccaactctatgttaaatagatacctaccaaccagatgatcacggatggccttaccaagagcctcataatctaaaaacaccaagaatttgtcaggatgctcaacctagtg

SEQ ID NO: 19022 - DNA, 718 bp, Emericella nidulans
ccaaactcatcatcttcgacttcgatggaactctctttgactccctatcggcaattaccacctccgttcaactgaccttcaacgccctcctcccctcctacaccccaacaccatccgatatccaccggttggtctccagaggcgcaccaccagaaatcactttcatggccctgcaaccccagtctccagtatccgttgatggagtggacgcctttgacgaagagacctgggttcgcacataccgccaaatatattctgtccacggccacccactaacgaagccgtatcccggcgctaaagaggtcctgctctcgctgcgggaaaaagggattccgcttgcaatcatcagtaataaggccgttgctgctgtgaaaagcgcgctggagagccatggtcttggcgggatcatcaatgaagagctgattatcggtgagccgatgtttgcgagtgggaagagaaagccgcatccggaggggttcacggaggtgttgctccctaggctgaaaagtgtgtatgggactgtggggtatgacgagggagaggtgcttatggttggggatacgatcacggatatcctctttgcgaagaatatcggcgcaaaggcttgctggtgccggtttgggcagggcaaccgggaggagtgtgagaaggagagtccggagtctgggattgatgagttgatagacgtccttggggttgtcgatgagctgtgacgggc

SEQ ID NO: 19023 - DNA, 718 bp, Emericella nidulans
cacgcgtgtcgcagccctccaacaaaccctcacaacccgcctcctcgcccacaaaaagctggtcgccgatgccgcaacaacaacaccgccgcccccggacccaacaataatcactttcactccaaaccccgtatacacgactgggcgtcgggacctgccaccttcaaacacctctccctcctcctcaaagaccctctctctccctcctgctctcgaaccaatccgatcgttgcttaccccaccggagtcggggtcaaaattacacaataaaaatgggccgatagcagagtatcacccgacactgcgcggtggacaaacaacgtaccatggccccgggcagatggtcgcatatacgattctggatctgcgacggatgggattaagtccacgctgccatatccggttactagagaacagtgttgtggatgtgctacggtcgtacgggcttgatgggctgatcacggaggatccgggggtttgggtgccgcgcccttcctctactggtagcaatggcgatgagctgcccagaaagatcacggctgtcggcgttcacttaaggcggaatatcagcagctacgggattggattcaatgtgacggaggagccgatgtggtttttccggcagatcgtggcgtgtggacttgaggggagggaggcaacgagcctggaagggcagggcattaagggcgtctccaccgatgaggttgcggggcggttt

SEQ ID NO: 19024 - DNA, 719 bp, Emericella nidulans
tccccagaagggtttggcaatgtcaacgactatgcccctcagatgaattcgataaacaaccaatctgtacccgtgcagaatgctcagttccatgccgtgccgcagtcgcaggttcccgggttgcctaacgttagcgcccaagtgaaccagtccgtcaattcccgggcaaccgcctccccttctcagtcttctgtcgctgccccgagtcccacgaacgctacctccctcgcagctcctgctccaggccctaagcgcaacacacgcagaagactgtcccagttagcgtggaggaggctgcacgaattgctgctgatgaggacaagcgccgccgcaacaccgccgccagcgcccgcttccgagtcaaaaagaagatgcgcgagaagctctggaaaagaccgtcaaggatactaccgaaaagaacgccgcgctggaagcccgtgtcaccgccctcgagctcgagaatcaatggctcaagaacctgattaccgagaagaacggcaagtccgcggaagaaggaaaaaaggcggagaacgacatctcggacatgttcaagaagtttcttgctgcacagaagaccgagggcgagcgaagtaacggcaactccaaaatcggcgttggtaccgtttaggtctcgcttagaatgaagtttgctgtttttgtcttctgttgtatatcttgacctttatgttgatatcatttgcttaagtgagaggcgtcat

SEQ ID NO: 19025 - DNA, 719 bp, Emericella nidulans
aggcctgggagatgcgatggtcaaaaagtttatggcacaattaatcgagggtatccgtttctgtcacagccacagagtgcttcaccgtgacttgaaaccccagaatctcctaattgaccgtgatggcaatctcaagctggccgattttggattggcaagggcattcggtgttcccctccgaacctacacgcacgaggtatcctccgcctccctatcgtccatggcatgggcttgtcgctaaatttgctctaggtggtaactctatggtaccgctctcctgaaatccttctcggcggtcgtcagtactccactggtgttgacatgtggtcttgtggtgctattttcgcggaaatgtgcactcgcaagcctctatttcctggtgactcggaaattgacgagatctttaagatcttccggtatgccatttcactgctgaatcgctagacgcaagcttctaacgtctgatgtaccaggatcctcggaactccagatgagactatctggcctggcgtcacctcgttccctgatttcaaaccgaccttccccaagtggaagcgcgaagatatccagaacgtcgtccctggcctcgaagaggatggccttgatctattagaagccctgctcgagtacgatcccgctcgacgtatttcagccaagcaggcttgcatgcatccatacttccagcacggcagctcgtactattctggtcgcgctcgccg

SEQ ID NO: 19026 - DNA, 719 bp, Emericella nidulans
gggatgataccaccgcagaggcccttatcaatttaaaccacggatggtgcaagagaccctgcttccaccagggatattttgagacatacaatctgccgcatgtgaggctgatcaaaaccgacgccgccggcgttacagggctaagtccaaagggaatattggttggggacaccctctacgaagttgatttggttgttttagctacaggctacgatctgggcagcttgtgtccggccgatcgggcgcaaatccaggttctaggctcagagggagtggccatgaaggagaaatgggctggcggtcctacaacgctgcatggggtaatgactcgtggatttccaaatctttttttccccggtacctcgcaggctggtgttaccgcgaaccaatcttatatgttcgatcgtgccgcagaacatgtggcctatatcattcagaactccacactggaggcaggaggctatattgacaagatccgtatcgagcccacggcggaaggagaaaagcactggacgacgcagtcagtcgcacggataagtgcattcgcagccacaacagcgtgtggcactggggattatacaatttcgaaccgttacagaagcagcgatgttgacacgatggcaaggcatatgccgtggggagaaggtatggcaagttatgtgaaaattctagaggcctggagagaaagtgggactatggaaggtttggatatcaggtac

SEQ ID NO: 19027 - DNA, 719 bp, Emericella nidulans
caccgggcaatagcagctccccaagacctgcagctaactcaacctctagtgcttccaactcacgaaggagacgagattccaactgatcaccctgcaaaggaagtgactagacttgctctgcggctgaaataccagcttgaacaagtcattccatgtgagttggaagaagagtcgataactagcgccaacagccgggtcataactcaggatgtgatccatactgcgatgcaggccggaggagagcatcttcgcgcatgcgtgccgttctgcctactcgtgtgtttgcgatggtttaagcgtcaagcacagcaggagctgtgggattccgaactccatgagcttcgagctacagcctgtgaggtcatagcgaagcgaatgtatcgtatcctagtctcgtcctcaatcagtctgcatgaatttcctgacgatgagcagtattgaagccgacgaagatcagaatcatcttctcgttcatgtcctcctcaagcgctactctatcttccaggacggcgaagaaagcgcccccgccaacgtcattgagcgagcagttgacctccatgccttgagggtaatcggctcttctgggtaccagaagtgcatcaagtacctctggaatggctggctgtgccagcaagaaggcaacccaaccaactttgtcccctatcaagacagagacagtaccgattttgcagtccattttcatccagaccgaatgcgcg

SEQ ID NO: 19028 - DNA, 719 bp, Emericella nidulans
accgatatgaacttagcgagctctacgaaaatgtcgctaatccatcctattttccttctagacctcaaggcgcagtacgaagtgaaacttgaggagggcttggacacattcgtcgtcatcgatggactcccagtcgtaccagaagagaacagacagaaactcatcaaattcttgctgaggaaactcaacacagtcggccacacctccgaagatgccgtcttcatgcccctcaacgagaagaatatgtccgaagggtatgtacctggaagccgagcgctcgattatgttggtaggatgagaaatggaggttaacatgcggtcgcagatttgcctttgtcgagtacgaaaccgcagagcaagccgttgccgccgtaaagcagctgcacggaacgccccttgataagaagcatactctcctcgttaacaaattgatggatatcgaacgttatggccgggaaggacgtatcgacgaggaatataagcctccgaatatcgaaccattcacagagaaggagcacctgcgctcgtggctcggggaccccaatgcccgtgaccagttcgccctttaccgcggcgacaaggttggggttttctggaacaacaagagcaacccgccggagaatgttgtcgaccgtgcccattggacacagcttttcgtccagtggtccccaagggtacatatctcgcctctgttcaccacagggggtgcaactgtgggg

SEQ ID NO: 19029 - DNA, 719 bp, Emericella nidulans
cgcaccagctgagcgatgtcagtcggtttgcttctgctggctggcacagcgatatcagcttcgagcgagttccgtccgactacgccatgctcaagatccatactctccccgagaccggcggcgatacgctatgggcatcagggtacgaggtctacgaccgtctgtcgcctgagatggcggcctttctagagcgcctgacagcgacccatgatgctactttcttccatgatgaggcgcgacggctgggcaatcccctgcggaaagggattcgagggtcgccgctgaaccacggcgaggagcttacggcggttcatccagtcattcgaaccaaccgtacgtatcccctttacaagaatcactagcccatcgctgaccgtttttagcggttaccgggtggaaatcagtctatgttaacaaaggctttaccaagcgcatcaacggagtgaccaaggacgagtcggatgtgcttctgcagtatctcttcaatgtgagtaagacagcgtttatcgccaactcagtgctaagactgtttcaactagcttgtcacacagaaccacgatgcacaggtccgcttcaaatggcggaagaatgatatggcgatctgggataaccggtcgacctggcactgcgcgacgtatgactatgcggagacccgaactggtgatcgggtatgcagtctgggggaagcgccgttcttggaccgtcgatccaagtcccgg

SEQ ID NO: 19030 - DNA, 720 bp, Emericella nidulans
cgcgaccccagagacgaagctgccctcaccccgccggcaacgaccggtagccccaccagcccgtatgcgctgacacctgcgattgattttgatggcctaagctggccatgtgagtatttcgacatatctcggtcccagtcggtttgctgatgcagtttgcctgataggccccggaacacgggcacggcttgagtcaaccccagaggaaaatgaggcgcggattaagaagctctcgggggctgtgcggacaatccttgaatgtcttggtgaagaccccgatagggagggtctccgagaaacacctgaccggtatgcgaaagctatgctctactttaccaagggatacgaggagaacgtgcgggaccttgtcaacggcgcggtcttccatgaggaccatgatgaattggttattgtcaaggatattgatgtattctccttgtgcgagcatcatatggtgcctttcaccggaaaggtaaacctctcccgatctttactttggtccttcgctaaggtgtcatacagatgcacattggctacatcccggaccgccgcgtcctcggtctctccaagcttgcccgcctagcggaaatgttttcccgccgccttcaggtgcaggagcgcttaacgaaacaggttgccctcgctatttcagaagttctcaagccgcgaggcgtcggcgtggtcatggaatcgtcgcatctttgcatggttatgcgcgga

SEQ ID NO: 19031 - DNA, 720 bp, Emericella nidulans
cgacggaccgaacaacaccgtcttccaggtcgatgcagtccgcggagacggagaggttggcagcgcagagaacaagtatggaaacgccttctacgcgaagaagaccaagttcaccacgccccgtgaagccgtgtctgactacaacggcgccaccagccgtacctgggaaattcaaaacacaaacaagctcaacccgtacagcaagaagcccgtctcgtacaaactcgtcagccgcgaagtcccgcctctcctccccaaggagggcagtcttgtttggaagcgcgctggatttgccagacacgcggtacacgtcacaaaatgtaagctactgtttccaaaaaacaagggaagcccagactgacttgcgcagactccgacgaccaactccacccggccggccgccacgttcctcaaacctcgggcgagccctcccagggtctccctatgtggatcgaagaagcaggacccgactgctccatcgacaacaccgacgtcgtcctctggcacactttcggtttgacacactttccaactcctgaggattaccccatcatgccggcagagcccatgaccgtacttttgcgaccccggaacttcttcacgcgcaacccggttcttgacgtaccgcctagctttgcgcgcacgccatcgcaggttgctgcaaatgctggcgcctgtggatgcagtaagaaggcatcgccagatggatcaagtgtgtac

SEQ ID NO: 19032 - DNA, 721 bp, Emericella nidulans
gccacagacaagaaagtcatcgcattcgacctctatggaaccttgctttctacagaatccattgcaaaacagcttgaatcacaattccccaacaaggcgcagtccatttctagcttatggcgccggtatcagctcgaatacacctggcgtttgaacagcatgggtattattggagtccttcaatagaagctgacggcttgagctaacactgtccaggaatctacgagcccttctcagacatcacccgtaacgccctgcagcacgccctcgccgaacacgaggagtcccttcccaacgacgccatcgcctccctaatgaaagcctacgataatctctcaaccttcccagacgtccagccagtattgatgaagctatcccagatctcgaccttaactgccgtcgttttctccaacggcaccctgtccatggtctcaaattccgtgaacagctcgccccatctttcgccgcacgcatctgtcttcaaggacatcatctcggtcgagagcataaaggcgtacaaacctgccccggcagtctaccatcacttggtcgcgaaaacaggaaagtcgtcggcccagaagggcgatatctaccttgttagtggaaacccttttgatatcatgggggcgcgcagtgttgggctcaatgcaatttgggttgatcgcggtgggaggggttgggcggacgctgcagttccacagctgaggccgactgcggtggt

SEQ ID NO: 19033 - DNA, 721 bp, Emericella nidulans
gagcaccccgaggttggtggtgacacggcctgggtacgtagccctaacccgtcttctaatccgtcagtaccatgcagcttagagcaaggaagaatgctaaagcaggcaaggaaggtctcgcaatacggcctctacgacgctctcagtgacgcatacaagaagttccttgatggtttgcatgctgtacatacctcccgactgcagtgtacgctccgcctgtccattcctttcatgcccaaaaaagattagtgcaccgtgagagataacactcctaactacagacgacacaattcttgacctctggggcacaggcccgaaccggccgcctatcgacacccaccacccagctgtccggacccacccagtaacgggtctgaaggcactgaatgtaaacccaggctttgtgacggggtttgctgagttaaagaaggctgagtctggtatttgccgcccactgtacctgcatttcatcttttcttttaccctcagagagtggacgcggatgaaccaagatcatgctaactactggttctggtacagacaaagttctcgactttctagcgtaccatatccactctgccgacgaccactacgtgcgctggaagtgggcggttgggagtgtggcgatgtgggataatcgatgcaccttgcaccgagtcatcccaggcacatatgagggcaagaggagggggatccgaactacggtgttcggggagaagcg

SEQ ID NO: 19034 - DNA, 722 bp, Emericella nidulans
ggaaatccgcttcgtgcgatgtaagttcatctggctcttaggaacacgaactcgtggacgcatggctaaaccagcggacagataggcgatgcccttgtccaactcggggttcccaatggtggttacctctctggcgtgaaattatactccccgggagtgatgtgcatgaaaacccggatttttggaccagcctatacggtacgaatggtgcgagattctgacaaggcggcgccgaccccccaacggcactttgccgatgcgattcccaaagacagggttgttttgtctcccagccaaaggggctgatgagtgcatgctggggtggactgatgagtacaagaccgaagaagctaggtgctgctggagtggtgattgacgggcgctttcgagatctcgccgggcatcagtagctcggcatcggcctgtttgcccgaggtattagcattctaggatcaaacaccttcactcgctcatccgaattgaatgtccctgttacgtactcaagctcagatggcggcgagactgcggtcatccagccgggctactacattgtgggggacgtcgatggtgtggtagcgttgccgacggataaagtggaggaatgcgtggatctcccccaaagaaggtataaagtcgatgaggaaactcgtgcctgtctcgagaatggagaggaggcgggcccgacgatcaagagatgtgaaagtgagatgaacgaatgatgc

SEQ ID NO: 19035 - DNA, 722 bp, Emericella nidulans
aagaatatgtcctttctgcaccaattttcaacttttcgactgagtcagtcagagtaaaattccgtccttacgggagcagtgggattgcgccaaatttgtccttttgagccatttcacggttgagttaccccaaatatggtcagtcatgcatgcaatattagtcaaaaagcagcttgttctaacctcactgttctgaaggcttttccatccaatggctcaattcttcggtctctctacatctgtgccgtttccttctttctggacaatggcctaccaaatcgcaatcttcttcgtcatggaagacacatggcattatttttcccatcgagctctccactggggtccactttacaaagccattcacaagatccatcatcaatattcagctccattcggcatggccgctgaatatgcgtcacctatagaggttatgattctgggatttggtactgttggatgcccaattgtatggtgcgctgcgactggggatctgcatatctttacgatgtatgtttggattgtgcttcggttgttccaggccattgatgcacacagtgggtatgagttcccatggagtctacaccactttcttcctttttgggctggagcagatcatcacgaccttcaccacgagaagttcgttggcaactactccagcagtttcaggtggtgggattatgttttggacacagagtacagtcccgaggcgatcaggcggaggc

SEQ ID NO: 19036 - DNA, 722 bp, Emericella nidulans
tcgaatcattggaggtgcttggttattcacaggatgagctcctacctagtgtacatgacacactacgccgtctaccccccgcgcgtatcggctcgaaagggcagctccaagaatggatgttcgattatgacgagaatgagcctggccatcggcacgtttcgcatctctgggctctttatccaggcaacgacatcaacctggaaacgactcctgagctcgccaaagcttgtgctgtcactctacaacggcgacaagcagcggggggcggtcatacgggttggagtagagcgtggcttctcaatctgcatgcgcgccttagggacgcagatgaatgtgcagagcatctagagcgactgttggcgcaatcaacccttcctaaccttctggatacacatccgccgttccagatcgatggtaactttggcggtggtgccgggattctggaaatgttggtgcagtcgcacgaagacggcatcatacggctactccctgcatgtccactagcatggcggagcggacggcttcgtggtgttcgcgcccgtggcggtttcgagctggaatttgaatggaaagacggagtgattcgagggccagtaattgtgaagtcagaattgggccttagggctgtagtctattatccaaacaatggtccgcgtaaggtcttggagggttcggggattattgtcttaaacggagacaactgaagcagacgtcgccatgga

SEQ ID NO: 19037 - DNA, 722 bp, Emericella nidulans
tggcctcagcgcgttcctcttaggagcagtccagatgaaggtcctgaacatcactgtacctagcattctcgttgcccctgcctttgcatacggaggcctagtccagctactggctggcatgtggtacgttctcagccttctctcgtcacttctcctctaactaatcagggaaatggccattgggaacacgttcggagctactgtgctctcctcatacggcggtttctggatctcagttggaatcattttcacccccggcggcttcaacatcatgggaagcctgatagaggcaagcggcggtaataccgacatgttcaacgactgtctgggcctattcttactggttagtctccctaggtagttactcatcttcccttcttccactcaccaaacatcccgtttcatctaggcatggtttatcttcactgtcatcatgacattgtgtacattcaagtccactctggccttctgctccctattcatattcgccgatatcgccttgctcctcctaggagttgcgttcatccacagagacgctgagggtatgccgaatgaatccctttgcaaggccggtggattttttgcaatcctatgcgcgtttttgtgctggtacaacgcattcgccggtcttgcggaaccgagcaatagctatttcgtgcctcctgttgtgcatttcccgtggtcagagcaaggacgaaagtctcgtcgtcctgcgcctgttg

SEQ ID NO: 19038 - DNA, 723 bp, Emericella nidulans
tgccagcaggaagccgaacattactgattggaggcacgtcattcctcgcagcccatatacccctatagttgatcatactaatactgtttgttcagccaatggagccggtaagaccacgctcttgcgccttctctcgggaaaacgcctagcacccagcaacacaatctccatcgcaaataaggatcctttcaaggaaggtctcgagggcgtcacctatctcggcgtagaatgggtgctcaacagcatcgtccggacagacatcgacgtccccacgctcctcgcctccgttggcggcaacgcctaccccgaacgccgtgacgagctcgttgaaattcttgacattgacctgcgatggcgcatgcatgcagtttcggacggagagcgccgtcgcgtccagctagccatgggtcttctccggccgtggcaggtgcttctcctggacgaaatcaccgtcgacttggacctgctgtcgcggagcaacttcctttcgttcttgaagagggagacagagaccaggccctgcacgattgtgtacgcgacgcatatcttggataatctggcgcattggccgacacatttggtgcatatgcatctcggcaatgtaaggcagtggggcgctattgagaaattcaaggaggaggcacctgaaacgtcggaaaacagccaactcggagagattgttctcaagtggttgaaggaggacttgcaggctagaggaccgcg

SEQ ID NO: 19039 - DNA, 723 bp, Emericella nidulans
tgccgctaaactgatgcatcttccagcactaggtctgcgaacatctgtacccttccttccgctgtcacgatgcttctctacgacttcgccggctctcgactggcttactcccaagatggcggaaacctcaaagtcgcccaagggtcgtccacatgtcccgaccggaggatcatcacgaggcacaacagtagtgtggggagattatggactacggatgaaagaccacgaccgccggttgccggctgcttccctcaagattgcagaagaaaccatcaagagacgtttgcgaggaatgaattacactctgtacaagcgcgtgagtgccaacattggtgtctacaccaagggtaatgagcagcgtatgggtaaaggaaagggtaaattcgactactggactgcgaaggttgctgtcagcaggattgtcttcgagctcaagggcgatattcacgagaaagttgcaagggaagcgttccgtcttgcaggtcacaagctacccggtatgttttagagttgcattaaaaaaaaaagtgagcgcaagtcattgatttatatacaggtctctgggaatttgtgaataaaggtgatccaccagttgttggccttacgaagctcggcaatggtgtcacattggagagcttgaagcgagctcgaagaaacccacctctaggaacggacaaattgtctaaacccccgaagtccacgtcctcaagcccatcggcatcg

SEQ ID NO: 19040 - DNA, 724 bp, Emericella nidulans
tcccgcattgagagcaacagctaacggtcacagggaaacggtctatgccagttcttcacgagcatttcgcccctggctcagaaatcaaggagttccaggcgcacaccgacgtcgttacggctctcgatctcgactatccgttcgggaccatgatcacagcggcgttagacgacactgttcgagtttgggacctaaatatcggccgttgtaccggattcttggaagggcacaacgcctcagtccggtgcctccaaatcgaggacaatgttgttgcgactggctctatggatgcgacagtcaagctttgggatttgagtcgtgctcgcactacgcatagagacaaccgcgttaataaggacgaggacgacgatgccgtgtcggttgcttattcaaccagcttagaagactgccatgtatactctcttgatgcacatgttggagaggtcacagcgctgcactttaaaggaaatacactagtgtcaggttctgccgacaagacactgcgacactgggacttggtaaaaggacgctgcgtacagactctggatgtcctttgggcagtgcgcaagcgtcttcacttggaaacgaatcacagtggcgcccgtctggacgtctaccggatgcttctgcggactttgtcggagccgtgcagtgctttgatgcggccctcgcttgcggtacagcagatggcatggtccgattgtgggatctgcgtagcgggcaa

SEQ ID NO: 19041 - DNA, 725 bp, Emericella nidulans
gcacgtccctatcgtcaagaagcgtatgtcaccaccacctatcacccgctgccctgccttgagagtggaagaggaggattgcaaaatagcacaagacgaaaagaggaggcttactggaaaaacttgatcgcccgatcagttttgtttgaaaatggaatggaggatataattgacgagcgactcgggtcaaccacacgtttatatgatcaagtctgactgatcatctatataggcaccaagcgcttcacccgccaccagtccgaccgcttcaagtgcgtgccggagtcatggcgcaagcctaagggtatcgacaaccgtgtccgcagacgcttcaagtcgaacattcccatgccctctgtgcgtcccccgccacaagacgctttcgagttcgattcaaatcgaaacatgaaaaagatgaacagcgagactaattgatacctgaatagatcggttacggtagcaacaagaagaccaagcacatgatgccctccggccacaaggctttcctcgttcacaacgttaaggacgtcgagctcctcctcatgcacaaccgcacctacgctgctgagtgcgtcccgcaatcctaaacctatgaatttgatcaactcgattggaggactaatatgctcttctctaggatcgcctccgccgtctcttcccgcaagcgcgtcgacatcatcgccaaggccaaggccctcggtgtcaaggtcaccaacccccgtggc

SEQ ID NO: 19042 - DNA, 725 bp, Emericella nidulans
agttcccaatctcaagggactagagagagcactacacaatggcatcaaagaagttgcggtgtttatcagtgcgaccgagggatttagcagagcgaacatcaactgtaccgtcgacgaaggactcgagagagctcgacaagtggcctctagggcagccagcgcagggctttcggtgcgagggtatacggttcctgtgttctcgagcttatcatcattgtgctaatatttacttgtctgattatttatagttacgtttcgtgtattttcgcagacccttacgacggtccgacacggccctcctctgttctccggtgcacaaaagccctcctagatgcaggctgctacgaagttagtcttggtgacaccttgggaattggcactcctgccgacgtgcgctggctgataacatatctacaagataatggggtacctttggagatgctggccggccactttcacgacacttacggcggcgcggttgcaaatgtgtgggaagcgtacaagtgcggattgaggatgtttgacagtagcgttgctggactcggaggatgtccatttgcgcttggagcgaagggaaacgtggccagcgaggatttagtatatatgttcgaacggtcggggatccacacaggagtagatctgtcaaagctagtcgaaactggagaatggatctcgaggcagctatctatcgcaaacagcagtcgagcaggtgcagcattgtgggc

SEQ ID NO: 19043 - DNA, 725 bp, Emericella nidulans
gtggccaccaatcgccaggtctctgggtacaccccgaagacgaatcccatcgctttaatgatatcgaccactggatcgagctcgcgcagctgcttgagtccgcgaagttccacggcatctttattgctgatgttctcggtagctcacctgatgcaccacgcccaccacttactcaccactcgtccaatcccctttcaccattgaaaaaatgaataataagctaatcattgtggcggcaaacaggcggttacgacgtctacaaagggcctcgcaatctcgaaccggccatcacatccggggcgcagtggcccgtgaatgagccgttggcagtcgtgccggccatggcggccgcgacaaagaatatcggatttggggtaacagtgacgacgacgtacgagcagccgtatcatctggcgaggcggttgtcaacggtggaccatttgaccaaggggcggtatgttctcccttgaacctggatgtgggagcgtgctgatgctgatcgtgtactgcaggatcggatggaatgtaagtgctatcgatctacctacttacatattcagcaaccctgctggggaagataaggcccatactgactagatagattgtcaccggctatcttgactcagcagcacgaaacctcggtcacgcagagcagccgcaggtatgtcttcttcgtctcaataccagaaaacaccagttctgagaaatgccagcacgatgaccgc

SEQ ID NO: 19044 - DNA, 726 bp, Emericella nidulans
tgtttctaactgttaccccttgtgggttttcaccgtttagcggactaggatactcaacgtgttgccgtcttgcagatgaattcctggcgtctcatcggaacgaccatcgttcattgacaatcatcttcactacccggagcacaagaaagggaagcgacacccttcgcaacctacagaatcacctccgcacctccaccttcggtgcttcggccaccgctcgagtgaccttcgttcctgaaaatgtcgacctctgcaacctcctctcggtccgcgcgctatcccgtcgcctgaacaagaccttcccaaaactcgacgcgattgtgcttaatgccgggatagggggttggtctggcctcaattggcctctggccgtatggagcgtttgcaccgacattatccatgcgacgacgtggccaaagtacaaaattgcgcctgtaggtctcataacggacaaccagacaattactgtgaccgacaaggagccccgcctgggaaccgtcttctgcgccaacgtcttcggccactacatgctcgcgcataatgtcatgcctctcctgcaccgatccggatcccccaacggacccggacgcgtgatatggctctccagcactgaagccacgatcaacttcttcgatgttgatgattttcaggcgctccggtccaaagctccctacgagtcatcaaaagcgctaacagacctcctatccctcacctcagaccttccca

SEQ ID NO: 19045 - DNA, 726 bp, Emericella nidulans
tcacctcctgcaacccctggatgtgggctgttttagccccttgaagaggtatacagatccctgattaagtagaaggcacgcctaggatataactatattaacaagcttgatttcttaaaggcttattcagaagcctataagaaagtctttataatagagaatattcaaagcagatttagggtaactaggttatatcctttcttacctgctgcagtactggataagctgcagttaagactattaactcctattccccccccaagcagaggtactgctttaatcccctcttctcaactctgtacgccttatacagtctgtcaggtatattgaaaagctttatcagtcaaaaagcttctaaaagagggctctaggagtcctttaagcccctcaaaacaggcactggatgaatttgtaaagggctgtgaggtggctatttacaatactgggttgctggtacaggaaaacaaggatctctgcttatttatagcagataatatagcaaaaaagagttgttctaggcgtctaataactcctacagatggactctcatttaaagaagccagggaccttatttcgtcaagaaataataaattacaagctggtggggggggttcaagctccagtacccttccaacttcggagagacttaggcacgcccccccaaggtgtacaaattgtggagtacaaggccataaaagaacaagctgtcaggttcccaatcatcct

SEQ ID NO: 19046 - DNA, 727 bp, Emericella nidulans
gacgaaccccgcctgcattcagaacgccgcataactccaacatggaccgtccagcaggtcaaggcaaagttggagaccatgactggcataccaccaagcagccaaaagctccgtctcaagacacccggccgtgcagaacattgggttgatggcgatgacacaataattggggagtgggggttgacgcggggatgtgagattgaggtacagttcatcaaaagaacaagaaaggtgatttggtattaactgatgcctggataggtccatgatacacggccccaagcggcacgagtgaatttcaccgacctctcatccgtggagaagtacgtccttccaacagagacatacgaaagcctgccgaattcggtccttgcgtggaagaagagccagaagctggggcggtttgatccgaacgcgctttcgccagttgaagcgatggctgagcaagcgaggaaggataaggaggaggtcgagaaacgtggtaagtatcctttgttcgcttatcaccaaacctgtgtggtgaacgatgagaatctggtggatggcgggtgctgttaatgacactctgcagacatctccgtttcaaaacgagcaatcattctcccttcttcaccaccccatgtccgccgtggcacgatccgcttcgttggccccgtcccggcaatcccagttcccggtgttgacatagagaccgtggacaccccagcactgcccatctgggtcggga

SEQ ID NO: 19047 - DNA, 727 bp, Emericella nidulans
tccagctctccaacgcggaactcgccgacgaaattgaagctataaacgcaatatatgacccggagaccataacaatatcaaaaacatctacgtcttgcggcacctcaacgttagacttaggggcctcaagctcgagcgctccgacgacaggagagacagtcatcaaactccaagtaccaaaccacacgcatttgtccttccttcttgcctttgaatccgactatccggacacaccgccgaagattttggggaccgcatctacggccgctcgtggggaagggaaaattgccgtcgatgttctcaaggatatactaggacggatgtaccagcctggtgctgtgtgtcttttcgacgttattaatgaggcaatagaggcatttgaagaaccgaggattggaggaggtacaaatgacacgagtgcaagcacgacggacgcaaaaaccatcacggaggacccatctttcgacgctttggaaaatataaacgcaaacatgagctccctcgctctccacgagacctttggactttctgaacctccgccctgggttatgtcggaggtgattactgagaagaaatccgtgttcgtgggacgcgcagcgcacgttacgagtttggatcaggcaaaggcgtatttagattatctacttgcgagtgataaaaaggttgcgtctgcgacgcataatatcagtgcgtggcggatcaagcagcagagcaagccgcctgggaa

SEQ ID NO: 19048 - DNA, 727 bp, Emericella nidulans
ttctgatgaccgatgtcgactgtctttatacagcaaatccacgaaccaatcctgacgcacagccgatcgaggtagtttcagacatttcgtcactggaagcggacgtttcatctgctggctctgcccttggaacagggggtatgagcacgaaaatcacagccgcgaaattggggacgagcgctggtgtgacaacaataattaccaagagctcaaaacccgggaacatccatgagatcgtgagatacctccagcattcaaggcaagcggctcttgccgatgctgcagatgtagagattaccgcatcgaaaccgcagacgccaatcccacctctgcatactcggtttcttccgtccgaaacccccattcagtcgcgtacattctggctgctccacggattgaagcctcatggtactctgtatattgatcaaggcgcatacactgcacttcagaagaaagcgagccttcttccggcaggtgttgttgacgtagacggccacttcgggcagcaagaagcagtccggatagttgttgtggagagaatatctcccgaatctctcaatggcgattttcttcatccaggccaagagccaaaagaggtgggacgtgccttggtaaactatggcagcctcgagatagcccggatcaagggtcaccgaagcacccatatccagtcattactagggtatgcggatagtgaatacgttgcgctgcgagaaaacatctcttt

SEQ ID NO: 19049 - DNA, 728 bp, Emericella nidulans
tcgccaagtccaagcgctgaacaagcgcgagctagagcatgccgtgtatgtatatacctccttttgcttgatgtgcagctcctaatatggccgtttccagtcccccggaagcttcctggcacgcggattatcgagacacagcctacatctacatcggcggccttcccttcgatctctcagaaggtgacatcgttaccatattctcgcagtatggtgagccggtacacataaacctagtacgcgacaaagaaacggggaagagccgagggtttgcttttctcaaatatgaagaccagcggagtaccgacctcgcagttgacaacttgggtggagcgacggttctcggcagggtactacgtgtggaccatacgagatacaaaaagcgcgacgaagatgaggatacaaataatgttgccaagttattgggcgagacggctggtaaagaggctgacggcgatacggacgatgagggaagaagacgaaagagaggacatagcggagagagggaccaacccaggcgccaacttctaaaagaggagattgaattagaggagctgataaggaatcatgacgatgaggaccctatgaaggaatatctcattgaggagaagaaagaagaagtggcccgagctctggagaaagaagcaagaaaagagagatcttcgcgacggcgcgagtctagccgagagagaccaagtcgtcattcccgacaccatcaccgccaccgc

SEQ ID NO: 19050 - DNA, 728 bp, Emericella nidulans
cgtggacggacgcacactcatcgtcacttacctcgcacaaccgcttcgcctcctcttcaccgagcctctcgtgggactcatttctgtatatttggccttcatctacgggctcatacatctgttctcacagcctacccaatggtctttgagacggttcatggcttcacccaggagtggcggggctcgcctatctcggcatcgcgctgggaatgctcggcgggggagggtctgcgcgatgttgacctagccggcgtattaccgcaagctcaaggcgagcaacggggtaatcgtgcccgaatgacgtctgcccccgctatggtcggaagtgcagcttttgcggtgcgtatcttctggctcggctggtcaggcggccgtcgcgacatccactggattgtgcccgtcctgtcaggactgcccaccggattcgggctgttttgcaccttccagcagctcatgaattacctcttttatatgtatcttccctagtaagtgcgattcttcccgtctcatactgcggaaaggagtgccctttgctaacaggtcttgcgacttgcagcgcagcccctgtcaatgcggccagctcagtgctccggtcttttgtggctttaggttcccgctattcgctaaatcgatgtttggcgctctgggaattccctgggccagcacgctgctcggccgcatcgcggtggcgtgtgtccctctgccgtttgtctgctaccgctgggggc

SEQ ID NO: 19051 - DNA, 729 bp, Emericella nidulans
tccctcgtctggaaccttgctgttggcgagcgctggcgcctgtacggcgaccgcgttgtagaaggcgatcttgtcctcatccacgaacaccgcgacaaagacggcaactcttcctataccacacccgcccccggtgcaggagctagcggcgaaaccactacaattgacgcagacggcgaaatcattatcgtcccgcaagaacacgactcagcctttgccgtcgaagacacattcacccgcgcccgagccctaaccgccgccgaagcgaacagcggcctctacagcatcttcgatatcgtcctacctctccctggcttcgacgtcctatacccgccaaacaaaatgacggacttctataaagagttcatgggtagctcccgcggcggcggattggatcccttcaacatgcggagaaagtggaaggacgcgagtttaagcgggagttatcgaaaagttcttagtcggatgggcagggactactctgttgatgtggtgctttatagcagggatgaggagcagtttgtccggactgatctagagaatttgaccctcaagacgagggatggaggggatgtggatttggagaagaaagaggggaagagtgaaggggataagcttgctgttgtcctcaagttccagcttggatcgagccagtatgcaaccatggcgttgagagagttgatgaggggaaaggtgaaggcgtataagccagactttggaggtgggcgg

SEQ ID NO: 19052 - DNA, 729 bp, Emericella nidulans
cagccgcttctgccgtcaacggatcgatcattcctgtcactgcggatgtgacgtctaaagagtcactgcaagccgcctacgacacctttgcttctcagaccgaccacattgacctgctagttgccaacagcggaatcgcaggtcccattacaaacacagagatccagcccgattgctatcccaccctatccgagtttcgcgaccagttctggtcgatccccatggaggaattcacaaatgtgtcccatgtcaatgtcacgggagcgttctacaccatattggcattcttgccgctgcttgaaagcccagaacaagaaacgaccggcgccgataccgggcactgtatcctctcccaaaccacaagtgatcattacaggctcaattgcagggtttacccgccttgcacttcccggcttcccatacaatctatccaaggcagcagtgacccatatggttaagatgcttgcgacaaccttcagtcaatacgacatgcgtgtcaatggtatcacaccaggtctttatcgtactgacatgtcgttgccgttttacaagtcgcagggtgtacgtgggaatgggaccgaggatgggtcgtttccacgatctatggttcccgtcacaaggagtggtagtgaagaagacatggccggcattatactctggatggctggtgccgcggggggatacctgaacgggaatattgtcgttagtgatggaggctcggtgagtgtt

SEQ ID NO: 19053 - DNA, 729 bp, Emericella nidulans
gcctctgcagctgccatccctttaacccccaatgcgggcctcctcacccgcgatgtaatcgaccacgacgcagtcgtcggtttcgacgagaccgtccccgactctaaaattggagacatgtaccttgcctacaagccctatctcaaagtcgtgagcggctgcgtgccattccccgcggttgatgctgaaggtgcgtccccgtcatccctatccagtccccgctcataagcatatgatgctgaccatggcaagcgtaggcaacacaagcggcggcctccaaccctctggcggttcctccgacggatgcgacagctccaccggccaagtctacgcccgctcaaccatgaccgacggcacggatagcacctacggccccgcgattatgtacagctggtatatgccgaaagacgagccatcgacgggcctcggccaccgccatgactgggaaggcgtaatcgtctggctctcctcatcctcctccacgtccgcagacaacatcctcgccgtctgcccgtctgcccacggagactggaactgcagcaccgacggtttcacgctgacggacagtacgcatccgctcatccagtactataatgtttggccagttaatcatcagcttgggcttacgagtaccgttggaggcactcagccgctgattgcatgggagagcttgacggatgcggcccagaatgcgctgcagactacagactttggggacgcgacagtgcc

SEQ ID NO: 19054 - DNA, 729 bp, Emericella nidulans
agccacgccgtcgaagatgccataaatttcgacagacaaggaggcatcagtactcttgtttggtattggtacgccccaacatgtcttctcgacagtgaggagcagccatggtatagcggtttttacactgaagcaacctgtttcaatattgcaaacacccttagccacagcaggaataggacagattatggactccttattcaggatatagatgttattgctgcccagctcaagcgcctatcagacgcaaacatcccagtcctcttccacccgcttcacgagcctgaagggggatagttctggtggagagcacatggcccggctgctttcaagcaactctgggaccttatttacaaccatatcacttgtgttcatgatattcacaaccttgtttgggtttgcaatactgcagatccgagctggtaccctgggaacaacaagtgcgatatcactaccgtcgaccactatgcagaagccggtgaccatggtgtccttaagggcaaattcgagggcttgaaaaacattactagaggcgaaagagttctcgcgctggctgaagttggctctataccagatccagaactccaggctaaggagaatgtcccctgggcctactggatgacctggaacgatgaattcatcaaggatgggaaaaaaactctctgaagtttttgcagaacatatccaacagcagcagcgtcgtaagcctgaacggcgctatgaggctcg

SEQ ID NO: 19055 - DNA, 729 bp, Emericella nidulans
catccggacgtggtcaacgatgtccagatcgtcaactggttgatgctaagcatcctcgctggaggcgacacttcgtctgccacaatgcgcgcaaccgtatactacctcgccaaaaacgcggacgcatacaagaagcttgttgcagagctgaccactgcgaatctaaccatgcccgctcagtggaaggatatccgcgagctaccctatctcgacgccgttattcgagagagcatgcggatcaatcccggaattgcgatgaacttcgagcgtgtcgcgccggagggcgggtatacattgcctgacggacggtatatccccgctggaactaaggtgggcatcaacccagctgtcacgaacagggactatgcaatttttggagaagactcagattccttccggccggatcggtggctgaaacgagatggtgagagtgatgaggagtatcaagagcgtcataaacggatgcatgatacctgcgactttgtgtttggagctggcgcgcgggtctgcatgggtcgatatcttgccatgttggagataaagaagctgattgcgactttgtacagcacgtttgatgtaagccattttgctctctggggatggctgtcatatcgctaacactcggcagctgcatctggtcgacccaaaacatgagtggacataccgaaatgcctggtttgtgtatcaacagaacatgcccatgataatcactcgccgtaagctctcggc

SEQ ID NO: 19056 - DNA, 729 bp, Emericella nidulans
atcccgcccgaccaagaaggtctgacgactgccaacaagctccacaacaaacacccactcggctcgcgcgcgcggcacctccaatccaaaggcgcattaattgtgcgcttcgagatgcccttcgcggtatggtgcacgacctgttcgccggagaacataattgggcagggggtgcggtttaacgcagaaaagaagaaagtgggtaattactactcgacgccggtctacagttttcgcatgaagcatacgctttgcggcggctggattgagattcggacggacccgaagaacacggcatacgttgttactgagggtgggaggaggagagacaccggacaagcggatgggacagacttgataggaggtggagagatcttgctcggtgggagaagtgctgcaggggcggcggctggagatgatccgtttgcaagactagaggggaaggtcgaagataagcggatcgttgatgaaacgcggaatcggatactggagttgcagcagaaacaggatcgggattgggatgatccatatgaggtgtcgaagaggttgcgcagggggtttcgggctgagagaaaggtgctggagaagaaggagggcatcaaagaggcgctgaaagataagatgagtttgggcattgaaattgtggatgaggccgaggaggatgcggtaagggccgggatggttgagtttgaggatggtgcttctagtgcttgtttaagtacgcgcgcg

SEQ ID NO: 19057 - DNA, 729 bp, Emericella nidulans
tgccatccgtactcgaggagccatctcccctgccccaaagaagggaagcaagccggaccaaaaatcccgaggtctggccttaccgcgccggccaaacggtacatgcaccattgtcgaccttggctgcggtgacgcacaactccaccgcgctctgctcccttccgccaagaagctgaacttgaagctccacagcttcgacctacacgctcccaaagattcacccattactaaagccgacatttctgacctacctttggaagatggctcggctgacattgcgatcttctgcctcagcctgatgggcacaaactgggtttcctttgtcgaagaagcgtggcgcgttctccgcagcgacggtaagggtgaatgctgggtcagcgaagtaaaaagtcgctttggcaaagtgcaccgcaagaaagcccaaatcggcgcgaaacggacactcacgaaagccgaaaagaagaaactcaagaagaagcgcgcgggtgatgacgatgccggctcggatgtcgacgatgcggagatctatgctgaagatgcccgtcccgcacaggatgatgagactgatatctctgcttttgtcgaggtcttcaggacacgcgggtttgttctgaaatctgagactctggataaatcgaacaagatgttcgtaaagatggagtttgtaaaggcgggcggtgcaccgacgaagggtaaacatgtgtctgcttctggggctcctggctctgg

SEQ ID NO: 19058 - DNA, 729 bp, Emericella nidulans
ttgccagggacattgcaggactaactcaaccagtgaaaccgttgggtacataggccgtgtcctctcatctaccgaagcacccaactttacaaaaggcccgtatgtaatgcagagcgctctcattttgatcgcccccgcctttctggccgcgagcatatacatgacactcggccgaattattgcaatgctagatgcagagagatgctcaatcataccactgcggttcttgaccaagatatttgttgctggcgacgtgctctccttcctcatgcaggcctcaggtacagttctcttgaccattaaatacggacaaagctaacgagacaggcgctggaatcatggtcaaggatgagaagagcgcagatacaggcgagaagattatcgtcggcggtctgttcgtacagatcatcttttttgccttcttcgtcctcactgctgctgtcttcgaggtgcgaatggcaaggcaacgagtgccggtttctcttgaactgcagagcatctggcgtagacatatgatggccctctgcttcacgagtgtgctgatcctgattcgctcggtggttcgcgttgttgagtacctcatgggctacgattcgtacatgatgaagcaggaggttttcatctacgtgtttgacgcgctgctgatgtttattgttgtgttcactctgaactggatccatccgagcgagatcaattgtgctttgggtagaggaaggacgtatttctggc

SEQ ID NO: 19059 - DNA, 730 bp, Emericella nidulans
cgtcgcagtatggcggggtctatgttcggtcgctgaaggtattcaatcccatgttatatactctcatgagcagctgcatctcgtccttcgtcatgatatgtattttatgcatagcagacaaggtcgggagacggtatgttgtcgactcctggcactttgtatctgctcgacttgctgattcggcccaggaagctactcatgctctcatccgtcatcatgctttctggcatcatcactatggccggcctcggtgttaatgagccggtcaccacacaacggatgaaaggcgtcatctccttgatggttgtttttggcgtcggcttcgccggcggttggggttggttgacctatgtcgtagtgaccgaagtaaactcgctgcgactgagagatcatacctttcaccttggatttgccatcaacgtctgtttcaagtacgtgagcttaccgatattttttttccattcgctggcactcatcgctctacagtttcgccgtcaacttctccgtcccatatcttgttttcgaagacgaagtaggcctataaagcaaagtgggcttcatcttcggtgccgtcgctttcttgtcgcttgtcttcacttatttctgcgtacccgaatgtaagggcaagacgctagagcaggtcgaccggctctttaacaatggtttcaggctgcgcgatttcggcaagactgatgggtctagaatgctggatcaaggagccgtgggatga

SEQ ID NO: 19060 - DNA, 731 bp, Emericella nidulans
tggcgagccccataagccaatgaaggatttctacggtaaggccttggtacgcaaagcagaggccttggagcagttagagaaatgggcggacgccgcacagatatggaagttggctgtggagaacggtcatgggggaagcacgagtatccaaggccgcaaccgctgcgaaaaggccgcaggtatcagcaagcccgcaccgaagccaacagctccttcacgacgacccgcggccccggcgcccaagaagaaaacatccgcccttgacgacctccagggtgcgccgtctgcaagcaaatcagcatcgtccttcgaggccgtgaaccgtctccgggaagctaatcaggctgctgaacgtagcgacgaggagaagtttgctctgacagagagcgttgatgcacgtctggcagcgtggaagagcggcaaacaagacaaccttcgtgcactcctgggcagtctggacacagtcttgtggcctgaggccaattggaagaaaattaacatgtccgagctaatcatgccgaacaaagtcaagatccagtacatgaagggtattgccaaagtgcatcctgataaggtaggccgtgatacctttcttatgtcgcacgagtgagcgtaactaatcagcgccttagataccaactgatgccacaacagaacagcgcatgatagccggtgctgtgttcggcgtgctaaacgaagcctgggataagttcaaggccgagaataatctt

SEQ ID NO: 19061 - DNA, 731 bp, Emericella nidulans
tccagtgccagcgcactacgtaaaaccaaagacacttggtgccggtgtaagtcacttctagcgaacaacccgtcactggcaggtttcaaatactgactgtcggcgatttcagtcagctctggccctcggcgccttcggtacaaccttgacgaccctttcactagccctgatggaatggcgcagcgtcaaaacgacgaacgcctttgtcgcgaactttttcttcatcgccgccttcggactggtggttactgcgcagtgggagctgagtatcggaaatgggttcgcgtacacggtgttcagcgcatttggtgcgtatttgcccatcagtccctcccccatactgaaagggagggcttgagctaatggctgtccgcttaggtctcttctacgccggctacggcgccctcctaacacccgcgtttggggtggcgcaagcctacgggggcatagatacagtggagtacaataacgccgttggcttcttcatgatcttgtggaccgtgttcgtgtttactttcctaattgcttcgctgccgagcaacattgcatacattctggtgttcctctttgtcgatctggggttcttgacagtcgctgcaagttactttgctctggctgacgggcatgctgagtcggcgattgccttgcaaaaggccgggggtgcgttctgcttcgtggcgggtctaatcgggtggtacattgtctttcatttgctgctgcaggactcgctg

SEQ ID NO: 19062 - DNA, 732 bp, Emericella nidulans
ctgccggcaccgcgacagtcagctgggctctcaccgtggcgacataccaccttctcacgaagcccgcaatcctccaaaggctcactgctgaagtttcagacctcgtcaacagcagtagctgtaccgagaaggtggaatggtcggccctcgagcgcctcccgtatctcggtgctgtaatccaagaagcgctgcgactgtcttacggggtcgccagtcggacggctcgcgttgccacaggcgaggatcttgtctaccgcggtgaatgggcacatagggaggtgcaatatattattccaagaggctcagcgattggcatgtctgctgtgcttgcacatcacgatgaggctgttttccccgattcgcatctttttcttccagagcggtggctggatgagaagaaccagcgactaaaggaacttgaccgggcgcttctggccttttccaagggaagcaggggttgtcttgggatcaagtaggtgttccctttctgccagggctgaggtcgaagtccgggtcggcttcaattttgctaacggctgcagtctcgcctactgtgagctttacctcctgctcgcactgctggttgtgcgtgtgtttccgcgcatgaggctatatggaacaactgaggctgatgtggcgtatgaccatgactttttcaatccgtttccggtatgggagagcaagggggtaagggtggttgtttgaataggactccaactgagcagcacagac

SEQ ID NO: 19063 - DNA, 732 bp, Emericella nidulans
tttccagaacagacttggtcttttcttcttcgtactggctttgtttgggttcagcacattgaccagtctaactgtgttctcaacagaacgccttctgttcgtccgggagcgtgctaacgggtattatcatcctgtgacctactacgccgcgaaggtggtgttcgacattgtacccctcaggctcattccgccgatcattatgggtgtgatagtttatccaatgacggggctaatcccggcctggcccgagtttttcaagttcatcctggtattggttctcttcaacctagccgctgctaccatctgcttgttcattggcattgtcttccgcgatggcggtgtggccaacttgattggaagcttggtcatgcttttcagtctcctatttgctgggctgttgctcaaccatgatgcgatcccgccatcggcgctctggttgcaatcggtaagcctccctccttccccatttccagatattgtgactgactgtttcaattagctatccatcttccattacgggtttgaagcattgatcgttaacgaagtaacattcctgacattgatcgatcacaagtacggacttgatattgaggttccgggggcttcaatccttagtgcattcggattcgacactctggcctactggaaggatgtcatcggactagctgtcttttccggagcattccttgtgattgcgtacatagcgatgcatttcctgcttgtcgagcggcg

SEQ ID NO: 19064 - DNA, 732 bp, Emericella nidulans
ccggcaagccagcactaacgattgttccctgcctgggccgaaaggagattatcaccttcttttacatttacatggccctcaccgtatgttcgctcgtcatcgacgccggcgtagtacctcctcgaagcggccctttcccctggttcgtcgcagtacagaatggtttgacttccgcactttgcacaagtctactcgtaaacgggtttgtcggattccaactatacgaagacggaacagccttgtcagtatggcttcttcggctcacgtcaacggtcatgttcgccgtttcctttctgatctctatcctgacgttcaagtcgtggggcggtctaagtccgacaaacactcttgccatgttcatcgtcttatatatcataaatgcgatctgcatcgcagtatacctagtgatgcaacttctacttgtgctgaacactcttgaggatcgttggccgctcggccatattgcattcggcctgcttgtcttcattgcaggtcaggtgatcatgtacgctttcggagatgtcatttgcgacaatgtccagcattacctggatggtctgttctttgctacattctgcaatcttctcgccgtcatgatggtctataaggtacagttagcttcaacgttaaatcttccaagcttctctttgcattttattgacatcatttgctctctagttctgggactacatcacaaaagaggaccttgagttctccgtcggaatcaagccg

SEQ ID NO: 19065 - DNA, 733 bp, Emericella nidulans
gtcatcagctctatttcctcggcggtgtcctgatggagggtggttctgacacgtcgagttcgatcattctgcgttcattcacgccatgacaaagtggcctcaggttctgaagaaggcgcaggccgaaattggtaatgtcattggtgaagacagaatgcccgcttggtcggactatggctcgctgccctatgttgcggctacagtcaaggaggccatgagatggagacctgccgtccgttggcgttcccgcatgcagctgctgaaggttggtctcacttcctacacactttctactttctactttgttgtcgaacgtgttgctaagattgaaaacagatgactggattgacggtcattttatacccaaaagcagcacgatcatcgtcaacggctggggcatgcaccataacgaagcccggttcggcaatccctcagtcttcgatccagaccactacaaaggtcagacagcccttgctcctgaactggccaatgcttctgattacacgacccgcgatcactatggctacggcaccgggcgccgcatctgcccaggcatccatgtcgccgagcggaacctgtttctggccatttcgaaactcatctgggccttctcaatcgagcccggagtggacgagagtgggaaagtgattgagccggacttggatcctaggactggatatagcgaagggtttctggtctgcgcgaatgattttccatgtcggattatgccgcg

SEQ ID NO: 19066 - DNA, 733 bp, Emericella nidulans
cctcccgtctggttcgttcgtagctcacagtggtgaacttagtcgccgtcagcttctggggctatgatctaggaaagacgctcgtcagcaacctttccgaagtcgaggtcaagaacaacacccctcagtactccattgcccaggtttctgccgctgggttcttctccgctattcccatgaccctcattaccgcaccctttgagcgcgtaaaagtcctcctccagatccaaggccagaaccctccacctcccggccagaaacccaagtactccggcggtgtcgacgttgtccgacagctgtacaaggagggtggtatccggagtgtattccgcgggagcgctatgacgctggcacgtgatggccctggttctgccgcctactttgcggcgtacgagtacatcaagcgctctctcacacccaaggatgcgaacggcaacgcgaccggtgatctctcattacccgctgttctggctgccggtggtgccgccggtattgctatgtggattcccgtcttcccggtcgacacagtcaagtcccgtcttcagagtgctcccgggaagcccacaatcagcggcacgattcgcacggtctacgcagctggcggattcaaggcgttcttccctggatttggacctgccttggcgcgtgctgttcccgcgaatgctgctaccttgtatgtaccgtgccatttttcggaaagacaattgctaactatttccagcgcgggtgtcga

SEQ ID NO: 19067 - DNA, 734 bp, Emericella nidulans
tccaatggctgcccctctgctacgtctacagtgcctacggttgcgttgttgacgatatcgcagatcaggaccttgacaggaaggtcgagcgctgccagcaccgacctctggtccgcggcgctgtatcaaccacttctgcgtgcctcttcgcagcgtcgttggcctctcttgctgtctttctcacaaagaccttcttcccagaccagccggccgtacatattcccgtcgcgttggcaggatccatcatctacccgttcctcaagcgtttcacgaacttcgccctgctctacctcgccttcttgtacgtggccacaggcctgaacgcctctcgcactattggctatgatatcttgtctgccccggaccatctgcttacgtccaacctcctcctcgcggcagccgtcttcatcgccaacgtttcggtggagacgatctacatgcacgcagatttggaagacgacatcaaatcaggcattggaagcctcgcggtaaagatccaaggctactccaagccagtcctgttcctagcggcagtggcatatggatcccttgtgttggccagtggtctcgcggccgagttcggcaagtggtatttcactggcgctatcacgtctgctctgacgctgttcacacttgtggcaagagtcgatctgaagaacgggaagatgtgtgaacagttctttttcatggggaacgcagtgctcatgagcctccttgcggccggtttgtatggg

SEQ ID NO: 19068 - DNA, 734 bp, Emericella nidulans
gccgttgatgcaggcagtcgaactctgcgtgacgctgtgaacgaggctttgcgtgcgtgggttgttgaccttgatacgacccactacatcatcggctctgctatcggtcctcatccattcccaacgatcgtgcgcactttccagtcagttatcggtgaagagaccaaacagcaactgcaagaacagattggaaagttgcctgacgccgtcgtcgcctgtgttggtggtggtagcaacgctgtcggcagcttctacccattctccaaggatactagcgtcaagcttcttggtgtcgaagccggtggtgacggtatcgacacaaatcgccactccgccaccctctccggcggtagcaagggtgttcttcacggtgtccgcacctacatcctgcaagacgagcacggccaggtctctgagacgcactccatttccgctggtcttgactatcccggcgttggccccgagctcagcaattggaaagacagcgaccgcgcgcactttattgccgctacggacgcccaggctctctctggttccgcaccatggctcagacagaaggtatcatcccagctcttgagtcctcgcacgccatttggggtgctatcgagcttgccaagaccatgggaaagggtaaggacatcgttcttactgttagtggtagaggtgataaagacgttgaaagtgttgccgagtctcttcccaagttaggtcctcagattggctgggatttgcgg

SEQ ID NO: 19069 - DNA, 734 bp, Emericella nidulans
ctcgccccgcagacgcattctgctcaggtcccattgcattgagcaaggacctggactgcccggtcctgatgccccagtaccgactgtcgaattcacgtgatcgcactacgtgcttccctgccgctctccaggacgcggtcacggcttacacatatctcctgtacacgcttgacgtggcccccgagaacatcgtgctctcgggggattcagcaggcgggaatctggtcattgcatttctacgatacatcaagaacgaggctgcagatcatcacctcccgcttccgcgcgcggtcctactctggagcccctgggttgatctcggcaccccaggaagcagccaatacgaccgtcaccgcaacgtctcaaccgactttctctttgacgcgttgggtgactggggcgtacgctgttacattccagacgggtggaatagggagcacccattctatccatacatcagcccactgggacaggagtttcagatggaggtgccgatctttatccagaccgggcgtgcggaggtgttgtatgattcccacgttgagtttatgactaatctgaaaaagagagggtgtagggttgagtttgtggagattgataatgcgccgcatgatacttttgttgcagctgatttatttgggattcgggagcaggaaggggcgattgatcgagctgcaaaaatggtcattgaggcggggacacctccttaggtcctcagttgttgtcttattgat

SEQ ID NO: 19070 - DNA, 735 bp, Emericella nidulans
ggtcaatacgagaaatttctaacgcgtcttgaagactatgagcttctgagccaaaaagacaaaaagctctacgagcgatacgttgcgaatccctcgtcattctcgctgacgcaaacgaacgatgccgctactcgacgagacgtcaaagtaacgcggttccgagaggagaaggagctcaaacaaaaacttgaggttggaaagcctggtacccgaacttttggatgaatttcgcttacgctgctgtaaagtattataccgaaaatcagaagaagctccagagcgacgatgatgacttacgacagctctatctcgctgaaataaagctatacacacatcaaactttccagtcgctagatatgttagcacaagaattgtcgatgctgtcgatgatgaagaagatgcctcccaagcctgagccctcgcatgaagtcgacgcgcgaggaagagctaagagcaatgacgaaaactattcagagcgcttggacccaccgatatctcagctcctcaaaggaggaaagaatggcccgatactaagcaaggatggaaaacctttacagcctttcacactcctcgaccgtcgtacgcaacttcgcgatggcgtcttccggtcgggacataacctgcccactatgacgattgaagagtacctggcggaagaacatagacaaggaaatgtgcttaagggaggtaaaccggaaccggttgagattgacgaagatgacatggacaaggccg

SEQ ID NO: 19071 - DNA, 735 bp, Emericella nidulans
tgactccggcatcggtcgtgcggtcgcaattctgtttgcgatggagggtgcttcaagtttaataacctatttgccagaggaggaggaggacgcacaggaaacaaagagacgggttgaggaagccggccagaagtgctaccttctagccacagacctacgcaggaaggagaactgcaagaaggttgttgagacggcattagagaagctaggaggaattgacatcttggtaaacaatgcgggaacgcagacgatgcttcctgatatcagtgacttggatgagtgagtatcaagatctaacaaggacgacacattgtgctgatgatgatttctattccaggtcccaatgggaaagcacattcgacacaaacattcatcctgtcttttatctctccaagtacactatgccacatctcaagtccggttcatccatcatcaactgcgcttcggtaaacccttacatcggtcgacctgaccttctcgactacacttcgaccaaaggggcgatggtcgcgttcacgcgcggtctgtcaaaccagcaatgcagcaaaggcattcgtgttaacgcagtatgccccgggcccgtctggacccctctaattccagcaacgatgaccactgaggcaatcgagcaattcagcggcacgccgatgggtcgtgcaggacagcctagcgagatcgcaacttgctttgtttttctcgctagtcaggatagtagttttatctctgggcagtgct

SEQ ID NO: 19072 - DNA, 736 bp, Emericella nidulans
cgggacctaaaacacacactcagtcgccagcagttactggaacctcggtcatcgccgtcaaattcaatggaggtgttgctattgctgccgataacttgggtacagtctcgcttctgtacacgtttatttcacgaccatgctctgacacttgatctcttagcatcatatggatctttggcccgattcacagacgtcaaacgcctacgcaaattcggcgacgccgctgtcatcggattcagcggcgacgtatcagacatgcagtacatcgaccgccttctagagtccattgatatccgcgaaaactactcagtgcatggtaatcagctcaacgcgaagaatcttcacacctatctgtcgaaagttttctacaagcggcggtctgattttaatccgctgtggaaccatatccttgtcgctggatttgattcggaaaagaagccttttctgagctctgccgatttgctcggaactacgttttcagccccgcaccttgctactggctttggtgctcatctcgcgatcccaatccttcgtcgattgttcccagaggagcgccctattgaggaaatcagcaaggaagatgcagtgtcggctttgaaggactgtctcaaagttctctggtaccgtgatgcgcgaagtatggacaagtactctctagccttaattacgcaggagggaattgagatgcatgaagatcaacaggtcgaggctcagaactgggcgtttgctgagagca

SEQ ID NO: 19073 - DNA, 738 bp, Emericella nidulans
gcctccgtccctgcgaacaccaacacgctattcagcgaggtagatctcaaggccaaatcctatccaatcgcagtccctgtttcagagactcctatacctgacactcctctctgccgccggatccaagagtgcgcccgcactcgcctccctcagcccacataccaccacagcctccgcgtctaccactacgggctcgccataaagcgctacgcctttcccgattggtcttttagtgatgagacttatttcttagcgtgcatgctgcatgatattgggacgacgcgccagaatctgcatgccaccaaactgagctttgagttctatggtgggtacctcgcgctcgatgtgctccagacgcagtatgatgcgggcgatgcgatcgcatcaaaagaccaggcagagagtatagccgaggccatcattcggcatcaagacttgagggatgttggaagtattactgcgctcggccagttggtgcaactggcgaccatctttggtacgtccgctcccttacatgacaggtggacctgctgacggattgtagacaacgtcggcggccatgcaagcttggtccatgacgataccgtcaaagatgttgttgagcattacccgcggctcaaatggagctcgtgttttgctgctacggtggccgaggaggtggagttgaaaccgtgggcacatacaactgctttgggcgacttcaaggggcatatcctcgcaaatccgtataataggttc

SEQ ID NO: 19074 - DNA, 738 bp, Emericella nidulans
aaaggcgccggctctgcttcctttctcctaacccttctcagcacgatcacccgcacctccgcccacgggtatgtctccaacatcgtgatcaacggcgtctcgtaccggggctggctcccatcccaagacccctacagcccctctccacccattggagtcggctgggaaacccccaatctgagcaacggcttcgttacccccgaagaagcctccaccgatgcgattatctgtcataaggaggcaaccccagcccgcgggcacgccactgtcgcagcaggagacaagatttacatccagtggcagcctatcccgtggcctgactcacatcacggcccggtgttggactatctcgccccctgcaatggggactgccagacagtcgacaagaacagcctcgagttcttcaagatctccggcgtcggcctgattgacggctcctctccgccgggctactgggcggatgatgagctgatcgagaacggaaacggatggctcgtccagatccccgccgatatcaagccgggaaattacgtgctccggcacgagatcatcgcgctgcacggtgcgggtagccagaacggggcacaactgtacccgcagtgcttcaatctgaagatcaccgggtcgggcactgctgagccggccggtgttccagggcccgaactctactcgcctacagacccaggcattctgatcaacatctaccaggtcctgacagattatgttgtgcctggaccg

SEQ ID NO: 19075 - DNA, 738 bp, Emericella nidulans
ccagcagactgccgctctcgattcagcagccgggaacaagctggacacctcgcatgatccttacattgttcgccggggcgttatccatcgtcttaacaagcaggtgattgaagagaacaataaccggcaggaaatcatcacggtgcaaaacaacttccagcagttcgaagcgcatgtgctgcagaccatccaggctgcaatggaacaactggtcgtatttattactggacagaccgagcgccagaagacactgtacagcgacattctcggtaacctacaaaggatcccagccgaatttgagtgggtaaacttcatgactagaaatgcttcctcgctcgttgacccagatgctccgccacggtcgattgcaaacattaactttcccaaccaggaccaccccgccacgcagccgctaatctcaggaacgctgcaacggaagtctcgcatggcgctcaagggttacagcagcttcttctacgttgccacccgtgcccgatacctgcacgagttcaaagacaatgacgacttcaaccgcgacccgtctcccgagatttccctttatctaccagactgccatattgtctccgtcgatgaagtcaaacataccttcacaatcaagggcaaggacgtttccagcaacgctatcggtaatgcctttcacacaaacaccgagttcgtcttcaaagccggctccgcagccgaggcgaaggaatgggtgaacatcctcagggacgccgc

SEQ ID NO: 19076 - DNA, 741 bp, Emericella nidulans
tgcacgggcagactgtcatggagtccgagaccggttacttaagaatctcaagcatggatcagacgcagataagaggctcagcgtattccaagttgatgttactggtatctttacaacatggctgcagcggtctgacccattgacccagctgatcgttgtcagatgaatcaagcatatccaaaatggcttcagaaatccgtgcactctacccggatactcttttacgtctggccatcacgcttcccggtgtgctccatgttgagaaatcaccggctcagattgatgttcataccgcgctggaaagtttcaaggtcaatgctttaggacaaatgctccttatgaagcatttatcgccatttctaccaggaaaatcatctccgccgtttgaagacacccaacagtcgtccaaggtaaacaggacgctgcgatatctgcccctacattcgacctatgcaatgatggcagcccgagtcgggtccatctctgataacgcctccggtggatggtactcgtaccgtgctagcaaggcggcagtttttcaattagcaaaaacattcgaccttcatctgcagtctcgaagcaaagagcgagctatggcgattgcgatgcacccaggaaccgttcagacagacttcacccggaattactggagtggaagagcaatgcttcagcccgaagaatcagccgcatcccttgtagaagtcctatgcacgttggggagtgacgcaaatgagggtcgcg

SEQ ID NO: 19077 - DNA, 741 bp, Emericella nidulans
tgctcatcccgacactgctcaagacaaggaggagaaggaagaaaacagagcgacatatacagaggcaccctttatgccatctgagaagagaaggctgtactttgggcctgagaccccggctctagcgcctctgactacgcaaggaaacctaccattcagaaggctttgtgttgaacttggcgcacagctcacctattctgagatggctctcagtatgccattaatccagggccacaagccagagtgggctttgatgcgagcacacgaaacggaagctttgccaccaacagtttctgcgcgcgcaagcgtagtacaagactatgacaattccaaagatatgaagttcggcgctcagatagcgggaaacaagtaccgatgggttatgaaggccaccgaggttctgtcatctcttactccaaatctccgcgttatcgatctgaactgtgggtgccctattgatcttctctaccgggaaggttccggctcggcgctccttgacgctccttcgaaactggagaaaatgctccgtggaatgaacgctgtctcagaacagatcccaatcacggtcaaaatccgcacgggtacaagggataacactccaaatgcacagaagctggtcgagcgtctcatccttggaggtcacgaagccagcatgctcaactgtggtccttctggtgtagcagcaatcacgcttcacggtcgtagccggcaacagcgatacacacgagaggccaactggga

SEQ ID NO: 19078 - DNA, 741 bp, Emericella nidulans
tcttgcactcacccttctgatcggcttagtgttcaaggacgaagctgggcagtcggtcttccctattgcgcccgttgagattctctggattatcatgattacctcaggcgctcctgatatgggattgggaatggaagttgccgctcctgatgtcatggaccggccgccgcaaagcgtacgtacttaatcttcacgcaaattgagccattcaagctaacagatcacagaaacaaggtatcttcacctgggaaatcatcgtcgacatgctagtgtacggagtgtggatggccgctctctgtctaacagctttctcgctcgtcctctatgtctggggcgacggaaaccttgctcgcggatgcaatgccaactatagccaggaatgcgacactgtcttccgagcccgtgccacgactttcgtctgtatgacctggtttgctctgtttctcgcctgggagatgatcaacatgcgccgcagcttcttccgcatgcagcctggttccaagaagtacttcacccagtggatgcatgatgtttggcgcaacaagttcctcttctgcggtgttatgctcggcttcgtcacaaccttcccagttctctatattccagttatcaatgatgtcgtcttcatgcatactggaatctcttgggaatggggcgttgttgtcgtggaagcaatcctcttctttgccggcgtcgagctctggaagtggtgtaaacgcatctatttccgacgcgagtctg

SEQ ID NO: 19079 - DNA, 741 bp, Emericella nidulans
tccttgtatcaaacgacgatttcttcactgctcttcccaaaatccagccatcttccaaacgggagggctttgccaccattcccgacacaacttgggcggacatcggtgccttaagcggtatccgcgatgaactcgcaaccgcaattgtggacccgatcaagcatcctgaactctacgctagcgtcggcatcacagctcctactggtgttttgctctgggggcccccaggttgtggtaagacgctcctcgcaaaggccgtggccaatgaatcccgagcgaacttcatcagtgtcaaagggcccgaacttctcaacaagtatgttggtgaatctgagcgcgccgttcgccaagtctttgttcgggctcgttcctccataccatgtgtcattttctttgatgagcttgatgccttggttccacgccgcgatgatactctttctgaggcatcagctcgcgttgtcaacacccttctcactgaattagatggcctaggtagcagccgccaaggcatctatgtcatcgccgccacaaaccggccggatatcattgaccccgccatgctccgacccggccgtctggaaactcttctcttcgtaaacttaccatcacccctggagcgcgttgaaattctgcagactctcgtgcgcaggctgccaattgagttcaatgaagatctgcggcgtctggcggaggagtgcgaagggttcagtggtgcagatcttaccagtctgttgcggcgcg

SEQ ID NO: 19080 - DNA, 742 bp, Emericella nidulans
tcgccatgcagttcttgcacaagaacaccaaatctctcctcgactctgaattggcggatggcgcttacatctccgccaaggacaagcacgtcgtcgtcatcggaggcggtgataccggcaacgactgcattggcacctctgtccgccatggcgccaagtctgttgtcaacttcgaactgttgcctcagcctcctcctgagcgtgctcgtgacaacccctggcctcagtggccccgtatttaccgtgtcgattatggtcactccgaggtcaagacccacatgggcaaggacccccgtgagtactgcatcatgtctaaggagtttgtcgacgacggtaacggccgcgtgaagggcattaacactgtccgtgttgaatggactaagagcgccactggtggatgggacatgaagaccgttgagggtagcgagcagttcttccctgccgaccttgtgcttctctccatgggtttcctcggccctgaagaccgccttcttggagaagaaatcgagcgagatgcccgtaagaatgtcaagaccccccctggtcactatggcaccaacgttcccggtgtctacgctgctggtgattgccgccgcggacagtccctcatcgtttggggtatcaacgaaggtcgccagtgcgctcgcgaggttgataccttcctttctggcatcagctctcagctccctgttaccggtggtatcgttcgccgccccgccgtcgatgctgtccgccaggccac

SEQ ID NO: 19081 - DNA, 743 bp, Emericella nidulans
gggaatacggggctcggtctggaggccgcacgacacttcgtgcggtacaagcggccacggttattctggctgttcgcgacttaaagaaaggagagcaggcgaacgtatcgattgaggagtctaccaaggtacaaggtgtcgtcgaggtatggccgctggatctagaagatgtccgcagcgtccagagcctggccgccaaggcatctagtcttcctcgtctggatgtggtagttgcaaatgcaggtatctcaaccaacaaatgggcgctagttggcgatatggaacgaaccatccaggtgaatgtcctgtcaacatttctcttgatcctggccctcttgccgaagatgcaagagcaagacatagagggccagatccgtgcgcgtccccgcgtcgtggttgtctccagcgagggccacgagacgacggctttcgcagagcgaaaagccgcgcggattttcgacgcactccgggaccagaggcaggcaaacatggatgaacggtaaggatccccggatagcaacgtggacgctattttttattctggtggagcccgagtctccatttggaacagctagattgattgattctcagctacgatacatccaagcttatccagctctacctcgtgcgtgcccttgcagagcgccttagccggtccgacaaacccccggtgacactcaacgccgtgtcgccgggattatgcaagacgggacttcttcgcgagactccgcttgtggctcggc

SEQ ID NO: 19082 - DNA, 743 bp, Emericella nidulans
tcgtcggcaactacggcgaaaaggccgaattacaggctacatatgcaccgggcatcagcgacgccgaagtcgcagaccccagctacagcgggtggacgacaattctccccccacaggaatgcggcccgtcacagcggcgcgcgtggaagttgaatagctacgacgcggcgaatccgactccgtacacgcatgtccggctgctgatgtatccagacggcgggttcggccggctacggctgtatgggcatgctatcccgccgactcttgagtcgacttcgaaggatcagaacgagttgccgacggaagaactgtcttctgcgctcttgggaggtcttgccctcggtgcctcagaccagcactatacaccctgcagcaacctacttcttcctggtcgaggaaaggacatgggcgacggctgggagacagcccggtcccgcgccaagggccacgtcgactgggctgttatcaagcttggactccctggctctgtgtcaaaggtcgttgtcgacactaaggatttccgcggcaacttccctcgcgccgtgcgtgttcatggactgcccgccggctccgttggcagtgatgaggttcctgcgcatgaccatgcgggatggacggagattgtcaaaggtgataagccctgccaggcggatacagaacatgtctttgagggcgcagatcttgcggccgactcgggaattttcactcatgctaagcttactcttgtgccggacggaggtgtg

SEQ ID NO: 19083 - DNA, 744 bp, Emericella nidulans
cgctcagacggttgggaacgagacctgctgcgtgctcataccagattggacgtctgccggccctgagaaggccgctaaagtccccgcgattgacggtctgatgagttgggaggcgtggccgtacggcaacgaaaagatgaacacaacgcgggacgagcagtacatgtcgctcctaggcgaaaggccctacattatgccggtgagcccctggttctacacgaatctgcggcaattccacaagaactgggtatggcagggcgatgacttgtggtatacacggtggcagcaggtcctggagctgcagccggcgtacgtcgagatcctgacatggaatgattacggcgaaagcattatatcggccctgtgaggcgtgacgcgacgagggtcatcgccgaaggtgccccgtttgattatgtgagtgggatggaacatgatgggtggaggagtctgcttccctatctgatagcacaatataagaacgggaagaaccgggaggatgttgagattgctgaagagaccctaagtgtctggtatcggctctctcctgctgacgcgtgcgattccggcaaaacaagcgggaatagcaagagctctcatcaagctgttatggagccgggggatatactgcaggatagggtcttctactcggccgtgctggaggaggatgcagatgtggctgtcgcagtagggagcgtgaaccagagcgcccagtggaccaacacgccagatagagcgagaggagtg

SEQ ID NO: 19084 - DNA, 744 bp, Emericella nidulans
ttggctgggcgattcgtgtctgtgcattcactagcctatttctactaattatctccaatctcactatcttttcgagactgaagcatcagagacgcaagccattatgtcacccaaaggattttttccgaccacttaaggaaatcccgtttgttttgacgagtgccggcacgttcttcttgtactggggtctttttcttccatttgcgttcatacccacccaggcgcagcggtacggcatgtcgccttacctagcttcgtacttgcttgccgttctcaacgcaggaaggttagtctctcctccatcctcttttcccgccaaatcatatacccctatagcaaactaacaacatcacagcattccgggtcgcatccttcccccctatatcgccgactacttgggacggtttaacctcatgattctcacaacaatgatatgcataatcctcgtgctcgccctctggcttccgtcgcgcacagacggaacagcaatagcatttgccgtattatacggcttcaccggcgggtcagcagtatcgctcgcaccggcactagtggcccaaatttctgatatccggcagatcggcgtgcgcagcgggacgtatttcgccattgcggcgtttgcggcactcacggggacaccgattgcgggggcgcttctaccggatccccttggtgggagctacttgggtgttgagttgttttgtgcggggagtatgtgtgcagcggttatattttatgcggttg

SEQ ID NO: 19085 - DNA, 744 bp, Emericella nidulans
cccccatgagcctttcccttgaacaatgagcatacacttacccatgagttaattgcagatcctctctggtaaagggggagttggcaagtcgtcagtcaccctccagctcgccctagctctcaccttacaaggcaaatctgttggagtcctcgacatcgacctaacagggccctctatcccacgtctcgtcggtcttgaaggcgcaaagatcacacaatcctcgaacgggtgggttcctgtaccagtacatgaagctgaggcccaaacagcttcaggtaacgatgctgcggttgcgctttcagacgatggtggagatgagaataaggacgtagaacgtgcaaagccaagaggaagcctccgttgcatgtcgctcggctttctcctccgcgaccgcggtgacgctgttatctggcgcggacccaagaagacagcaatgatccgacaattccttacagatgtctactggggtgacaccgattaccctgcttgtcgacacgccgccagggacaagcgacgagcatattgcgcttgcagaggaactgctgaaattgtcaaccacgagcccatcttctaccggtgtcggtgcgctcccccgcctcacaggcgccgtcctcgtcacaacaccccaagcaatcgcgacttcggacgtgcgcaaggaggtgaatttctgcgtcaagacgaatatacctactttgggtgttatagaaaacatgtccggttacacgtgtccgtgttgcggggagg

SEQ ID NO: 19086 - DNA, 745 bp, Emericella nidulans
tccgaacgacagataaacgctctagaacctaattcagagtgccctcacgcggaatcacacaactttcacggataccgcggactggataaccttgggttgtcaaagtacagtgggaagcttcataaatgcgacctacagaccgcacgagtcatcggccaagttgatcaaaagtttatcctggtagaaatccctgacgcgaacgcatcaactcttgttcttatcgatcaacacgcagcagatgagcggtgtcggatcgaacgcttatacagcggctttttcaatggctccgaggtgcagacgattgaggtggagccgatagtcattgccataccacctgttgagacatcgctctttagacagcaggcagaattcttccagtcatggggcattgagtatatgatagggcatgcctcagaaagcggcaaggcctcgatatctgtgtcagcactccctactcttatcgcagaacgctgccgggcagaacctgagcagctgattggcatcctccgtgctgaaatctggaaacggactgaagagcgcccgcagacctttaatgctaaggggactgattctgcagaagattgggtccggcagatagcaggttgtcctcagggtattcgtgacatgcttaattcgcgcgcgtgtcgaaccgcgatcatgttcaacgacgtcctgagcgtggatgagtgcaggaccctagtcagtcgcttggctagctgtgtctttcctttccagtgcgcgcatg

SEQ ID NO: 19087 - DNA, 745 bp, Emericella nidulans
gctcacgtctcgaattttcttcctcttttgccaggctttcccgctgctcgcgcgtttcattctccgcttccgaaccaagacattattgcctaaggacgtcccctgggatccacacttcaagccaaactataacccatgggaccagcgtctttgtgtttcgccagatggtgatttctacaagagtctacacacgggcaaagccgctgtaaaaacagacaccatcaagaccgtcacgccaaagggcattgagctcaattcgggcgaattcttggacgccgacatgatcgtcccagcaacgggtctccgtttgaggattgctggcggtgcctccattagcgtcgacggtgccccggtgcacctcaacgacaagtttatttggcacggtatgatgctccaggacatgccaaacgctgcctttatcattggatatacaaacgcatcatggacacttggcgccgacgccacagctcttaccatctgtcgaattcttaagaatctcgaaaagcgcggcttcgcggccgttgtgccgcgcctctcgccctcactcgcttcgaacattcaaccccggcggctgctcaatctttcgtctacatacatcacgaaagcagaaaaggacctaccgcgggcggcagatcgtggaccctgggtgcctcgagacaactacttcagtgatctgtggttcgccaaatacggcaatatcgacgatgggatggagttcttgggagagaagaagactctgtaattg

SEQ ID NO: 19088 - DNA, 745 bp, Emericella nidulans
ggccaaagctcgacgaaccgtctatcagttgggcagtaacagccctgttccggactccgaaatcgagaagcttgttcatgctgccattctgaacgtccccagtgccttcaatacccagtcgacacgactgcttgtgctgttgcaccgcgagcacgagcgcctgtgggatgtcgcaatcgaagtctttaagaacctactgaacacaggtgctattcccaaagaagtttgggaaaggcagacactgccgaagctgcagggattccgagccggcgtgggaacggtatgttaaactcgaccacgcagcgagatactgattggacatggatcgcgataagtacggactacggagtattaatcaagagtgtgcggacagattctcttttacgaagacccaacgcatattaagccattctcggagaagttccctctatacagaaaccagtttcagccttgggctgaacactccaatgccatgcatcagttcttccgtgcgtctgacccccgcctccctacttttggtcccatcctttgttgtgagtgcattctgctgacatcatgcaagtctggaccggactcgaatcccttgcgttcgcggcaaacttgcagcattataatcctctaattgacggcccagtcgctaagcaatgggatatcccttccgagtggaaacttgtcgcacagttggtgttcggtagccctaagggagttcctggggagaagagccagaagccaattgaggaccgcg

SEQ ID NO: 19089 - DNA, 745 bp, Emericella nidulans
cgggagaatcaccggcgacaagttcatcctcgcgacgggtgcctggacggcgaatctcattccctcctggaactcgatggtcgcgacggcacagattgtcgggttcgtccgtctgacaccacaggaggtagaagcactcaaggacctccccattatcttcaacctatcaaccggcttcttcagtttcccaccgcacgaaaagacaggatatcttaaggtagcgtgtcacagctttggttatacgctctcgactcagtcagcgaacaaattggtctcatcgcctcccggccgggcgattcccgcccgggcaaacttcatcccccaagaggggatggagagactgcaggctggactgagggagatactccccgagattgcgaaaaggggctttgagaagacctgtctttgctggtacaacgagacgccaactggggatttcatcttcgactatcaccctgagtataaaaatctgttcatcgccactggcgggacgggacagtatgccatcccagttgtcttgcacgctgaacattgaagataaagaataatagctaacattcgcctccacagtgccttcaagttcctccctgtgatcggaaaatacatcgcgtcagcgttccagcgcaccctctcccccgaactgacacagaaatggcgattccacaccgagtaccgcaatcagccccgcgagaagctcttcaccgggagtaacagccgcaatggaggtgatggcagtcgaggcggg

SEQ ID NO: 19090 - DNA, 745 bp, Emericella nidulans
ctcaacaagggccacgtatgtatactgatttcctttatctgatatcctccaaatggtgaatggattttcgatggatgaatggacggatgggatggagcttccgatgtcgagtcgaatcgaattgagcgagacgagcagaaagcgatcggttttacgtacggttcggttcggattatgtggaagtacactcggattgagttgaaatgaaattagaggttgcgggcaacgaagaacacgagacgaaattttacgcccgtgtacggccgtcaagaagggactagcagggagattatagcgtcaagaatgttatcggaagtcaccgtatttgcgtcagcctatgcctacgttgtctattcagttcggctatctgctcggcttatttgattcgacacggaaactccggaccatacaactatcatccatccagcaatccatccatcctattcttccaatctgcggtattccgaggcccctgaactaacgggtcgtatctgctttagaaaaccacccccctcaacacccccaagacccgcatcagccgctccaagggcaaggcctcccgccgcaccgctttcgttcgcgacatcgcccgtgaggtcgtcggtctcgctccttatgagcgccgtgtcattgaacttctgaggaacgctcaggacaagcgcgccaggaagctcgctaagaagagggtatgtctgcgccttttgctggttatccatggcaacgaatgggttttgctcagcagagc

SEQ ID NO: 19091 - DNA, 746 bp, Emericella nidulans
tggtcggtgatggtgctgtcgggaagacctgtctcctgatctcatacacaacgaacaaattcccttcagaatatgtgcccaccgtgttcgataactatgctgtgactgtcatgtaagtggatttttgtgttttcgccgtgacaccccggttcgattttcgcaggcttcctgcttctactcgctctgcgatgcgtaaagaatattcctcgcccggtttttttgtccgaacgtcgggtctaatactaccgatacttctttcaactttactgatcgcggttttatggaacaggatcggcgatgagccctacactctaggattatttgatactgctggtcaagaagattatgaccgacttcgtcctctctcatacccgcagacagatgtattccttgtctgcttttctgtgacctcccccgcatctttcgagaacgtgcgcgaaaagtggttccccgaagttcaccaccactgccccggcgtcccatgcctgattgttgggacacaagtcgatctccgggatgaccccgccgttcgcgacaagctggctcggcaaaagatgcaaccgattcgcaaagaagacggtgaccgcatggccaaggatctgggcgccgtgaaatatgtcgaatgctccgcattgacccaatacaagcttaaggatgtctttgacgaggtgggtttgtcttaagtttcgctcagggctcgtgattgactaaaaccgtctcaggctattgttgcggcactcgaaccg

SEQ ID NO: 19092 - DNA, 746 bp, Emericella nidulans
gccggcgtccgaaaagaaggcagccggtgagtaagcctttgatacactgggctcaatctttcgccatgactgactgatatcttcagcggcggccgcggcgacttcaaatggtcggacgttaaagattcttcacatcgcgaaaactaccttggtcattctctcatggcacctgttggacgatggcaacagggtaaagacttacaatggtacacgcgcggagaggatgacccagaggaagcggccagaaagggacgagaggagcgacagcgcgtcaaagctgcggaggaggaggccatggctcgggctctgggtcttccattaccatcccagaacgcgaacctgatgccgttaggggggaggaaagaccggcaactagcgggaattcagatgagaagacaacaggtatgggaggaacaatcagttcaattataccgtgcatttggctgatgagctggagtagaacgggactcaaaagacagtcggcggcgaaagcgcgagcgaacacggagtccaagaagggttcgtgatcgcgatggtgaacgtggtggtgatagggatcgaggacacagacattacaggcgatatgatgaacgagaccaccggagtcaccgaagccatagacgcagatcacggtcaagttcggtcgatcgggacaaggagcgccataggagaaggtcgcggtcacggtcgaggagtagagataggggcgagagaattaggcacggaagacatcgagatggcggccc

SEQ ID NO: 19093 - DNA, 747 bp, Emericella nidulans
tcgaattagccaccgcgataccaattcgattctgactctccagcttgctgttgggtgtccactccaggtgaaaccaggtcagtccattacttcattcagtacgtctgtactgggccagggtcacttataagaatttaggtgtcatgattggcatgtctcctacgataacactaaggggtaatctttctttcactttcgttaagctcattgcgggaggcgaaatggccatgtctacctatactgggcctggcaaaaatctaattgccccaaccctgctaggtgatatcaccgtcatccgacttacagaagggcaagaatggatagtcggtagagacgcttttcttgcagcaacaagcgccgtcaagcacgaacacaaaacgcagggtcttgccaaaactctcttctctggagaaggactttgggtgtacagattttacaagacgggcttgctctggatacaaagctttggggcaataatcaaaaaagacgtaagtactccttgccttcccttacatccttggcttggatacatcatgctaaaatctcggtacacccagctcgctgatggagagtcatatttcgtgaacaatggccaccttgtagcttggaactgcaagtacaaacttgaacgcgtggcctccggcggtatcatctccaacttcagcgcagccgagggtttagcatgtaggtttacaggacctggcacggtgtatatgcaaactcgcaatgtggcaggctttgccatgc

SEQ ID NO: 19094 - DNA, 747 bp, Emericella nidulans
cccccaaccttcttcccatccaatccggtattggaaacattgccaacgccgtcattggcggcctcagcaagggtggcgcagactttaccaacctcaaggtatggaccgaggtcctccaagactctttcctcgacctcttcgacagcggcaacctcgacttcgcgacggcgacttccatccgcttctcccccgatggcttcaagcgcttctacgacaactgggagcgctatgctggcaagcttctcctgcgctctcaacaggtttccaactctcctgagatcatccgtcgtctgggctgcatcggcatgaacactcccgttgaagtcgacatctacgcccacgctaacagcacgtgcgtcatgggctcgcgcatgctcaacggtctcggcggctctgcgatttcctgcgttcttccaagtacagtatcatgcacacccctagtgtccggccctccaagacagaccccaccggtgtctcctgcatcgttcccttcgctacacacattgaccagaccgagcacgatctcgatgtgattgttacagagcaaggtcttgctgatgtgcgtggcttgagtccccgtgagcgtgcacgtgtcattatcaagaagtgctctcaccccgactacacaccaatcctgacagattacctggaccgtgctgagttcgagtgcttgaagaagggcatggctcacgagccccacctgctcttcaacgcgttcaagatgcacaagaacctccaggagaacgg

SEQ ID NO: 19095 - DNA, 747 bp, Emericella nidulans
ccgcacaacagttggatggaaaggtctgatcaacgaccctgatattgacgagtcctaccagatcaacaagggtctccgcgtgtcccgcaagctctacgccgacctcacaggcatgggcatgcctattgccagcgagatgctcgacaccatctccccgcagtacatggctgacctgatttccctcggtgccattggtgcccgcaccaccgagtcgcaactgcaccgtgagcttgcctccggtctcagtttccccatcggttacaagaatggcactgacggcaacctgaccgttgccattgacgcgatcggcgctgctgcccacccccaccgcttccttggtgtcaccaagcaaggtcttgcggccattaccaagaccgccggtaaccctcacggcttcgtgattatgcgtggaggaaacaagggcacaaattacgaccgcgagagcatccagggggcccgcgaagcccttcgcggcaagaagcagcgtgaggttctcatggttgactgctcacatggcaactccaagaaaaaccaccgtaaccagcctctcgttgccaaggaggtcgctgaccaactccgtgagggccaggatgccatcattggtgtcatgattgaatccaacatcaacgagggtaaccagaaggttccccctgagggtccctccggtctcaagaagggtgtcagtatcaccgatgcctgcattgactgggagaccaccgtcactgtgttggaggacctcgccgatgc

SEQ ID NO: 19096 - DNA, 748 bp, Emericella nidulans
cacgccgactcggactcgaacgctccaaatccagcaggcgaaacggaaaggcaggacgttcaagatattcagcttgtctctgaaccagcagcatgcccattttgtgtccagccagaattcggggtggcatatgtaccccctcctttccgtagaggactagcctacgcctccgattcgagtggccggccaaacataggaacaccagtgtcatctacatcgtcgctatcttcggcaactactcctaccactggtcgacggcgtgcaacatcattatctgcaacagatccgagtgttataactacagacaaggtgcggccagattgggcgcagaaactggccaatgctcgtgcacatgcggcccgaagatctgcggcggctaccgctttacataccgcggcttatctaatgaattctaatggctccggaggcgatactcgaggatttagtatgaggagaggtgttatgcggcgcaataacggtggacaagactccccgggtacaccaggtagaagcggatcgccagcgctacaagcgttcgctttcttgacagataggcgcgcaccatctggacaagaaacggactcggctgaagagggcacaagcaatcttgctccccctcggaacagttcaagaaggtcacgcatggatgacttggaggagatgatgatgatggaagctatccggctgagtctggcaagcgaagaagagaggcgtaagagagaggagaaggaattgagaaaagaggcca

SEQ ID NO: 19097 - DNA, 750 bp, Emericella nidulans
gagcatgctggcaaggctcaagacaggttcgttccgtgctatcttgagctgatcacgattgctaatcgcgtctagaatgcggatcaagtttcacgcacaacctcgagtccatgttcaaggatatggaagttgcccgtgacgaaatgagcgcatacaattccataaagcgcgaacgccaaactccccttcccgtagatctccatgttagcgtgctatcagcctccgcgtggcctacgtaccctgacgtccaagtgcggataccaccggagatcgcaactgccatcagcgactttgaaaaattctatgacactaaatataacggccggaagctggcgtggaagcaccagcttgcgcactgtcagctgcgagcacggtttcccaacggcaacaaggagctcgtcgtcagttcattccaggcaatcgtgctcctcctcttcaacgagcttccagaaggcgggacgctcaattatcgacagattcaggaagctaccactctatgtaagtcccttactagcctatctattactatccattgccctactgccacggttattttactaacacaatacagccgaccaagaactgacccgaactctccaatccctcgcatgcgcaaaataccgtgtcctctccaaaaagccgaaaggcagagacgtgtctcccaccgatgaattctcctacaacgcctccttcacagaccctaagttccgcatcaaaataaaccagatccagctcaaggaaacgaaggag

SEQ ID NO: 19098 - DNA, 751 bp, Emericella nidulans
cgcctcaaggacagcgtggattgcttgttgttgatgcagaatccttcaggtggcttcaccgagtatgaaactacccgcggctccccaaagatcgaatggttaaatgctgcggaggtttttggcggtatcatgattggctatgactaccccgaatgtaccaccgcatcagttaccgcgctctcattattcagcaagttctaccctaactatcgtgccgaagagatcaaagccgcaaaagataaagctgtgaagtatatcaagcgagtgcagagagcagatggaagctggtacggatcttggggtatctgctttacttatgcggccatgttcgccctcgagagtctggcaagcattggagagacttacgagaccagcaattatgctcgccgtggctgtgagttcctgatttcaaagcaaaaggaggatggaggctggggagagtcatatctcagcagtgagaagcacgtcttacgtacaacacgagaagtcccaagtttgccagacggcttgggcgtgcctcgctctgatggaggcaggttacccccataaagagccactacaaaaggcgatgaagctcataatgtcccgacaacaaccaaacggcgagtggttacaagaggccattgagggagtgttcaaccagtcttggtaagtctgcaactcattcaaacgtgactgaaactcacagaatattagcatgatttcttatcccaactacaagttttattggcccattcgtgcccttggcttg

SEQ ID NO: 19099 - DNA, 753 bp, Emericella nidulans
gacctcggcgtggctctgctcatgactaccgtgcaacggaacaaagcactttgttcgcggaacctactgggaacgcgctggacattgaggaacgcattgccgcacagcctcttccgggagatgacgactatcctctttacgattccgatgacgattcctttgactctgaagagctggaagaagcgcgacgagttggcggggcatactattataaacaattggcgaagcattacacccaccgaaccacggctaaagcagtggatataataaaagctctcgttcctaggcccatgccgaccaatatgccggcacctgaacaaaacggaattgctgtcattgggaataaacgaaccgtcaagaagttccaagcccccaaaggcaaacgtaggccaaaccgactcctttctgcagctgcatctaacgtttctataggcatccatgtccctgttcgcgttgagccaaaagtttactttgctgcggagcggaccttcctctcgtggctggagttttccattatgcttggaaccattgctgctaccctgctaaacttcggcgaggattacaccacgtttgcttgctcgtgggcgttcactatcctcgcagccgtcgcccttatctacagtctaatgctgtacatttggcgggttgacaagatccgtaaacgacgagacgttaaacgagtttactacgaaaaatggggcccaacaatcatcggcttaggtttggtcgctatcatgcttatcaactttggac

SEQ ID NO: 19100 - DNA, 753 bp, Emericella nidulans
ggttccagccaaacaacaagactgcctgggatgatattatcctacagtacgacttgatcgaggcgcacatccgcgacaacgagactggtctgctctttcatggatacgatgccagcaaagtcgctgtttgggctggtgagtctcttgctctttcagctggtgatgatgcttacttagcttagaccccgtcaccggtgcttctccgcatatctggagccgcgcagtaggctggtactttgtctcgcttgttgagcttctggactacttccccaaatctcaccccggctacaagcgaactctgcagcgctaccaaagccttgccaaggctgtcaagaaaagccaagatgagtccggcggctggtggctcatccaggacccgccatacccaagcgatcctaggaactacattgagagcagcgccagtgccatgtttacttatgctttgttgcggggtatccgtaaaggattcatccctgccaaggaatacaagccggttgcgctggacggatattcgcttctgaagaacgagttcctctcgcacaatgcgaacggaacgctcaactgggaggggaccgtgcaggtaggaagtttgagtgggaacggaacgttcgaggtaggcgcctccttggtcttatagggactgtgctaatcctgatagtactacatctctgtcccagttgtccagaacgattacaagggtgctgggcctttcatgtacgctagctacgagttggaagcgtactgagtgggcga

SEQ ID NO: 19101 - DNA, 753 bp, Emericella nidulans
cgcccccgtgtcaaaccttctcgcctgctcacacaatcccagggcccaatgatgatgccaactcagcagctatattctcatgctggacctcattcgtaaagcaaaaccgagagttcataccatggaagaaacgagcggtctgttcgatcggcatcaacaagtgttcctccgggttatctgtgatttcatagagacagggtactccgtccgatgggcccttcttaattgtatgtggtatggggtgccacagtctcgaaagagattgattatcattgcgtcagggtatgcgtgctcaagattcgatgctgactcatgactaacatcggtcctttttaggcctggggaaagcctcccacggctgccaaggcctactcatggcctgccagggtccgggctgcgtgatcttacaacaatcagccaggcaattcgcgatatccccactggaagtcccgatcacgacgtcgttgccgcacggggtcgcggagttcataatcgaagagctccattcgacggaaaccgacaagctcgcacaataacatgcggcggtggggacaattatcatccctctggattgcgcggttttaccctcagggagtttgcttgtctgcaaacctttcctctgggctttcggttcctgggcggtaggacgcaggtaaagaggcagatcggcaatgcagtgcctcccctactggccaaagctgtctttaaggaaatcatcaggtcgctgcaagacaccgatgagcgtgaattgca

SEQ ID NO: 19102 - DNA, 754 bp, Emericella nidulans
gggcgcagagtaaagagaacggagaggctggaaaaggagaaggacagcacttggatgtttgtctcagtgattgccaggttgcgacgctggcgaatatggggcaggggcctcttatctcaggacagaaggatagtggaagatggggaaccgcgcatcgtatggatacaactcacctacctcctctcatctctcttccactaactgacatgtcagcatccgtcgttccctaccaatccttcgccacagcggacggggacatcttcgttggcggggcgaacgacaagctctttggaatcctttgcgcgcggctcaacaagccagaatgggcttgtgacgcgcgctttgtcacgaactcggaccgcgtcgctaataggtctgtccttgaagagatgattgagcacgaaacgagaaagttatctacgaaggaatggcaggaaagattccagggctcaggactgccttttgccgttgttaacgatgtgcttgggacaatggggcatgaacatggtacgtttacccgcttactatcctatatcggtttctcaagctcctcgtaaatgcttcgtgatgttctaacagcgttgccaatgcagtacaagcgcggggtatggtccagacaatagcgcatccggcatgcgggctaatcaaggtgatttcgccgccggtgaagtactcaaatgcggagccgagcattcgacgggcgccgccattgctgggggagcatacggatgaagttctaatggagattgggctt

SEQ ID NO: 19103 - DNA, 755 bp, Emericella nidulans
gcctggcttgagcgtcgtaccaactacactcgttcacttggagtcatgtccatggtcggctacatccttggtctaggtgaccgccacccgtccaatcttcttctggacagagtgaccggcaaagtggttcatattgactttggtgactgcttcgaagttgccatgcatcgtgaaaagtatccggagcgcgtgccattccgtttgacgcgtatgttgacgtttgcgatggaagtcagcaacattgaaggaagctaccggatcacttgtgaagctgtcatgcgggtgatacgtgagaacaaggactcgctgatggccgttctggaggctgtaagttaccttttcctcatataatccactatttgctaacttaatatagtttattcacgaccctctaatcaactggcgtctgggaattcgcgagtctcctgaccgaatgccatttaacgcggagcgtcgtcaatcgattgtctccaatgtcaacctcgagcacggcgtccaacccagcaacttctctcggcaccgtcggccttcaatccttgaaggtggtattctcgacgctcaagaaggggtgcctaatgaggcacgtgaggctcagaatgcaagagccttacaggtgcttgctcgggtgcgggagaagctgaccggccgggactttaagcctagcgaagagctcaatgttagcgatcaagttgacaagcttcttgcacaggcaactagtgttgagaacatctgtcagcattggattggatggtgca

SEQ ID NO: 19104 - DNA, 755 bp, Emericella nidulans
tgggagccgcgactcaacctcctttagacgccattaacccaaataactatataggctggcgctttgccacccctgatgaagatatcccaggcgcaaatacaacccctgacccagtccactcctcgtacagtcacctccgcgacatctacttcgccaacgaacccaactacactggccgctttactgtccccgtcctctacgataagaaaacgaagcgtatcgtcagcaacgagtcttccgagatcatccgcatgttctactacgaattcgacgacctcttacctgcacagtatcagaaagtcgacctcttcccacctcatctccgcgagcaaatcgacgccacgaacgactgggtatataacgacgttaacaatggggtctacaagtctggttttgcaactacccaggaagcatatgagagaaatgtcacgacgctttttgcctcactcgataggattgaaaagcatctcgcggattccaagtcggcttatttttttggagatgacatcaccgaggcggatataaggctcttcacgacgatcgttcgatttgatcccgtatatgtacaacacttcaagtgcaatattcgcgatatcagatctgggtatccggctattcatgcttggttgaggaggctgtactgggatgtcccagcgttccgggagacgacccagttcgaacatattaagaagcactacacgaagagtcattcgcagatcaaccccttcggcatcacacctgtagggccgacaccg

SEQ ID NO: 19105 - DNA, 756 bp, Emericella nidulans
ccatgtcgctctgtttgaatcgtctgactgaggaaaggtaggctgattgactccttttaccagcaactatatactctgttcagttctcgcagtaagtcgagttgagctgacaggcacactcgcgcacaggaagcaatggcgaaaagatcatcctttcgccttttatgccaagcctcatcgtacggcccagggtgttttggatatgaaacgatgggaatgtggcattcccgggaaaaaagggacaatctgggaaggtggacttttcaaattggacgtcacttttcctgatggtgcgtggcaactctataaaagctcaaagcgaagttgttgactgactgttctctttcagagtaccctaccaagccacccaaatgtatgttcctttcgtcccgctcatactcacaaatatctttcacgagaatgtcgcaagactcttaaattgaataccgcttgcttagaagctaatgctgctgtgctgttctgggctaactttatgtcattatgaacaggcaagttcgtgccagctctgtttcatcctaacgtctacccgtctgggactgtttgtctgtcaatcttgaatgaagacgaagcgtggaagccggcaatcacgattaaacaaatccttcttggtatccaagacttgctcgacgacccaaatcccgagtctccagcgcaggcggaagcatataatatgtacaagaaagacagagctgcttatgagaagcgagtgaagcaggttgtcaaggaaaaccccgc

SEQ ID NO: 19106 - DNA, 756 bp, Emericella nidulans
ccgacgaaggaagggacattgtctttggccaaatcatattcgcattcctatacctgatatgtcttacggttgtcatggcgtgctataggcgagtcggagctccgccatacttgtttcctctattggttttatccaaacgtttgcatagcgtttacatgctacggctttttaacgatgggcttgcggcgctggctatgtggggctctatttggctcttcataaaccggaaatggactcccgcggttgtgctttggtcgcttgggctaggtgttaagatgaccttgattctgctggttcccgcggttatggtggtgctcgcgttgagcttggatattggacgatgtattaggctggctgggttggctttgggcattcaggtctgtgacatgttcttggtggagtattctgcgcacaaaggactgacagggctagattctccttgcgataccgttcctgaagacgaaccccagtggctattttgagcgcgcgttcgaatttggaaggcaatttatgtttaagtggacggtgaattggaggtttgtgggggaggatatctttctctccaaaggcttttgggcgggcctgatagttctgcatttgctcattttggttgtgttgggtttcacctgctttctgaacccatctggtactagcttgccagatttcgcgggcagattcttgactggacaacaccgcgggatagcacttcatccgtcttttattatgtccgcactattgacatccctgtccgttggc

SEQ ID NO: 19107 - DNA, 756 bp, Emericella nidulans
cggccctcgggctattcttccttctttttgtgcaaatatctttggcgctcaagttcgatatcgctgctggaaagggcgaacgatgtattcgcaacttcgtcctgaaagaccagcttgtcgttgttactgccatcgtgagcggcgagaggggggatggtcagatggtcaacatgcatgtatgtgggatttcaactttagcgatagttaccagcatcgggactcggatgcgaatctcagcttcgatgcaattacgtcggcctctgtaacggtgctaacgatcgttctgtaaaagatcaaggattcaatgggcaacgaccacggaagaccgaaggatgtgatcggtgagactcgtcaggcgttcacatctgctggagacactacctttgacgtttgcttcgagaatacgctggtttcccgccgtacgttcagtctcccaggtccatatgcccggagcgtttacagtgctaaaataggccgaactaggtggaatctcgaacccgcaccgatcgattgagctggacgtcgacatcggtgccgacgctcgtgactggtcaaacattcaggcccaggagaagctcaagccgattgagaccgaccttcgccgcattgaagagatcgtcgctgaagttgttagtgagatggaatacctccgcgctcgtgagcagaagctgcgggacaccaatgagagcacgaacgagcgtgtgaagtggttcgctttcggcacaatgggcatgctggtcggactcggtgtctggc

SEQ ID NO: 19108 - DNA, 758 bp, Emericella nidulans
tgcagaagccgcccgagaaccggctgaacacatggtattgccaggagcttatccgcgcattccgaacagtcgagaagattcttgggcctgacagtgaaggcgctgtaatcacgcgcgggagcgatgcgaagttttggtgtaccgggctggaactcgatgagtcggacaccaacccgttcgccaattcggacgggttctatccggtgcgtatcttcatcctggacccgagaggcaaggctgagattttctgcttcatgaataatagctagtgcatacagtcctcgacttcccgtttcccacaattgccctgcttaccggccacaccttcggcggtgcctgcccctttgcattggcacacgactaccgcatcatgaactccaagcgcggcttcttctctatgcccccagtaaatcttgggctgcactttgacgggattggctcgctaccgcggttgaagctgcgtcccgacatcgccgcaaagatgctcctcgaggcgcatcggtggacgggggaggaggcattgagggatggtattgtgcatgctattgccgacccagacgagatgctcgacgttgcactggagatgggaaggaagtgggcgccgaaagcaaagatggggtgcgtacatatcctatacctaatcgcttaaggtgtgctaaactaaggactggtgatagggtctatgcggcgcttcgagcggagctctggggcgaggcgattcgcaagtttcagcaaatcagctatgttcatggtcgatt

SEQ ID NO: 19109 - DNA, 758 bp, Emericella nidulans
catccacaagcatgacttgagcaaatgtgttcttatcggtcattctatgtatgtctacttcttccctagcttatttgtgttcttttctctagggcttggacgcggttgttctagaagattgctaccttacaactcatacttacttggtcttatgaaaaggggcgcgaaagctgccatgaccgttgccctcaacgcccccgagctcgtctcagctcttgtccctgtcgacaacgcacccgtgaacgcgcctcttcgcaccgattttgacaagtacattaagggcatgcagcatgttgagtccgcgaatgtaacgaagcagtctgacgcggacaaaatcctgcaggaatatgaagaagtatcctctccatcctaacggttcatccatatgtgaatgcgaagccgaaagttactaattgtgttaggccctccctattcgccaattcctcctcacaaacctcatacgctctccagagaaccagacgatgaagttccgcgtccctctttcgacgctaggtgcgtcactcagagcaatgggtgatttcccattctcgcagcctgggtctgtgcagtataaggggcctacgcttgttattaggggtacaaagagtccctatgtctctgaggatacgttcccaattatcaaagcctttttcccgaattcgaaaattgcggatgtcgaggccgggcattggcttatctcggagaatccagaggcgtttaggaagggtatgtacctactccttgccctatctacctcc

SEQ ID NO: 19110 - DNA, 761 bp, Emericella nidulans
tggtgaatgcgagattttatgatcagttcactcgctgctatacgccaccgtcgtccgagcctttcgacttggatgtcccagagcaagctgccataaatattactagcagtgtcccgcttgaagagcccgttctccatgctgagcggacaattgtcggacacgggcaggagcgagggggaatgcgcattatcttcgataacccttcgagtgagaagcccgtcgatttcatctactttgaatctcttccctggttcctacgaccttatatccacacacttcaatcaaccatcaccggccccgatggcgttcgtcgacaagccccgaccaccgattttatcagagagaccttttaccgccctggcgttgaccgcgagcgcgggacacaactagaactcgccctgtccgttccacccgcttccaccgtgactcttacctacgatttcgagaaggctatcctgcgctatactgagtacccgcccgacgcaaaccgagggttcaatgtcgccccggccgttattaagatcgccgcctcaaagcctatctatatccgtacaacgagtcttctcctccccctcccgacacccgatttcagtatgccatacaacgtcatcatccttacgagcacggtgattgcgcttgcctttggcagcatcttcaatttgctcgtgcgccgcttcgtcactgtcgaagaagcggccggcttcgggcgcagacattcaagggccgcctgggtgggaagattgttgccctacgcgatcgga

SEQ ID NO: 19111 - DNA, 762 bp, Emericella nidulans
cctcagtagagctctcggccctagctcggggctggactcggacgatgtcgaccctctcgacattcagcgcttgatggaactctacacctccaacccagaagactggcttccttatgccctgggagataccaacaaatcttacacacggaaccttatcgacgaaggaaacggaaaaagtaacctggtaagctacctcccatctcaccgctagttgtttatcttcccagctctgccctcactgttgatatgtctgtgcatgacgttgctgtgcatgcaggtattgacagagagttcgttgagttataatgactaacgctcagcctcctcttagttgattcttgtctggagccctggacggggaagtgctattcatgaccatgccaatgcccattgcgtaatgaaggtagtacaaatctcttgctcttgactgttatcccaagacaacaagcttaggctgaccttgaatgtcatggttaggtcctaaagggcaaccttcaagaaaccctatatacatggccagatcaggataaagttcagcatggacagtcatcgcctcccgaggtcacgaaagtaacaacgtacggcgagaatcaggtcacatatatgtctgacaaggttcgtaatgttatcctaactagttgaagcatctctaatgtatcgaagttgggactgcataagatccacaacccagatccgaatgagccagccatctccctacaccgtaagttacaagcccttcacttcagctgtgtattctattct

SEQ ID NO: 19112 - DNA, 762 bp, Emericella nidulans
tcgacaccatggggtagagaaatgcaccgcatgccaactggggttgcccaatatctgcaagcggtatacatcgtacgggttcagtgccgcagggggcgggctcgcgagcgaaatcgttgtcaagcattatgcctgcattccgctccctgattcaatctcgttgaaggtgggcgcgctcctggagccgctcgcggtggcgtggcactgtattcggatttctgggtttcaaagggaccagacggttctcatactcggtgccgggcctatcggcctagcgattctgatgattctaagggtctggggggtcaagacggtcgttatcagtgaggtggcggcgtcacgaaagcggatggcgagggagctgggcgctgatctggtgctcgacccaactgagttggggagctctaaggatggactggatccagtggtcgtgctacgcaaaaggccatgaaggcagacggggccgacgtgacattcgactgtacggggctgcaatccactctggacacggccattgctgcgaccagaccagggggcactgtcttcaacgtcgccatccatgaaaagcccctgatggtgaatctcaacgagctgactctgggcgagaggcgcctgactggtggaatctgctacacggacgttgatttccaggagctcattgctgctctggaagcagggaagattcaggccgagaggctgattacatcgatcgtggatttagacgacgttattgacaaggcgctgatggagttgatccataac

SEQ ID NO: 19113 - DNA, 762 bp, Emericella nidulans
gccatcgacgaagccgacagacttttggacatggactttggtgaatccctcgacaagatcattcgaatcctcccccgcacccgccacacctaccttttctccgcgacaatgagcaccaaagtcgaatccctccagcgtgcctctctttccaaccccgtccgcgtctctgtttccagcaaataccaaaccgtctcaacccttcaatcatcctatatctgtattccccacaagcacaagaatctctacctcgtctacctcctcaacgaatttgcgggtcagtccgcaatcatcttcacgacaactgttcacgaaactcagcgtgtcgcgtttatgctccgcgccttgggctttggcgccatccccctccacggccaattgtcccaatctgctcgtcttggtgccctaggcaagttccgctctcgcagtcgcgatattctcgttgccactgatgtcgctgctcgaggtcttgatatcccgtccgttgacgtcgtctttaactttgacctccccatggacagcaagacatatattcatcgtgttggacgtactgcacgtgcagggaagagtggagtagcaattagcttcgtcacacagtatgacgttgaagtttggcttcgtatcgagcatgcgctgtccaaaaaactgccggagtatcaggttgagaaggacgaggtcatggtcatgtcagagcgggttgcggaggcttcacggcaggctactattgagatgaagagctttgacgaaaagaagggggctagaggg

SEQ ID NO: 19114 - DNA, 764 bp, Emericella nidulans
ttcaagccggcagttgataccaatatagctggtatgtctcgctctgcaacctccacacctcagtccggcgcggcaaccgcgaaagtccagcagccgaagccacaagctctcgcaagcaaatctggtccctccgcgatactagtctcaacgcgtcaaaaaggaaatccgatcctgaatcacatcaaatttcagccgtgggagtacgccgacattccagccgactatgtcatcggcgcaaccacctgcgccctcttcttgtcccttaaataccaccgactccatcctgagtacatctattcgcgaatcaaacagctagcggggaagtatttactccgtgtgctgttgattatcgttgatatcccaaaccacgaagaccctcttaaagagctatccaagacgtcgatcatcaacaacctcacccttatcttgtgctggtccgccccggaagccgcgcactacctggaactctttaagtcatgcgaacattcccagcccactgctatacgcacacaacaagcacaatcctacaaagactcgctggttgagtttgtcactgcgccccgaagcatcaacaaatccgatgctgccagtcttatatccacattcggcagcttacagaacgcaattaacgcccagccagagcagatcagcgctgtgccgggatggggcgagaagaaagttagagcgtggtgcaatgccgtgcgagaggaattccgcgtggaaaaggcgaaaagagcaaccgctcctaagcggactgtgcggga

SEQ ID NO: 19115 - DNA, 766 bp, Emericella nidulans
tccgcggaccagggatcaaatccggagggaaggtaactcaggttaccactcacatcgactttgctcccaccatctttgagttgctcgggttgccgcctcgcagtgactttgacggcactccgatgcgtatcatgaaagatagcgccgccattccccatgagcacgtcatagtggagtattggggccaggcagttcttgaaggtgactacgcaaacatatgtacgattttcagccgaatcacaattgcgcatacaagtagctgatgatggtcacagccccgacgaacacagaccgcatgccaaacacgacatataaatccgtccgcctcctgagcgagaagtacaatctcttctatgctgtctggtgcactggtgaccacgagctttttgatctaaatgtacatcgtcttcccattttcgtcaagctgcgaaagaagcgaataactgacggttaatacagacggacccctaccaaatgcacaacatctacaataccgcctctcgatctttcaagaacaggctagacgccctcctcctcgtcctgaagtcctgcgccggaagcacatgcatcaagccctgggccgaacttcaccctgacggatcggttcagagcctttctgacgctttggattcgcaatatgatgggttctatgcccagcttcctaaggttgagtatgaggcttgcgtagacgggtatctcattgctgcagaggggttgcagtgggaagatgtcagtgctagcgctctacggaactatgtccgacgga

SEQ ID NO: 19116 - DNA, 766 bp, Emericella nidulans
gcagacatttgagatcatcttttacgtcattgccgccgtcgtaatctactactatgccggccagaccgtcgattcgcctgcgctgggctctgcaggccccgtgctgaaaaaagtagcgtacggtattgccatccccacggtacgtttaacgctctccccactagattatttcttccttattctatttgcaactaacaatctcagattgttggcgctggcgtggtcaacggccacattggcctcaagtacatctacgtccgtctctttcgcggaacagaccgcatgcatcgccgggatttcgtgtctgttggctcttggattgccatcggcttgacctgctggatcattgcctggattattgcggacgcgatcccggtcttcagcgacctgctcagtcttatcgtaagtcttgctacagctgcgtatcagccaaattatatgattcctcgtaactaatgctttctgtccttccatcgcagagctccctttttgccagttggtttagttacggacttggtggtgtatactggctgcacattaactacgggaagtggttctcgtcgcccagaaaaatctgcctcgctatcataaacgtgctgattgttcttgttggcgggtgcatggtgagtggccttaccaatgtcatcgcaaatataccacttgcagttgctgacagattgtctactacagtgcggtctcggtctgtatgtctctggcaaggcaattcatgatgacgcttctaccaacacgttctcctgcgccagca

SEQ ID NO: 19117 - DNA, 766 bp, Emericella nidulans
cctggctcgtggggcatttgaaccatctgacagaggagcaggaggcgaagttaacagagtttaaggctttttgtgagaaggagggctactataagcctggaggtgagggggagaagccaagccatgatgatgcgacgatgctgtatgtttgctctaacatatacgcgccttaacaaagttggtggttaacatgtcttaataggcgatttctccgcgcacgcagatttgacgtgaatggggcttggggccagttcaaggatacggaagattggcggaaagagaatgctatcgaggctttatacgagaatattgatgtggactcttacgaggctgctaggaggatggtgagtttcctattattttttagttccgggtcgaatctaaccttaactttatggatatagtatccgcaatggactggccgtcgagtccgatcgggtattccggtgtacgtgtttgagatcaagcatttgaatagcaagaacatggccgcttacaatgcgactatggccgatccagaggccacggcggaaacacacaagtcttccgcagtcccgcagcggctcctgcggctgttcgctctttatgagaacctcctcaactttgtcatgccgctctgctcagaactaccccgtccgcatcctgagactcctatcgtgagctcgaacaatatcgtggatgtcagtggtgttggattgaagcagttttggaatctcaagggccacatgcaggatgccagtgtcctcgctactgcccattatcccga

SEQ ID NO: 19118 - DNA, 767 bp, Emericella nidulans
ttgcgactggtgcgcccatatcctaaacacctcgaatcctgaacacaagatcgaactcactgcccatctattctcaactttcaccgaaagggaggggacaccctcaccgatgaccatcattcgaggaagtcctgcgtcactccctcccatgccaccgcgggaaaacctcgtggaagtccggcctagcgccatgccaaaaccaggacgaggaggaagtctgaagagtaggatcgctatgctgcatgctctggccaacatcgagcagtgggccattgatctggctatagacatctgcgtgcggttcgcagagttccaaaccagtccaacagcgcaggagtctgcacggcaattaccccggacgttcttccacgactggctcaaggtagccaatgatgaggccaagcatttctcgttactgcggacccgcctggaggaaatgggttcctacttcggcgctctccccgttcaccacggcttgtgggaatctgctaccaagacagcgcacgatcttcgagcaaggatcagcatcatctcgctcgttcatgaagctcgtggtctcgatgtcaatccaatgaccattgccaagtttcgcaatgcgcgtgatgacgagagcgttcaagcgctcgagattatacacaatgatgagattacccatgtgacaaccggccatagatggcttacgtggatctgcgagcaagaacataccgacccagtggaggtatttcgctcgaacgtacgcaagtacttcgtcggaggcctcaaagagc

SEQ ID NO: 19119 - DNA, 767 bp, Emericella nidulans
cccgatacaatccacggcgagagcttgatctcaatacacacggagccaaagcaggcaatcgggcaacgtgcgtacttgtgtcggacattttcaccaggaaactctaggctctttaatgtcctctgggactgcatcacatatattgacgattataccataacacgcatcaatgaactcgggggaatcgacgcgattgttatctcccatcctcattattatacgactcatctcgtctgggcagagattttcgactgcccggtttacttgtcatctgaagatgaggaatgggctgtcgtgaaaggggacaagcaggtgtttttcggtgaaagttcactgtcatttgcaccgtcagggaattatgggggtgatgacggaagagcagatataattgtccttaagacgggcgggcatttcccgggaagtacggtgctgtggtggaggccgttgaagacgttgttgattgcggatacgattgcggttgtgccaagtggaaggtattgggttgataggccggctggaacagcgtcgtttacgtttatgtggtcatatccaaatatggtatgttttctgaatgacactgaatgggccctggctaacctgatagattccactatctgctgatgacgtgcatggtatctggaaggctatcaagcatacggagtttgatatcactcggggcgcgtttattggaatggagacggacacagacagcaagaagcgtctgttagacagtgctcaaatcttcgtcaaggcaatgggctatctcg

SEQ ID NO: 19120 - DNA, 767 bp, Emericella nidulans
gccgcggcgagagtcgaaattctccagaagctaggtgcgtcattgctggagaataagaatatttttggaccgtcgggaagaccaggggatcttgtcggtatgtcaacacttgtcacggcctgcctcctatgatgcgggcgagcagtgctatactaacaacaggcccatgcgaagactacttaactcgcaatggaagcagtagcctcgactacgccgagctctggagtaccctgcagacactcctcatcccgatctggccgtcggaccgaacgaaggtagccggaaagcccgtaggcgacgcctggcctttaatggcactacgcaagcacgagtcaaccgccggcatgccggtcgagacagcgacaattgctcccttccacaaactgacccagtggctggcctactcactcaaagtccctttcgagcggctgctgggcaccacatgggcgaacgcgcagctgggcactggactgcctgagtaccgcaatggcgggctctttgtcgacatgggcgtgctttcgctgaaacgcgaggcgatggaacgaggactccagaattcgggcggctccttaccctgctttggtgccggggatgacgagatcgtggagtggcgagcgatgacggttgcgctcctggatgtcctgcaccagcggatcctggagagcgggaagtttggcgatgtcaggctatccctgccgcagattctggaggctgggtcctggaaggccgggagggaacttgcggcccagaatcggccggagacgaga

SEQ ID NO: 19121 - DNA, 769 bp, Emericella nidulans
cgcggcacagcagtccgaatgacctctggattgtgatagagggaaacggtaagaaccgttcagcgcagaaggactcaactaacgaaatggaatagtctatgatgtagcagaatatcgtgaggaccatcccgggggtgatgaaattctccgccaatttgctggaaaggatgccacgacagagtttcaagacgccggccactcgaatgacgcctacgtgaaactgaagacgttgctcgtcggtagtctgcaatcgaaaaccctaccggaaaatcaacccgaagaaagttcacgtatcgtttcaattgccgtaagcgatagaggcaaaattccgaccaaacgacaggcaaggaatggaaatgacacgtcaaagtatggccagctgcctagcctagtgctcgcgggagggctagcattgttgttctttacactaaagcaacacccctggcaatctattcagggctatctttcgcaagcccaagtttcacgagttcagtcgagcggatgggtagggtttctcggcggattcctgactgccacaacattaaacactgctgccgcaacttttgtcggcttgacagccaaaaagactcttttgctacgacaccgcgagctggaggagtatccgcgagtaaagcagcattacctgccgcttcctccaaagaaacccggtatcagcggtgaaaacacccagcagtttctgacactagtggatcgccaatgcatcgcccccaatgtgtacaaggtgcggctccagggcgacggattggtg

SEQ ID NO: 19122 - DNA, 770 bp, Emericella nidulans
gccaaagcctgctcaagtatcgaatgacactgcggaaactacacgtgaaacggtggcggatgaggactgggatgatattgcggatgagctaccctacatcagcctgctgaataaagcacttccagaggatattcgcgtgctggcatggtgcccaaatccaccagaggattttgatgcgcgttactcctgtcgtgagcgtcactacaagtatttcttcacgcaacccgcattttccccgacaccgggccctcttgggcttcttccacggaagggtgatgcgcctccaaagtatccagaggggtggctagacatcgatgctatgcgtgaagctgctaagtattttgagggcgtgcatgactttcgcaacttttgtaaagttgatacaagcaagcaaattgaaaacttcgagcgaatcatatatcgtgccgacatcgagctacttgatcccaggaacagcccgttgggatacgtgaatcggccggaattcagcgcattaaactaccctgacacagattctttgacccagaaacctgcaggctcagtgcctcctggatgtcaggtatatgtgttcaatctgcaaggctccgcttttttgtggcatcaagtaagacacatggttggcattctctttcttgttggccaaggactggagtcaccatcagtcgtgcgcgaattgctcgacgtgacgaaaaacccgcgcaaaccgatgtacgagatggcatctgatgccccgctagttctttggaattgcgtctttccagcaaaggaca

SEQ ID NO: 19123 - DNA, 770 bp, Emericella nidulans
cgcggcttcaacgcagtcaacgcaagacattggactttttgcgagtagccagacattgattgtacttgccccggtactagtctgtgcgagtttgtatgtgctcctggggaggatcattcggtcgacgtgtgctttccagagccaggaccaggaccgggttgcagggagacgagtgactggtgccggtataaaagaagaaactggcgaagctgaaaagcgcatagaggtcaaagtcggcggcatagtgagggtttcgtacctcccaaaaatcttgatcacgcttgatgtcgctgcaatgcttacgcagggcggtgggagtgcgattgcgtcggctggggagtggaagggaacgctggaggatatcggaacgagcgtgctgattggggggctggccctgcaggttgctacttttacagtatttctgagtgttgttttttcgtttcatcagaagattctgagacacggagaagagggaatggggatggtgttgaggggggtttatattggaggattgttcatcatggtatgtcctttttgagattctctggtttcctcttgctagttcagagaacctggacgctaacaagtgctttcgcagatccgctccatcttccgcctcattgagttcgcccttggaacggagtcgtacatcatgacgaacgaatggccgctctatgtccttgaggctgtgccgatgctcgttgcgtttatggttctgagctggtatcacccatctagatggctccttgccagtagtgctggtgtatcga

SEQ ID NO: 19124 - DNA, 771 bp, Emericella nidulans
tcagtggtcgggcgcaaatgccattactcagtattcgccaacgatcttcggatacctgggcattgtcggagaggaggccactttcctggcgacaggcatctatggtattgtcaagtttgcgagcacgctggcctttgccctggtcattgtagacttcgttggccgccgccgatctctcctggtagggatcagcctgcagattctcacactggtctttgtcggagcatatttgggcgccaccaaagatatgacaatcgccggggttaaggcctctcgacatgctgaacgagcatcgacggcggccatcgttgcgatctacctgcatgccgtagcgtggagtataggctggttcagcattccctacctcattgggcccgagattttccccacgcgcatccgatccctgaatatgtccatctctatggccttgcactgggccttctactttggctgctccaaggcgatgcccagtttgctcgcggcgacacatcgctggggtgcattcctgtttttcagctgcatcggtgtgctggggttgatctatgtatcgcttgccatgccagtaagatgactctatcggtgacactacatgcgagtatactgacagtgtgcaggataccaccgggcgatcgctggaagcgttggataagctgtttgagcgaccatggtacacgatgtataaggttgcgtatgccaaccaggatgagctgcgggcagaacagccgggggaaatgtacagcaccataaaagggcttcagaccagtgctgagc

SEQ ID NO: 19125 - DNA, 771 bp, Emericella nidulans
aaagcgccgcaaggtcaacggcgacgatcctgctcctgccgatcgcgatctagaaataggcttgagcacgatggatgccaacaatccgccggaaaccccagatctctacctaaatgaatctctgcctccctacgatgaccacaggtcacccaaatatgaggatgttgatacagcgggctcgtcccgtcagtctacatggcagagtcgacttatgatttcgacttctggactaggtgttgccatgagcgaagaatcactgaaaagcctgcaatactgcttaacatggctgaggtgggccaatggcaggctaggaaagtccatcgtggctctgcaggaatctcttcaagagtgggagtctctttctcggaagaacggagatgcttctgccgatagccaagcctccaaccagaatctgctgtcacagcgcattcaagccctcaagcaagacgtgctggctacattaaagcaggtggtagatattgtctccaagtacgccggcggggcacttcccgagaatgcgcgcaatctggtccgccgccaccttacttcgctcccgcagcgcttccgaattgcatcgaccgcggtccctgcgccagacgagtccggcgcgtcatccgagccctccagcagtgcacgccggattctggtactcgctcaggagggtctggatatgatgtctcaagtcagcggtgtcgtaaatgagactcttgtcagtgctgacactggtgcgagcggctgggcgaagcgtcacgatagcaagaacgctgacgc

SEQ ID NO: 19126 - DNA, 771 bp, Emericella nidulans
gcaaatcagagaacgatccaaaatatgttactgagactgagctggacgcacggccgattggtgagagactccgtgtcttcctcttgcgccctttccaactgctctttctcgagcccatcgtcctctttatctcgctgtacatgtccgtcctctacggtctgctgtacatgttcttcgtcgcctatcctatagtttatgaaggtggcaagggctggagcgccgggactacgggtctcatgttcatcccgcttgctatcggcgttctgttgagcgccgcctgtgccccatttgtgaacaaccactacctatctctttactcaaaatacggcggcaagccacccgcggaatctcgtctcatcccaatgatgatctcctgttggtttattcccatcggcctgttcatcttcgcttggacttcgtaccccaatattcactggttcggtccaatgattggcggattccctgttggattcgggtttattttcctgtataactcagctaacaactatcttggtatgtaacaacctcatcacaaccatctgccgtcgcatttactaatgttcattcctgcagtggatacataccagcaccaagccgcctccgccctggcagccaagaccttcatccgttcgctctggggtgcctcgactgttcttttcacggagcagatgtacgaccggttgggcgatcaatgggccagctctttgcttgccttcctggccctggcctgctgtgcgattccgtacgtattctacgtcaagggcgctgcca

SEQ ID NO: 19127 - DNA, 771 bp, Emericella nidulans
tgcttttggccgcatcaccacctcatgaccctgacagtgcaacagaaatctgcaactgaacgcaacctgaaagagacagcagccgaaactcagcgactagcaactgacccgtcacttctctcctctctatcgcgcaaacatgcttttgcctcacacaacctacttaaagctgacacggaggctgctggagaggactttgaacgcaaacgggcttgggactggactgttgacgaatccgagaaatgggataggcggatggaaaaaaagcagcgccatcgagacgatgtcgcattccaggattatacccaggatgcacggaaagtgtacaagaggcagctacgggaaatgaaacctgacctggagggctatgagaacgaaaaaatggcagcgattgaaaaggctgcagcaagcggcgatctcgagattgttgaaaccaatgatggagaaatgattgcagtggataagaacggtactttctattccacagccgatacgattggatttaccgagagcaagcccgatcgtgctgctgtcgataaactagtcgcggatctgaggaaggccgaagaagtccgcctcaagaaacgcagagaccgccgtggcggcgacgaagatggcgatgtcacttacatcaacgaaaagaacaaacagttcaaccagaaattggctcgcttctataacaaggtttgtcctcacttccctctaagacttatgggctgagctaatcatctttcagtacactaccgaaatacgtgacagcttcgagcgagg

SEQ ID NO: 19128 - DNA, 771 bp, Emericella nidulans
gccagatcgctgcggttccttatgactggccgcacgatgcaacgctcacgccgtatacaactgcactggttatcattgatatgcaaaaagactgtcagcaactgcccatgccataacttccttgatgtgtctgaccatctcgcagtttgtgcgccaggtggatatatggagtttcaaggctatgacatatcacctgcacgagaactgataccaaagttacagcagctactgaacacatttaggtcagccgggtttccagtgtatcatacccgcgaaggtgattgatcccagagtttgctcgtgtcccaatctgacctcggccaggccaccgacctgatctgtcaacactttcaagccgagaaacatatcgatcacagaataattcatccggacttggaattggctcgcccggaccattaggtcgtcttctgattcgtggtgaactgggccatgacaccgttgacgaactgtatcctctccccggcgaaccggtaattgacaaacccggccgtggtgcctttgcgtacacggactttgagcttctcctccgaaacaaaggtatcaagaaccttgtcctcgcgggcgtgacgacggacgtatgcgtgtccacgacgatgcgcgaggccaatgaccggggattcgattgtgttatccttgaagatggtactgcagccagtgagccggcccttcacgtaagcacgatagaatcggtgaaaatggagggtggaatcttcggtgcagttgccaagctggaggatgtaatgcacgcgg

SEQ ID NO: 19129 - DNA, 772 bp, Emericella nidulans
cgccgaagccgatccttcctccgtcggttcaaagacacatgtctgaagcatacttgggtgctgcccctcctcatattgatcgttctcctcgccggatatgccgtcaatcccactccgtccaacccgctccactacgcgatcttcctgtcttatcccgagcctccgaaaactccaggcggcccggttatgtacggaaaaggcccgaaagatatcgcattcgtctccttctacatggtcgtcctttctttcactcgtgaatttctaatgcagcgtatgattcgtcccttcgccgtatactgtgggattcgtgggaagggtaaaaccgctaggttcatggagcaggtgtatacggctatctactttgccatctttggaccctatggtctttacgtgatgagccgcaccaacatctggtattttaacacgactgcaatgtttgaaggatttccccacagagagcacgaagggcttttcaaggcttattatctgctccaagcgagctactgggcccagcaggctattgttctccttctgcagctggagaagccacgaaaggacttcagggagcttgtgggccaccacatcatcaccctggctctcattgcattgagctacaggttccacttcacttacctcggtctcgctgtgtatatcactcacgacgtctctgactttttcctggcggtatgttacggaaaaccattatccacgtgtttcaatcagaacatgcgctaattctacatttagacttccaaaaccctcaactatctcg

SEQ ID NO: 19130 - DNA, 772 bp, Emericella nidulans
ggctggtgtttttgccggctcattgttttgggtgttcgtcagatatgtgctttatgtgttgccaggtaaggattccctggcaggttgacgccttgaaactatactgatatgcggtcctagcgacatattccacgaatcccttcctgaacctaggatttgtggtatttttctccctgacgacgtacttctacttctattccatggtcgcagatcctgggtatgtgccaaaacttggcagcaggaatgaacagcgagcagtgattggccagctgtttgaggagtggaagtttgatgaggagaatttctgcgtatactgcatgattcgaaggcctctgcgtagtaaacattgcaggcgctgctcgcggtgcgttgcaaagcatgatcagtaagaccttacctaactcaccgtagtaagacgctaatattcgtgtgcgcacagtcactgcccctggattgataactgcgtgggtgtcaataacttgcggcagtttgttctgtacattctctgcttggaaattggtattattttgttcctgcatttgactttcaactgtgagtaatagcaggccctgcttgagacaagaactaacgtggctgtaagatattaatggattgcccgccccggcggagccaatctgcaatattctgaatgaccagatctgcagctttgtgcttcgagacacctttacgcttctccttgatgtttggatagctattcagctggtctgggtgactatgctcggcgtcgttcagctcgttcaggtgtctcgga

SEQ ID NO: 19131 - DNA, 772 bp, Emericella nidulans
cccgctgtggaaagaggtgaggtgatttggttgaaactgacaacgatcgtaggtcaattcttcgatttactggaaatcttccggctgaacggattcccttccgacactcatgcgtacttgttcaatggcgactttgtggatcgtggctcgtggtctactgagattgccctcctcttgtacgcctacaagtggctgcggccaaacggcatcttcctgaaccgtggaaatcacgaaacggacgatatgaacaaggtatatggtttcgaaggtgaatgccgcgccaaatacaatgagacaatgttcaaggtcttctccgagtccttctcagcgctacctcttgccaccctgattggcaacaagtaccttgtcctccacggtggtttattctccgacgacaagacgacgctggacgatatccgaaagctcaaccgccacaaccagaagcaacccggtcagcaagggttgatgatggagatgctatggacggatccccagacagagcctggtcgcggacccagcaagcgaggtgttggtctccagttcggtccagatgtcacaaagcgcttctgcgagaacaacgggctggaagctatcatccgctcgcacgaggtgcgcatgaacgggtacgaggttgagcacgatggacggtgtatcaccgttttctctgctccgaaatactgcgatacgacagagaacaagggtgctttcatcaagatcggaccagagctcaagctcgaataccaggttttcgaggcggtgcctcacccagata

SEQ ID NO: 19132 - DNA, 773 bp, Emericella nidulans
tgcccctcgcgcatgagaatttggccctagtccgccaattcccagagacatgcaccatgacacttggtgtacatccttaccatgcaaaagaaatctatgtctctgaagcttcaggagccggcggcagaaccactgccgatggcgccaggtaccttcaggaactccggaatttcgctagaactatcctcgcagagcaaggcgttgcaggcgagtctccgctcgttgcctttggggagataggtttggactacgaatatattacacgttcggacaaggctacgcagcagcgcgcttttcgagaccagctggctattgcggtcgagcttcaactgcctttattcctgcacgtgcgggagtcctgtgccgatttcatctcaatcattaaaccctttttggcggatctcccacgtcgaggcctcgtgcactcctttgctggaacaaaggaggaaatgattcaactcacagctcttgggttcgatattagcgtgaacggtatctgttttcgtactgaggagcaattggaaatggtccggtctattcctctggataagctgcagctggaaactgatgcgccatggtgtgaaattcaggaaggagatgacaggatcaagcagtacctggagggtgccaggtcgcttccagggagcagaaaacacgggaagtttcggttaggcgaaatggtaaaagggaggaatgaaagctgtacgattgaaagagtcgccatggttgttgcagggttgaaggggatcgaggttgcagaggtcgcgacggct

SEQ ID NO: 19133 - DNA, 773 bp, Emericella nidulans
aggcgagcgccaagaatccctccgcacaagaaattggccgaatcaagaaaaagtcgattttttgatcgcatccacatcgacagcaacatcctgagcttaacggccatcatcaccttaccgagcctcgaagttcaggtcttgattggcatccagcctcatctgcagtatgtccattcctcaatccaattcacccgctaccacaagctaactggtcctcagcatctcaaacccggtctcactcaccaactcaccgtcaacatgtcttacaagcaggagaaggacttcggcgagggccctgtacgttgtcaattcctctaagtggtcgcgctggtcaatgccgactgcgactctattgtgctaacaatcggtcttcctgcatatagaaggtccacaaaatccgtatcaccctcacctcccgcaaggttgcctctctcgagtctgtgtgcgctgctctgatcgagcgtgcccgctccaagtcccttcaggtcaagggccccgtccgtcttcccaccaagaccctgcacatctccacccgtaagacccccaacggtgagggttccaagacctgggacaagtatgagatgcgcatccacaagcgtctcatcgagtatgtacctccggcccttactctggagccacgagcttcatgagaaaaatgaatgatggaaacaatactaatcataaagtacagcctcctcgctcccactgagaccgttaagcagatcatcatcaacatcgaggctggtgttgaggttgaggttaccattgccgcc

SEQ ID NO: 19134 - DNA, 774 bp, Emericella nidulans
ccggtggcacctggttcgataccctcaagaggtcattcgatgatgttcctgttgatgctgccaacgacaatgccattgctacctcggagttcctcgaagctgcagagtctctaaccacgcttttcggtatgccaaagcttactcgtggagcggaacagtgctaatcttttatctgcaatagacgtccttggttctgccgcattctcccccgttaagagcgacttgacaggcaacatcaaggtccgcttatccccgcgatcaggtgtcgctccgtctaacgtacgtgcagaaagttagagacaggcagctggctgcccccggcgaatcagagaccctccaatccctcgttctcaatgaattgaagacaaagaagcatgttgccacagaaggcctggtttggctcgttaggttagtgccgcccgaagtttaacgggaggaaagttgggtcgggaaagtaatcctatactaaaccttcatctcctttcctaggggtcttgaattcaccgccaaggctctccgccacaatctcgacaacggcacagagctgtctgactctttccgtgacgcgtatggcaaaaccctcaagcaacatcattctttcatgatcaagcccattttctccgcggccatgtcggcgactccttaccgaaaggacttctacgcgaagcttggcagcgacgaggggaaagtcaaggctgcccttgagcgtgaagtggcggctctagagaagagggttgagattttgaagtccttccaggagcgcaaggaggcgaa

SEQ ID NO: 19135 - DNA, 774 bp, Emericella nidulans
taccaggaaatgtcatctattttgccggatacgactggttgcgcaccgacgacaggagtccgatcaagcgcgtcgtccctggcgcatacgttccattcgttgcgggagcagttgcgcgagttgcagcagccactgctataagtccgattgagatgttccggacgcggctgcaggcgacgcccggcactggcgcgggacatttcaaagccactttggagggcctgtatcaaatgacacaagccaaaggttacggctccttgtggcgggggttcactctcaccatgtggcgcgatgtgccattttctggactttactggtggggatatgaggaagtaaaaaaatcgatcatcgaggttcgaaagaaggcacgagggcataacccgccacagaccgcgccctcgtcaacgcagctggggacctccgatgtggagggcaacacgttcttggatagctttgtcgcagggtcgatatcgggcgcactagccgcacttgtgacgacaccatttgacgttgggaaaacacgccagcaggtgttccgccacatgggagatgatgcgccgagcacagctggcagcaaactccctaaggggcctcttcagccggagcagctttctctgccaaagtttctcttgcacatcttccgtgaagaaggtgcggcgggtcttttccgtggctgggtagcccgttgtcttaaggtggccccgcgttgcgctatcatgatctcaacatacgaggttggcaagaagtttgcacgggatgtcaatgagcgacggc

SEQ ID NO: 19136 - DNA, 774 bp, Emericella nidulans
cctagtattatctatacacaaatattgaccccatccagcctagagaaagccatcctcaccaacttcaccctgcaggccagaagctcaccatctgcggtgccttcggcagtggcaaatcatcatcagtcctaaccctcctgcgcatgatcgacgtccagtaaggccacatcgccattgattgcacggacctttccactatgaagcccacaatgctgcactccctgatcactgtcgtgcctcaggaccctttcttcatacccggcacgaccctctgtttcaatctcatcctagacccccacccccgggcacagcgcgccgatgccgagtgcatggtctcgaccccctgcaaggtcaggctttgagacaagccccgcttccttggtggcctagatgccctcattgacgcaacgaaactgtcatacggcgagaagcaactcctcgcactggctagggccctggtggcagataaaccgatgctgattctggacgaggcgacgagcacgtgagcttttttcatctatgggctgaaatttccgggctgacttggttacgcagcgtcgactgggaaactgaagtccgcgtactggagatcatcaagcaccagtgcgcagcagagactgttctcacggtgatgcattggccgcgccatgtcgagtggctggatcgcattgcggtgacgcagaacggtcggctggtggagtttgatagcccggagagactgctggcgcgcgcatcgcggttccgagagctatatacgatgtctgttcgggcggc

SEQ ID NO: 19137 - DNA, 775 bp, Emericella nidulans
tgtcattatctccctactcgtactgaccactggcagtgcgcccgaatcgaggctcgtttgctcctcaataccagcgggtggaattgctttcgacgtccgctatcaaggcggcaacggctcttgagcgacaaggcaatgccgggcaatcgctgactgcgtctggccaagtgcggagagaggtacctttgccgagtcaggagaagaaggagggtgcaatgcaatatgtcctgtatgttacccgtatctctactgtacgttcgctaacaacgcaaggacgacgcttgaccaagtggcaaattgggcacggcaaagttcgctgtggcctatgacctttggactcgcatgttgtgccgtcgaaatgatgcacctgtccacgcccagatatgatcaagatcgcctcggaatcattttcagagcttcaccgcgacagtcggatgtcatgattgtcgctggtactttgacgaataagatggctccggctctccgacaggtttacgatcagatgcccgacccccgctgggttattagcatgggaagttgtgcaaacggtggtggctattaccactacagttactcggtcgtccgtggttgtgataggattgttcctgtcgatgtctatgtccccggctgtatgttgactctttcttccttctgttcattaactgtatcattaactgtaccaaggtccacccacatccgaggcattaatgtacggcatattccaacttcagaagaagatgaggcacacgaggataactcgcatgtggtaccggcg

SEQ ID NO: 19138 - DNA, 775 bp, Emericella nidulans
gccacgatccttcactgtttgggttcttcctccctctgatgactatcctgggccagctgctggatatcaatcaagccaggaaccacccgatgctcggtctcggtgttcttggagaaaaaacctgggaaactaggctacatgaagtgctcggccggctcgaccagtacgaagcgagcctctacggcttcgtcgcaaggtgcggtgaccgtaagtcaccgtcccttgcggacgacgacacggcacattgcttgcacgtccagacacggttctggctcgcaaagacagtcaaagcctacgcatcatattacatcgatctgctacacatcctccagaacggcaaatgggatccgcgctcgctcgcggcggatcacaccctatgggcctcgtctctgaacctcgcctctgctgttccgcaagcgctcagggcggccgagtcggtcagacaggttctgcatttcgacccgaacctcagctttatgccgacctttttcagcgcccaattgcttcaaggcggcttctactttcttgtccttcttgagcaactgcaggatcaggcaggagagccgttcttgagtgcttgcgaaaccatgctcagggctgccgagtcctgcacagtcactttaaataacgggtatctcaagggcttctgtctggttatgcggagtactgtagcgcaagcacgcggtcgtcccatcacccagtatgaggttcgacagcgatggagtgcaatagcagcactgcacgcttggtcggggtgaccggctaagcttggcgc

SEQ ID NO: 19139 - DNA, 775 bp, Emericella nidulans
gccgaggccgtcaacgacaagatcaagctttcccttgtgctccctcatcaggtactactcgcccactgaattcctaagatatgcttgaggatttgagactgacactggctcttaatagaccattttccggtccaccgacgtgtatgtcactgcactgccccgtagggccagcacacagccggcctcgctcacccttccgcgcccttgctgacgtctatttagcgtccaggtcaacattcccgctgagtctggagagatgggtgttcttgccaaccacggttccctctattgagcagctgaagcccggtctcgtcgagatcgttgaggagggcggtgccagcaagaagtttttccgtacgtccgaccgacgacacaaatcgcgtcccgtctgatatcaattcaattcgagatcacatttacgactagtaatatcgctgacatacttctgcacagtttctggcggtttcgctgttgtccagcccgactcccagctgagcatcaacgctgttgagggtttcccccttgaggacttcagcgccgaggtacgtcttctcacatatgcgcttgattaagtagcaattctaacgagggttttcgcccccagaacgtccgcgcccagcttgctgaggcccagaagatcgccagcggtaacggcagcgagcaggacattgccgaggccaagattgagattgaggtaagtggatgatatatagagacttatgcattgggccaacctcagctaaccggattataggttctggagagcctccaggcc

SEQ ID NO: 19140 - DNA, 775 bp, Emericella nidulans
tctactgatattgagaacattctttttgaagcctttgaaaaggcataaatagcctatacagattgtagttagaagattaggaccctcaagaccttcaatgcagtcgctcattaccgatatcaatcacatgatcaaaatcgacgctagcaaccacctccaaagccgacaattatttacaaggccattctgggattgctgggaacgagctggcagacaagcttgcaaagcttgggtcctctatatacagccctaacatccccccatcccctgcatacctacgacgggaggcaaaacagtggcttcgtacagaggcatatacagcatatgctagtaaggcaccccaagcctacaagaccctggatatcagaccccatacaaaggaaagccgcacccgcgagcacaagctgccccgttgggtacttggccgactcgtcgccgcccgtacaggccacggagactttacggcataccaccagcgttttaaccacacagactacctggagagctgctcctgtggcaagacaaagaccccagtacatttcttcttctgtccatacaccaggaaaagctggaaagatagatggagatgtataagggatggcccgtcaaaaacaatagattggctcttaagtacagctgccggggctgaagaattcagccgcatcgtgcaagaatcatcctttttcaaggatatatgcccgaactgggcccgccggagcgcttgaaaatgcgacagtccacacatctacctggaaaaagggtacggcccctcccc

SEQ ID NO: 19141 - DNA, 775 bp, Emericella nidulans
ccgcaacccttccctgtctagcacgattttggactctatatcgacttcccgaactctcgaatgtggcgccaatggacgactgctatactctcaccttgaaagatgctcaatatcatctcatgacgagcgggaataagagaatagaagctcgaaagcgttcggaaatagtatggattcaatgtcagaaactaacagttttatagcggccgcaacaagaacggccgcggccacgttaagcccgtgcgctgctccaactgcgctcgctgcgttcccaaggacaaggccatcaagagattcaccatccgcaacatggtcgagtctgctgccatccgtacgttgaccccgcctccgaatgaaccttcgatccgttgtgcgctgttgtaccgaaagagctggactacgtgattggaaacctcgagaatggcacggaatatcgaaaacatcgcacgcacgggtcggaaaactggatattcagagcgcaacagacactaacctgaactttccgctttctaggtgatatctccgacgcctccgtcttcgccgactacgccgtccccaagatgtacctcaagctgcagtactgcgtctcctgcgctatccacggcaagatcgttcggtacgccttctaccctgatgctttgaaatcgactccggcataactctggttctaacgatttttaatagtgtccgctcccgggaaggtcgtcgcaaccgtgcccctccccctcgcattaggtacaacaaggacggcaagaagctgaaccctccccaggcc

SEQ ID NO: 19142 - DNA, 776 bp, Emericella nidulans
cgcgccacgaaatggaacgcccccgaagctgtggctcggctgcagcgcacacttacctggcgccgggagtacggcattgagaaattgacagcggattatatctccattgagaacgagacaggaaaacaggtcctgctcggatatgatattcacggccggccgtgcctgtatttgctgccgtcgaaccagaatacggagaagagcgatcgccaagtgcagcatctggtattcatgcttgagcgtgcgattgaacttatgccggcggaccaggaaacgctcgcgttaatcgtggattatagccagaccaagtccggacaaaatgctagcattggacaggcgaaggatacagtgcactttttgcagaaccactatccggagaggttggggcgggcgctggttattaacagtgagtcctcccacttcttaacattgggagattggtagctaacaagactagtgccatttatcataatgggcttctttaaaatcatcacccctttcctcgaccccgttacccgcgagaaactcaagttcaacgagaatctaaccaaccacgtcccaccatcccagctcatgaagtccgtgggcggtgacgtcgagttcaagtacgaccacgcggcatattggcctgctctaaacaaacttaccgagctaaagcagaaggagtaccgcgagcgatggattaagggcggaaagcggatcggcgagtatgagcactaccttaagactggtgctagtcctagcatatctcagcgggaagccgaagcgaacggcag

SEQ ID NO: 19143 - DNA, 776 bp, Emericella nidulans
gcctctccaggcgaagggttgttgcgcctttgcgatttaaacaatggctgacaggtacttgtaatttccgcagggttacttgtctttctggaacgaaaacatctcctatgctttacgaggctgcattgtcattgaactggcactccgcggtcgggtgagcatgcagaaggattcctctcgacgaaggtttcccctggccgatagggtcattgaagttatcgacgacacattgacgggagaggtcttgctggacgaggcattgaagatgatgaagtcgagcgagaaaatgagcgtgaactcctggatcgacctgatgagcggtacgtataccaaccctctcgcttcaacagtgcatgctaattgctgtgcgcgcaccaacaggcgagacatggaacctgatgaagatcggatatcaactgaaacaagtgcgcgaacgtctggccaagggcttgtggacaagggcatcctccggacggagaaacgtaacttcctcctcttcgacatggccacccatcccgtcgccgacggcggcgccaaagaagatctaaaccgccgagtgcgcagcatctgcagcagtcgcaccgtcattctccctgccaaccaatggcttcctgaggacatcgagttccgttacctgcgcactattaccatggtgtgcgccgcctacgccgcgaacgtcttggagaatgcgctagtcacaatgagccatgaagcccgggagcgggcttttgcgcaggtggacgaacttctagccgagtattctcagtggccatttg

SEQ ID NO: 19144 - DNA, 776 bp, Emericella nidulans
cactctacacccataacgtatgttcttacacctcagggcccagaattagaattgggggtttagctaaccttgaatcttgcagccaacgcctcgctcgacgaccctcatcgctctagcaaagctccacaacctcgacgtcaaaatcatacacgcagaaaagaagaataaagaggcatttgaggagctttgcagatataatccactcgggcaagtccctacttttgtaggcgcagacgggttcgtgctgagtgaatgtattccattgactctttactgtactcagccccgacactccctggttaatgaaagaggactgaaaagtcctgctgagcagttgcatcccagagtcaggacccgataacaaaatccctcctaggcaatgacgaacgctcctcgctcaggatcctccaatggatgtcttttgcaaactccgacctctttccagcagtcggcggcgtcttcctcccacgcattgggcaacggcaaataatccagcaagatgacggggactcactgcgtgcgatgctgcagcggtgcaagtacctagatgagcatctgaagcgcagagatatcttgtgggggaaagtataacgattgcggattttttcgccgcgagtctgctcatgggagcgtttgcggcgtttaggagatccatgcaggagaggtttggagcactgtgcagctggtatgatggggtccttgagattggctggtttaagaaggttgcgggaggtgtcccggatttgggacttgagttagagattccagaggatata

SEQ ID NO: 19145 - DNA, 777 bp, Emericella nidulans
caatgcaggcgcgtctactccaagacctacaaggtccctcgtcgtcgtaagtgaacccaatcgaagcggaaacgccttgtcgaaatctacaagaatgaggctaacaatgcgcagctttcgagtcggctcgtctgttagtactctccggccactgatcagaagcgtgcttctgtttatgtcgtgtgttcttgttccctaacctggttatgctagtgactcggaactgaagattgtcggcgagtacggcctgcgcaacaagcgtgaggtgtggcgtgtccagtttaccctgtccaagattcgtcgtgctgctcggtatgtcaattcatatggatgaaaagggcgtagaatataggctaaccaacgaccgaatcagtgagctcctcaccctcgatgagaaggaccccaagcgtctgttcgaaggtaacgctttgatccgtcgtctggtccgcattggtgtgctcgatgagtcccgcatgaagctcgattacgtcctggccctccgtgtcgaggacttccttgagcgccgtcttcagacctgcgtctacaagcttggccttgccaagtccatccaccacgcccgtgtcctgatcaagcagcgtcacatccgtgtcggcaagcagattgtcaacgttccctcctacatggtccgtctcgactctcagaagcacatcgacttcgctcttacctctcccttcggtggtggtcgccctggtcgtgtccagcgcaagaaggctgctgctgctgccggtggcggtgatgacgagggcgaggaggacg

SEQ ID NO: 19146 - DNA, 777 bp, Emericella nidulans
caacctctcgcgcctgcaaacagaggcagtcaacccacaaaccagcctcattgataagctgtcgaccctgcaaatgtgcacagttatcaaccaggaagatcgccgtgttgcagccagcgtcaccccctgtctccccaggatcgcagcagctatcgacgccctggcgccacgcgttcggcgcggcggcagggtagtctacgtaggcgcaggaactagcggccggtcagtcaatcagatagcttccctaccaccgattggaagtagtagcaggagataatgactagggcgcgcttgcagactcggaatcctcgatgcctctgaaatcccgccaaccttcgccgcaccaccagagcagttcatcggcctgattgccggcggcgatgcagcgatccgccgcgcccaggagggcgctgaggacagcctcgcgctcgcggaggctgatatggccgcgctcgagctcagaccagagctcgacagcgtcgtcgggatcgcggcatcagggcgcaccccgtacgtcctggggtgtatcggtttcgcgaagcgcaagggatgtatcacgatcggggtggtgtgcgtggagccctctgcgctgggggaatccggggaggtggatttcttgatcgcccccttacctggcccagaggtggtgagtgggagcacgagactcaaggcgggcacggcgacaaagcttgtgctgaatatgctgagtactgggacgatgatccgggttgggaagacgtatgggaatacggtactgctcccttcaacctgttccca

SEQ ID NO: 19147 - DNA, 777 bp, Emericella nidulans
ccctctatccctgctgctgccacggatggcggagctgtacagaaggtgaagcccggcactcgtgttcccggccgaacatacgtccagccccagtgggtttgggattgtatcaatgagggaaagctccttcgacctgatctatatgcgccgggcgccactctgccgcctcatctgagcccatgggtcaaccccaagaagggtggatacgatcctcgtgctagcttggccgaacaggaagaagatggggaagctgatattgatgcggaggaagagagcgatgaagaaatggaagaagctggtgaagaaaaacccgcccctacggcggccaacgagtctgaagactctgaggatgagtccgttgatggcggcatggatgtcgctgaaactgatgacgacgacagcgagagcgaggaagaagaggaggaagaagatgagtttgccggtattgatgacgaagatgctggctccgaatcagaggacgaagaagagaccgctcgcacccagcaccagaaagaactcgaagccgaggccgcaggtctccccttctcgtctagtggtgctggcgacgatgcagcagccaagaagaagtcccaggcgaagaagcgggctgccaagaagcgtcaagaggaggaggagctggagagacagaagatgatgatgagccggaagaagcgaaagctattggagaagatgatgtattcgaacaagaagacggcggaggagtctgccaagttgcgctctaagcggaggaagatcgagaaaggtgccgcggggaag

SEQ ID NO: 19148 - DNA, 777 bp, Emericella nidulans
tcaacaaccggcgttgaagcagatgcagctcgatttgggccatgaggtacggaaaacgtgcgcgacctgtgggatggaatatgtgccgtccaacagcgaggacgcgtcgctccacaaaaaatttcacgacatgaactcgactggggtagacctaggcaaagcgttcatgcgggcgaacgcgtcccgatgggtttacgaggcgactcgctttgaggaggggtatgtggtgatagtggatcgcaaatcgtcacctacagcaaagaaccaggccaagaaggtcctggaggtcatcagcaaggagctgtcctctccggtgatcgaggatgataccctatggagccagacggagccaccgaaacatctgcgcaagaacggagcgtcggagaaggtggacagatacaaggtgttcttgcacatgaaggacagccggtgtgtgggcgcctgtttaactgagcgtatctgggagtctcacgcggtggataaggcatctatccagacggacggtgctgactcggccgtcactgttcgcgacgatacccatcccgcgatcgtggggatctcacgcatctggacgtctggctcttcacgtcgaaagggcattgcgatggatcttcttgactgcgtcgtgagcaacttcatttacgggatggaaatcccgaaggaacaggtagctttcagccagccaacaaacagcgggaagagcctagcccaagcattttttgggccagaaaacgaatggcatgtctacaaggagagttgatggttttgtgcacaatt

SEQ ID NO: 19149 - DNA, 778 bp, Emericella nidulans
accccgcgcctggtaacgatgcgttggattgcctgctaacccgagatttggcgcagaaaacaacattcacgatgagatgcaaaagcttattcgtacgtgcaactcttcaagtcgtacagaagtctggagtcaaccctctaacaccttctcgcgcagatagattcttcgtgcaccatctctccctcaactctgaagacgcccacatgcttcatatgaaatactacaaagagtacggtctcgccatagagggccttacgcgccaccacaagattgacccgctcgaattcaaccgccttgtcgatgacgccctcccactagacaacatcctcaagccggacccgaagctgcgccagctcctagaagatatcgaccgggacaaagtaaagctttggcttctgacaaacgcatacgtgaaccacggcaagcgggttgtgaagctgcttcaggtagacgatctgttcgagggcatcacatactgcgactacgcgaatccgccgcttatttgtaagccgtcccagttgatgtatgataaggcggagaaggacgccggcgctacggataagagtcagtgttattttgttggtatgtctttcttctcactgtggagggttggggtggactagatgctgacggatgcgaagatgactccggcctgaattgcaaggctgccgcggctcgcgggtggcaggtggcgcaccttgtagagccgggacttcctgtccctgagactccggcttcgcagttccagattcgaagcttggaggagctgcggacatgc

SEQ ID NO: 19150 - DNA, 778 bp, Emericella nidulans
cacaaccgcgagcccatcactcccaagctgctctggaagagtctctgcaactacgacctctggccaatttatatcattggactgacattccagaccccgatgatgccaccacagcagtatctgacgctcacactacgcgggctagggtttgacaccttcacaaccaatttgcttatcatcccaaaagagattcttcacatcacaacgatggtcctcctggcgtatacggcgaaagggcgaacgagttgacgcttatatccgtgctcggtcagatatgggcgttgcccttccttatatatatatacgttgtcgacattaataccgtgaataagtgggtggtggtatggtagtgatgactttgctactcggctatccaaacggtccgtccctctattcaaccatcaagcccaggagaacatcaaactaacatgagtacagcacacccaatccaagttggctggaactcgcgaaactcgaatactgcgcgttcccgcaccgtctccgctaccatgtataacatgtgcgtccaatcctccggcatcatcgcctccaacatctaccgcgaggacgatagcccgcgataccggcgtggcaaccgcgcacttgtggcccttgtaacagcgaacattaccatctactgcctgacgaaggtctgctatgtctggaagaacaagcggcgcgagaaaaagtggaacacgatgagtgagatgcagcagctggagtacctgagtacgactacggacgagggtaataagcgtttggctttcaggcttgctca

SEQ ID NO: 19151 - DNA, 778 bp, Emericella nidulans
cgatcgcatctgtcgaaaagggagttactatgaatccgatgccgctgacctcgtccgcgcgatcttgtctgcggtggcatatctacacgaccacggcatcgtacatcgggaccttaagccggagaaccttcttttccgaacgcctgaggacaacgcagacttgttgattgcggacttcggcttatctcggatcatggacgaggagcagcttcatgtccttaccacgacgtgtggtacgccgggatacatggcgcccgagatttttgataaaagcggtcatggaaagcctgtgtaggttttacccttcagacccgccctagccaagcatcggcaactaactcgaatgatggcacagcgacatatgggccatcggcgttatcacttatttcatgctctgcggctacactcccttcgaccgcgaaaccaaccttgaagaagtgcaggccattgcaactgcaaacttctcatttaccccagttgagtactggcgcggcgtctaccaagaagcccgtgacttcattaagcgctgtttaacagtcaatcccaagaagcgaatgaccgtccaccaagccctccagcacccctggatcaatccgacctacgacacaacagacgacctcggttctggcgaggatctcctccccaacatcaagaagaacttcaatgcccgccgtacgctgcacaaggctatcgataccgtccgtgccatcaacaagctccgcgagaacggcggtctcatgatggatggtataatgagtgttgatcccaagcctgagca

SEQ ID NO: 19152 - DNA, 779 bp, Emericella nidulans
aagctttggaaagctctacacgtacaaggtcagcaccgttttcatgttatccctatgagtcggaaagcccagcatatggtcgcagggctaactggcaacagcggagcccccgagccctaggcatccaagctgtcgcaaaatccatcggcttggagctggagcaagtcgagctgcagccggccaacggcgtcccagacttctactggaacctgaacccgctgggcaagaccccgacgtttgtcggcgcagacggcctggtgctgacggagtgtatggcgattgccctgcacggtgcgttcccccctcgacttacgatgatacgcttgcttttgtgctgaataacactcacaagagcagtgaccaacgaagactcgacgaccacgctcctgggcagcagctcgctcgacttcgtccagatcatccgctggatctcgttcaccaacacggatgtcgtcacccgcatggcgtcctgggtccggccgttgatcggctacacgccgtacagcaaggaggaggtgctcaaggcgcagcagcagacgacgcaggccatcggcgtcttcgaggacagcttgcgcgaccgcaagtatctcgtgggcgaccgcctgacgctggctgatatcatgtgtgtcagcttggtgtcgtttgggttcgcgcagatcttcgataaggagtggagggaggcctttccatacttttcgggctggtacatgatggttatgcatttacccatcatgaaggcagtggtggaggaggtgccgtttgtcgaggagggcttgccg

SEQ ID NO: 19153 - DNA, 781 bp, Emericella nidulans
cctccccatgacgcggtttgacgaagagattgatcagacctctgcaaggcccgggcaacaggcctacgagaagatggtagccgggatgtacatgggcgaactactgcggctcctcctcctccacttgcacgagtccagtgggtttttcaccgatgccgagattgaccggctacgaggctatggcacgatggattctgcgtctctgtcgcgaatggaagcgggaggatccgaggcagagcggatgagtgacgccaagtgtatattgaaggacttgtatgggattgaggcgaccgacgaagaggcaagggtttgctgcctcttgggggagattgtgtgcactcgtgcagcgaggttatatgcatgcggtattgcagcattgtgccggaaacagggcatcagcgagtgtgccgtcggagtcgacgggtcgacttttgagaagtactcgcagttccgcgaacgtgcggtcgatgccctgggcgagattctggactggcctgaagggcaacagcttgtgaagctggtcacggcagaggacgggtctggagtagggtctgctctgattggggccatcacactgaatcaatagaccattgtatagaatatagacagcgttgaatcattcgatgaccagattaggtggcaaactaatgatcaatcatactcctttggagaaatcctaagccggcgtatccactgaatcgatttattgggttaatgccaatgctgagcctggccttaatcatagatcatgtgctcaacattagacgcctggaggggttga

SEQ ID NO: 19154 - DNA, 781 bp, Emericella nidulans
ctcactaacaaactgatacagcgccatttgctatccgatcgccatgttactgtgggccatcggcctcctgctgatcttcggcctaccaaactactaccgccagaaacccggcaaagtaccctccttctacaaatcccttttcagacgcaagatcgtgctctggaactttgtcgccgtcatcctacagaacttcttcctgtcggctccctatggccgcaactggagtttcctctggacatcctcccacacaaagccctggcagattgtcatcctgtgtgtcatattctttggtcttctgtggtgcgcgttcctttacattgtcgctgttctttcgaagcagcactcctggtttttgccagtcttcgcatgcgggctcggcgccccccgcttcctgcaaatctggtggggtgtttctggcatcggacactaccttccctgggttgccggcgggtatactggcggcgcactagttagtcggagtatctggctgtggctaggtgtgctagattcaatccaggggttagggttcggaatcattctcctccaaaccctgacccggatgcatatgtgctttacgttgatcgtcagccaagtcctgggatctatagcaaccatcgttgcgagggcatgtgctccaaataatgttggtccgggacctgtgagtccagatatcacgaagggagcgggcgaactggcgaacgcctggttctgggttgcattgttctgtcagttgcttgtctgtgctgggttcttactgtttttccgcaaggagcaacttgcg

SEQ ID NO: 19155 - DNA, 782 bp, Emericella nidulans
gcccaatatgatcaaccgcacacatatcgggatgtttacccagatctggtctcaactgacgggcatgaacgtaatgatgctgtacatcacgtacgtctttggtatggccgcctttccggcaacgccaaccttgttgcctcgtcgattcagtacgtgattaacgtggtaatgaccatttttgccctggtcttcatcgaccgctggggtcgccgcatcccgctgctgatcggatccaccctgatgatgaccttcatgttcgcaaacgccggcatcatggcttcatacggcaagccagcgcccccgggcggagtcgacaacgtccctgaagagtcctgggacatgtcagaggccaagtccgcagccaagggggtcattgcatgcacctacctcttcgtcgcatcgttcgcgcctacgtggggtcctgtcagctggatctatccccccgagctgttccccttgcgccttcgcggtaaagccgtagccgtgacgaccgcctcaaactggatcttcaattttgcgctttcttactttgtgcctcctgcattcgagaacattaaatggaaagtgtacattgtattcggtgtcttctgcgccgctatgacactgcacgtcttcttcctctttcctgagacggccggcaagacccttgaggatgttgatgcgatgttccatacgaatgtcaagccatggcagaccagggtgcagtatcgcgatatcaagaatgtagagcgaggcggtgttggggctcggatgctcgagaaggagaacgccgttggggtgga

SEQ ID NO: 19156 - DNA, 782 bp, Emericella nidulans
gaacatcgccccctggctcatgaacaagggcatcgtcgcgacggagaaggtcggtggctggccggatcgtgtgatcggcccgtccaccgtgcccttccacgagactttccccacccccaaggccatgaccaaggacgacatcgagcagttcaagcgcgactggtttgatgcgtgcaagcgggccattgccgctggcgcggacttcatcgagatccacaatgcccacgggtatcttctctcgtctttcctatcaccgtcttccaacacgcgcaccgacgagtacggcggctcctttgagaaccgcatccggctctctctcgaaatcgcccaggtcacccgtgacgccgtcggccccaacgttcctgtttttctccgtgtctccgcgacggactggatcgaggagaccctccccgaggaatcgtggaagctctctgactccgtccgcttcgccgaagccctcgctgcccagggcgctattgacctgatcgacgtctcttccggcggtgtccacgccgcgcagaagatcaagtccgggccggctttccaggctcccttcgctgtggctatcaagaaggccgttggcgataagctccttgttgcgacggtgggcacgatcacgaacggtaagcaggcgaacaagctgcttgaggaggagggattggatgttgcgcttgtgggacgtggtttccagaaggatcccggtctggcgtggactttcgcgcagcatcttgatgttgagattgcgatggcgagtcagattcggtggggattcacaaggcgcg

SEQ ID NO: 19157 - DNA, 783 bp, Emericella nidulans
tggatactaccattagtagggtatctgggagtgataataggattctgctttctcactttagccataggtaagatatttccgcatctcatattttgggtatcatcaagaagattccatgcagcaaaactcgtgcacgcgaagtctcttcctagcgaccctcattaacagaaccttacagcatctggtctttattatctctcagaactcgttgaagaacatactgtcatagctcgccggcttttatctcgcctgatatacggcataataacgatccagattctgctccttcttgtggacaaattccccttctcactctccctcctcagtatcggctcccacatcgtctacgcaagcaatctccgccgctttcccatagtgaaactctcagacccgtttttcatcctttcctgtttcctcgttggcctcaaccactggctatggttccagcacttttcgaagcccaccacactgcaaaggagctctacgagctggcgacagccgtataatgttagccccaacgacatgccgacgtttacagaagtggcgtcatactttggactctgcgtgtggctagtgccttttgcgctgtttgttagtctgagtgcgggagagaacgtgctgcccaccatgggatctgaatatgcaactggcaaaccggttcccacggcggggttgagtcggggctctctaggtgctgatggtaagaataagaacaagggcatggcgaaggcgttagttgatggtgtgcgcgagtgggttagtgaaaacggggaattgatgggg

SEQ ID NO: 19158 - DNA, 783 bp, Emericella nidulans
cggtcccgcttctcgttttgggactggtccgactctatagcgtcaaaaacctggactacgcagaacatgtcacagaatacggcgtgcactggaattttttctttacgctggggtttctacctccatttgtggaactttttgagggcatcgccacgctaatcccatcgtatgaagtcctctcgcttgccgtcgcggtgctttaccaggtagcgcttgaatcgaccgacttgaagagttacatccttgtctctccacgagggcctgacctgctttcaaagaaccgcgaaggagtcttctccttcctgggatatctggccatcttccttgcgggacgtgctactggaatgcgaatcataccgggcggaatctccccgtcaaataccccacaacaggccaggaaacgcgtgcttactagtatagggttgcaagcaataggatacacggcgctatttgcattgaactctacatattttctagggtatggagccaacatccccgtctcgcgacgtctcgccaatatgccgtacgtcctctgggttgcagccttcaacaacgcccagctgtttctcttctgtctgattgaaaccatacttttcccttctgttcaccgagcgtcgggatcaggcaagaatgacgaagcgaagcgaacagattttgcgacgagcccgatattgacggccttcaaccgcgaaggacttgccgtgtttttagtcgccaatctacttactggcgcggtcaacttaactgttccaaccctggatgtggataaaacacgagccatgg

SEQ ID NO: 19159 - DNA, 783 bp, Emericella nidulans
tgcgccagaatgtcgagcagctgctcaactactctcaaaatgagaagaagcgtaacttcctcgagagccgtcgagctccagatcggtctgaagaactacgacccccagcgtgacaagcgtttctctggtaccatcaagctccctaccgtgcctcgccctggcatgaccatctggtacgtcgactctgcaatagaaacggggaggaagaacgagaacggataaggagaatggaaaatagttcggactgaggctgacgagtttaattgcagtgttcttggtgaccagcacgatctcgaccgtgccaagcaccacggcattgatgccatgtccgccgatgacctcaagaagctgaacaagaacaagaagctcatcaagaagcttgctcgcaagtacgatgccttccttgcttccgacggtctcatcaagcagatcccccgtctcttgggtcccggtctctccaagggttcgtctacacttttgtcgcctttcccatctcaagtgaaaagtatgcactgacaatccacagctggtaaattccctacccccgtctcccacaacgaggacatggccaacaaggtcaacgacgtcaagtccaccattaagttccagctcaagaaggttctttgccttggtgttgccgttggcaacgtcggcatgacccaggaggagcttgtcgccaacatcatgctggccatcaactacctcgtctctctgctcaagaagggctggcagaacgttgggtcccttgtcatcaaggcgaccatgtctcctccccgccgtgtc

SEQ ID NO: 19160 - DNA, 783 bp, Emericella nidulans
tcacgctcccaaccaacacgatgtttctcaactacactacgggcccagtctcgagtcggcggcgccccagtctcagtaccccccgaggtctctttaaaatttatcgatctgcctcaagtgcaaggccggggagcgggtaaagaccaacctaaggttgcagttgaagttaatgggccattgggtgggttgcgtcttgttttctcttttcgaggacgggctaacttgactgtcgcggcaggtcaattaacgttgaacatcccttcctttgtcaatattgcacacgatgagaaccttcggaaagcgtccctaactgtcgctgatcccgctgttccgcaccagcgtgctatgtggggtgtgtcctttccctgcccctagtaagatatatgtttgtctaacggggcggccgcatatggaaccacccgagcccacttgcagaactacatccttggagtgtcggaaggccatatttgcatcctgagtctggttggtgtcggatacagagctagcattgagccaacagcgaccaccgtcgagcccgagtaccccggtcagcaatttgtctccctcaaggctggatattcacacccgattgagctcggcattccagaaggcgttcaagcgagtacaccccagcctactcgtatccttctgcagggcagcgataagcaggtggtcacgcagtttgcggcggagatccgggaatggcgcaagcccgaaccgtacaagggcaagggtattttcatcaacggagagacaatcaagctgaaggcgaaaaagattcgg

SEQ ID NO: 19161 - DNA, 784 bp, Emericella nidulans
gctcccaagatcgccatcgtcttcgtacgtcattcagttgcattgctttacccgcaacctgtggagcatatactaacgaatggttttgctatagtactccatgtacggccacgttgagaagctggcccaggctgaactcaagggtattcaggccgccggtggtaatgccgacctctaccagatccaggagaccctgcctgaggaggtccttgccaagatgcacgctcctcccaagtcctctgtccccactctagagaagcccgagcagcttctggagtacgatgccgttctcttcggtatccctacccgttatggtaacttccctgcccagtggaaggccttctgggaccgcactggtggtatctgggctactggtggtttcttcggcaagtaggtaacacgaacagcggggaagtaatggaagtcattgacatctctatccaggtacgctggcctgttcgtctccacaggtacccttggtggtggccaggagtccactgcgatcgctgccatgagcaccctcacccatcacggtttcctctacgttcctcttggctacaagactgccttccctctcctctccaacctcgaagagatccacggtggtagcgcctggggcgctggtacctttgctgtgcgttttatttcttcaatggcgatgtagggttatggctaactgtgtctctagggtgccgatggctctcgccagcccaccaaacttgagctcgagatcgctgagactcagggcaagtccttctatgagcacgtctctcgtgtcaacttc

SEQ ID NO: 19162 - DNA, 784 bp, Emericella nidulans
gttcgacggcgcaggcggtaatctactacctattgaaaaacccacagtatctggctacggtcagaaaagagcttgatgaggcccaggcgaagggagaactctcggatgttatccagtatggcgaggcgacgaagttgccattcttgcaggcttgtgtgagtcacctacttccgggctcggttttttctcgtttcttgtggctactattctgtattctatatatgatgctaatctgtctggcgtggtgggtagttgaaagaagcataccgcttccaccctggtgtttgccataatctgcctcgtatctcacccaaggggggcatgacgattgcagggcgatatttccctgaaggcgtaaggctcaaggcccataaatacgccttccatactcttgatactgaaattaagcgaaactgcaggtcattctaagcgtccacccctgggttatacaccgcaacgccgacattttcggtgctgactgcgatacctacaaccccacccgctggctgcaaggcgacactaagaggatggactatttcttgatccacgtacgttcctccctgattgcctctctcgttcacctcatatatttaatgtactgatgaatacagtggggtgccggctacaaccaatgccctggccggaacctggcgcaattcgagctctccaaggtccttgcaactgtgctgcgagactacgatatcaaactcatgaatccgaagagcgagtggcgcttcgagactcggttcctggcagtgccgtatgggtggccgtgccagattca

SEQ ID NO: 19163 - DNA, 785 bp, Emericella nidulans
cgggcgcttgacaggacacaacgcgaacttgatagagaacgaacaaagctggaaaaccaggaaaagaaactcatacaggatattaagaagagcgcaaagaatggacagattggggcctgcaaaattcaggccaaagacctggtacgcacgcgaaggtatctcaccctgatttcttgctcgtagtttggccgccaaattgctgatgttattttcaattcggtacacagatatatccaaaagttctatcaaatgcgaacacaactacaggctatctccctgcgcattcaagtatgatgttttccacccctgacgcctggcagaagcttatgtgagcgtgatatagaccgttagaagcaacgaacagatgatgcagtcgatgaaaggtgcgaccatgttactggggagcatgaatcggcagatgaacctcccagcgctacagcggattgcgatggagttcgagcgagagaacgacataatggaccaacgacaggagatgatggatgacgcaattgacgaagcaactgggatagagggagaggaagaagaaggcgaagacattgtcaaggaagttttggatgaaattggggtggatctcagccaggcggttcgtattctcctgctggtttacgtagacatggatcgtactaatgcatcgttgaaacagctgggagagactccatcggggatacagaaagagtcggtcagtgagggccgggtggctcaagcgattggtgctggtggtgccggcggcgcaagtgacgatgacgacctccaagcaaggcttg

SEQ ID NO: 19164 - DNA, 785 bp, Emericella nidulans
gcatcaggccttctcggttccatctccttaacctgctggatttttctcttagtatgtgcagtgtcctgttttatctcagatatactcatcggtcacctacgagaccaagaatcaaataatgactaactccatcataaggtcccccaactaattgaaaactaccgcaacggcaatgccgaagccatctcgctcctcttcctcttcgtctggttcgtcggcgacattacgaacctcgccggtagcgcctgggcgggtcttgtccccgtcgtcgtcgcaatcgccgtctacttctgtatcgccgatggtgtcctaatcggccagtgcctttattaccgcgctcggaactcgcgcggcgccgccgcgcaccttcgcgaatcatcgtccgctacacccgagccaacgacgccactgcttggaagaagatacagcgatgcgctgcgtgaaggtgatggcagtcggcggcggagggactcgcggccatcgtacagcgctgtgaatggctctcagcaagcgcaattgccggatgatacgcttgcgaagctggttgaggagaataggatcgggcagggggctttcgtcaaaaattctagcagtgtcctggctatttgtgtcattggaatggttgggtggacggtcgcatggcaaactggggtttggaggcctgcgccgttgggaggtacgagtggaggcgtcgatatgcgcctggggcgcaggtgctggggtacataagtgctgtctgttacctggggtaagtttcctgatttctggatatcctgtagtttcga

SEQ ID NO: 19165 - DNA, 786 bp, Emericella nidulans
atgtctactccaaacatccctcatcaaggtgagttcggctgcccaggttctttttggcttggcctgcgtactaacttagatgacccagagttcttcgacttcacggaaggcttcggtgaggatttcaccgatccaaccatgctttcgcctcacctcgttccaaccggcatcatggcgtctaaggattctctgggggacgtgcctgccggcactgtctcgcccagtgatcttttcatggatgcctcagctcctccatcgacatcgttcactgacctcagcacaccttcatttgattcccctggatactttagccaagacacttctcccgtgtttggcgctgacctggatcttgctcccggtcacgaagaatgggctccactgttcccttcgaatgatggaatgtcgatgccctttgacccgactggcttggaaattgcagctcctgttccagcagtgaaggctgaacctactgtctcctcccctactgtgaagcccgtctcgtcgcctgctcgttcgcccactgccacctctcgttccacaaccaaacactcgactgtcgccggagtaagcgcccggcgaagcaaacctcttcctccgatcaagtacgacgaatctgatcctgttgcagccaagcgtgcgcgaaatacagaggctgctcgcaagtctcgtgcccgtaagcttgagcgacagggagacatggagcgtcgtatcgctgaactctcaaaagagcttgaggaaacccgacagatggtggagttctggaaatctcaggctcaggcacgtgca

SEQ ID NO: 19166 - DNA, 786 bp, Emericella nidulans
tgcatggtttggcggcaatgagctaggcaatggcattgcggatgtgttgttcggggtcgtcaatcccagtggaaaacttcctctttctttcccgcggcgaatcgaagacaccccgacatatctcaattttggaagcgagagagggcaagtaacatatggcgagggcatttacgttggttaccgatactacgaaaaagtcctccgagatgtgctctatccctttgggtccgtccgctccactattatttctgtcgaaactacagctaactcgcttcgtccctcaggcacggtctgtcgtacacttcctttgcttattccgatttcgctgtcgacaccgcgtccgctacacttaatgttcgtaactcgggagacgtggctggagcagaagtcgtccagctgtatatcgctgccgatgcaacaacgtcgtccatcgcacgtccagtcaaggagctcaaaggatttgcaaaggtgactttgcagccaggtgagacgtgcagtgtgagcataccatttgatcggttcactactgcattttgggatcaggaagcacacgtgtggacgtgcgaaaaagggcagtatagagtcatggttgggtcgagcagccaaaacattctgctggaaggcgtgttggagataaaggagacgacgacctggtcaggcctgtgagctattgtaacgggctgatctcgagattgtcatcgacagcacatgtctaggccaaggccatctaattatttgccatctaggcgaattggaggctcttcgacgaacttgctggagagcagg

SEQ ID NO: 19167 - DNA, 787 bp, Emericella nidulans
tgccgaatgtctacggcgtgttcactcccagatacaaggactttatcgactccagtgacctggtcctgtgtttcgggccccatttttccaacaccaactcttacctctaccaaacagtcccgcaacagcacaagacgatcttcttccatccgacatcagtccagatcgacagcgagatcatccgtgatctgccagcaaaccacttcctaccgcagcttattgggcacctcgaagtagcgaaactcaatagatatacatgcaacttcgatcatccttcctccgtcgcgccgcccgatgtacaagcctccgacctcgtcacccaagccggcggtttctggcaccgaatgtcttcttttttccaggaaggggacatcatcctcgccgaaaccggaacggcatcatatggcgcaaacgaattccgactacccccgaaaacgcgtctgttcaaagcagtcacctggctgtctattggatacatgctccccgcaacgctcggtgcgagtctagcacagcacgaccttatcgctcgatccgagtaccacgatttcctcgaggcccggtccatcctattcatcggcgacggcagcttccagcttacagcgcaagagctggcaacgatcatccaccggaagctcaacgtcattatcttccttatcaacaacgacggatacaccattgagcgtgctatccatggtcgtaaccaaggctataacaatattacaccctggcgctacctcaagggcctcgagttctttggcgcccctactgagggagagtacgcggcgca

SEQ ID NO: 19168 - DNA, 787 bp, Emericella nidulans
ggccccatctctcgggcaatggcttgaattcccgggctaccagctcgctgaaacggtcgcgtcactgagcgaagacgtacgtaacacctccttatccgcacacccaccgtctatcattaaaacacagcctttactcactagaaagaggagtgggtagtgggtattaatagactgcgagcatggcgcaataaccgatctgaaatgcatctgcaagtcgccgcaatatccagcgccaactgctcgcccatcgtgcgcataccggcttccgaaccctagatgatgaggcgcgccctcgacgctggtgcacatgggataatgattcccatgtgcgagatagctgaacaagcccggtttattgtggcccggtgcaagtacccgccagctggaatccggggcgccggagcaatgtttgcgcatagtgcatttcaccagaatccgagggagtatcttacgactgcaaacgacaatatcgtcatcatcgtgcagattgagagtaggaaagcggttgaaaactgtgaggagattgcgggcgtggagggggtcgatatgctgttcgttgggccgaatgatctcgccagttccatggggcacgtggcttttgagcatccgcatatcgcggaggtgcaggacgcaattgcgagagttttgagggctgcaaagatgcacaataaatatgcggggcattttgcgttgggggcggaggaggttgcgagacggtggaagcagggttttgattttgtgaattgcggtgcggatattgtggcattgagcgcttggatggggaatg

SEQ ID NO: 19169 - DNA, 788 bp, Emericella nidulans
tctacattcaccagctatgaactatgcagctactccgctcttgtcatctacgcagtgcttgcaggctccctgtccctgaagcgggtcgacttcaaggccaaggtggtggatgctcccgagatcaaggcgatcctcggatcgggcgaggaccgtctcgccgcgctgaccggcgagatctcctctgggcctggagctcaagatgaagagatgaaagatgcttcttcgtcaggcgctaccaccgccgtcaaccttactgcctttggcggcaacaccggcattcaggcggaggctgagaaccctatcgacttcacacctctttccaacctggttagcagcttatacaacggcaactaccggactttcttcctagctctcgctgccgtggaggaccatttcttgacccaagacagatacttgtatgagcatcgggcctggttcgtgcgtgaaatgaggctcagagcctaccagcaactcctccagagttaccgggttgtggggttgaacagcatggccaatgatttcggcgttacggttgactatttggatcggtatgtcaaaagtatgtatatgttcagaacaaatagactgactccctacagggatcttgccaggttcatttcgaacaaccgaatcgcatgcacgatcgatcgcgtcaatggaattatcgagacgaacaggccggatgacaagaacaagcagtacgcggatgtggtcaaacacggggatgcgttaatcacgaaactccagaaatacggtcaagcagtgcgcctgaggggaagcgagcgcag

SEQ ID NO: 19170 - DNA, 789 bp, Emericella nidulans
ccaggtcgtgcgagccctctacagcgccgacaagccctacagcgtcatcgtcgctgcgcgatcgctctccaaggcgcaggatgccatccgtgccatccaggccgagtttcctgcctcgtccaataagctcacgccgctagttatcgatgtcgagtcggacgagtcaattgagaaggcgtacgaggaggtgcaggctgcattcgagaaactggatgcgcttgttaacaatgcaggtaggctactgccggctgacccctatacgtttatctgtccaaaagtcgtgtcagactgagggtgtttaggcgctcagtttgatcccctcatcgccagcaagaaactcaccccccgtgaagcctggaacaagtcatgggacgtcaacgtcaccggcgcccaggtcctgacgctaacattcgtcccgctcttgcttaagagcgccgatccgcgcctcctctttgtcacatccggcacctccatactcagccgcaacgagggcatcgctctccccgtcgaccgctcccccgaggccgggtggcccaagagcaagacggcgatcgacgtggcctcctaccgcagcgcgaagacaggtctgaacatgatgatgcgcgagtgggagcggacgctgaagaatgacggggtgaaggtatttgcgattagtcccgggtttttggcgactgggttgggcgggctcggcgctgaagcgctgaggaagtttggggcgggcgagcccgatgctgcgggaccgttgtttcgcgacgtgattgaggggaggagggatgcagatgccggcag

SEQ ID NO: 19171 - DNA, 790 bp, Emericella nidulans
cattcgccatgccagacccaaacaatccgactgaggcgcccctctccacaaaatctcacgtcctagagaccgctgccgctgcaacccagaacttcacaccagtcaaccagatctgcgcgcatttgcacgccttccacgtctacgctgacgaccccacacgctgtgtcgatgcgaaccattactgtacgcatttgacagagggtacgtctcccggcctcatctaacttttgatcagtttttgaacaaggtgttgtgctgcgcagatatccgccaatgcctcatctacgacagcccgaacaagggcgcccggctaatcggggtcgaatacatggtctccccgcgcattttcgacactttaccttctgaagagcgaaagctctggcatacgcacacctacgaagtgaaatcaggtatgctgatcatgccgactccggccggtttaccaaacgcagcatgggaagctgcggagacgagcgaaatgcgcgacatcatcccgctctacggcaagacgtatcacctttggcaggttgaccgtggtgatccggtcccgctaggcgagccgaagctcatgttgagctttacagatgaggagaaggtgaagaatgcagtacccggggggctggatgaattggttaaggagcgagatcgagcgtttggagtagatacgaaggtgaagagggagaagagggcagacattgaggctacagagaaacatcctggtatgtcctggtttccaagtttgcttcagacttggccctagccggtgctaattacgcgcagatgcggacgc

SEQ ID NO: 19172 - DNA, 791 bp, Emericella nidulans
gtgtcgcggcgctcgtcttccgccccaacgagatcgatgtcgttggccgccagaaactcgacccggcccaggactggtcctacaacttcgccgagctcctcggtaagggcggtgcgaacaacgccgacttccacgacctcctccgtctttacctcgctctccacggcgaccacgagggcggcaacgtttccgcccacgcaacccatcttgtcagttctgctctttccgacccgttcctcagttactccgccggtctgctcggtctagccgggcccctgcacggtctcgcagcccaggaagatcgttcgctggatcctagcgatgcaggagaaaattggcaccaaattcaccgacgaggacgtccgcgcgtacctctgggacacgcttaagtctggccgtgttgttcctggatacggtcacggtgtgctccgcaagccggatccccgcttccaggccctcatggacttcgccgccacgaggaaggatgtcctcgccaacccggtcttccagctcgtcaagaagaactcagagattgcccctggagtgctcactgagcatggaaaggtaccgtatcgtccctatcacaagacgcttcagctaatattgtgcttagaccaagaacccccaccccaacgtcgacgccgcctcaggcgtgctcttctaccactacggattccagcagccgctctactatactgtgacattcggtgtgtcgcgtgctctgggtcccctcgtgcagctgatctgggaccgcgcgcttggcctccccattgagcggccgaagagcatca

SEQ ID NO: 19173 - DNA, 791 bp, Emericella nidulans
ggggattcgaaacccggtccttctagccggaatgttcgcggtgtcctccccaagctggctgcagcagtgtccaatgctgggggtctgggagtcattggaggcggcacttacacgctagaccagctgcgcaaggcgttggaagagctgaaaggctatttggtagacaaaaacagcctgtttggcgttgatctgctcatacctcaggtgggcggtaatgcgcgaaagtcaaagtccacaaccctaatggtacgcttagctctaacaaaggtcctccaaagttacgattactcgcatgaaaagcccgatgggctgattgagatcatcatcgagagtggcgccaaactgttcgtgtgcgccgtgggtattcctcctgcccgggtcgtcaagcgattgcatgaaggtggtgtgctgtacatgaatatggtttgccatccacaccacgcgcaaaaggtaattgacgccgtgcagacttgctctgctcccggggaggagaaggcggcgggcatacgggggatattcccacagtcattctgatccctgctgtcgaaaaagtaatcggtaaccagaagagtaagttcacggaccggcaaatcatccttgttgcagctgggggcctcttcaacggacagtctctggcggcggccctcatgctgggggcgagtgcagtctggatagggacccgatttattctctgcgatgaggctgggtcgtcttcctcgcaccagcaagccgttcaagaagctggccatggcgatatcattcgtacaacggtcttcacgggacggccactg

SEQ ID NO: 19174 - DNA, 793 bp, Emericella nidulans
cgacaccgcgaacaccctcctcgctcgcgcaaagcggaccctcctcctccagaacgctcttattcccgcgtcttccacgaatcctgaactcctagtcctcgcccgtgagaccctcgagctcggcgccctctccgccatccgccagaccgacgccccggccttcactcgatactaccagcagctgcaaccgttttacgatctggagcgggaagggagcagcactcttgacacgagaacaagccagcgcagcaagattacaggactttacctcttgctgctacttagctctggagacgggtcaagcttccatacggttttggagggtttagttgaagaggcgagcttgaagggcgggaatgtcgaagatgatccgtttatcaaatatccagttaatttggagaggaatttaatggaggggagctatgataaggtctggcgcgagacgaattcagaaagggtgccatcggaggatttcgcgctgttttcgaacgtatgtcttgctacgattccgccgaataggtcggaatatcacacggaagagaattctttgctaatatatctttaggtgcttgttggaaccattcgcagcgagatcgcggattgctccgagaaggcgtacccatctctcccgatctccaacgccaaaaaccttctcttccttgagtctgaaggcgccgttatggagtttgctcagcagcgtggatggacacttcgtgatggacggatatactttcctgttgagccggaggcggccacccgctcagagaaggatatccttgtggccagcagcacg

SEQ ID NO: 19175 - DNA, 793 bp, Emericella nidulans
tcgtttacacacccatggttccaattcggacctatataaccctcacgctaaagagtgtagggtttgacactgtactgcccccagcactcccagcattcgaaaggctactgatggaaaatatggcagttcagcacaaacctcctcattatcccttacaatatcacacatatcctcctcctaaacctcctaacgcatctctctgaacggctcaatgagcgcgccctagtctcaagccttcaatccctttgggtcctcccctgcctgctcatcctgctcttctggtcaaatgcaatgatcgacccatggggcacgtatgcggccatgacaatcctgctctcatacccatactgccatgcgatcctggtcggctggacgagcaagaactcgaataatgtggggacgaggacggtgtcggcggctgtttataacagtactatcccacccttttcttttgctctattatgacctgggagcttgctgatatggagtacagtgtgcgtccagatgggcagcattattggaaataatatcttccgcgaaaacgatgcgccgctgtataaacgcgggtattctgtgctcctggggttgaacctactggggattatcctcttcatcgcgacaaaactctactatctcagacgaaacaaagagagggacactatctggaaaggcatgagcgaggaggtatccttttacccattctgccctagtcttcctcaattctagtctgcgaatgctgatacactgtactaggaacgagaagactatatcaggaacagccccgagacaggga

SEQ ID NO: 19176 - DNA, 793 bp, Emericella nidulans
ccgcattcctccatccccaacaaacgactttcttatctccccaagccaccttcacatctggccaggcaaggagttcatgttcattgcccttccctccgtcgacaaatcattcacctgcacgctcttcgcgccagcgagccactatgcccagctcgaacgctccacagaagacctcctccagttctttgacgagcactttcccggcgtctgtccccaactcatctccccttccgacctcacagcccagttcagagccaacccacacctccccctcattagcatcaaatgtgcaccacaccactacagctcctccgttgttattgttggcgacgcagcccacgcagtcctcccattttacgggcaaggcctaaacgccggccttgaagatatccaggttctcttcgacgcactagacaaacatggcgtctacaatgccaactctgatcaggccgcccgcgctctcgcccgccagtcagcattcgcagcgtacacggcttcccgcactgctgacgctcacgccatcaacgatctttcccgccaaaactacgtcgagatgcggtggggcgtcaaacaacccctctaccggctgcgcaagtacatcgaggaagcactctaccactaccttcccagcctaggctggcaaactcagtacacccgcgtcagcttcagcaatcagcgctactcggagatcatagctattaaccggagacagggacgcatactaggtgctgtcttcgggtcgacgttaatatcggtattagcggtcacgggtatctacttatggagacagcca

SEQ ID NO: 19177 - DNA, 794 bp, Emericella nidulans
tcattgccctccctggcgtatacgacaaactccttgacaccgtcacctcccgcattaaagccctccgcctcggttcagtcttactagacacaaagcccaacaacccaaacaacaagtcaggtgccccagacgtgggggccatgatctccccggcctctttctcccgcttggagtttctcattcagcgcgccgtcagccaaggtgctcgcctcgtcgctggtgggaaacaattcgaacacccaacctatccgctcggtcactatttcacaccgaccctccttgcagacgtcacgccctccatggaaattgcccaaacagagctcttcgcccccgtcttcctcatgatgcgtgcatcttccgtctccgacgcaatcaccatcgcaaattctacccaatacgcgctaggtgcctcggtatttggctacaacacgcgcgacgtgaatgcttgtgtctcaggaataaaggcaggcatggtctctgttaacgattttggcagctactacacagtacagctgccattcggcggcgtcaagggatctgggtatggccggtttgcgggcgaagaaggtctgcggggcgtaagtaatatcaaagcgatttgcgttgacaggttcccgcgccttatggcgacgaggattccgccgcgcgtggattatccgattatgaagggagaagcggagaaagagaatggggatggtgcatttgagatgtgcaagggggttgttgagacggggtatcagatcacgctggctgggagggtcagaggtattctgaggttgattgggaatatgtag

SEQ ID NO: 19178 - DNA, 796 bp, Emericella nidulans
tggacgccctcacatttccctcttctgaaaccccttttttagagccttacctcccaaaaccaaaatcaaacaatgctgacctccctttcacaaccctcacattcgcaacctcactggactcttctctagcactctccccagggacccgcacaattctttcaggcccgcagtccaaagcaatgacgcactacctgcgccgccaccacgacgcaattctcgtgggcgtgggaacagcagtcgcagataatccaggcttgaattgtcggattcagggagttggaggatacggaggggaagggttacagggccagccgcggcccattgtgcttgatccgtctgctaggtgggagtttgatgagcaatcgaaaatccttcagcttgcccgggaaggccgtggacgagctccttggattattacgggctctggagtggcagttcaccaggacagaaagagtctgttggaaagccacggagggaagtttatctcccttgatgttactgaagggaaagggtttgactgggcttgtttgttgcggtgtcttaagagggaggggctcgagagccttatgattgaagggggagggtcggtcatcaattccctgcttgagccagagtttcagcacttgattgactctgttattgtcacgattgcccctacctggctaggccaggggggtgtggttgtctctccaaagcggcgatttgataaaaccggctcggcgatggcggcgtcgcgactgaaggatgtgaaatggcatccttttggagaggatgttgtcctctgcggaaggatcgg

SEQ ID NO: 19179 - DNA, 796 bp, Emericella nidulans
ccaggtcgtcgacgccatcaaagatctcgtgcagtactgcaatttcgactgcaatgactccggaatcgccctacaggccatggacaattcccacgttgccctggtatcaatgctccttaaggcagagggtttctctccataccgctgcgaccgcaacatccccatcggtatcgatctggtctcgctgaccaaagtcctacgcgccgctcaaaacgaagatatccttactctgaaggcggacgactctcctgatgtcgttaacctgatgttcgagagcgcagagacggataggctgagtgaatacgatataaaattaatggacattgaccaggagcacttggctatcccggagacagagtacgctgctacgattgagatgccctcggcggagttccagaggatttgcagggatctgaatgccctttctgagtcaggtgcgtggctggctgtcatctctccaattacatcgagttttactgattagcgtctagtcgtcatcgaagctacaaaagaaggtgtcaagttctcctgccagggtgacatcggcagcggctccgtcacaatccgccagcacaccagcgtcgacaagcccgagcaaaatgtctccattgtcctcagtgaacctgtcgccctcacattctccctcaaatatctcgtcaacttctgcaaggctaccaacctttccagcaccgtcagcctctccctctcccaggaggtgcccctgctcgtcgagtacggtcttggaagcggccatctaaggttctacctcgctcccaaggtgagtctttccaaaaca

SEQ ID NO: 19180 - DNA, 796 bp, Emericella nidulans
tcgactttgatgcggggtgggcaagtggatctgacagactaggattccgatgagaaactcgaggaagaactgctggagaaagttcgtactcttaatagcgagcttgacaaaatggctcccaacacgcgtgcactggagcgcctcgagagcgtagagaacaaacttcgagctacagaaaaggactttgagcaagcacgaaagcgtgctcgaaaggctaaagatgacttcgaagaggtcatgcgtcgacgctcggagctcttcaacaaggccttctcgcacatttctgagcagattgggcctatctatagagaattgacccggagctcaaactaccccttgggaggacaagcgtaggttttgaccaaaactcgtttgagattccaatctaacccgaatagttacctggacatcgaagactccgacgagccatacctggacggcatcaagtatcacgctatgcctccactcaaacgttttcgagacatggagcacctgtcaggcggtgaaaagactatggccgctctggctcttctcttcgccatccattcataccagccgtcgcctttcttcgtcctggacgaggtcgatgctgcgctcgacaataccaacgttgctcggattgcaaactatatttacgaccatgcggcccctggaatgcagttcatcgtcattagtttgaagaacgggctgttccagaacagtgaggcattggtcggtatttaccgagaccaggtagaaaatagcagcaaatctctgacgcttgatgtaagtctggtcaaagtatatcctccgccgg

SEQ ID NO: 19181 - DNA, 796 bp, Emericella nidulans
cggccaatgggtcgcagaagatcgtcgaaattgacgatgagcgcaagcttcgtcctttcatggagaagcgcatgggcaccgaagtcagtcgaaccatccatctattcccgaagcacatatccgtcctacgcaaaagaaaacacaaatgaagaacgcacggtgaatgatatgagaattggtggctgatgcggcgtctttctggttattaggttcccggcgactctctcggtgacgaattcaagggttacctcttcaagatcactggtggtaacgacaagcaaggtacgactggatcttccgatatttggttgcaattctggcgtttgggcgtgggttatggatacgacaccgaaattaacttgtcgcgcggggagatcgtcaaactcggcagaggaacaaatggctaacgattttattttacaggtttccccatgaagcagggtggtatgtaacgactgccgcaaacaatccgactcccacgacaaagcaagaaactcactcgttcctcgtacagttctcctccccacccgtacccgccttctcctcgccgacggccacagctgctaccgcccccgccgcactggtgagcgcaagcgcaagagtgttcgtggtgccatcactggccaggacctcgccgtccttgccctcagcattgtcaagcagggtgagggggagcttcccggtctcaccgacactgtcgttcccaagcgtctcggtcccaagcgcgccaccaagatccgcaacttcttcggtcttgacaagaaggacgacgtccgcaagttcgtcatccgccgca

SEQ ID NO: 19182 - DNA, 797 bp, Emericella nidulans
tcttggttcttgatgaaaggcttcgggaggcgctctatgtacctcggtggggtggcgatgatgtgcgtctacctcttcaatattgggatactggatctagtgcgggagatggccggtgtaaaatgggcgcagtcatcgttgtgcattatctggctgtttacctactttctgagcgtcggaccgctgggatggtccattgcgccggaggtatcctcgacgaggcttcgttctaagacgatcgtgctggcgcagaacacgtactatatcgccattgtggttgcgaatgtcattgagccgtactttataaatcccaccgcttggaactggctaggcaagaccgacttcttctggttcggcactggactcgccacgttgatttggggtttctttaggcttacagagacgaaaggcaggacgtttgaagagctcgatatcatgtttgctgccaaggtgctgacgagaaggttcaaagcgtatcatgtcgatctatacgcggaagacctcaatattaaggacagtgcaaaggagagtaggtagggctagttgaaacagactccgaggataaggccaagcaagcgtgaatggagctctttagtaggacctgccacgagctagagtaggacatatcttgaggagacaacgttgaacactcgctatgaatcaatgtagacggccatcatatccctgcgtcatgggagtttgtccccggaacagacccagatcgagggtagcactggcgcagggtggcagagacggtggtggaggctgtacgctgtgctccaatctactacaataaa

SEQ ID NO: 19183 - DNA, 798 bp, Emericella nidulans
atgcagcagtacgtgcttctctccgttcttgtttacgctcaaactgacatttccacaggtggactggtgtcaacttcgtcttctacttcggtactaccttcttcaccaacgtatgtttccctgaaccctagaggatgttcaattagctaactatcgcagctcggcactatttccgaccccttcctcatcagtatgatcaccaccatcgtcaacgtcttctccactccgatctctttctacacgatggagaagattggtcgtcgtcctctccttctctggggcgccctgggcatggttatctgccagttcattgtcgccattgccggtgtcgttgatggatctaacaacaagaccgtcagcgctcagatcgcatttatctgcatttacatcttcttcttcgcctccacctggggtcccggtgcctgggtcgtcatcggcgagatctacccgttgccgatccgttcccgtggtgtcgctctctccactgcctccaactggctctggaactgcatcattgctgtcatcaccccctacatggtcgacgaggacaagggcaacctcaagtccaaggtgttcttcatctggggctccctctgcgcgtgcgcttttgtctacacctacttcctgattcccgagaccaagggtcttactcttgagcaggtcgacaagatgatggaggagaccacccctcgcacttcttccaagtggaagccccacggcaccttcgcggccgagatgggtatgactgagaaggatgtgactcagactgtggaggacattgctaagaaggcgtaaatg

SEQ ID NO: 19184 - DNA, 798 bp, Emericella nidulans
  unsure (1)..(798): unsure at all n locations
tgccctccattgtgccttcgtatctcttcgtcccgaccgcaaacttctcttcctcggtgagccgggctgctacaccgtttggacctcctccatcgggattccgccttcctccccccaagcgatgggatcaggaccccgagtcctctttggacaaggctagcaagtacttcctcatggcggagattttccggggaatgtacgttgttttggagcaattcttccgaccaccgtaagtcttcctcgcaatcggcattggatcctgtcgagagagggtgtgcgacgccacagctcgattgaacgcactatcttcaagagtccaaatatactgtgctaatgcggcttgctcagttacacgatcttctaccccttcgagaaggggccaatctcccctcggttccgttggtgaacacgcccctacgacgnctatcctactggcgaagagcgctgcattgcgtgcaagctctgtgaagctgtctgccctgcgcaggccatcaccattgaagctgaagagcgtgtggatggaagtcgccggacgacccgatatgacattgatatgaccaagtgtatctactgtggctactgccaggagagttgccccgtcgatgccatcgttgagagtacgttttccacatcttattgttactggactgtctgctgacaagtaatccagccgccaacgcagagtatgctactgagacccgcgaggaactgctatacaataaggagaagctcctcgccaatggtgacaaatgggagcctgagattgcagctgctgccagagccgatgcgccttaccga

SEQ ID NO: 19185 - DNA, 800 bp, Emericella nidulans
tggatcgttgaccacgcaagggctgcgcggcgtgttgggaagccggtcgtgcatgaggaatacggtgcgtctacctgccgtttctattttatatcaatttatattttttcccccggctgtcgagatatactgacggtgcaagtaaaggttggctcaccccacagggccgactggataatctcggcacggtgtcgaatataactcgtctagaggctgtgggcggttggcagagtattagtctgcgggagaagatgtccgatatgttctggcagtttggatactcggggtactcgtatggtcggaatcatgatgacgggtttaccatctacctggatgagtgagtcgaattccccgctgaagtatgaccttgctaacccttatagtgccgaggcgcaggagcttgtctacaagcatgcgaaggaggtgaacaagttgaaccggagacggtagatagagaatggtccaggatgtacttttacattgtcagattaaagcgactgctactcttcagctcggtctcttgtccagcttgctcttgtccatgacctctcccgtaaaaaatgcacctgctgcccacgctcccgtaagcttctggacagaagaaacaaaagaatgtatgagaggcgagacatcacttcttccctgtaatatctgaccactgcctctccacaaatcgagcggactgcaaataagtccttcctctctctgtgtcctttcagtttgactcccttgtcatcgagtcttgagggccttggcgcgaatagcgaggtgacagcctgcggtcccttcgagcgcctggt

SEQ ID NO: 19186 - DNA, 801 bp, Emericella nidulans
acccccgacggcgttgagatcccctatcgcctcgaaggctctacagatcctcactcatctgtcatcgttctcagtaactctatcctagttgattacaccatttgggactcgttcgtgaagagcttcctcgccgaggagcgcaaccgcaaattccgcatcctccgctacaacacgcgcggccggtccgctgctgccggcgaaacacccattaatgtcgacgtcttggcaggcgatatcatcgctctccttgatgccctgcgcatccctcaggctatcctgatcggcgtgagtctcggcggcgtgacggttctcaatacatccctgctctatccatcgcgcgtaaagacgtttatctcctgcgatacaaacagctctgctcctgaaacaaaccggaaagcgtggaacgaccgtgccgcaatcgccgagtctgagggcgccactcacccagagacgaaggagcccattatcggtgaggagttgtccgaggttacggtgcgccgatggttcaccgagaaatcttacgagacacagcctgaagttccagcgaaggtgaaagatgttgttcgtgcgaacagccttgtcgggtttaagaaggcgatgcaggcgctctgtgcatatgatgtgcgcgagagaatgcagaaggcgtccgtcaaggggttgtttgtggcgggtgatagtgatggtgtcctgccgaagacgatgaagcagatggcggaggatttgaaggttgaggggggtgcggagctgaagattgtccctggagctgggcacctgcccatggttgagcagccggaggcgttc

SEQ ID NO: 19187 - DNA, 801 bp, Emericella nidulans
ctccttttcgactgtcggacttttgttgtttgatcttcagcttctcatcttttgcttcttggtcttattgatcttttccatatttattgtttcttcacctgcatttttccacagcgtccattccttcttttgagactatcccaggaaacggggtgttgacaccatcatacgctcgtttgcatcgcaacattgtcgctctttaatatctcatcaatactgcaatatattgttaattaaataatcctaataaagtcaccagaaatgcgctttcagacactcccagccctggccctggccctaataaacctcaccaccgcaggcgccacatcaataaacgacttttcctgccgctccgggaacaacagcaaccccattgttttccttgggggccttggtgcaacctactatgaagacctgaacctgctgcaagccttcctccaaaaccaaggctactgcacctacgcccaaacctacggcgcatacgatgggttcccctttgttggcggtctgcggcccatcgccgactccgcatctgaaataacggcctatatcagggaagtgcacgagcagacgggcgcagataaagtcgatatagtaggacactccgaaggcggaatgcaagccctatatgtgccgaaattcgaggacgggattgccgagatcgtagaaaggattgttgctattgcaccaccgacgcgcggaactacattcattgggctgtataacctagcttacatccttggcgatgcgtcgagagtgctcgttagccagctactacatcttttcggttgccctgcctgc

SEQ ID NO: 19188 - DNA, 801 bp, Emericella nidulans
tcgccccgttcctgtcgttcgtgagttattggaatgcgcttgaatatacctctacatcgtccatgctgacaatcaatttaaatacaggcaggaattgctgcagccgtaagtgccaaaccagcaagcgattattcaacttctggactaacgaagccgcattagatgatattcggatgtacgttctcaaaactcgcagcttgctgcagaatcaccatggctcactgatacagcggccggagcggcatatggaacagcgaaagccggtatcggaatcgccggtgtgggaacgttcaggcctgatctaatcatgaaggtaggaaatgcgtgcttggtataccctgctcttgttagtttccgtgctaattgccgcgccatgacagtccttgattcccgtcgttatgtccggtatcatcgcagtctacggtctagtcattgccgtccttatccagggcgatgtcactgcgccgacagggagtgaaccgtcattgagcttatatgcgtacgtgaagggatgccctctactcggacctactctaaccgcaagaaaggggttgcatgcatctggcgtcaggtctgtcggtcggcctcgctggaatagctgccggatacacgatcggaatcgttggagatgccgtaagcagaaaccgagtggccacgaacgtcaaactagctaacgaatgatacagggagttcgcgcttacatgcagcaatccagagtctacgtcggcatgattctcattttgattttcggtgaagttcttgggctttatgggtacgtgtggtcgaagctgaaaggctgcc

SEQ ID NO: 19189 - DNA, 802 bp, Emericella nidulans
agtgccggatatgcaaagcatctactttacgacgacaatcaaacttgtgtcgacgtaaaatgtccgatggcacagcttatttggcagtaagattatcctggctgctggtgccgccaccgggagttcgttggacctggagaatcagattgtggcgaagggtcatgtggtgggccatattcaacttacgccagatgaggtcgatgagtttatcgacatgcctattcttgatcatatgaaggaggcacgtcactgcggcggtgtatcaggaaagcgctaacaaactactaggcatccttttcccgccccaggaggatgggatcatgcaaattggtgcagtccatttcgttactaacaacgccaaatccttcaatgggaatatcacttccctgataccgttccgacaaccctaaggatgggacacctgttgtagttgaagctcggcttcgtaagtggatggagacgtgcgtgcctaagccgctcatcaggaatggattgagactcgaatttgctggttcgtcagctctaatcgtcgagctatattcaagcactgacttaatcattctagggacggggacatggccgactaccacttcctgatcacaccccatctgcggcacaagaatctcgacatcgcaataggcgctccgcgcatggattcaagttcctccccgttatcggaaagtaccttgtagagatgttagaggggacgctggacccggaaatcgcgaagaagtggagatggtggcctggccttgagctttcggactacactacgaatcctcatccggaaaaaccagaggat

SEQ ID NO: 19190 - DNA, 802 bp, Emericella nidulans
ccgtcaccgagatcacatacacgactgtcactacctgccctgcaacaaccacaatcaccagcggcgattccacaatcacgtcaacttacaccacgatctctacgcagaccctgacttctacctcaaccatcgccgtgccaacctctgtctctcctgaggaaactccttcaaccccctcggagacagaaacctcctctacccccgtcccaacgacctcttgccccaacgttgttcctaaatgtatcaatacctggctcaacctcatcccggactgcaagtccaacagcgatatcacctgcttctgcccctcatccgagttcaccgagaaggttatctcttgtatccaggcatggggtgctgatgcagacgaggttcaagccgctctctcctacatggctggtatctgcgccgcttatgtccctgagaaccccggaatcatcaccaatgttcctacgacgatcaccctcaccccgcctcccgccgcgacgcctacggatgtgagccctgaacagactggctctgaatcgcagtctccggttcccacggcccctccatgcacgacaattacttactcaacgtacaccgtcaccgtgccgcaagttggattctccactgccacggtcacggagactgctgggtcgggcgtcaacccggtgcagacatctactatcgagctagttccccagcctaccgcggcgccgacttctggctctgattccggctccggctcgggagctgggtcaaccaccctcgccaacccctggacaacaaccctggccacaaacacgccgtcgcagaccgt

SEQ ID NO: 19191 - DNA, 803 bp, Emericella nidulans
gcccaatcaagaatcaagaagctggagaggatgcccgtattgacaccaccggaaagcgactatgttgtgcacttcaaattccccgaagtagagaagctctctccgccaattgtgcagatgaccgaagttgcgttcggatacacgaaagacaagcttctgctgaagaatgttgaccttgatgttcaactcgactcgcgtatcggtatcgttgggccgaacggtgctggtaaaaccacggtgctcaaattgctcactgggcagcttgaacctacttccggtctcatgtcacagcatccacggttgcgcatcggctactttgcgcagcaccacgtcgacgctctggatttgacgaccagtgctgtgagcttcatggccaaaacatatcctgggaaaacagatgaggagtaccgtcggcaccttggagcgtaagttcctccacctatatggaaggctagtactaacggctgcagatttggtatcaccggtatgaccggcctccagcgcatggagttgctctctggaggtcaaaagtctcgtgttgtttcgcctgcttgtcattaacaaatccacacatccttgttctcgacgagccctctaaccatttggatattgaaggtatggacgcactgtctgaggcgctgcagaagtttgaaggaggtgttgtgatggtgtctcacgatgtgacaatgttgcggaatgtctgcaccagtctctgggtctgcgacaagggaacagtgcagaagttcgacggcactgttgacgcgtacaagaagaagattagcgcacaagcagacgaggctggc

SEQ ID NO: 19192 - DNA, 803 bp, Emericella nidulans
tccagagcgggctcgaaatgttacgaaggacagaacgagtaagggacgagtggttgcaagaacgaacgcccaaagcaaggtcttccgaaaccgaaaataaccgtgagcggctgatctcgtcgctgcgtaaaacttgcaattcgcatgagaagaagttgctaaacggcgtggttgatgcaaaaagcattcgcactacttttgctgatgtacatgtaccgcccgaaacgattgacgcactcaaaacactgacttccttgtcccttatccgtcctgaagctttcacctacggtgtgctagctacggacaagataccgggtctgcttctttatggaccgccgggcactggtaaaactctactcgcaaaggcagtggcccgcgaaagtggtgccactgtgctcgaagtcagtggatccgaggtatatgatatgtatgtgggtgaaggggagaagaacgtcaaggccattttcacactagccaaaaagctcaatccgtgtgtcgttttcatagatgaggccgacgctatcttctgttctcgtactggagccagcagccgcacatcccaccgggaactgatcaatcaattcttgcgagaatgggatggaatgaacgacctttcaaccttcatcatggtcgccacaaataggccgttcgacctagacgatgcagttctccgtcgtcttcctagacggctactggtggaccttcctacagagcaagaccgtttggcaatcctgaaaatccatctcaaagatgaagcactggatgcctcagtcgaccttgccgaactggcacgtcgcactccg

SEQ ID NO: 19193 - DNA, 804 bp, Emericella nidulans
tcagtcacgcattcgacgaggcccggtcttatctccaggtccgggcgaatctaggtccgtttcggggactcgtgaagaataccaagtttgttgacgatgtaattgtgcatgcggctgttgacgagttcgtctatgaggctctggagcaacgtaggagtccggctcatgagaatagaggcaagctggggagagggtgtgggaatgagagcgagagcgagggctggtatgaccttctctcccagctagccgacacagtcagcgacggcgtgcagattcgcagccagctgctgcacgtgcttttggccgcgagggataccacagcaagactgttgagcagtgtcttctatatgcttgcacggcatccgagcgtctggcggaaactggagagggaggtgcttgtagagtttggccttgcaacccagggagatgggaaatgcccattaccgacatatacccagctccgcgagatgaagtatgtgcgggcagtgttgaatgaaggtatgcagaacccaccacgccttatcccgtgacttgtatttggtgcctgggcggctggctaacacaaggatgcacacgcccaaccttcagccctccgcctcctccctccagtccctacgaacatccggtgcgcaacacaacacacattcctcccgcgcggcggaggcgtcgacggatgccagcctatattcgtggccaagaaggcgatcgtgcattattctaccggacgatgcaaaggtttacggaaatctacggggacgacgccgagcagtttcgtccagagcggtggttgcagcctgcagaggg

SEQ ID NO: 19194 - DNA, 804 bp, Emericella nidulans
cggtccggctgatggtcgatacgaagaagaacaccgctgtgactctcgttcaggagttcgtgcgtctacgacccggccgtgaggataagcgactgggctatctcctccatctgtgcaaggaggtctacacaggacgagtgattgttttcttccgccaaaagaaagaagcgcatcgggtgcgcattgtatttggactccttgggcttaaagccgcagagcttcacggtagcatgagccaagaacaggttagtcctgaggcccctaaagatgtcaataacagctgctgacatgccacagcgaatcaaaagcgtcgagagtttccgagacggaaatgtgaacttccttcttgccacagatctcgcctctcgtggtctcgatatcaaaggcgtcgaaactgtcatcaactacgaagccccgcaaagccacgaaatttacgtccaccgtgtcggtcgaacagcgcgtgccggtcgttccggtcgcgcctgtaccatcgcagctgaaccagaccgcaaggttgtcaaggcagctgttaaggctggtaaagcacaaggcgccaagattgtcagccgcgtagttgacccgtctgtcgctgacgactgggcctccaaagcgaaagacatggaggaggagattgacgctgtgctggaagaggagaagctggagaagcagcttgcgcaggcggagatgcaggtgacgaagggcgagaacctgattaagcacgaggcggagatcaagtcgaggccaaagcgtacgtggtttgagacagagagagagaagcgtgttgcgaagaagatcggggccgcg

SEQ ID NO: 19195 - DNA, 805 bp, Emericella nidulans
ccaaggacactgctcctcaccgtcaacggataataatgaagactatcaatttcattaccgggaacaagaataaattagctgaagtcagagctataataggcaacgtggttgacgtccagaaccaaacagtcgacgtacctgagatacaaggcactattgaagaaatagcaaaagagaagtgcaggcatgccgccaacgcagtgagtggcataaagtagcctactttggagaagacatattaaccgtacaataggtgggaggcccagtattgaccgaagatactgctttaggttttcatgctctgaaaggcctgcctgggccgtacatgtacgattatctttgcgcgtcaagcaatttgatataatttactacgaactgacaccgtccgacatagcaaattctttcttgaggcattgggtcatgaggggctgaacaaaatgctggacggctttgagtcgagaggagcagaagccgtgtgtacttttgcattctccccaggcccgggatcggagccaattctatttcagggacgaacggaggtatggcagtaactctataactgttatattataaacaaggatctgatttcgactctcaagggagttattgtaagccccaggggaccggcaaattttggtacatccctacctgatcaccgacgactgattctgacgggcttattactaactctctttttctcacaggttgggacccaatattcgagtatgaaggccagacgtacgcagagatgaccaaggaggaaaaggtgctgccctttacctttttctgcgcggtgctgttcaca

SEQ ID NO: 19196 - DNA, 805 bp, Emericella nidulans
catcccaacccgccgtgaactcgtccgtgaagccgcccgcacccccagcacagcacaacttaaagaaacacagcgcgagcttcaaacacatttttggaccacctgcccactctcgcacaagcctcttcagcgtccgattgtctctgattgcgctgggaacttgtacaataaagatgcgattctgaaattcctcttgcccggcgaggacgttgtcgagggaatcagctccaaggccgactgtgaggagattctcgctggacgagtcaaggggcttcgagatgttgtggaattgaagttcgaagttgatactgagggggaggaaaactcggccgctagagggaatggagaaggaaagagtgagggctggatctgtcctgttacggcgaaacagttggggccaagcgtcaaggcggtttatattgtcccatgtgggcatgtgttctctgaggaggcggttcggcaattgaagcaggataagtgcttacaggtgtgtcttcgtttgtatctcccacatctaagtggcccaagagactaacagtcacagtgcaacgaaccctacacagaagaaaacatcatccccattcttcctacaaaagaagacgacaagcagcgtcttattgaccgattgaagcgtttagccgatcaacacctcacccactcgttgaaaaaagcccctggctcgaagaagcgcaagaacaagggcaattccgatgcggacgtagccccaacaacggcagccgagagcaatgctgccagcagagagtcatcgtcgaaggctacgctttcgaaggatccgccatcagca

SEQ ID NO: 19197 - DNA, 805 bp, Emericella nidulans
ggccgcgtctacgccatcaccgggggcggacggggtctcggtctcgctatggccgaagcgctcctcgaagccggagctaaaggtgagcattccctctattctctgagcacataagaggagataatcctaacgagccgaaaagtatattgcctcgaccgtctccaaaccccacacccagactttgaggccgccagatctcatgctgaatcggcctacggcggcagcctacactaccaccgcattgacgtgcgcaacgctgctgaaacaaacagcatctttgcaaagatcgcctctgagaactcgcgcctcgacggtctcatcgccgccgcaggcataaaccatctggaacccgctctctcgcacagccccgagaaactccacgaggtcatggacatcaattataacggcgtctttcatagtgccactgccgctgcgcgtcagatgttcaactaccagcaaaagggttccatcctgctcgtggcttccatgtctggccttatcgccaacaaggggatgacgagtcccgtttacaactcgagtaaggcggcagttgtgcagcttgctcgcaatttggcaatggagtgggggaggcatggcattcgggtgaactccttgtgtcctgggcacattgtcacgccgatggttgagatggtcttccagaaggagccggccgcgagggcagtttgggaggctgagaatatgctgggacgactggcgacgcccgaggagtttagaggcgcggcactatttgcgttgagtgatgcctcgagctttatgacagggagtacaatgctgattgatgggg

SEQ ID NO: 19198 - DNA, 806 bp, Emericella nidulans
atggcgagacggacaggtgcgcgatctgtccgacgcggcgtacgcaagccgcagcaagacccgcgtctacagcgcgacataccgcgaggccagccagtgcgacattgtggtcatcacggccgggtccaagtacttatacggtaggtgtctggcatttcccagcatcctggctagtggtgacggtgactggacttgcatgggaacaggtcaaaccagcatggactatttgtaccgcaacaccagcattgtgcgctcaatcatcaacgagatgaaaccgttccggtccgataccgttctccttatcgtcgcgaaccccgtcgatctcatgacctcgctggcgaaggagctctcgaacctgccgtccgcgcaggtcctgggttccggcacgttcctcgattcgatccgccttcgcgggcttctggcagacgaaaccggcgtaagtacaaccttaatcccgctggccgtgcctgttggtgaacacctttttcacttctcattttttttttcatttttttgtcccacttgcacaactgccatcttgaccgctagataagaactggttgcttcttccgttgtaaaaatgtcaacaccttgaacatgccactgatcgtctagcttgcgcccaactccctggacctgtatgtcctaggcacccacggcgactcggcagtggctgcttggtcgtgcgccgcagtaggcggagtgcccctgaaggatgcactggggctggagaagcgggtcgaggagagcctcgtcgaggagtgcaagcaccgctcgcagagcattgtccgtgccaaaggagcgac

SEQ ID NO: 19199 - DNA, 807 bp, Emericella nidulans
ccgccgcgatcatgaaggacgtctatagcattccgtctcatagcgtacctgttgaagacccaaatcctactatccatccgcagcgaaacccgcttcaggccgactaccatagcgaagaggaagtcgaagccatcgccgcgcacctcaagaggtctttggagagaatggtgatcaaggttttcagcgaggcacaaaaggcttctgcggcctccgagggcgcagaggctgagactttgagggttcggtgggtcgaagcatacttccctttcaccagcccatcgtgggagctggaggtattctggcagggcgactggcttgagattctgggttgtggtgtggtcaagcaagagcttcttaacaactccgacgtgccgaatcgcgtaggctgggcgtttggtttgggcctggagcgcatcgccatgctcctcttcaacatccccgatattcggttgttttggtcaaaagacgagcggtttctctcacaattcaaggcgggccaaatcacgcgcttcgagccgttctctaagtaccccgcttgctacaaggacgttgctttctggcttccttctgctgctaccagcggtggaagcgcagctggcggcgcggtaccggttcatgagaacgatatcatggagattgtgcgtggtgttggtggcaatctcgttgaggatgtcaagctgattgacgagttcatccacccgaagactaaccgcaaaagtttgtgctatcggatcaactatcgtagcctggaacgaacgttgacgaacgaggagaccaatgatctccatgacaaagtgcggcagaagc

SEQ ID NO: 19200 - DNA, 807 bp, Emericella nidulans
gcgccaagttgtttgggcttgataaggatctaaagctgggtagtcaactgacggacggctgtgtctgggcatatgaagccacaaagtccggaatcatgccggaagcattccaactggtcccttgtaagaaaggcgagccatgcgaatgggatgaggacgcatactacatggccatggatccttatgccgacaagcggccaatatcacataacaaacgctccgccggccctgaaaaggggaattggcacgtcgtcgccacagccgaatcgtcttcgccccaggaagataaaacacagaaatcaaccactactgagggtcgacacaccggtacaactaccggggcaggcgcgctctcgcacgaggaattcgtcacgggaaaaatcctcaacgaccgactcccgccgggcatgacagggatctcggctcggcagtacctccttcgcccggaggcgatcgagtctgtcttcatcatgttccgcctcacgggcgatccttcctggcgcgaaaagggttggaagatgttccaggctgtcgacaaagccacgaagacggagctggcgaactcggccatttccgacgtaaccgtcgataatccacgcccggtggacagtatggaatcattctggcttgcggagactctgaaatacttctaccttcttttcagcgatccaagcctggtgagccttgacgaatatgtcttgtaagtgatgcttgacttaatcgactgcttgatgctgacttttcccttaggaacaccgaggctcatccgttcaagcgacccaagtactgaagtactaatttaaatga

SEQ ID NO: 19201 - DNA, 808 bp, Emericella nidulans
gccgatcaaacacttcctggtcgatactcccgggcaaatcgaggtcttcgtgtggagtgcgtccggaagcatcttgcttgagacactggcctcatcgttccctaccgtgatcgcctacatcattgatacgccccgcacgagctccaccagcaccttcatgagcaacatgctctacgcctgcagtattttgtacaagacgaagctaccaatgatcttggtctttaataagacagatgttcaggatgcggagtttgccaaggagtggatgaccgactttgatgcgttccagcaggcgctgcgggaagaagaggagtcgggtcaatttggaggcgaaggaggagcaggaggcatgggcggaagcggctacatgggatctctcctcaacagtatgagccttatgctagaggagttttatcgacatctcaacgtcgtgggtgtgagcgcgatgacaggcgagggcgttgacgagtttttcgaggcggtcgaggagaagcgcaaggaattcgaaagggactacaaaccagaacttgagcgtttgaagaaagagcgtgaagaggcgcaggcgaagcagcgagaaattgagcttgggaagctgatgaaggatatgaatctgtctagctccaaggccaaggaggagcctgagacagttagcgaagccgaagaagaggaagacgaacgagttgcagcgatggggagagcctatgatcctgattcggacagtgacgaggattatccacctccggctggtgacgacgaaggactcagccagcggtatcagagtgcactggcagactcgagaagtgggccc

SEQ ID NO: 19202 - DNA, 809 bp, Emericella nidulans
cgttgaagcccaacggagcagagcataccacacattccgcgactcctcaccatcatcctcgaactacgatgttgaaagcacggggagcagcaacacacggtcacgcatcgacccgcgcatcgtctcggatgccattctcggcctgtcagatggcctcactgttccctttgccctgagtgccggtctctcagcgctaggagatacaaaggtcgtcgtgctgggtgggctggcggagctagctgcgggcgcaatctccatgggtttgggaggatacgtcggggcaaagagcgaagcgtaagtcttgcctttattataatcaagatcaagtaagggttctaacccgcagcagagaatcctaccagactacggtccgcgaaactaccgaactcattgattcgtccccctccgagacccaagcaatagtctacgacatattcgcctcgcatggcgttcctgacgacgcaatcgcgcccatcaacgcttccctgcatgcatcgcgcgaccgcctccgcgaattcctcatcaccttccaccacaaagagtctgagccggactgtaaccaggcctggacgagcgcgatcaccctcgccctgggctacttcatcggcggattcattccgctgattccgtacttctttctcaaccaggtgcttattgcgttgtattgtagcgttgcggtcatggcgattacgttgctggtttttgggtatatcaagaccgcggttgtgcgtgggtggagtgggaaggacaatatccttgctggggtcaaaggtggcattcagatggtcgttgttggggcctttgctgcg

SEQ ID NO: 19203 - DNA, 809 bp, Emericella nidulans
tgcacacaactgccggggtaccagagggatatccggaggtccatgtcgtgtatatgatggatacaaagaacggggactttgcgacctttttagctggcaaaaatagcacggtgctctggcattcggacgtcacatatgatgagcagccgccgggtatgacaattctctacgcgcttgaattgcccgaggtgggtggggatacagcctttgcgaaccaggtggaggcatataagcggctttcacccgcgctacgggagcggttgcatgggctaaagggggttcatgatggtgtttcacaggcggagccctactatcgtgcaggaagattggtccggagggagccagtaattgttgagcatccacttgtccggacacatccagtgacaggggagaaggcactttttgtcaatgcatgtgagtccctctgcccttccacacttgagtgccgggttattgaagacactgactggggtagtgacgacgagaattgtcgggatgaagaaggaggagagtgatatgttgctgggcttcttgatgaatcatattgggcattgcctggaacaccaagtccgggtgcggtgggagccaaagacggttgtcatttgggatgtaagtacaccatatgccgtcatgcttgtgcatcaccctgacaagaatagaaccgtgtcactgcgcacactgcgatcgtcgactggagaactcgtgagcgtcggcacctggcacgcctcactccccaggctgagcgtccatttgagacgccgtatgttccagaagattagttggttgtgaatacgatatcttctttgctt

SEQ ID NO: 19204 - DNA, 810 bp, Emericella nidulans
cgggattcaaggcctgcagatgcagagagtgagtctattgtgggcgactctgtcgagagactcaagcggtcacactcatttgcggaatcggtcgagcaggtcgtgcttgaatacgaaaagacgatccagagtctcgaatcttcgctttcaagcacccgagcttctctggccagcaccgaaagtaccctcctcgaacgcgagaccaaatgcacttacgtagagaccgtcaatgcgcagcttcaggcccgcatccaaaagctcatggaccgggaggcgagcacggagacttatcttcatgagctagagtccaagatagatggtcaagcctctggggaagagcaacacgcggcaatggtgtcagagctccgtaaagagctcgcccgagctcgggagaacgaggctagctgtgaagaatatatttccacactagaagagcgcctagccgaggccgaccaggatatggaactcatgcaacgcgagatagatcggctggagcatgttgtggaccgccagcggagcctcggaaaactggataatctcctctacgagctcgaccacattcagcaaaatggcaagaaagacgaccaaacccctgaacagcctgagaggacgtccactcctccaggagcataccaacctcgaaagcgcggattgtctcttgacgtgctcaccgaagccgccgaaaccgctattcctgattctgacgagggtctgtctgatccgattcctgaagaggacgaggaccaggctacacccagcaagcccgtgtcaaaacaaggtgattctggcctaaaaatactcgaaagtgct

SEQ ID NO: 19205 - DNA, 811 bp, Emericella nidulans
gccgcgccttgatgaacctcaattcagagcttccgccggtacaagcagagggattctcgcttctttcggacctggtcaagagatcttcaccgattcttgatataccatctacacttactctcctcttgtctattattaccgactcttcagagacagctgcaaatgatgaattcatatacctgaacgcaatcaaactcattggtacattggcctcccggcatcctcgcaccgtgacaacgaccttaatcgaacgctatatcgataggagcgaaaacgccacactcgatcaaaggctcaaactcggagaagccctgctccgcacagtgcaagatcttggcgaagccctcgttggcgaaacagcaaaggttctaggcgaaggcctgatttccgttgcaggaagacgggcgtcaaagcctcaagcgcagaaaagccgaaagcaagccctagagcagcaaagacggaaaatggaacgcgaagagcgccagaagcagaaggactcctcgtccggatggagactatcgacaccaaagatagccgaacaaattctagacaatgacgactccgactcagagacgcccgaacaagcggtccattcggcaaatatcatctctgcttgggcagccggctcatctcgcgacgaagaacccgacgacctgcgcgttcgtgcctcagcactctccatcctcgcaacggccatccaaacaaacatcacagggcttggcccgtcaattctagcatcgtgcgttgacctcgcccttgcaacactgactcttgagccggaagacgagtgtgcaatcctcagacgcgccag

SEQ ID NO: 19206 - DNA, 811 bp, Emericella nidulans
cgacccattggcatgggaagctctcgcaaaagagcgtctctcggccgacagctttggctacgtctggggctcagcaggaaccagacagacagacgataacaatcgtgccgcgttcaagaaatggggcatcgtaccctcgcgattagtcaaggctaatttcacgaatctgaaaaccactttatttggggacgagtacgagtatcctctcgccctggcacctgtgggcgtgcagaggattttccatcaggagggtgaatcagcggctgcgaaggccgcaggggaggaaggcgtcacgtttatattgagcacggcgacgtcaacaagcctcgagaatgttgcgaaggcaaacagagacgggccaagatggtaccagctctattggcccagcaacgagcatcacgacatcacggctagtctgctgaaaagagccaaagagaatggatataaggtgcttgttgtaacattggatacgtatatgctcggctggcggcctagtgatctcgacaatggttataatccgtttctacgcaacgataacatcggtgtggagataggattttcggatcccgttttccggaaacgattcaaggagaagcatggagccgaggtggaggaggatgttgggaaggcagcacaggaatgggcgcatacaatcttcccgggtacaagccacgggtgggaggatatcagcttcttaaaggagcattgggatgggccaattgtgttgaaaggaattcagacagtcgctgacgcaaagagggctattgaggtcggcgtgcacggcattgtggtatccaaccacggcgggagg

SEQ ID NO: 19207 - DNA, 811 bp, Emericella nidulans
aactcctccataatgacaactttcaaactcaacactggcgccaccattcccgccctgggcttcggcacatggcaagacgccgacgcccaggaaacagctgtactggaagccctcagggccgggtacagacatatcgacactgcgcgcgtctacggtactgaagccgcagttggccgtgcgatcaagaaatctggcatcccgcgtaaccagatcttcctgactaccaagatctggaacaacaagcaccacccagacgacgtggcacaggcactgcaagattctctcaacgacctggatcaggattacgtcgacctgctgctcatccactggcccgtcgcctttaagcgcgggacggagcagttcccgaaaactgaagacggaaaaccggctgtcgcggatacagattatcttgacacctacaaagctttggagaagctactcagcacgggcaaggtcaaagctatcggggtctcaaactttagcaaggctgagatggagcggatcctggcgaacgcgactgtccctcccgccgtgcaccagctggagggccatccctggctgcagcagcgggagttcgcggagtggcataagaaacacggtatccatatcacgcattactcgccctttggaaaccagaacgaggtctatagtcgagagggcacgatcggccggctgattgaggatccagtgctggtggagattggcaaaaagtataacaagtctgcagcgcaggtggcgcttgcttggggtgtcactgagggtcactcagtattgcccaaatcgaaaacaccagagcggatcaaggcaaacc

SEQ ID NO: 19208 - DNA, 813 bp, Emericella nidulans
ctcgttgcccccgaggaggtcaagaacctgaagctcaccctcgccgcccccaactggtaccacctccgctaccgtgaaggttacgcctaccccaaggaagtctacgccaatgtcgacgagtactttgccgatatcgccaaggcgtaccaggatgagctgaagatcctctacgatgctggttgccgcaacgtgcagtttgacgaccccaacctcgtttgtacgtctcttgccagtaaaaccccctacagatgctaacaaacattagatttctgctccgaaaagatgctccagggctggaaggaagatcccctgaacaccctcagcgccgacgagacttttgagaagtacatcaagctctacaacgactgtctcgccacccgccccaaggatttccacgttggtgtccacctctgccgcggcaacttcgtcggctcgcgccacttctccgagggcggctacgaccgcatcgcgaccaagctcttcaaggaactcaacgtcgacacctactaccttgagtacgacaccccccgcgccggtgggttcgagcccctcaaggaggttcccgccacaagtccgtcatctttggtgttgtcacctccaagttcccccagctcgaggacaaggaagagatgaagaagcgcgtctacgacgctgccaagttcattgccgagggtaatggcatcactctcgagcaggcgcttgatcaggttggtgtcagtcctcagtgtggtttcgcctctcaccgcgagggtaacgccattgatcgcgagggcatgatcaagaagctagagcttgtccgggctattgccgacg

SEQ ID NO: 19209 - DNA, 813 bp, Emericella nidulans
cgccccgatcgatatggatgacgtgcctctcattcgatgcatgggtctcaactaccgggaccacgcgaaagaagccaacatgcctattcccgacgtgccggtgctgttcatcaaaccccggactgcgctgaatggtccacacccagccatgatcaatgtacctaagatcgcccaggatggctccagcgactacgaggccgaattatccgtgatcatgtccagaacgggccgcgacattcctgagtgcgacgccatggactacgtgctgggctacacgtgcagcaacgacgtgagcgctcgcacgcagcagtttaagaatagccagtggagcttttcaaaaggtaagcggagcagactggcactcccagctcgtcttttgttgtcccgcttgagcctgactttgaatgttagggcttgatggctcgtgtccgctaggacctgtcttggtggctccctcagaagtcgacccgcaccagctcgatatcaaggctattcacaatggattagtggtgcaggactccaacacgaggtaagaccagttttattctgttatttttatttttacttttattttcttttttatttttgcgtggtccatcattcaatgggaagagcccgtggctgatggcagagcagaagagatgatattcgacatccctaaaatcatcgcgttcctatcgcagggcaccaccctggagcgaggcacggtgatcatgacggggacagggccagggattggggcaatgcgtgatccaaaggtcgtgctgagagatggcgacgatatgcgtgttcaaatccaggggatcggcacgc

SEQ ID NO: 19210 - DNA, 814 bp, Emericella nidulans
gagattcacgtacaggccatctacgtcaacaaggttatcaggagcacggaaaagaagcagatcgagaagctcacctacgccaaggatcctagcgagatgctccaggctggtgagtcaaccactcaaatctgggacactgtagctgggcacactaactgtggaactaggctctgcgatgccactgcccgtcgtgagcgtatcgtcaagcgcgctgctaaggaattcgaggatggcatgtacgtcaacctcggtatcggaatgcctctgatcgctccctcctaccttcctgaaggtgttgaggtcttcctgcaggccgagaacggtatccttggtctgggtggctaccccaagcccggtgaggaggaccctgacttgatcaaccccggaaaggagaccgtcacccttgccaagggtgcttccctgtttggttcccacgagagtttcggcatgatccgcgctggccgcattgacctgaccatgcttggtgcgctgcaagtcagccagtacggagacctcgccaacttcatgcttcccggtaaggtcaagggtgtcggcggtgccatggacctggtcgccaaccccgagaagaccaaggttatcgtcactatggaacacaccgacaagaagggcaaccccaagattctctctcagtgctcgttccctcttactggaccccgctgcgtgtccaagatcatcaccgaccttgctgtgtttgaggtcagcacgaccgagggtctcacccttgtcgagcacgcgagggcgtgactgtggatgagatccgcagcaagacggaggctccgttcaaggttgcggc

SEQ ID NO: 19211 - DNA, 814 bp, Emericella nidulans
cggtcattgtttcgaccgaggatctgcgaagaagaagcttgacttcttcttgaagttctttcaagtaagcttgcttatgcttgatgagtgaagcttaggctaattgtttagtactacatttgtaccaaagacccactgccgatggacatcgacttccttgtccaagacacgtactctctcacccgcccgcaatggaccctagttacggaactagacgaagctagccgtatcttcggcgaggctgttgcccagaatttcaagccacaagaggagaagcctgaacccgaggaagaatcggaggatagtggatcagatgaggatctggaagaagacgcatttccagaggccgacgaggaaggagagtcgagtgatgaggccgatgtaagtgaaccagcatactctgctgatcaatgctaacaaggcaggtctctccaaacgctgagcgcaacgacgacagcgagtctgaggaagaacaaatattcgtcacccgtcaagaagaggaacgagaccccgaggccgaagccgagtttgatcgtgaattcgagaaaatgatggcggaaagcgttgagtccagaaaattcgagcgcaaggctgtgtttgatattcctttaccgatgagacgcgctgcccgtgatcccactgcggaagtcacagccgcgaattcaaccccagctcccgtttcctcgcctgctcagtcgtccggtacaatggcgttctctttgatgaccaagaaaggcaataagcagcagactcgtactatcgatttgccatccgactccacttttgccgttgccatgagaagccagcagcaggc

SEQ ID NO: 19212 - DNA, 815 bp, Emericella nidulans
acggcgtcgtcctcgtcacaacctcaaaccgccaccctgatgacctctacctaaacggcatccagcgccaatcgttcatcccctgcattacccttctcaagaccgtcctgacagtaataaatctcaattctcccaccgactaccggaaaattccccgtcccccatctggtgtttatcaccacccgctaggccccgaagccgaccaacacgctcagaagtggtttgactatctcggcgatcccatcaatgaccctcctcaccccacaacgcaggaagtctggggccgcaagattcaggttcctcttgctagtgggaaggccgctaaattcagcttccagcagcttattggagctgcaacaggcgcggcagattacttggagcttgtgaggaattacgaggcgtttatcgtaaccgacgtgccggggatgaccttgcatcagcgggatctggcgaggaggtttattacgttcattgatgcggtttatgagagtcgggtatgcacacatcttcaacccatcatctcgcttatatacacccttgtactgacatatgaccaggcaaagctcgtcctcacaaccgccacccccctgacaaaccttttcatctctgaatccgaagtcaaaacctccctcgatgacaacggcgaacacacggacctctccgatgccatgcgcatgatgatggacgacctaggcctgtcgatgaaagcgctcaaaacgtcctcgctcttcagcggtgacgaggagcgctttgcgttcgcgcgcgcgctgtcgaggttgtcggagatgggaagtaaggagtgggttgagcggggc

SEQ ID NO: 19213 - DNA, 815 bp, Emericella nidulans
cgctggatacgatgaggagcaggtccgtcttatggatgaggtctgcatcgtcttggatgacgatgataagccgattgggagcgctagcaagaaaacatgttcgtgtccttccctccaacccctcaacccctcccttccccgctatcataactcataatccctaattataatggaagcattgtattgccgtcgccgatctaatattaaaattgtgcaggccatttaatgacaaacatcgatcgcggcctcctacatcgcgccttctccgtttttctcttcgactcccagaaccgcctccttctacaacagcgtgcctccgagaaaatcacctttccggacatgtggacgaatacctgctgctcgcacccgctagggatccctggtgaaacggggtcgcagctggacgcggcgatcctgggtgtaaacgcgcagcgcagaggaagttaaaccacgagctggggattaagccggaggaggtccctattgagaaatttgagttcttcacaaggattcattataaggcgccgagtgatgggaagtggggagagcatgagagtaagcagtacccggggtgatttcgggccggattggctggttggtgtacagtggctaacaaaacgctccttgctagttgactatatcctctttatccaggcggacgtcgttctcgagccaaatctcaacgaagtccgcgacacgcgatatgtgtctgcggacgagctgaaggagatgttcaagcagaccaatctgaaattcacaccgtggttcaagctcatctgcaactcgatgctgtttgagtggtggagccaccttgg

SEQ ID NO: 19214 - DNA, 815 bp, Emericella nidulans
tgcgtgcaaattatctcaatgatcgtgaccagcacgctcacagatcgattcggccggagaccgttgacggtgtatccctacggcgtcacggttatttctgtcctagcgctggggatagtggggtgctttgattataccaagagctcgttgagctctttgcttgtagatttccccttgatcccttttccctgcgcctttgacgtacatcaatactgaatctccgtgcagatcttcttcgcttgtctcgctaccttttcgacaaccggtgcgtccgcaatcgggtatgcctacgcagcagaaattccttctcagcggctgcgcgcccaaacagcagctttctcgctggcgctgtcaaatatggctgctatcatgtttagtttctgtaccccgcagatgatcaacggtgaagccacgcagtggggggttaggactggtttcttgtatatattccgtctattgttacggtatcgcagtagaggcgaaagatgctaatgattaatacagcttcgccgctaccgggtcgatctccgtcgtgatcgcgtggtttattttgcctgaggtcactaggcggacgccggcggagattgacgagctgtatggccacttcatcctcttcaatgattctgtgtttgaaaactggctaatattgggtttgcaggtttgagaagaaagttaaactgcgcaagtttgataagtacgtgactgacgtgcagatcaatgcggctgggcaggagaaaggggatggaacggcataagatatgtttagagggagtattagctttagtagtgatatggctggcagtagagactgttaa

SEQ ID NO: 19215 - DNA, 816 bp, Emericella nidulans
agccaagaaaagtgctagatgtcagtcaagtgactcagattgacacgctggaggagtatcagctactcttggttcttgcgaataagactttgtactcttatccgatggatgctcttgaggtcaccgaagccaaaacccagcggctaagagaccgaagaagatccagggtcatgcgaacttcttcaaatccggaatcggtcttggacgtcacctggtgtgttcagtcaagacttcggctctctcaacgaccatcaaagtatatgagcccatggacaatctagccaagggtaagaagaagtctactgtcagcaagatgttccagagcgggcaagataccttaaaaccgttcaaggttagtttagcccccacatcagtcctgatttctgagctaatcaatctacaggaattctacatcccggcagaatcatcgtcgatccattacctccgatcaaccctttgcgttggttgtgctcgtggcttcgaggttgtcagtctggaaacgacagagactcaatctcttctggaccaagcagacacatctctggactttgtcgcacgcaaagagaacgtaaaacccattcatatcgaacggttgaatggagaattcctactgaactacagcgacttttcattcttcgttaaccgcaatggttggcgtgcgcgggcggattggaagatctcctgggaagggaatcccaattcttttgcactctcattgccttacatactagcatttgaaccgaactttatcgagttcagacacatcgacacgagcgaactgatccatatcatgactggaaagaatattcgcatgct

SEQ ID NO: 19216 - DNA, 816 bp, Emericella nidulans
tggcaatgcaagctccggtaccagacacaggaagaattgcttcaggtggctcgcgagtacaagcgccgcgagctgccgattgacctgattgtcatcgatttcttccactggccgctccagggagattggcggttcgatccaacctactggccaaatccagctgcgatggtcaaggagctgaggggaatggggattgagctaatggtcagtatatggcccacggtggataagcggagcgagaactaccgcaaaatgttggagaaagggtttctcatccgcaccgatcgaggagtccgtacggcgatggactttcaaggagataccatacactttgacgcaactcacccaggtgcgcgagcatacgtctgggagaaatgcaaaacaaattattacgattatggcgtccgtgccttctggcttgatgaagcagagccagagtacaaggcctatgactttgataattatcgatactaccaaggaccaaacacagcaattggaaacatctatccactagaatatgcacgggcattctacgaggggatggaacaggctgggcaaaagaacatcgtgaacctggtccggtgcgcttgggtgggcagccaaaaatacggagcccttgtgtggagtggcgatattgcttcatcttgggaaagctttcagcaccaacttgttgcaggcctccacatgggattatgtggcattccgtggtggacaacagatattggaggtttccatgggggcaacccttcagatagcaagttcagagaactttttgtccgatggttccagtgggctacgttctgcccagtcatgcgg

SEQ ID NO: 19217 - DNA, 817 bp, Emericella nidulans
gaccctgaataaagcaaaatgagacttttccccctagccgctctatctctctccatcccgggcatccttgccctcccccatttgggtcccaaacgtcccaaccgtcccaacaagatagtcgatgacccgaaagtgggctacctagccgtctactggacaaccgaagacgagagcgtttactttgctctcagctcgaacgatgacccgctagggtttgaggcaatcaatggcgggaatccaattgtctctcccactctggggactaaagcgatcagagacacaacgataattcgcggcgagagagaagacgaggggaagtactatatcatcgggacagatctggatatcgataccgtatgtagctccatctcctctaatctttgaaggtcgtcacaagagggtagccgagtaggtactgaccgacgtgtgcagactaactggggcgccgcgtcaagcaatggctcacgggcaatcttcgtctgggagagtaccgatttaataaactggactgatgagcggcttgtgacggtggaagacgagagagcaggaatggcgtgggcgccagacgcgatctgggacgaggagcaggggcagtatttcgtgcactgggcagcgcagctggtgcgttccaaacccccatctggttattgactaagtcaagtctgacaggacgtagtttgctgaagacgaccccaaccacacgggcgacccagccctccccagcagcctgcggtacgcatatacaagcgatttccgcaccttccccgagccccagacatatatcaacctgggcaacgagacggccatcgatctctcc

SEQ ID NO: 19218 - DNA, 817 bp, Emericella nidulans
agcataaacgcaaacactttcaaaattatcttttggctgatcgcgcacatcatctcgaacccgacaatactcacagcggttactaccgaaatatcttccattctctcagactggccgtccaacgaatccctctcttccctctcaatccgtctagagcggaacacccttctcgaagctctccataacgaagcccaccgactcgcactcaacaccagctccgcgcgaacaatgaagcaagacgtaaacatcaacggccgcatcttcacatccggcacacatgccgttatcccataccgctacctcgccatgcgtcatccgctcctctcgcaggattgggatgccttccagccagagcggttcctttctaaccctgggttgggccagagtaagagttttcttccatttggcggtggaaagcataaatgcatgggacggttcttgagccggaggctagtgctgacttttacctcgctttttcttcatcggtttaaggtccggccgttggatggggtacccaagatgggcttccggccagtctcctcgggaccggcgagtcctgtggatgacatgaggctggtcatttcccacaaagagtactagggtatatggctaggttaggcaggcaataaacaagggtagatcgagcgaaagaactgtgcgaagctaagctacttttataagctgaatgacacattcaatgacaccgcgttcccatcacacgagccagaatctacagattccgccaggttccatctacaattgcccatcccgccacgcttagtgggtgcaatttgcccagttgccccgtgaggctgcc

SEQ ID NO: 19219 - DNA, 820 bp, Emericella nidulans
gccccggcgtgtcctcctccgcccaacctttatcaaaaaagacaaacgcaccaacggcgcaacagaccaccaaggcgccgcagccgcagactccatagccgaagccgaagcgcgcaaagctcagcggcaggagaaagcagatgcgctggttcgagagcaaattgagaaagatgccatcgcgcggagctctgcgaataaagcctgggatgacgatgaagcaatggcaaacgaggaggcggctattgacgatacagatggaaaggatccggaagctgaatacgcagcttggaaactgcgagagttgaaacgcatcaaacgtgagcgtgaggctattgaagcggcagagaaggaacgcgaggaggtcgagcgccggcggaacctaacagcagaagagcgcgagcgagaggatcaagaatttctcgctaaacagaaagaggagcgtgaggcttcgcgcggccagactggatatatgcagcggtacttccacaagggtgcatttttccgccccgatctcgagaaggaaggtcttgataaacgtaatgtcatgggcgcgcgattcgcagacgatgttgctcgggagacattaccgcagtatatgcaaattcgagacatgacgaaactcggaaagaagggccgcacgcgatacaaagatctccggactgaggatacggggaggttcggtgagggttttggtaatcgacgaagacaggaagctccagtaggggttacggatgaacggttcttgcctgatcgaggctttgataagaagggtcccactggtgcaaatgcttctgttgtaagggagaggcgcagatcacgg

SEQ ID NO: 19220 - DNA, 821 bp, Emericella nidulans
ggcagaagcgctggaggtgcaagtgatggaaacccggaagcaggtattaggatcatggcatcctgatactctgacgagcaaggccaatcttgcattaacatatcaatatcaagggcgatggaaagaagcggaatggctagaggtgcaagtgatggagacccgacaacaggtattagggccagagcatcctaatactctgacaagcatggcaaaccttgcattgacataccgaaatcaaggtcaattgaaggaagctgaaaggcttggtgtgcaggtaatggagaccagtaagcaggtactcgggtcagaccatgatgacactctggctagcatggccaatcttgcatcaacatactggagtcaaggaaaatggaaagaagcggaagcgctgtttatacgggttttgaatacccagaaacaagtgctgggtctagagcaccctgacactctggccagcatggccgacctcgcatcaacctaccaaaaccaaggccaatggaaggaagcagaagagctgttcatacaggcgatggagattcagacaactgtgctaggatcagagcaccctgataccctgatcagtacggctaatctcgcatcaacataccgaagtcaaggtcgattgaagcaagccgaaaggcttggtgtgcaggtaatggagactagcaaacaggtactcgggccagaccatccttacaccttgaccagcatggccaatcttgcatcaacatactggagtcaaggaaaatggaaagaagcggaagcgctgtttatacgggttttgaatacccagaaacaagtgctgggtctagagcaccctg

SEQ ID NO: 19221 - DNA, 821 bp, Emericella nidulans
cttttccggtcgcggtggaggctttggtggtcgtggaggtaagcaattgtgacaattgaagacagatatgtgtttgaccagagctaaatgaaatttttttggataggcggccggggaggtttccagcagtcttttggaccgccagaccaggtgttaggtgattactcacattgaaactggcttggaggcatcaaccggctaattacaattttagagatgggcactttcatgcacgcatgtgaaggcgagatggtttgcgaatcaatcaacccgaagattccttacttcaacgcccccatctacctggagaacaaggtacgagacgagcaatatgatctgggaacaatttgactaatgattgctttctatagacacccattggcaagatcgacgaagttctgggccctatcaaccaagtatacttcaccatcaagccccaagaagggatcgtcgcgacgtccttcaagcccggcgacaaggtttatatcggtggtgataaactccttcctattgagaagtatgcatctttctgcccttgggagagtagtagccccgctgaccagctatatcaggttccttcccaagcccaagcctccacccggtaaatatatccattctgtaacatcgccctcttacggactctgctaacaagacaataggtgccaaagccaagaaggcagtcggagctcgtggcggcggtcgtggtggtcgtggtggtgctcgcggcggcggtttccgtggccgcggcggtgcccccagaggacgtggtgcacctcgtggtggaagcttcggattccgcggtggtgctggcggtaggggag

SEQ ID NO: 19222 - DNA, 821 bp, Emericella nidulans
gcgatggccgctggaatacagacagccaagaaggaacttcgcaaaagaatgcgggatgtcctgcagagaattcccgctgactctatcgtcactcaatgtctggctcatcattcccgatcaccgcaacgtctactaaccttctgcagccaaaactgtagctaacaggcttttcactcttccggaataccaaaaagcccggagaataggcgtatacctgtcgatgccgtcaggggaactatcgacaacagcaatagtggaagatgccttgaagaaccacaaggaagtatttgtgccttatatccacagcatagagaccacaacgacacagcagaaaatctcggttatggatatgctcgcgttagactcaatggaggagttcatgtccttggagcgcgataaatggggaattccctcactcacgaaagtacaggcagtcaacaagcagaattgctttggtggaactgggatatccgaaccactacctaagggtaatacggcggggccatttggattagatctgattgtgatgccgggaatggccttcgatcccgatttcagaagacttggtcatggaaagggatattatgacagtttcttaacgaggtacttgagatgggaaactgagatgggcgttgagaagcgaaacatgcctttacttggtgagacgctagcttatatcggttttaagagagtaatgaaattcctgactagatcacagtcgccctctctctcaaggagcaaacgctttgcccgcctgaacaggtgcccgttacaaatcacgactggctcgtagatgtcgtgatagtcggtgatgaccggtg

SEQ ID NO: 19223 - DNA, 822 bp, Emericella nidulans
gccaaagaacccgcgcactgcacgcatcctcaaggctaaagaacctcaactcattgaaggtgcaaagcgcgtattgctgctccatgggtcaaaatgtcctacgcccctacatactgtcctcaaagttttccattctcttacgacaccgcattccgtcctcttccacaagaaaaatgagaacattcacccgttcgagagtaccgagagtctcgaattcctggccaacaagaatgactgcggcatggtaattttcggaagcagcaataagaagaggcccaactgcctgacaattgcgcgcatctttgactccaaagttctcgacatggctgagctgttactcctccccgatgccaatggcgaggggattcccgagatgaacaggctttctatgcatgtcgccatcggtctgcggccgctgatgctcttttccggcagcgcatgggacgatacgacatcgacgacgcatacgatgctgaagagcatgctggtggatctattcaagggcgagaccagtgataagattgacgttgaaggactacagtatgcgcttatggttggtgcggaggagcctacggcgggtctggcacctattattcatctacggtggtacaagatcgtcactaagcggagcggacacaagcttcctcgcgtggagctggaagagattggacccaagctcgacttcaaagtcggacgtatccaagaggcacctcgcgacgtcatgaaagaggccatgaagcagggcaagaaaccgaacgaggagatcaagaacaagaagaacatcggtattgatttaatcggtgacaaggttggtcgggtgca

SEQ ID NO: 19224 - DNA, 822 bp, Emericella nidulans
ggcgagttcgtcggcacgtttctgttcctgttcttctcgtttgccggcacccaagtcgcgaatacgccgaaaccggtcgagggggcgccgccgaataccgatgcactgctgtactcggcgctggcgtttggtttctcgcttatggtgaacatctgggcgttttaccgggtgacggggctgctgttcaatcccgctgtacgcttgccgtctactgggtgaaggggtcggcggtgctaacgaccagatcgcgtccaggtaaccctagccctctgtctcgttggggggatgcccgcctaccgcgggctgttcgtctttgccgctcagatcgtcgggggcattgcggcggccggcgtagtcagcgccttgttcccgggggatctcaatgtctcgacgagactgggaggaggcgcatccatatcgcagggtttgttcatcgaaatgttcctgaccgcgcagctcgtctttgtcatcatcatgctggcggtcgtcaagcacaaagggacctttcttgcaccggttgctatcggaatcgctttcttcgtgacggagatgatcggtacgcttccccctgataccgttctcggtgcatcttggactaatgcgttcggcaggcgactactacaccgggggctcgctgaaccccgcgcggtctctcggaccggacgtgatcaaccgcagcttcccgggttatcattggatttactgggtcggcccgctactcggatcgctgctggcctgtggtttctattacttcctgaccttcttctcgtatgagagcgtcaacccgggccaggacttcaatgagtgggaggcgaaatgggg

SEQ ID NO: 19225 - DNA, 823 bp, Emericella nidulans
tcctgggaaggcgagaagatccttaatcacttccacttctttgacaacgccgaccccaccaacggtttcgtcacctacgtcaatcagagctacgcagagtccgccggcctcgtcaagaccaccgacagcgggacctctatttaggtgttgactatgagaacgttctcaccgtagacggcccgggccgtgagtctgtccgcatcgagagcaacgagtattacgaccaggggttgtacgtcgtcgatatccaacacatgcccggcagcatctgcggcacatggccagccttctggaccgttggccccgactggccgacggacggtgttattgatattatcgagggagtgaacaagcacgatgcgaacaagatcgtgctgcacactagcgatacttgtgacgttggtggtggctacaagatgaccggcgacatgacctcaagcgaatgcggcgaacgttcaggaactatcggatgcgttgtccaaggcaagcagggctcctccggcgaccctttcaacgagcaaggtggtggagtctatgccatggaatgggaggaaaagtacctcaagatctggtactttccccggtcttcgatccccgagtccctcactgcgggcaaccctgacgtttcgtcttttggcactcctatggctcacctccagggctcctgcaacttcaaggaacgtttcaccatcagaagctgatcctcgcacaacattttgcggtgactgggcgggcggtgtttttggggcagcggatgccccgtcagcgaccccagcgacccaatgctgagttgcaagaactatgttgccgagaacccggctgt

SEQ ID NO: 19226 - DNA, 823 bp, Emericella nidulans
cgatccgagcgcaagtgacgagtaaattagtcgaacttcgcacatacctggaccgtggagtccggcctttggaaggcagactgaagtatcaagtggacaaagttgtcaaggcagcagaagaagcggaaagggctgaaaagagttctcaggccaccaagccaagcaagtctgaaggcgacgatgagagcgataatgagggatcagcatcggacaattccagcagcgaagaaggtagcgacagcgaggaggacgaagacattgacgaaatggcttatcggcctaacgtgtccgcattctctaagaagatggtgccagaggcaaaggcggataagactgcgcgaaaaacttcgagcgacggcatctaccgaccaccgaagatcatgccaacagccatgcctactactgagcgtaaggagcgcaaggaacgacctatccgcagatccaatgttatcgatgagtttgtgagcgctgaaatgtcgtccgcgccgatggctgagcctagcatcggtagcacaatcgtctcgggaggccgacacacaaagagcaggaaagaaagagagcacgaagcagagcggactcgctacgaagaaaccaacttcgtccgtttggcaggtgaaagcaagaaggaacgtgcgaagaaggcggcggctcgtcgtgctgaagggacattcggaggcgaggaatggaaaggcctcactgagggcgcagatcgcatcacacgactcacaaaacgggccaaaggaagcagtagtgcgctggagaggagtcggaagcgcaaactcaccgaagacgggcagcgcggggatggtgctggagttggtca

SEQ ID NO: 19227 - DNA, 823 bp, Emericella nidulans
aggagcgcccggatcgatttggggcttttgcgtacgttttcatccgtgccttctacttctgtgatcatctaggaacaaagacacaaagttgggacgggtaagctaagttagctttgtggtaggacactgtcaatgcacgatcctcaagaagcagccaccgagctccgtcgctgtgtcgagaagtacggtttcctcggcgcgctggtcaacgacactcagcgcgcaggtccagacggtgacgatatgattttctacgataatgcatcttgggatgtcttctggaaaacctgcacagacctcaacgtgccgctctacctgcacccgcgaaaccccacgggcacaatctataacaagctgtgggctgaccgtaaatggctcgttggaccgcctctcagttttgcgcagggcgtttccttgcacgtgctggggatggttacgaatggcgtctttgaccgccatcccaagcttcaaattatcctcggccatctaggcgagcacatacccttcgacatgtggcggataaaccactggttcgaggaccgcaagaagcagcttggtctggcggagacgtgtaagcggacgattcgggagtactttgcggacaatctgtggattacgacaagtggtcacttttcaacgaatacgctcaagttctgtatgggcgaggtttcggcggatcgtattctgttcagtattgattatccttttgaacattttgaggatgcttgtgagtggtttgatagtgcggagttgaaccttgttgataaggttaagatcgggagggagaatgcaaaacgactgtttaggttgggtccgtataagg

SEQ ID NO: 19228 - DNA, 824 bp, Emericella nidulans
cgctggcgcttagtgattcgtacattgtcgcagtaacgacaaaagactatgttagagtatatacattatatggcacacctttcagggtgtacagacagaaaagcccggccgtgacctgcgccgcctggagagactatgttatgaccataggcaacggaccgctgggaagcgacgggcgaacggggacgctgcggtactcgatcgaaaacgtcaagcgcgacgaaatatgccagaacgaggatgttgtggctatcccggaaggagctgagctgaaaagcgttttcttcacagacatgggggtgagcatttccctattgatttgagacctatctaactgagtaggacccttgtatctacgacacggaaggcgtgctgctggtcctgcagcactggcgcacccaaggccaagcgcgctgggttccactcctcgacacaaagcagctggagcgactggcaagcggccgcaaagaagaaacgtactggcccgtcgcagtcgcgcaggacaaatttcactgcatcattctgaaaggcggagatcgatacccgtacttcccacgaccaatgctcagcgaattcgatttccagatccccatctccgacaagcccaagccgcaagaggaagacgaagaaggaagcaccgcgcgcaacgacagtatgcgccttgaggaatcttttgtccgtggtaatctcctcctctcactgttccaggacctcctttcggccacgcacgcgacggccacgcagcgcgctgaattgtcgcggaaggagctggagcttgacaaggtgcttctgcagcttctggcgatcgagtgccgagagggcga

SEQ ID NO: 19229 - DNA, 825 bp, Emericella nidulans
gatttgaataggaaacatatccgagaagctccctcctgcacggagctagagttgcagtcgccgagcccgttacggcagctttcctagctgggggagtagctggcgctgtatcgagaaccatcgtatcgccgctcgaacgtttgaaaattcttcttcagatccaaagtgtcgggagggaggaatacaaactatcaatctggcaggccctaaaaaagattggacgggaggaaggctggcgaggctttttgcggggaaatggcacgaactgtatacggattatcccgtactcagcggtgcagttcggcagttataatttctataaaagggtatttcctcgatatggaagtaatgtattgcagaattgacattcgcagttcgctgagccttcgcctgatgcggatttgacgccaatacgccgactcatttgtggaggggcggctgggataacctcaggtttgtataccaaccctacgaaacacattattcttactttgaccaaactaacattgcctacgcaattggcgtgaccagtcattgtaacctatccccttgatttggtccgtacaaggctgtccatacaatctgcctcttttgcggctctcaagcgtgatagcgccggcgagaagttgccgggaatgtttacgaccatggttttagtctataagaatgagggcggctttttagcgctttaccgtggtatcattccaaccgtagccggtgttgccccttatgtatgatttccaggcgtactggacaatcgtccttgagtgacatcagctgactttgcctaggttggcttgaactttatgacatacgaatcagttc

SEQ ID NO: 19230 - DNA, 826 bp, Emericella nidulans
tacggaggctacgagtatttcaagaagttctatagtgaccttgtcggggttgaaaatgccgcccgctataagacgcctttgtacttggcagcgagtgcttcagcagagctgattgccgacgttgcactctgtccctttgaggcagtcaaagtgcgcacgcagacgaccattccgcccgagttccgctccacgtttggcgggatctctgctgttgtcgcaaaagaagggacagctgggtaagcaggcgcttatgctgccttaacctgatactaatagggccagactatacaagggtttgtatccgctctggggccgacagatcccctataccatgatgaaattcgcttcttttgaaaatattgtcgaggccatttaccactacctcccgggccaaaagtcagactacaacaaaggcgcgcagactgctgtcgcattcactggaggatatcttgccggtattctgtgtgcgatcgtctctcatcctgcggatgttatggtgagtaagttgaacgcaaatcgcctgcctggtgaggcctttggtgccgccacaggcaggatttacaaggaaatcggctttatgggtctatggaacggcctccccgtcaggatcatcatgatcggaacattggtgagttcatatacagttattcctaggccgatgctaactctactccgtactgtagaccggtctgcaatggatgatgtatgtatttccttgctcgacttccaacctatccgaagcggaatcggagctttcaggcggcatgtactgacttaggttgacagttacgattcgttcaagatattcatgggcctgccaaccaca

SEQ ID NO: 19231 - DNA, 828 bp, Emericella nidulans
ggaaagaaccggaagcccgtgtatgcacttgaaggaagtgtttccgtcgctggtagtggtgtttcattcctcatgaacaatatgggctttttccgagactcacgtaaagtgagtgacttggcggcaatggttccagacaacggagggtgtgtcttcgtcacagccttcagtggtctctttgcgccatactggattgatgacgccaagggaacaatttgttagtatattctcaattatttactggactgtaactgatcagctctagttggaatcacgcaacatacccaacgtggtcacatcgcacgtgcgactatggaggccgcctgcttccaaaccaaagcgattctcgatgccatggagatggacagtgggcactccctctctcagctcgccgtcgacggaggaatgagcaactcggatatctgcatgcaggtgagttgcgaacttaatttcgtactatcagtataaaataagctaacttctttgcccctcagacccaagcagacatcattcaaattcccgtcgaacgaccggccatgcatgagacgacagcgctgggcgcagcaatcgccgccggcttcgccatcgatatctggaaggaatttgatgaacttaaaaacatgaaccgcgccaaccgaacctcattcacccccgcaatctcccgcgaacaaagccagaagatgtataaacagtggacgaaagccgtcgaaatgtctcgcggttgggtggataccaaggagatgggaggtgaggacgactagacgattgtctctcctctttcattccgtgtttctataatgatacaaccagtcgagccggtgaccggac

SEQ ID NO: 19232 - DNA, 828 bp, Emericella nidulans
gcggctacgacatgcccctcgtaggcttcggcctatggaaggttaacaacgatacctgcgcagaccaagtctacgaggctatcaaggctggatacccgtctgtttgacggcgcgtgcggtacaccccctcaaaatagcccaatccaagtcagtgaataacaacagctaacgcgtggtagactacggcaacgaagttgaggctgggcagggcgtcgcccgtgccatcaaagagggcatcgtgaaacgctcggatctcttcatcgtctccaagctctggaacagcttccacgatggcgagcgcgtcgagcctatcgcgcgcaagcagctgtccgactggggaatcgactacttcgacctgtacatcgtgcacttccccgtctcgctgaaatacgttgaccccgaagtccgctacccacccggctgggagaacgccgaggggaaagtcgaattgggtaaggcgactatccaggagacgtggacagcaatggagagtcttggtgatagggtcttgcgcggagtattggaatcagtaacttcagcgcgcagttgctgctggatctactccgatatgcgcggatccggcctgcgacgctgcaaatcgagcaccacccataccttacgcaggagcggcttgtgacatttgcgcagcgcgagggaattgctgttacagcgtactcgtcgtttgggcctttgagtttcctggaattgtcggtgaaacaggcggaaggagcaccaccgctttttgagcacccagtcatcaaggatatcgcagagaagcacgggaagactcccgcgcaggtgctgttgaggtgggcgacacagagggga

SEQ ID NO: 19233 - DNA, 829 bp, Emericella nidulans
tgcgcaacctacagcttcaccatgtcgtcaaaagtctggttcatcaccggttgctcgtctgggttcggccgcgagctcgccattgccgctgctcagaacaacgacaccgtggtggcgacctcgcgcgacgtctctaagctcgccgatctcgttccactcggtgtcatccccaaaacacttgatattcgagcgagcgatgcggaaatcaaggctgttgttgacgatgttgaagctagtattggacccattgacattcttgtcaataacgccgggtatatcctcgaaggagcggtagaggagtgcaggtatgtcacgccatatcataccaattgattccattatccctggttatgaagaatcccctgttctaacgcggaaatgagcagtaacgatgaaattctcgcccaatttgacgtgaatgtcttctcccagatccggcttctccgcgccgttctcccctccatgcgtgcccgcagagccggggtcatcgccaatctcggctctattgctgggtgggatggtactcccgctgcgggattctattgtgcctcgaaagctgcaattgccatctacactgaatcccttcggcacgaggttgctccgctcggaatcgacgtgacatgcattgagccaggctatttccgcaccaacttcctcaccaccagcggcgggcacaaggtcactgcgcggaaacggatcaatgacttacatgctggcactcagcaggctcgtgatgcgttggctgcttataatctccaccagcctggtgacccggtcaagggggcaagggttattgttgaggctcttacgaaggcgggccgttgtgaag

SEQ ID NO: 19234 - DNA, 829 bp, Emericella nidulans
gcaaccctcggcagcgaatgctcgaccaaaatctccgagggcgccgactggctgcacgtcgacatcatggacggtcactttgtgcccaacatcacattcggcgcgccagtggtgaccaagatccgctcgcatgtgcaccgcccttcgcagccgcagggcaaagggacgtttgattgccatatgatgattgcagaggtacatccttaacctcacggtatactcagctagagacgaaagctaatataggagcaacgtagccgcaaaaatgggtcaaggacttcaaagacgccgggtgcgatctatattgcttccactacgaggcggcggtttcttcagtcgccgccaaggaaccagctgataaggagacaacgcgcaagacgagtcctaaggagttgatccgctttattcatgaggaggggatgcaggcagggatagcaatcaagccggatacgccagttgatgtgctgtgggatatcttagctgcggatgatgagaaggagaggccagacgtgagttctctctgctccacttcactttcgttgttggtaaaccagacgagcgtgagctgacagctttctgttactagatggttcttgtcatgaccgtgcacccgggatttggcggacaaaagttcatggcctcagagcttcctaaagtcaaggcgttgcgtgagaaatacccagacttgaacatcgaagttgatggtgggttgggccttgggacaatcgaccaagcagcggaagctggtgccaacgtcatcgtcgctgggtcggctgtctttggcgccgagaacccaggagatgtcattcagaagctgcgcgatgcggtt

SEQ ID NO: 19235 - DNA, 829 bp, Emericella nidulans
tcacaaccatggcggactcggtcttcgatcctctatcgaacctgacgctcctgctgtgcaataagacggtcaaccgcgttgacccccgcaagttccctgcgggaaaagcccgtatcgagacggctggcaatatctgcttctgcttcctcatgacggcagtctcgctcttgctcattgccttctcaatccgcgacctcgtcggtggctcggacagcgaaacgggcgacttccatctcccgtccgtcattgccgtagttgtcgccttctgcaccaagttctccctctttttgtactgcttcgcgctgcgcaaccaggtttcccagatccgcattctgtgggaagaccaccgcaacgacctcttaattaacggcttcggtattctcacctctgtcggcggtagcaagctccgctggtggatagacccaatgggcgctatcatcctctccgtattgatcagcggtctctggcttcacaccgcgtatcatgagttccagcttttgattggtatcacggcggatacgaaaatgcagcagttaatcacttatatctgtatgtctcgttaactttttgtcacttgatgataaatggtggtgatgctaacatatacagcaatgactcactcaccactcattactgctatcgacactgtccgcgcgtacacttcgggaccccgtctagttgtcgaggtcgatattgtcatggacccgtcagactccttgcgcgccacccacgatgttgccgaggagctgcagacaaaactcgagtccttgcctgatgttgagcgggcttatgtccacgttgactatgagacgacgcataagccggagca

SEQ ID NO: 19236 - DNA, 830 bp, Emericella nidulans
tggcatacgcgtgtccaggaagctctggatatgtctctaagtgagctgggtatggactatgttgacctctatctcatggtacgggcgggtctcgtctgaaatacaagaggaagggctgacatgttcccacaggcattggcctataccagtcgacccaaatgactcctccacccagctggccgactgggactttgttaagacatggtatggcaagatatttctctcgcttatggctggattcctgtttctaagctctacagggaagaactgcaaaatcttgcggcaaccaaagtgcgaaatattggtgtgtcaaacttcggcatcgcacacctcaggagactgctcagccattcctcttgcaagattgtccctgctgttaaccaagttgaggtacacaatccaccagatacatgttgttcgcgtatcgactttctgacaacatagttgacaacatagcttcatccctattggccatcaagaaagcttttgcagtactgccgcaatcatgagatccattgtacagcctattcctgccttgggtctacagattctccgctactagaagacaaagttttgcttgaaatatgcaagagaaggaacaagtcaccgcagcaggttctgtacgtttcaagtccttatttagtaccatgttatgctatggtatgttgtccccagcactgacaattcaaggatcatgtgggggctccagcgcggcaccagtgtagtacccaaaaccgtcaacgctgctcgcattgaggaaaactttgatttgaatggctgggcactgagtgacgatgaattggacaaattgaaccgatgcaccacccggt

SEQ ID NO: 19237 - DNA, 830 bp, Emericella nidulans
aaaatatgtttcagaactttggagatcttgggcaaaatatcaaagaatacgtggagcagtatcaggtgaagactaagaacactatgaacatcgagtctattgccgatatgaagcgtttcgttgaagactatcccgaattccgaaaactttcaggcaatgtgagcaaacacgtcacactggtcggggaactcagtcggcgagtgggtgaggaaaaccttctcgatgtgagtgagttggaacaaagtctggcttgcaatgacaaccacaatagcgacctaaaggtatggtactcttacatttgatctgtcctcaaatcctaacgctttatagactctgcaaaggatcattcaattacctacagtgccccctgagaataaattgcgactagtggctttatatgctatcagatatgagaaacaaccgtccaatgcccttccggtccttcttgatcttcttgtgacggccgggggtgttccttctcaccgagtcaacattataccaaaattactggcctaccaccactctctccaagctccgccaattgccggcggattctctgacctctttgagtccacatcgttgttttctggtgctcgcgacagattcaaaggcttaaaaggcgtcgagaatgtctatacccagcattcgccgcgcttggaagcgaccctccaaaatctgatcaaaggcaaactcaaagagcttcaataccccttcctcgaaggtggcggtcatgttcgggacaagccacaggatattatcattttcatggttggcggaacaacatacgaggaggcaaagatgataactcaggtcaacgccagctcacctgg

SEQ ID NO: 19238 - DNA, 832 bp, Emericella nidulans
cgaccagactagaaacaaaacatgtcattctccgtgcagggcaagacagctattgtgactggtgctggctctggtgtgtttatccaagatccatccttaacggcgtgagatgtactgagaaatgcttgtatgcaggaatcaacctgagtttcgcgaaacagctcttggagaatggctgcaatgtcctaatcgctgacttggccctgcgtcctgaggctcagagcttggtagatcagtatacggccaagattccccgggctgtattccagcgaaccgacgtgagggagtggaagcagctcgagcagatgtttgaggttgcggagaaggaatttggcgaggtggacattgtctgccctggcgccgggatttatgaaccggtgcgttctctctacgtatccttaccttgtccgtctaggctgaccgaccggttaaagcactggagtaacttctggcgccctccaggaacggctgtgagccgcgaccccccagatggcgaccgctacgcgctcatcgacatcaacctcacgcacccgatccgcacgtcacagctcgcaatctcgcacttcctcaggtccggaacagacagcacacgccgcaaagcgattgtgcacatctccagtatcgcagggcaaaacccgttcctcgcagcgcccatctacgtcgccacaaagcatgcgatcaatgggttcgttcgctcgctcgccaaactcgacgagcgctgcgggatccgcgttacggccgttgcaccgggcatcatcaagacgccgctttggaccgaccacccggagaaactgaagatagtggatgatacgaaggatgcgtgggtgacgcc

SEQ ID NO: 19239 - DNA, 832 bp, Emericella nidulans
gagctcttcgcaatatcaatacctcagcaattggaattcgatggcaatggaacaagaatgcctggatgaaccaaattattatgcgtgaatggctcctggagttctatcaacatatcggccagcgatcaatccttcttacaatggacaacctccctgcgcatctttctggcctagagctagcaccacctcctcctaatatacgcatctgctggctgccaaagaattcaacaagccggtaccagcctctcgatcagggtattatccagaacctgaagatatattatcggaaacagtggttaagatatatgctttcccactatgagagggacctggatccactagaatctgtgacgattctagactgcatacgctggcttgtacggtcctggcatcatgatgtcctaagctcaactatccttgcctgcttctataagagcacactggttccagatcctatacagcttccagttgaagcacctgatctaaaaccactatatgagaaggtacagcaatctgggaatctatcagattgtatggatatctccttctttcttaaccctgcagaggagtctcaagagcctactagctctagtaatgggatgtcctctgaggtattacttgagcagctaattactgaggcttctgggagtacagatatatattcggacgatctagatgatgatacagctgagccagcacctcttccaaagcctcaggatgctcttgatgctgtaagactactgatctcttatatggagggtcaggatgcatctaaagcacctattcttagatcacttgagcggttagagcgagatttagagggtgaaattat

SEQ ID NO: 19240 - DNA, 833 bp, Emericella nidulans
gctcgcggtcctgcagtccttcgccgtgctggcgtcggcattcagcggcttgatctcgttcggcctattccagataaaccattccgccgtgaagggatggcagtggctctttattgtcgagggggccatgacgctgattattggagtgattgggttctggtggttaccggacacagcccagagcgcgtggtttctcacgcagcgagaacgagacgcggcttctgccaggctcctgagggatacgtctgcagagatcgagacaaaactggagctgaaggctgcatttcaaacatggagcgactggaagtttcccatctgggctgttatcaccttttcctacccggttgcgtatgcgacggcgatgaacttctttcccattgtatgtccccgaaagctacattaccctttttttttttttttacattattatcaggttatttttactgacgacgcagatcgtggctcgcctcggctactccgtcgtcaagacgaacctctggactgtagcgcctaatctcgttggcgcggtggtactgctcgtcgtcgctaagtcatctgatatcttccgcgagcggtccttgcatatcatctttagcctgacggtttcactggtgggaatgttgatcctggctagtattgatgtctcgcataacaagggcgtctcgtacttcgcctgcttcttactcgcatctggtgcatacattccgacgtgtctcgtgcacgcctggcacaataacaataacacgaacgagaactcccgcgctgctaacactggcttctttgtcgggctgggcaatatcgctggtgttctgagtgccgctaccttcaggaca

SEQ ID NO: 19241 - DNA, 834 bp, Emericella nidulans
ccctccgcacgaaccgaagatctctcgcccaagctttaatcaatcgaggtgttgtcctcgagcccgtcggaaagtggtccaaggtcggtctgcaggtcttcgagtccgcagttcccctcggtgccaccccagaataccttgcaggtcactacatcctccaagccgcctcctcattcctccccgtcatggcgctcgcccctcaagagaacgaacgaatcctcgatatggcctccgcccctggtggtaaaaccacctacatctccgctctgatgcgcaatactggctgcgtcatcgctaacgacgcgagcaagccccgtgcaaagggtcttattggtaacatccaccgcctcgggtgcaaaaacaccatcgtcacgaaccttgacgcccgcacagcttttcccaaggccatgggcggttttgaccgtgtccttctcgatgctccctgcacaggtacaggcgttattgctaaagaccctagcgtcaagaccaacaagaacgagcgtgacttcctcgcaattccacacatgcagcgccagctcctcctcgcggcgattgactccgtcaatcacgcttccaaaaccggcggctatattgtctattccacttgcagtgtgacagtcgaggagaacgaggctgttgtccagtacgttctcaagaagcggcctaacgtcaagctcgtcgagactggacttggcgatttcggttcaccaggcttcactcactatatgggcaagcacttcgacgcgaagatgacgatgacgagacgctacttcccgcaccgcgagaacgtcgatgggtttttcgtctgtaagctgaagaagattggtcctacgc

SEQ ID NO: 19242 - DNA, 834 bp, Emericella nidulans
gtgccgccggtgacaaggaggcgatcaccacacgtgtggcccatgactccgaccctcagactctgtacaacaaccgccaccttgttcttcgtggtgagactgcttcgtcagtgatgaaagtcagggctgcgaccctgaaggcctttcgtcagacattcgacgagctgcgcatgactgaagtaactccaccggccatggttcaaacacaagttgagggaggaagcaccctattcaagttcgactactacggcgaggacgcctacttgacccagtcttctcagctctatcttgagacttgtattccgtctctaggagatgtcttttgcgtctgcccatccttccgtgcggagaaatctctcacccgccgccatctctccgagtacactcacatcgagtccgagctagacttcatcgaattcacggacctcctcgaccaccttgaggccgtcatctgccgtgtcctggagatcgtcctagccgaccctgtcgccaaacccatcattgcgcaactcaaccccggcttccagatgcccagccgcccattcctccgcatgaagtactccgacgccatcgagtggctgcgcgagcacgaaatccccaacgaagaaggcaagcctcacgagttcggcgacgatatcgccgaagccgcggagcgcaagatgaccgatatcatcaaccgccccattttcctcacgcacttcccggccgaaatcaaggccttctatatgaagaaggaccctgaagaccgccgtgtcactgagagtgtcgacgtcctgatgcccggtgttggtgaaattgttggtggaagtatgaggatggacgactgggacgagc

SEQ ID NO: 19243 - DNA, 835 bp, Emericella nidulans
tcggagcgtgcgttccagaagcagccgcacatcttcctcaaccccaagaccaaggcgaagagcaagaaggtcggccagactcgacgatggtacaaggatgttggtctgggtttccgtacccccaagaccgccattgagggcagctacattggtatgcacgacttgaacttttttttctccggttcgaaaattgcggtttggcgactggcggtggtttttccctcgaggtctggaattgagaatgcgcggatggcgaacgcaaaatctacacttacattcaatatgttgggaagcggatgaattggatgacggtgtctggacttacaatatccgggctagcgatacgattcctgattctcaatcctcaattctcatatctcagactttcggggagaagatccatctactctatacgctctacgcttttttttcggccgcagaaggattaatgctgacttgcaaactctagacaagaagtgccccttcaccggtatggtctctatccgtggccgtatcctgaccggccgtgtcgtctccaccaagatgcaccgtaccatcatcatccgccgtgaatacctccactacgttcccaagtacaaccgttacgagaagcgtcacaagaaccttgctgcccacgtctctcccgctttccgtgttgaggaaggtgactgggtcaccgtcggccagtgccgccccctcagcaagactgtacgtgatacctgcaggaccctaacattcatacttctcaatccaatatattccatcttatatgcgaacgaacgaattctgactttctgatcatcaggtccgcttcaacgtcctccgtgtcctgccc

SEQ ID NO: 19244 - DNA, 836 bp, Emericella nidulans
aatctttcagtgggttgtatgtttcactttcatccttttggtaacttaggttttggtctatactagggatttaagactatgggctatggattatgatactaagatacggcgacagcttcgccggaagcgagacgacagccctgactctgtccggcatcctctacaacatcttccgcaatcgagccgtctacgaaaaactcacttctgagatcgacgctgcgattacgagccaccagctgagccggccgcacatcacatacaccgaggctactaggctcccctatctgggggcctgcattaaggaggggatccgaatgcacccgatcaccggggtctcattcccccgccacgccccatcttgcggatgcgaggttggcgggtactggatccccgggaatacacgcgtaggtgtgaacccagcagtcattcatttcgacaagtccgtctttggggaggacgcgggtatattccggccggaaaggtggatagaggccggcgcgaacgtggctaatatggattgtcatataatgcagtttggcatgggagcgagggtttgcctggggaagaatgtgagtgcagtttggctgtattgattcttttgctctctttctccatattgtgttgcgtgttcagtttcgttgctttttcgtttctttttcgttgcttttttttgttgcggctgtcaagtcagtgctgactgacggggtagatctccatgtgcgagatctacaaagctattccgcagctactgcattcatttacctttgaaatgggtgctgaggagcccgtgaagacgacttcgtattggttccataaaccggttgccatccacgtga

SEQ ID NO: 19245 - DNA, 837 bp, Emericella nidulans
tggtcaacttgagcccgcgatagtcaagtcattcgcttttcagcttctgcggggtatcgcgttttgccacgataatcggatactccaccgcgatctcaaaccccagaatctgcttatcaactccaagggccaactcaaactcgccgatttcggccttgcgcgcgcgttcggaattccagtcaacacattctctaatgaggtagttacgctctggtaccgcgcaccagacgtgctcctcggcagccgcacctataatacgacaatcgatatctggtcgatcggttgcatcattgcggagatgttcactgggcgcgcgttgttttctaggcacgacgaatgaggaccagcttcagaagattttccgcgtcatgggcacgccttctgagcgtacttggcctggagtttctcagtttccggaatacaaaagtgattttcccgtttaccctcctcaggacctgcgacaagtcgtccctaggattgatccatacggtctcgacctactccggtgtatgttgcgccttcaaccggatttacgaatcagtgccgtcgatgcgctgcgacatccttggtttaatgatgttcctgtttctcagccagtccctgtgtgattcgtagccaggtgagaacaaagaagggctcttcggctatcgctagcgatattcctgtacagcaccacattaatgcctcagtagcttggtctcccatgtgagccagccatggatacggagcttagtttctgatctacctattgatcatggtatggaggctctcacttgacgcgaatgggaagatcaaatggcatactatagagtccttctctgggccaactttgcaatg

SEQ ID NO: 19246 - DNA, 837 bp, Emericella nidulans
tgtgggatcaccggcatgaaactgatgtattcgctgttttgaatagtgcgaactttacgccttttgctgcgcgcacacagcagttaattcgcgagcagctgggtcaggttgaagacaagactcaacttcccgatgagtacatcgaacttgagaagcgcgtggatgccctgaagctagtgcaccagaaactccttcaggtgacgtacgttgcattctatatcaatctggctgtggtatgctaaggtgtgcagctctcaatactccaacgaagcctacgactacccccctaacatccgcgaatccttcaacgatctcgggcgcaccatcaacgaaaaagtccaccttctgtcgcaggccagcacccctgccgaagctcaggctgcactaaccgcacccccttcagcaaaaccgcagcccaagaccttcagccatgccattgcgcgcgcttcgctagctggctcccagactctggggaatactacagctggtgaggatccgctcgcaactgccctggagaagtatgcgctggcttcggagaaggtgggcgaggccgtctggcgcaggacgcccaaatccagtcgcgctttctggctgggtggaacacaactctgaacacgaacttgatgtttgctgcgaaggcgcgtaagaacgtggagaatgctcgactcatgctggactccatcaaggcaaagcatggtggtgatttggataatctgagcgaggaggcccgttctgagattgagcaggcggaagatgagtttgttggacaaactgaggaagctgttagcgttatgaagaatgtatgtttgccaatatgagctggaggtgtgttgttgg

SEQ ID NO: 19247 - DNA, 838 bp, Emericella nidulans
gaccttgcccgcaagacccaggggacatggatggggattacgcgagccggcaaagtcgccgtgctgaccaactaccgcgagacacgtcggacgccgcaataggacagcagtcccgcggtgccattgtcaatagttggcttactagatccaaaggagacggaggcgcagatgcagacgccacgaagacatacgttgaggaaatggtcgccagcccaacggcccgcagtgtcggcggattcagccttgtttgtgggtacgtgaatgagccattggcgattgtgtcgaacaggtcaagtaccatggaccaaattacatggattgcggagaagaaggggcagacgaaggggttgagtaatactgtttttgacgatcggagttggccgaagatcttggatggtgagaggctggtgggggaggcgctcaagaagcatgtagaggagggagagggagagaaagagctgattgagaggctactggacgtgctgaatacgaactcgctgcccgagttgaaaggcgatgcgacggcggaggattatttaccatatttcaggcagagcattttcataccgcttattgggacgagggataagacgggttcaaagtttcctgctgcggctgcggagattctggagccggggtcgacaccatccgtctgtgctgaagggcacagcaacggagtggcattggatccagcaattgtgaaggaggccaatcccggaaacgatgtaatcgaccagtcgtacctgcatggtccatacgggacacagaaacaaacgattatcctggtgaccaaggaaggccgagtgagatactttgaacggaccctctacgaccagga

SEQ ID NO: 19248 - DNA, 838 bp, Emericella nidulans
ttgatgcgcttgcgggtgttatagcctaccgacataccggtgactccgtgacgactgtaactgcggccgtggatagaatcaccattgagcatccactgatggaaatctgcgacctcgagctgagcggccaggttacgtatgcaaccggaagatccagtatggaggtctcgctccaggttgccaaggtccctgcgcctggggagaagccaaacccggaggatgtcctaattacttgcgcgtttactatggtatcgcttgatcccgcgactaagaagtatgtacggcccttctcgccggttatagttatgcttattgactttgtcagacccgtcaatgttgcacctctgttggttgaaaccgaagaagaacgcgcattgttcgaaaagggggaaaagaattatcaagcaaagaaggcattgaggaagcggagccttcttgagaaagcacctgacgctgaggagagcaacctcattcactccctatggacgaaagaaatgtcatatctgagtaagtgcagtaggcataaccgcctattcggatacatactgatcagtacagaatctcctgaaaaacgacccgccaacaccatctctatgagcgacgcagtcctcaaatccgccatgattatgcagccgcaagaccgcaaccgccacaacttcatgatctttggcggcttcctgctcaagcaaacctttgagctcgccttctcgtgcgcagcctcattctcgcacgcccgtccaaacttcatttctctcgatcccagtacttttgagaacccagttcccgtcggaagtgtgctctaccttcgcgcgaccgtcgcctacaccgagccgctgga

SEQ ID NO: 19249 - DNA, 838 bp, Emericella nidulans
ccccgaagacgtcagtcaaatggccacatcttgctatacttcccggacgtttggggcatgtttcccaatggactcctggttatggacgcgtttgcagatgcaggatatctggtgctaggcgtcgattattttcgaggagtatgcttagcggattctgcgccactttctgtctaactcagagatctacaggaccccgtttggaaacaccgccgtaatcgccacgaccggtctaatccagacttcgactacgaggcgtggaaaaagaaacatatgaaatttgcagacgaagcggttccacgatggattgatgaagtaaaacgcacctacggtcttccatccacgaagtacgcctgtgtcgggtaagtagaaccaaatcccgctgttgggccgctttacctgacccagtctatatcataggtattgctttggcgcaccatatgtctgttccgaactggccaaaaataccgtcaatgctggtgcatttgcgcacccggcgttcttgaagaatcatcattttgcaaacatcaagagtaggggttgtctatcggggggtttggcacagaaggtctgattgggtacagagcctctttatctatcatgctccgaggaagatcatacatttgatcaggactctcgccggacggctttgcagatcttgcaggccggcaagaaaacctaccacctccagcttttctccggcgtcgagcatggctttgctttgcggggaaacatggacaatgcttatgaacgtgagtgttgctctttgtgaatctggggccaaagctggcttatgctttacaggctacgtaaaagaacagagtctgcaagggattgtgca

SEQ ID NO: 19250 - DNA, 838 bp, Emericella nidulans
tgcgctgttccttggggctttcatggagcatacgcactggcggtggttctttacttttgtgtgaggcatatgctgttcttctctagtttgctggtggtacagctgacgataaatagggcgtgccttggggccgtgacattcatacctctctggcttctcagcaacaaccaagcaacgtcaagtcgaaatgaaaagatcgattggctgggtgctgcactggggacgagcgcgttgattctattcaatttcgtctggaagtgagttggactgacatacgtaacgtgtctgccaattccagccgctaacaccttacctgccagtcaagcgccgagcgtaggctggtcaaccccctacgagatagctctactcgtgctgtcagtcatcctgttcagttttttcatcatttggagcacaaaatctcgcatcccattatgccaccttccatattcagagcgccctccttcgccattctcgtcctggttatcctcctcgactatatgaccgtcggtacagtgctttggtaccagctcctctggcttcaagacgtctggggctggtccacgcttcagttcgcaatcggctggaccccctttgtcatctgcggcacattcgcagcctgcctggcagcctggctaataccccggctcgcagctcaatggatcctagcactcggctcggtaacagtcatggtctcaactgtgctaattgctacaatcccactgaaacaaagctactgggcgcaaatgtttccctccatcgtactattttcgttttgccctgacctcgtgtataccgctggtcaaatcatagctagtaacacggtccgacgacaccagca

SEQ ID NO: 19251 - DNA, 839 bp, Emericella nidulans
atgggaaaccggccagggtgtgcttcttgaccgaacaaacatctcaccatccaccagtgtccgcattctacattgattgtccagacacgggagtatctgctcgtggattcgatcagatcagtgccaaatttaccgggacaagcattcgtgttgcccctggtcagcataatctcggaatcttcatcaacattagcaagagggacgacgaagaatatcagttgacgcatcccgctgctcatctcggtggcctgttgaggggagctttgtcaataagtgtggctgacacatgttacattgtctgcccaaaaacaaggattaaggttattttgcagtacttagaggatggctggatcagccgagctcagaataaggttgagggagtcattttccagtacgatccagaaaaggataccattaccaggataaaagacgtccaagaaggtgacatccttgccaaaatatcaggatcgtggcacggcgaaatgtactacactctagcaggaacgagtgagcctcgccttctgattgacatcgggcctctttttcctgtcgcgaagactttgccgccggtggatactcagctttccaacgaatctcgaaagttctggtcaggtgtgaccgaggcaatattggacaagagatatagccaagccaccaagctgaaaatggaaatcgaggaccgacaacggcagaaggctgcggaacgtcaagaaaagaacgaggagtggaagccgcgcttcttcaccgggtccgtcacacctttgggcaaaccggccttgagcgaggaaggcgtgaaggccctcgagggtattcgaactcaacagtaccatctagatgaa

SEQ ID NO: 19252 - DNA, 839 bp, Emericella nidulans
ggccgcggaagccctagactgcaagacgccctgacttccttatttacacggattccgagtgcgggaggccaattggaaagctttacctccctcggtggccttgtccttattcacgccataattcaagacatatggctaatccagaaggcatgccgtgtccccgtgagttgcagctcctctctatcaccggcccagattacctccttggaacaagcactggagaattggtgccagtgctgggaacgcaatcaagagtcctcaacagatccctttaatccgaacggcccactttcgtttacttccacggctctactgcgtcttgcgtatatccgtctcaacgctgatttcagctctgcacggcgtctccagactttcaacccagacgagattgctcggtccctccgacagaacctcaaagtacagcgcagggccggctgacccgcgccgcactgcattgcgcacatgcgttgagcacgccgatcaaactgggcatcaactacgttgcacgtacgctggtggtctcgtggtcgaaccagtacgccctctgctcgctcgaatgcgcagttctcctagcgaagtggcttgaaatcgccaccgtgaagaatcccgagcccagattgacggagcaagaaacgaagctactcgagttcgtgattgagatggtaatggaggcgcagcatgaagtgtctcgctcgtggctcttggagaacaatactcgtctgagtgctgtggtgaccaggctctgggcccggttgttcacggcggactatatttatgagcttgttaacctgatcggccgatcattgaacagctacgccaatcttctcgaaaacgtagaa

SEQ ID NO: 19253 - DNA, 840 bp, Emericella nidulans
agaatcagaaggagattgaggagattatccgccaaaatgcggtcacagagaacctgcataatgccatggagcatcatcctgaatgtacgttgacccttaggtgaggggtggtcttcatggccgccggcggaccgccctgcatgaagtttgagcacagaccgctaacctgtgtcacagcatttggccgcgtgacaatgctgtatattcccgttgaagtcaacggccataaactcaacgcctttgtcgactcgggtgcgcaagtaacaatcatgtctccggactgcgcgacggcgtgcaacattatgcgcctcgtcgactcacgctacggcggtattgcgaagggtgtcggaacagcaaatatcctcggccgcgtacactctgcccagattaagattggcgacatgttcctcccttgctcgttcaccgtcatggaagggaaacacattgatctcctgctcggtctggacatgctcagacggcatcaggcgtgcattgatttaagacgaggtgcgcttgtcatacaagaccaagctgtcccgttcttaggcgaggcagatattcccaagcacctcctcgaggagtttgaggatgagcctgtcattaagggcgcggatggcgcggaggtcggcgcgcggactggcgccgttacacaccaagctggcggcagtactcctgctcctggacctagctcggctgcgaatgcaacggcttcatcttctcgtccggctgccgtgcatagaccgtcgccgcgctggccggaggcgtcaattgcaaaaatcacagagctggggttcacccgtgaggaagcgacgcgtgcgctggaggccgcgaacggagact

SEQ ID NO: 19254 - DNA, 840 bp, Emericella nidulans
gagaagatcaagactacgctcactgatctgctccagatcaaccaccccgtcctgctggcaggaatgaacgtggctgctgggcctaagctggctgcggcagtcaccaacgctggtggtctcggtgttatcggtggcgtcggatacactcctgacatgctccgtgagcaagttgccgagctcaagagctatctgaaggacaagaacgctcctttcggtgttgatctgctgcttcctcaagttggtggtagcgcgcgtaagacgaagtacgtttatctgtcgttcttactgttgggaagcataatcgttgcatgtctgctaaccgttaaagttacgactacacaaagggcaagctaaacgaactcgtcgacatcatcattgagagcggtgctaagctcttcgtctctgccgtcggtgttcctcccaaggccgttgtcgataaacttcacaaaaatggagttctctacatgaacatgattggccaccccaaacacgtgcagaaggctattgatatcggtgcggatatcatttgcgcccagggtggtgaaggtggcggtcacactggtgatgttcctacaactgttcttatccccaccgtggccaaactctgcgagggcaagatcagctctttcactggcaagcctgtgcaggttgttgctgctggtggcctgttcaacggcaactctcttgccgctgctctcatgcttggagcttccggtgtctgggttggtacccggttcattctttctgaggaggcgggtgctcccaaagctcaccaggaagctgtccgcacagctggctttgaggacaacatccgcacgataatcttcactgtatgttccc

SEQ ID NO: 19255 - DNA, 840 bp, Emericella nidulans
cgaccgtgcgaacgtcaacagaatgagcgccattccgacaacaccgccctcgcgctccctcgccggcaaatgtgccatcgtcaccggcgccggctgtgctggtgatggaattggaaacgggcgcgcaattgccatttttctagccagtgatggatgcaatgttctctgcgttgataagaatctagaatgggctgagaagacagtttcgataattcaagagcactctcgatcgtcgtcgcaatatggccaagcagtatcgttccaagcagacgtcacctgcgagaccgattgctcctccatcatttcccaagcaatatcgacgttcaaacgggtagatatattgatcgacaacgtcggtatcgccggggcaccgggaacagcagtcactgttgacatggaatcatggagcaaaagcctcgaggtcaatgtcaactcgatggtgctgatggcgaaacacgccatcccagccatgcaaaagaacagcggcgaaataaaagggagtattgtgaacatggggtccgttgccggactaaaaggagggacaccccatctcctgtatccgacgagtaagggcgccgttgtgaatatgactcgtgccatggcggcgcatcatgcagaagatggaatacgggttaattgtgtttgcccgggagtatgtcccctcttcctgttatcatcttgcgctttacatagggttagggctgatttaatcgggtatagatgctttacacgcccatgatgtacgcgtccggtaacgggatgagcgaagaagcacgtgaagcccgtcggagacgcagtctgctaggaacagagggcaatggatgggattgcgcaacagcg

SEQ ID NO: 19256 - DNA, 840 bp, Emericella nidulans
cccaccttctacccatgttcctccagatgctcaaagatgagttcccagacgtgcgactgcatatcatttccaaactggagttggttaacaatggtaagttgccagcaaatttgtaacagttcatatagtttctaaccataacagttattggtatcgaactcctatctcagtccctcctccctgccattgtacaattggccgaggataaacaatggagagttcgtctagccattatcgagtacattccccttctcgctagccagcttggagtgaaattctttgatgaacaactcagcgacctttgcatgggctggcttggtgacactgttttctctattcgtgaggctgccacgcagaacctgaggaagttaaccgaagtgtttggggtcgattgggccaaggagtccatcatcccgaaagttatggcaatgggccaacatcctaactacctctacagaatgacaacgtgtttcgcgatttctgtatgcacactataacattgttggtgaaaactctgctaattatttttatccagacgcttgcacccgttgtcaccctggaaatcatcgaaaattcagtgctcccaatccttgaaagactcacttcagacgatattcccaacattcggttcaatgtcgcaaagtcttatgccgtcttgatcgacacgttgcgacgtcttccggctcaaggcactctgaccgacctcgagaaggaaggcaaaaccgaggctccttcgccaaggggtcaagagctcatccagcagagtgtccttccaagtctggagaaactccaaggcgatgatgatgttgatgttcggtactttgcgacaactgccgctgg

SEQ ID NO: 19257 - DNA, 841 bp, Emericella nidulans
cccaacggctggggaactgggtacatcatcgcgatgatcgtcgtgggcgttgttatgctgggcatcttcatcctgcacgaggtctatattgctcctgtgcccatgctcaaattcagcttcctgtggaaccgcaccgtcgtcggcgcctgcttgctcgacgccacctaccagatctcctactattgctgggccaactacttcacctctttccttcagatcgtgaataacctgacactcgctgaatctggatacgtcagcaacacgttcgacgtcgtctcgggcgtccttctcttcggcgtcgggttcctgatccgcaagacaggccgcttcaagtggcttctttacattgctgtcccgctgtacatcttcgcccagggcctgatgatctacttccgccgtccgaaccagactgttggttacttggtgatgtgccagatcttcatctctatcggcgggtcgatcttcatcatcatcgagcagctggctatcctggccgccgtggaccaccagcacattgcgacggtcctggcaatcttgaatgtggtcggcactatcgggggcgccatgggcaacactatctccggcagcatctggacaaatacattccgcaaggcgcttattcggtacttgcccgagtcagcgatgcctgatctcgatatgatctatgaagacttggctacccagaagagctatgccgtcgggactcccactaggcttgctattcagaaggcgtatgggtatgctcagacgaggatgctggccgctggtgtgggtatcatgtctctgtgcttcgtctggaccatcatgattcggaacatcaatgtcggcaagattgcgcagg

SEQ ID NO: 19258 - DNA, 841 bp, Emericella nidulans
tccaccccagcggctacctgccccgttgatcacaaaacccgtgaggcatggctgcagcaacataaacccggcgaggctcctcatcctgtcgcttccaatgatggggtgccgacaacgatgaagcaacaccgcccgctctccacagatcgcgaagtaagcagtataccaagagcggttgcctccgattcagatgcacccccatccgagtgtcccgccgcaccgtcctccccatatgcatcaccgactgcatcgcacggtacgccttctaacgcagaaactgaaacggggcatgacaaatcgacggggaactggatttatccttctgaacggcaattcttcgaggcgctaatgcgtaagggtaataccccgaattcagtcagctcggcgtcagaattagcgactacggtagcatcgataatcccaatccataacgctgtgaatgagcgcgcatggcagcaaatcctggaatgggaacagaaagcgccgttatcggaccctggaagcaaaaagtgcggcgggccgaagctgtactcgtttcgcggactaggctccgagccggaatttttgagccctagggcgcgcatgaacagcttgatgggataccagttaccttttgatcgacacgactgggttgtggaacgatgtgacgggcagcggattgaatatgtcatcgatttttaccaaggaaagtcaacaggagggagcagccggggtggcctggccgcaaacgccgggccaggcaagctcagcttttaccttgacgtgcggccgaaattgaattcttgggaaggctgtatgatgagattcaggcgattctcgggtctttaaggaactctgttca

SEQ ID NO: 19259 - DNA, 841 bp, Emericella nidulans
cccgacacccctctcccaccgccgttgctaaagaagaaggagctcgatctgctcagtaagtggaagaatggcgaagccacgatcagcattctagacttcgacccattggaacttgcgcggcagttcacgatcaaggaatcgcggatcttctgcgccattctacccgaagaactgctcgcaagcgagtggatgaagaagaccggatcgcttgcggtcaatgtccgcggtatgtctaccttgtctaccgatctggcgaatcttgttgcagattcaattctacaactcgaggagccaaagaaacgcgctgccattatcaagcactgggtgaaaattgcaaacaagtgcctggaactcaacaactacgactcgctcatggcaattatttgctcactcaactcgtctatgatctcgcggcttcggcgtacgtgggaagttgtttctcagaagacaaaggcgacgctggaatacctgcggaagattgttgatgtcggccgaaattatgccgtacttcgacagcgtctgcagaaccacgtgcctccctgtctgccatttgtcggaacctacttgaccgacctgacatttgtggaccaaggcaaccaggcgcttcgcagtctcccgactgacgacggtgagatggctgtaatcaactttgacaagcacgtcaaaactgcgaaaatcatcagcgagctgcagcgcttccagatcccgtaccgcctgaccgaagtaccggagctgcaggcttggatgcagaacgaactggtgcgcgtgcgatccaatggtgaaatgagtatgcagaccttctaccgccgctcgcttgtcctagagccgcgcgaagttcagc

SEQ ID NO: 19260 - DNA, 842 bp, Emericella nidulans
accggcccaaccatgaccaacgtcttcccaaaatatgccgaacttcgagataaaattgccctcatcatgggcatcggccagtcgcgcatccccggctcagacatatggggcaacggcgcagcgatcgagcgtcttctcgctcacagcggcgcaaaggtctttggctgtgaccttttcctcgaagcagcagagtacacggcggtcaggatctgaccggagggggaacctgcgacatcttgcaggcggacgccacctcgttgagcgaggtgcggcgagtcgcagccgccgttatagcaagacacggccgaatcgatgtcctggtaaacaatgttgatgcgacggcgactggcaatccggcgaccatgccggaagagctgtgagatcagcagtagcagctcaacctgaagaccgtttaccttgcctgccatgtgatcctgcctatcatggagaaacaggggctcggcactgtagtcaacaatgcctctattgcgggtctacgctacatcggcaagccgcaggtggcctgctctacggccaaggcagcagtgattcactttaccagagtgaccgctgtcatgtatgctcccaggggggtccggatgaattcggtctctccaggccttgtgtatacgccgcttgtcgagggccagaggaataatagccaggaagatgcctattggaagatcatggaacggccgattccaatcggccggatgggggatgcatttgacgtgacgaatgcgacggtctttctggccagcgacgcggccaagtatattacggggcagaacctagtggtggatggagggtttacaagcagcgcagtgtcaaaactgtagatt

SEQ ID NO: 19261 - DNA, 842 bp, Emericella nidulans
agtgccggatatgcaaagcatctactttacgacgacaatcaaacttgtgtcgacgtaaaatgtccgatggcacagcttatttggcagtaagattatcctggctgctggtgccgccaccgggagttcgttggacctggagaatcagattgtggcgaagggtcatgtggtgggccatattcaacttacgccagatgaggtcgatgagtttatcgacatgcctattcttgatcatatgaaggaggcacgtcactgcggcggtgtatcaggaaagcgctaacaaactactaggcatccttttcccgccccaggaggatgggatcatgcaaattggtgcagtccatttcgttactaacaacgccaaatccttcaatgggaatatcacttccctgataccgttccgacaaccctaaggatgggacacctgttgtagttgaagctcggcttcgtaagtggatggagacgtgcgtgcctaagccgctcatcaggaatggattgagactcgaatttgctggttcgtcagctctaatcgtcgagctatattcaagcactgacttaatcattctagggacggggacatggccgactaccacttcctgatcacaccccatctgcggcacaagaatctcgacatcgcaataggcgctccgcgcatggattcaagttcctccccgttatcggaaagtaccttgtagagatgttagaggggacgctggacccggaaatcgcgaagaagtggagatggtggcctggccttgagctttcggactacactacgaatcctcatccggaaaaaccagaggatttgaatgatactgtatgcttgggtggggcgagttaagagt

SEQ ID NO: 19262 - DNA, 843 bp, Emericella nidulans
cgtcgtgttcttccgcgatcaggacatctcaccgcaggagcagaagaaactcggcgagtggtacggcgagattgaagttcatgtatcattcccattacgaaaaagcaaagaagttactgactacaacagcctcaagccgctcaagtccccggtgttcctggtgtgacggtcatgtggcctgctctgcaggcaaccgaaataccagccagttttcgtcgtccgggaggcgcctctcgatggcacacagatcttgtccatgagcggcagccagccggcgtgacacaccttcataatgatacggttccatccattgggggtgataccctctgggccagcggttacgctgcttacgagaagctctcccctgcgttccgcaagatcatcgatgggcggacagccgtctaccgctccgctcatccgtaccttgaccgtaatgaccctgaagctgggcctaagtatgttgagcgtgaacatccacttgtgcgcgtccatccagcaactggttggaaggcactgtgggttaatcgagccatgacggttcgcatcgttgggctcgacaaggctgaaagcgacctaattctgggatatttatatgatgtgtttgagaagaatgttgatatccaggtgaggttcaagtggactcctcgtagtagtgcactatgggataatcggtatgttttggctggctccacctgcactggcattgctgacttcctaggatcactatacacaacgctagctgggattatgaaggttctgagccacggcatggcacgcgggttactgcactagctgagaagccgttttttgaccccaaggctaagagccgcagagaggcgttgg

SEQ ID NO: 19263 - DNA, 843 bp, Emericella nidulans
cattggcggtggcaacatggcgtcggcaatcatcggcggtctcctcagccaagggatcaacaagcagaacatcaccgtgtctgagccatgggaggtcaatcgcaacaagatcgccgacctgggtgtcaaaactaccacttccaacgtcgttgccgggggtgaagcagacctggtcattatcgcggtcaaaccgcaggtcacaaaggctgtgtgcgaagagctggccgacgcctggtccaagcgtgagacactgccggtggtagtcagcattgctgccggtatcactctgggtagtctacagcagtggctcaagacatctgacggcaggaccacgcatctggttcgcgtcatgccgaacacacctgcgcttgtcggagagggtgcatcgggcctgttcgccagcgcggacgtgactgcggaggagaaggagcttgtcaacgcgcttctcggcagcgtcagcaaggctacggaatgggtggacaaggaggaattgatcgatgtcgtcactggtctttccggtatgttgtttttgcttttacctctagtctggtccatcgtcgtactgacaagaccagggtccggacctgcatacttcttcgccatggtcgagcacctgatcgccagtgccaccgcgctcggcctgccggccgagcaagccacgcgcctggcggcccagacctgtctcggagccggaaagatgctgaccgaatcgtccgacagccctacgcagctgcgcaagaacgtgaccagcccgaacggaacgacgcacgccgctctggagaccttcaatgcgcagactttgaccaggttgtggataaggctgtgaaggcggctacttcccgc

SEQ ID NO: 19264 - DNA, 844 bp, Emericella nidulans
gctgaatgtcagcaatgaagatattgcgaggatatttatgcttcagacctgggcgtgagttttgccatcgcctttccgattcgcggcctgctaaacaattgacaggatcctaggcaacatgtacaaaatgacattctggcttgtcgcgcatattctgcacgacgcggccctcgttaacgccataaccgctgaggtccggccggcagtcggagtgatgacaataggacaagagcaaaagatcgagatcgaccaccactatctctcagaacagtgtcccaagctggactcgctcttcagcgaggttctgcggctgaccttgacggccccgatggcgcgcgatgtatctgaaacaacgaccgttgggggccggcgactacgtgaagggaacagggttctggtatgcttgctaaacattcaatgcagatataatcttcatcataataccaatttgtctaactgtgccgcccggacaggtcctctaccgccaactccacctcgaccgtgcaacatggggtccaacaccgcaaacgctccagcctgaccgttttttaatcgacagtgggctcaagtccagcatcgcataccggccgtggggtgcaggaaagcatatttgccccgggaggttcttggcaagaagcgcagtttttacgtttgttgcatatttgcttgccgggttcgaagttcgtttgcgggagactgggactgggaagagcaccaggagtgctttcccaatggcagatatgtcgaggccgtcgcccggaatcgcaaacatcgcggatggggaggatgtcttgataagtgtgatacggagggataggtcttcgtaagattagggagctgcatc

SEQ ID NO: 19265 - DNA, 844 bp, Emericella nidulans
cggcacgttcaaaaagccactctgggccgatgcccacgagaagacgtgcatcggcgtcgagactgtagacggcacaaagtactacgccgacaaggtcgttctagcagctggtgcctggagttcgacgttggtcgatctggaggagcagtgcgtttcaaaggtatgcatgcctgcgcttccaagcgttgttcaagtctaaagtggtgctgtctctaactgtgatcatgaaaggcctgggtctttgcccacatccaactgacgcccgctgaagcagccgcgtataagaacactcctgttatatacgacggtgactatgggtttttctttgagccgaatgagtacgcacctcccctcttctcattcttccagagaatagcctactaacatataacagaaacgggatcataaaagtctgtgacgaattccctggcttcacgcatttcaaaatgcaccagccgtacggctcgccggcgcccaaacccatctctgtgcctcgttcccatgcgaagcaccccacagatacatacccgcacgcgtcggaggtcacgatcaaaaaggctatcaaccggttcctgccgaggttcaatgacaaggaactgtttaacagggccatgtgctggtgcaccgataccgcggatgcaaatctgcttgtttgtgagcatccacgctggaaggggttttatcttgcaacaggggacagtgggcattcgttcaagttgctgccgaatattggaaagcatgttgtcgagttattggaggagaggctggaaagtgtgtttaaggatgcttggaggtggaggcctggcagtggggatgcattaaaaagtagacgggctgcgcctgc

SEQ ID NO: 19266 - DNA, 845 bp, Emericella nidulans
tatgtggagctgaacgaggatatgatctcctacagcgggaacatcagccaggtcgagctcaccgtagaaggattcggcagccgagacgacgcgtcttccgacagagaaaccgcatttgaggaggggccctggctctataagcgggaggatatctactatatgatttatgcagctacatgttgctctgagaatattcgatactctacgggctctagtcctactggcccctggacatatcggggtatcatcatgcagtcacagggtgcgagcttcaccaatcacccggggatcatcgactatgagggacgatcatacttcttctaccacaacggggctcttcccggcggcagcggcttcacaagatctgtggctgtcgaagaattcacttacaatgccgacggtaccattcccgagttgagcatgacaactgctggtccggcacaaatcggaaccctcgacccatatcgccgccaggaagccgaaacgattgcgtggtctgatggtatcgaggtggaagcctgcagtgagggtggctttaatgtcgccaatattgacaacggggactatattaaggtggcaggcgttgcctttgatgaaggcgcctctagtttcactgctcgagttgcatctgcaggcaatggtggaaatctcgagctgcacctggacagcaaggatggaccagtcgtcggtatctgttctgttcatccgactggaggctggcaggtgtgggaaaatgtggattgcccagttagtaacagtacatctactcacgatctgttccttgttttcaccggcgacactaccgggtatctgttcaatttcgattggtggcagtttagcagatg

SEQ ID NO: 19267 - DNA, 845 bp, Emericella nidulans
cgggcctgcatgacaccaaaccccccgtaaccttcgacccattggcatgggaagctctcgcaaaagagcgtctctcggccgacagctttggctacgtctggggctcagcaggaaccagacagacagacgataacaatcgtgccgcgttcaagaaatggggcatcgtaccctcgcgattagtcaaggctaatttcacgaatctgaaaaccactttatttggggacgagtacgagtatcctctcgccctggcacctgtgggcgtgcagaggattttccatcaggagggtgaatcagcggctgcgaaggccgcaggggaggaaggcgtcacgtttatattgagcacggcgacgtcaacaagcctcgagaatgttgcgaaggcaaacagagacgggccaagatggtaccagctctattggcccagcaacgagcatcacgacatcacggctagtctgctgaaaagagccaaagagaatggatataaggtgcttgttgtaacattggatacgtatatgctcggctggcggcctagtgatctcgacaatggttataatccgtttctacgcaacgataacatcggtgtggagataggattttcggatcccgttttccggaaacgattcaaggagaagcatggagccgaggtggaggaggatgttgggaaggcagcacaggaatgggcgcatacaatcttcccgggtacaagccacgggtgggaggatatcagcttcttaaaggagcattgggatgggccaattgtgttgaaaggaattcagacagtcgctgacgcaaagagggctattgaggtcggcgtgcacggcattgtggtatccaaccacggcgggagg

SEQ ID NO: 19268 - DNA, 847 bp, Emericella nidulans
ggcctgcaagatcgaagacacgctcaaaaagtcgcgtgagattctatgcgcggcgtataatctcaagttaccgcaatcagaacacatctcttcagataatcaggtatggtgcttgttccaacaatgccttgcgactgaatgctgacatcgggtctaatagatactcgacgaacccgcccgaggcatcatcggcctcgagagactcatgctcgagagttccggtttcgattttcgaacgcggcatccacaaaaaactctcataaagctggcaagacagtatagacttacacctcaatcagaagtctcgaacgtagcctaccgcatctcgcaagacctctatcgcacctttgcgccgctcaagcagacgacatctacgatggctttcagctgcctggagctcgccggacgcttactggaacaacgaatcaaggaggttgagcttgggacagactacgcgagatggagaacaagccgggaggaggttatgggtacgtcgaagccacaaagaagccatcagaggactaatggatttagaaactctacttgacctcctcgagctatacacacacaaccgcagtgctacgaccgtcggccctcattttcccgctgaccgcttcctcaccgtacgcattccattgaacaaagaggcagaagaacagaatctcccgcggtacaccaactcgattgatgaagacaaactcacaaaggactcgcgcaagggaccagcaaccaacagctcaaagacggaaaaaggagcaccgacgactggggctcttcatcaccctctcattccagttactgccaacggagagcgcccaaagccaggagaaaaaggccgggacgcagc

SEQ ID NO: 19269 - DNA, 847 bp, Emericella nidulans
aaggccctctctagtaattggaagaagctccaggagactttgaagaaggacgtctccacaccccctacacaaaagcgcaaacgatccgatcgcgaaccccagaatgacctgatgaagaaacggaaaagcgccgcacaagcaggaaagcgaaattcgacttcacggactgtgcaagccccgaaaaagcacaaaagaatgtctcaggggactcctgacaagaacgcaagtgcaaacgagacttctaatgcggtagtgtcgagggaaaatgagggccgctctccaaagtcagtattcggataatcttatatctagtcatttcttgcaatctctctcttctctttgattatgttactgactctttacagtgttgagataggcaagtacattgcgatggattgcgaaatggttggaattggcccggatccagacaatgactctgcccttgcccgggtcagtatcgttaattataacggcgaccaagtatacgactcatatgtacggcctaaggagatggtgacggactggaggacacatgttagcgggattcttccaaagcacatggcagaagcgcggtctttggaacaagtacagaaagaggttgcggagattctcgaaggacggatacttgtgggacacgctcttcgaaatgatctagatgcgctacttctcagtcatcccaaacgcgacatcagggataccagtaagcatcctccatatcggaaagtcgctggtggggggtctcctcgactgaaaatcctggcctctgagtttctcggactaaatattcaagccggcgcacattccagcatggaggatgcaaaagctacgatgcttttgtatcggcggg

SEQ ID NO: 19270 - DNA, 849 bp, Emericella nidulans
  unsure (1)..(849): unsure at all n locations
tcccaaatcaacaccgtcgaggattgaatcggctcgtaccattcctgcggccccttgttcagaagggtctccgctctgttatcctgtttggtgttccgctgcatccatctgccaaggatgcattgggaacctccgcggacgacccagccggccccgtcgtacaggccattcgtcttctccgctcgcgctttccagaactttacatcgtgactgacgtttgcatatgtgaatacacatctcatggccactgcggaattctgcgggaggacggtacgctcgataatgcgcagtccgttgaccgaatatcggatgttgcgttggcttatgctagcgctggtgcgcactgcgtcgcgccatctgacatgaacgatgggagagttcgcgccataaaattgaaactaattgaggctggtctggctcatcgtgtgctgttaatgtcttatagtgctaaatttagcggctgcctttatggaccgttcaggacgcgactggttcttgcccttcatttggagaccgcagatgctaccagcnttccccctggtggccgccgggcttgcacggagagctattcaaagggacatcggcgagggtgcggatatcattatggtaaagccagcaagcagctatcttgatatcattagagacgcaaaagaacttgcgaaggatattccaattgcggcttatcaagttagtggcgaatatgccatgatacatgctggagcaaaggctggagtcttcgatctgaaatcaatggcttttgagagtaccgaaggaattttacgagctggcgctgggataatagtcagctattttgtgccagaatttttagattggctctaattttggcca

SEQ ID NO: 19271 - DNA, 850 bp, Emericella nidulans
attgagtttacagtcttcgataaggttcgggttgaacccaaggacagctcgtaggtctctttggagtcagattgcttggttttggtctaatgcgtcgaacagaatcaaagaagctattgcattcgccaagccctataatcctgatgcctttcttgccgttggtacgtagcctcctaggttctcttggacaaaccagctgagtatgcatgcaggtggtggatcggtcatcgataccgcgaacgtcatgaacctctataccgttttccccgaggccgatttcctcgactttgtaaatgctccgcttgggaaaggcctccccgtcacaaagccattaaggccgcttgtggcggtgcccaccacagctggcacaggctctgagactacgggcactgcaatttttgatctagtctccaagggcgccaaaactggaattgcccaccgcaacctcaaacccactctaggaatctgtgatcctctcaacacacgaaccatgccatcagccgtacacgcctcttcaggcctcgacgttctctgccactcgctcgaatcatggaccgcgatcccctacaacgaacgaaccccgcgccccacaaaccccatcaaccgccccgcatatcagggcgccaatcccatatccgacatcttctctctccaggccctccgcgacacagtcaagtaccttcctcgtgctgtcaaagaccccgaggattccgaggcgcagtcacagatgctcctcgccgccacgttagctggtgttggattcggaaacgccggcgtccatctctgccacggcatgtcatacccgatctctagccagaacccgggctataagcacgccggctacgatgtc

SEQ ID NO: 19272 - DNA, 850 bp, Emericella nidulans
tgccaaccttgttactgaccttctgtagacgataacggcggcaagtccaaggtggacggtgggaatacttatgcggattggcacacctacgagatcgactggactcctgagaagattgactggttggttgacggcgaggttgttcgaactcttaccaaggaatctacattcaatgagactgccgaccgctacgagtacccccagaccccgtcccgaatgcagctgtccctctggcccgccggtcaagctagcaatgctcagggaaccattgagtgggctggaggtgagatcgattgggactctgaggatatcaagaaccagggctactacgcagcctactacagcgacatcaccgtggaatgctatgaccctccttcggacgccaaggtcagcggcgatgtctcttacgacttcaaggacgacaagggcttggaaagctccgttgagatcaccgacaacaataccgtgcttgcttctctgggcgccaccggcctcaacatggacctcggttccaacaaaaccgacagcagtggcaactctactggctccatctccaactccacggttcctcagaaccagggaggtactggtaacatcgccggatcctcgaccggaaacggaggctcgtcgagctctgattcttcaggaggcgccttcagtcaaggtaccgatgacagcaccgacggcgaaaatgcagccccttctgagcgagtcctcaagggttccttcttcgctgttttggtcgctgtcgttgtcctcatcatcatgtgaagccttctcattttcctcttacatcttcacctcttcttggactatatttatttatttcttcttttgccatctcggcctc

SEQ ID NO: 19273 - DNA, 850 bp, Emericella nidulans
tggatgccacggtgtgattgacattttcaaccgtctgaatggacttcagaagctggatttggattgcccagccgaacagctggaggctggggatgtcatacacttggaaactccagtcaatcctgaggggacctctttcaatattgagcaatatgccaagaaagcacactctcgaggagcttatctgatagttgacggaacttttgccccgccgcctctgcaagacccgttcaaatttggtgctgacctggtgctgcactctggatccaaatactttggagggcacagcgatgtcttgtgcggagttctggccacgcagaacaaggactgggcgcagcaattgctcagagaccgcgttttccttggtggtgtcatgggcaatctggagggctggctcggcgtccggagtttgcggactctggaggttcgtgtgcaacggctgagccagaacgcaacgaatttggtcttgtggcttcacaacgcgctgcagactccaagccccgcacccggcagcgatgaagaggcgacgcagaaagtgctggagcaggttttccactccagccttcaaaaggacgacgagtcctggctcctgaagcagatgccgaacgggttcgggcctgtcttctcgatcaccatgagagaagaagactatgcgcgccacttgccaagcaagcttgccctgttccagcacgcgaccagtctgggtggcgtagagtcgttgattgaatggcggacaatgtcggacaagacggtggaccgacggttgctgcgagttagcattgggttggagaactgggaggatttgaagcgggatctggtgaatgcttttagagcactggtttagatacac

SEQ ID NO: 19274 - DNA, 850 bp, Emericella nidulans
ttcaagatcctcagatgacaggatatgtttcgaccaggtactaccgtgcgccagaaatcatgctcacatggcagaaatatgatgcaaaggtggatgtttggagcgcagcgtgcattttcgctgagatgttgctgggagcgccattgttccccgggaaagaccatgtcaaccagttttccatcatcacagagcttctcggaactcctccagatgatgtaattcagaccatttgcagtgaaaacgtgagaaacagctccctgccatcttttgattttggaatcgcgcgctaatagacttctcacaaacagactctgcggttcgtcaagtcgctaccaaagcgggagcctcaagatttggcgaaattgccgaagttcctggcgctcgtgcatcccgacaagaaacccgaagaggatgaagattataaaaacagtacgtgtcccgcttttgtattcatatatgcttgatggtggcctctaacggaaaatagctatcaaccttcttaaagcaatgctcgtttacaacccggaaggaccgaatcagcgctgaagcggcgctcgcggccccatacctagcgccataccacgatgagacagatgagccggtagcggaggagaaattcgattggtctttcaatgacgccgacttgcccgtggacacgtggaaaatcatgatgtgggttgcattctgtttatcaacatctattaggattcttgaactaactcggcactcaggtattcggagattctggacttccacaacatcgatcagggcggcgacatcaaccccgcccttgtcgagggagccgggctcaaccagcaaggtttccaataaagccctaatgaatcgcgtg

SEQ ID NO: 19275 - DNA, 852 bp, Emericella nidulans
agcccctgtcgcggatgatgtcgacgcgacgtacgctgagtccgactttgacgatatgtccgttgacagtgacggcggcgttgagctcacaccagcaaaatcatcacggccgacaaagcggcctcgattaatagaaggggtggatattggaacgggaataatcacaccaggagaggttgttacgaatgacccgcaatggatgaggtttgtttttctttctctgccgattactgttgtatgtgcgtgcagactaacgtcgtccttatcgtctagaggacatggaacatatacgaaccctttatccacgtccattattgccacagttgccggaacagtccaaaagaccaacaagctactttctgttcagccgcttcgggctcgttacacgccagaaatcggtgatttggtcgttggacgtatagtcgaagttcagtccagacggtggaaggtcgatgtggcagctcctctcttagctcagctacctctctccgcgatcaacttgcctggaggaatcctgcgccggcgaacgagcgcggatgaactgcagatacggacattcttcagcgagggggatttgcttgttgcggaggtacaaacagtgcactcagatggtgctgcatcgcttcatactagatcactcaaatatgggaagctccgtaatggtgtcttccttgcagttgcaggaacaggtggtagcggcgcgtctagctcatcaacaaaaggcggtcttggatctggatcggcaaccggagttgttcgttcacgcagacagatgttcacgataacgacttccaacggcggcggcgatgtagatcttgtcttaggagtgaacgggtatatctggatatcgaa

SEQ ID NO: 19276 - DNA, 854 bp, Emericella nidulans
cgctgaggtgacgcggttcctggatacacatttgcgagcgcggattggtacgcggttaatagcagagcaacacctggcgcttcattttgcgtcgcggcctgctggggacggatcagccgaaggacgagagcagccgcggaaggatgcgccgccgtcaaactatatcggggtaatcgataccgctttgcaaccggctcgtattgtacggtcgtgcgaggaattcgttggagaaatttgcgaactgaaatatggggtgcgcccacggctggagattcacggacaaccggacgcgactttcgcgcatgtccctgtgcatgtggagtacatcctcaccgagctattgaagaatgcattcagggccgtcatcgagagtggaaacgagcaggagccgattgaagtgacaatcgccgccgcaccagatgtacctggcaatcatttacaagcacatgagccagtcaccaacggtaaaccagcagacgccctagacacaggcgctcaatccgacagcgacgtcggattccacgtcgatacagttgttggtactgcagacgcaaacgagtccatcaaattctccactccatcctcgcaaagcattaccctccgaattcgagaccgcggcggcggcatatccccggacgtcttgccccagatctggtcatacagcttcaccacgttttctgacctggatatgggcgaagcaggcgggatagacgcgctaaacacgatttcttccaatagtggccagctgagcagcattgctggccttggatatggtctcccgttgagccgcgcctatgcggagtactttggtggtagtattgccgttcagaccctgtgggggtggggaacggatg

SEQ ID NO: 19277 - DNA, 855 bp, Emericella nidulans
cctcgctgatccggcacgtacacgatttcgcccgcgagaacgaactcaccgtcgacgagtggatggccggagtacaactcatgaactgggccggccagatgagcaacgcaaagcggaacgaggggcagttggtttgtgatgtaattgggcttgagtcgtatgtcaaacctccacttaccttccagggataccttgtacaagaccagaagggacaagcgttaatgggaacatggatagcctcgtcgatgagataaccttcaaactagccgacgaagccaccgacgcacccacagcaaccgcaattttagggccattctttcgtgccgacacccccttccgctcaaacggcgagagcatcgtcaagacagcaccgaaggacggtaagggcgagatggcctacatggcaggccaagtgttggactttgtcaccaagaagccgcttgttggcgcggtggtggaggtgtggcaggcttctacgaatggactgtatgagcagcaggatcccgatcaggaggaatttaacctgcgtgggaaattcaggacggatgaaaatgggcgatactcgttctattgtttgcggccaacgccgtatcccgtaccggatgatgggcccgcaggaaagctgttgaagttgatggataggcatccgttccggccggctcatattcatatcattgtatgttttatcctctccttaactcttcgtttgaggatgcacagcgtggcatggctcttcatgttatgtatcaactaatgtttttgttgtacaggcaacacacgacgggtacaagcctctcacgacgcagattttcgatcgaaaggacccctacctgacgaatgactcggtgtttgccg

SEQ ID NO: 19278 - DNA, 856 bp, Emericella nidulans
tgctctccgggcgaaattggtgccgatgtctgccatctgaacctgcacaagactttctgcattccccacggcggcggtggccccggtgttggtcctattggtgttgcagagcatcttcgtccctaccttccctctcaccccaacagcgaatacctgcagtccaaacgaactgagaaatcctcgccgccgatcagcgctgcgccttggggtagcgccagtatccttcctatcaccttcaactacattaacatgatgggctccaaaggcttgacccacgccactaagatcaccctcctcaacgctaactacatcctgtcacgcctcaaagaccactaccccatcctctacaccaacgacaacggccgctgtgcgcacgagttcatcctcgacgtccgcaagttcaaggacacctgcggtattgaagccattgatatcgccaagcgtctacaggactatggcttccacgccccgaccatgtcctggccggtggcaaacactctcatgatcgagcccacggagtcggagaacaaggccgagctcgaccgcttctgcgatgctctcatctcgatccgcaaggagatcgccgccgtggagagcggtgagcagccgcgtgatggcaacgtcctccgaatggcgcctcacacccagcgcgacctcttggcgacagagtgggatcgcccgtacacccgcgagcaggcggcctaccctcttccttaccttctcgagaagaagttctggccctccgtgacgcgagtcgatgatggtaagctttaaccccgaactttcccgcctggacatgctaactctgcttctagcccacggagaccagaatttgttctgtacatgcccgccggtg

SEQ ID NO: 19279 - DNA, 856 bp, Emericella nidulans
agcgacaacggcatcggctccggtctagccctaactttccaagctcaggactactacgtctttgcaacggctaggaacccagccaaaatgtccaaactcgctgacctacccaacgttactcttttacccctcgatgtctgtaaaaatgaggaaatcacggctgccgtggaggcagtgaaatcccataccggcggcaccggcaaattagactacctaatcaacaacgctggccaagggcacttcatgccaatcctcgaccaggatctgaagaacgcaagagacctctatgaaagcaacgtatggggccctcttgctgtaacgcaagctttcgctccgttactcataaacgcgaacgggacagtgacattcatcacctccgtctcggggcatattaattgcccatacattggcgtatatgcagcgtcaaaacaatccctggagatcattgctgagacactccgccttgagctccagccgtttgacgtgagagtcctgtcggttgtcactggcgctgtgcagagtatggggcaggttgggcggtttgatgagtacaaactcccagaagattcaatgtacaagccaattgaggcgttcataaaagaccgagcgcagggaaaggacgggatagagagggaggagctgatgacttactgtaacaaggtcgtgagtgagatcacggatggcagggcgaaaaagttctggtgtggaggtagtgcgggctttgcgaggtttgtgacttcatgtatgccgggggtatatttggtgagctagtccactccctatttttattggatttctccaaaaaattatcatggctggctccgactgactatttcgtgggcaggatcacatcatg

SEQ ID NO: 19280 - DNA, 857 bp, Emericella nidulans
ccgcaccaccgtccacgtttccaacatcgacccctccacctcggagaaggaggtccaggacttcttcagcttctggtatgcagcctcttccgtaaggaaaattatttatctaacgagtccaacagtggcaagatcgtcagtatctcagttactcccacctccggcgagccaggctctcttaagtcggcgaccgtgacattcgaaaaggatgcgtaagtctaaaccacccaccgcaccctccatatcgtcattatttaccatttaacacggaacagggctgctaaaaccgcccttctcctcgaccagacccagctcggcccctctgtagtcaccgttaaggccgcgcaaacccttgatgagatcgcaggagagcatagtgctaccgccgctgaagctaaagacgagaaccaaaacgacctcgagcaggaagacaagcctcgctcccgcattattgcagaataccttgcccatggatacacgattagcgaccaggctatccagaaggctattgccatcgacaaaaagcatggcttcacgtctcgcttcaccagcgtcctgagcaacttcgacaagaaaactggtgccagcgagcgcgccaagggtcttgatgagagctataagatcagcgacaaggccgccaacagctggcgcggcttgcacagctactttgagaaggctatcaacaccccctcgggccggaagctgcgtgacttttactctcagaccgataagcaagttcgcgatattcacgctgaggctcgaagactggcggatctgaaggctggaaagactgaggagaagaaagctgagggtgaaagcagctctcctgcgacggagtctaaccctgcccctgcccc

SEQ ID NO: 19281 - DNA, 857 bp, Emericella nidulans
atcgtgaccggcgcatcctcaggcctcggtcgagctatcgctacccgatacgctcgcgaaggggccaaagtcgtatgtgctgatgtatctccaacagcgcgatcgctcgaggagtccgatatcaccacacacgacttgatactgaaacacggtggagaagcgctcttcatccagactgatgtcggcgacgcggctcagatggagagtctcgtcaaagccacggtccagcactatggccgactggatatgtaagtatccactggacaaactaagctcgaattaagtgaacttgactgaacatcagggagccttgtcaacaatgccggcataagccttgaggcccgcaaaccggcagtgctgcatctcaccgacgaagaaacctgggatacgaccatgcgcgtcaacgcaaagtcggtgttcttgggatgcaagtatggtctcgcgcagatgctgcgacaggagccgcatccctcgggggatcgggggtggattgtcaacatctcctccattatggggatgattgtcggaccagaaaatcgtacgtcgcgcccgtttccgggttggattgcccactagtgagtgatgctgacgaaatgtgtactcagcttcctattgcgcatccaaaggcgccgtcagccaactaacccgacagatcgccctggattacgcgcctcaccggatctatgcaaatgctctctgtcccggatgtaagttctacattttcaatactaccttgtaatgctgaagataagctgaacgcgaggtagatacacaaactgcgatattcaaagagacgacaacccacttaacgccgtgggaggatttgaatcggcgacatccactgaaggggccgggat

SEQ ID NO: 19282 - DNA, 857 bp, Emericella nidulans
ggcagggcccgtgtcaacaaagcatggacgtctattttccctacgtgcaactactatattcttcgtccttgggccagtagccgaaactcttgcctccaatatcccaatactcgcctttggcagaatgttatccggtgttggatcaggagcagccattgttgtcggtccgatatacatttcggagatcgctccgccaagcgctaaggggttttttggcgctttcacacaggtcatgacgaatgttggtattctcttgacgcagacgcttggctacttcctcagcaaggatagcatgtggagagttatcctcgcgattgccgggattatcggagcttcagagcttctcggcctgactctggttccagagagtcctgcctggcttgctgatcatcagaaacacgacctagccagacgcgtcctccagcggatacgcggcaggaacgcagacatccgtggcgaactagaggcgctcggacactccaccagatctgatgatgacgctggcgaacaacagtccctgctctcacccccttccagcaacctgcctccaaagcagcctcctgtcacaatggcccaagtagtgatggattcagggtaccgcccagccattatcgccgtcgtcgggatcatgatagcccaacaatttacaggaatcaatagcataattatgtacagcgtctcactgctccagagcatcctccccactaccgccgcccttctctctgtcttgatctccgcaattaacctcatcatgaccctggcctgttccccgctccccgacaagatcggtcgcaagacttgccttttgtccagcatttgcggaatgggatccacttccatcctccttgctttgggca

SEQ ID NO: 19283 - DNA, 857 bp, Emericella nidulans
cagctgtcgctccccagggtagccgtcctggcccccctcttcatcgcaagcgtcatatcactggtcctggttcgttcgaatccccgttgcactgagttccgtgctaaaaaaaaaaaaaaagaagccaggctaacgtagcaaacgtatagctcctcggtgtttatacaatcttccagaacactccggtgcccaaatggcgtcccaagagcaccccggtccatcttctggtcgtcctcggcagtggcggccacacggcagagatgctttctttgctacggcgcgtggacattattacaaacaaatgcatttatcggacctatgttgtcagctccggtgataacttcagcgctaccaaggcgctcgagttcgaatccagtctcgggggacagccagagtcctacgcaatcataacagtgcctcgtgcccgccgcgtccatcaatcctacttaacggctcccttcaccactattttgtctttctggtcctgtattctagttctatgtgggcgccatccggaccagcagcgacacaaacgaccagcgcaacttacctcgccttatccggatctcatcatcaccaatggccccgcgacagccgttagtgttatactagctgctagattcttgcgtcttcttgcttcttgcctgagcttcctatctttagccaagtcccaccggcaatctatgaccggcaaaggggcgagcgaggctctgctgccgggagaataccgacttcgtacagtatttgtggaatcttgggcgcgggtgaagacattgagcttgtcgggaaagattcttctgcctttcgctgaccgattcttggttcagtggcctgcgctggaagggaagcaggcgtgg

SEQ ID NO: 19284 - DNA, 858 bp, Emericella nidulans
tgcccccttcttcgctgaggtgttcacaggacaactgctgcatatgatggatgttaaggaagatccagaactccaatcactagcataccacgttttccgtcacctaccgaacgttccgtatcccgctgaggagaactcagactttattaagacacttatccgcattgggcagacgtcgccctcttggcaccagcggttacgtgtcatgatcaatattcagattatctacttcaggcgtctcttccttctctctccctctgaccgtgataagctctttgagtgcgtggcgagcatgctagaggacccacagcatgaagtcagagcgggtgcatcagccacgctgtcagggatggtccgttgttctccagagttcctccgcaaagagatcgtggatcgtttcaagaagcgattcacccaaatcctggtagagaatcctcttcccaaacgaccaaagatgcctcgtatggccagtgggttatcgtctccgggctcctcgggagccaatactccaaatcctgaacacacccgtcttgttatctccaggcacggtgccgttctaggtctcggagcacttattcaagctttcccctacagcagtccaccgccgacatggatccctgaagcactgaccacgctgagcgttcgtgcggccagcgatcctggcattgtggggtcaagtgtcaagtcaattatcagtgagttcaagaagaccaggcaggacacatggcatatcgatgcgaaggtaagtcagcattttcttgttctgttgtatgcacatagcaactaatcccctatcaggcatttacctcagatcaactagaagatctctcaggtgttctttggaagagctacttcgct

SEQ ID NO: 19285 - DNA, 858 bp, Emericella nidulans
ctggcgataccgctatacatacacttgaatcaccatgtcggccctagctgaggaattccgttccagaaactttagtatgacactcccatcatcttgctggcagcaaacagacaaagctaacagctcaaccttcaggtatctacggtcaatggtttgtgcccttatccccagcgaaatatctccctcacaaaatatcgcacgccgtcgaacccttgaatgaatgatggctgcctggaatctctaccgatttgcttggcattgtttgcgcttgatcgacgctggccggataagcgcccgctctggcatccgcagggtttccgcgcccgcgatgtcttgatctgttatgctagtgctactgtaaagtagaggctaacgaactgctgttaggacgggtgtgctgtgcatcatcctgtgtctcgccgtcgggatcgccaatattttctctttcaatgcagtgctcattgttttcagtatcctctgcatgtaagccaaagcccactcttgcatgccatgtgttgagactcatccgttcagtatctccggctgcatcctcgtcttcactgaagtgcccttcctcttgagaatctgtcccacctctgcgaagtttgacacctttatccgacgtttcacgaccaattggatgcgtgctgcgatgtaccttgtcatgagcattgttcagtggctcagtctgctgtcgagagcgtccagtctgctcgccgccgccgttttcctactcattgcttctctgttctacgcgctggctggcctcaagagccaggagtttgtcggtagcaagactctgggtggacaaggcattgtgcagatgattgtttaagacgagcattatcgatcccgctg

SEQ ID NO: 19286 - DNA, 858 bp, Emericella nidulans
gggtgtgagtcaatcatcagtaagcttgaagaatatcgccagtcagtcaagaatatgcgagaattggatatggaccctaaggagcacgtccctttcaacttccttttccgcggtcccccaggtaagtcagcaggagccttcgaaatacagttactaatgaggtcaggctctggcaaaacgagcacggccaggaagatgggcaaagtgtactatgatatgggtctgctgtcatctgcggaggttatcgaaagctcggcaaccgatctaatagggcaatatatcggtcacactggacccaagacgcaagaactgctggaaaagtcgcttgggaaggtccttcttattgatgaagcgtaccgactcgcagaagggcaatttgcaaaggaggctatggacgaaatggtggactgcatcactaagcccaagttcttccaaaagcttatcattattctggcggggtacgacaatgatatcaatcgccttatgaccatcaaccctggcctcactagtcgttttccagaggaactcgaattcaatggactcgctccggccgattgcctccagcttctcaccaagttactccagaggcgaaaggccgacttcttacccaaagtcaacagtttcgatctggatgcactggactctccaagttcgttgttccaaaagaagttgttgaatagattccagtcactcatccgtaccgcgaactgggccaatgctcgtgatattcagacgctcgcaaagacaatcttccgagtcgctatccagaagatgcagaacaagaacgtgtccgtgaccgaggagcttattctccgccacgttgaccatatgatatctgaacgaacaaaccgagaagcg

SEQ ID NO: 19287 - DNA, 859 bp, Emericella nidulans
cgccaccattggaccacctcaatcacctatgatgccagtaatatcataacatacaatctatccgtcggcagcaaaggtcaagatctccgtcactgctgggaagagcatcccgagtttcaagccctgccgacgttcagctcgctagctgtgatcgacatcatgggaaaagtcactgttgacatgccgaaactcctgccactatataagccgagccagcacccgcatgtccacgcagagcattctctcgagataagagggccattgccaagatcgggaactctaacctctgaggcgaggattcttgacgttgtcgatcgtcgcacgggcgtcgctctgattgtgggtatttcaatcaggaatgaggatacgggggagtggatttgctatagcgagtggacctcttttctgatgaagatgccaggagacggggcgtcgaaggcttcttcgagtatgcagagtacactacttcctagccgagagcccgacgcggtgctcagccaccagacaacccctgaacaaggtgctctgtatcgagcggcaacaggcgagtggaatccaatgcatattgatcctgcgactgcccagcgggctggcttcccaggccctattctctctgggacgtgtacgatcgggattggcgtaaaccatgttatcgaggcctttgctggtggagattcggcgcgattccagagactaaagctgagacttagcaagcctgtctttcccggggaggtagtcacaaccaagatgtggcggtttaacgaaacgaagattgtttatcaacaggtggcgggggatgggagggttgtcatttcgaatgcggagattaaactgaaagctggaggaaagcagcggagcc

SEQ ID NO: 19288 - DNA, 860 bp, Emericella nidulans
cgtgcacggcgaagtctcccgtctcctcttctccccgattgataaccgcacggtcacaggggttgttctcaaagattttaagaacacgaccatgacggccgacctcgtcatcctcgcaacaggcgcctggacagccgggcttgtcgaccttcggggtcgcgctgtctcaaccggccaagcaatcgcctacatgcgcatctcagacgaggagcaacgccgcctcgaacacatgcccacgatcctcaatttcgcaacgggtatcttcatcattccgccgcgcaacaacatcctcaagatcgcccgagctacgtacggctaccacaaccccaaggcagttcccgtgcccggcgcgacaccaacaggagaaacaatgcacgtcagcttgccggagaagggcgtccccatcccgctggagggggagacggccttccgcacagccctgaagcagctcctcccctccttcgcggaccgtcctttcctcaatacccggatctgctggtacacagatacgtatgtcgatcgtaccaaccctttattgctcatgaccattcgatactaactatgcccaaacagtcccagaggcgacttcataatcacccaccatccatcgcacccacacctcgtccttgcaactggtggcagcggccacgcatacaaattcttcccacttatcggcgaaaaggtggtcgatgcgctggagggtaagctcgcacccgaactgcgcgcgctctgggactggccggaggctgtggacgaggcccactttgacggaacagaggatggaagtcgttcaggggataagcggctgctgcttttggatgagttggcgaagggggcagaaagcgaagcgggagagtgcg

SEQ ID NO: 19289 - DNA, 861 bp, Emericella nidulans
gcccgcaagcagctgtccacaacgtcccgcgccgtcgtcgcctcccagcaacggtacagctcgagcttcgacagcccatttaccgccaaagacaccctgaaggtccctgatttcagcaagtactcttctaagaaggctcctcgctctaaccaggtcttttcctacttcgtcgccggtactatgggtttggcttctgccgttggggccaaggctactgttcagggtaagtgttcctgagcatcgtgatatatggaggcaccggaggctgcgatactcgacttgcttgaaatccgattcgcaaaatagcttacggggtgaatattaccacaaatacctggctgacggcgactcttgcaatagacttccttgtcaatatgtccgcctccgccgacgtcctcgctcaggccaaggttgaaatcggtctcgctacaattcctgagggcaagaacgtatgtttatattctcattgggccttcttgtgttgcgtttgcaggccttgcggctaaaccggagctttcaacaggttatcatcaagtggcgtggcaagcccgtgttcatccgtcaccgtacccaggatgagattaaggaggctcaagagtacgactggaagaccctccgtgacccccagcccgatgaggagcgtgtgcagaaggccgagtggctcgttatgcttggtaagataatatatatatatatgggttcctgcagcaactaacagctgacctatctaggtgtctgcacccaccttggttgtgtgcccatcggtgagtccggtgacttcggcggctggttctgcccctgccatggttcgcactacgatatctccggccgtattaggaagggacccgcccctctgaacct

SEQ ID NO: 19290 - DNA, 862 bp, Emericella nidulans
cccagccacgaaatcctggtcaccccccaaactagtcaaatccccctaccttccgatccacgggatggctccagggttgaactacggccaacaagcgtacgaaggcctcaaggctttccgacaccccaataacagcaagatcacaattttccggccggaccgcaatgctctgcgcatgcagcgctctgcttcgtttatatcaatcccacctgtcccggaagatctctttctggaagccgtcgaattggccgttggggcgaacgcgggattcgttcctcctcatgaaacaggggccgcgatgtacatccgtccgcttatctttgggtcttcagcgcaattaggcctctccccgccggaagagtatacctttgtagtctttgtcatgccgactggtgtataccacggcgtgcatgcagttgacgcattaatactggaggatttcgaccgtgcagcacccgagggaacagggagtgcaaaagttggcggaaactatgcgcctgttctgagacacagtgcgaaagctcatgccgaggggttcgggattacactgcatctagatagccggacgcgttcggaaatagatgagttttcgacgagcggcatgatcgctgttaagaagaataaggagtctgggaaggttacgctggtccagccggatagccctaatgttattgacagtgtgactgcggcatcggtctgcgagatcgggaaactttggttcggatatgatgttgagaagcggaggattccctatgaagagttgaatgagtttgacgaggtgatggctgctggtacgacggcggcattggtgcctattcggagtatcacgaggcgatctagtgggaataggtttgaatatgag

SEQ ID NO: 19291 - DNA, 862 bp, Emericella nidulans
tggcatacgcgtgtccaggaagctctggatatgtctctaagtgagctgggtatggactatgttgacctctatctcatggtacgggcgggtctcgtctgaaatacaagaggaagggctgacatgttcccacaggcattggcctataccagtcgacccaaatgactcctccacccagctggccgactgggactttgttaagacatggtatggcaagatatttctctcgcttatggctggattcctgtttctaagctctacagggaagaactgcaaaatcttgcggcaaccaaagtgcgaaatattggtgtgtcaaacttcggcatcgcacacctcaggagactgctcagccattcctcttgcaagattgtccctgctgttaaccaagttgaggtacacaatccaccagatacatgttgttcgcgtatcgactttctgacaacatagttgacaacatagcttcatccctattggccatcaagaaagcttttgcagtactgccgcaatcatgagatccattgtacagcctattcctgccttgggtctacagattctccgctactagaagacaaagttttgcttgaaatatgcaagagaaggaacaagtcaccgcagcaggttctgtacgtttcaagtccttatttagtaccatgttatgctatggtatgttgtccccagcactgacaattcaaggatcatgtgggggctccagcgcggcaccagtgtagtacccaaaaccgtcaacgctgctcgcattgaggaaaactttgatttgaatggctgggcactgagtgacgatgaattggacaaattgaaccgatgcaccacccggttcaagtcttgtaatgatgactggctgccggca

SEQ ID NO: 19292 - DNA, 863 bp, Emericella nidulans
cccaatggcacgccttcctgcactccctcccaaagtgcgaacaccacgtacacctcgaaggctgtctcgagccgcctctgatcttttctatggcacgcaaaaataatgtatctctcccctctccgtcctcaaacccagcctatacctctgttgaaaccctcagcaagcggtatggacatttcagctcccttgacgacttcttgtctttctactttatagggatgacggtcctcaagacacagagcgactttgcagagcttgcgtggacgtacttcaagcgggcacacgcggagggcgttcaccataccgaggtgttttttgacccgcaggtgcatatggagcgggggttggagtacagagttattgttgatgggtatgtggacggttgtaagcgggcagagaaggagctgggaatctctacgaggttgattatgtgttttctgaaacatttgccgctggagtcggcacaacggctctacgatacagcgctaaacgagggtgatttggggctggatggcaggaatcccgtcattcatggccttggggcttcgagtagtgaagtcggaccgccgaaggatttgttcaggcctatttatctcggtgcaaaggagaagagcatcaacttgactgcgcatgcgggagaagagggagatgcttcttatattgctgcagcattggatatgggcgctacgcggattgaccatgggattcggcttggggaggacccagagctgatggagagagttgcgagggaggaggtgctgttgactgtttgtccggtatcgaacttgcaattgaagtgtgtcaagtctgtggctgaggaaaagattcgaaagttcctggacgctggagtgaggttcagc

SEQ ID NO: 19293 - DNA, 864 bp, Emericella nidulans
tcaagcatttgtccttgctgtgagcaattgcaagtctttcatcgacatcaaattcatggtgttgatgcaactgatcattttcctgcccctctcgctgattcgcgacataagcaagcttggtttcactgcgctcatcgctgatctgtttatcttgcttggtctggtatacctcttctactacgacttcctcacaatatccacgcagggtgtggctgaaatcgcttcattcaatccgtctacatggacactattcatcggaaccgctattttcacttacgagggcgttggcctcattattccaattcaggagtcaatgaagcacccgaagcagttcacaggcgtgctggctggcgtaatggttattatcacgatcattttcctggcagcaggcgctgtcagctatgccgcttacggacatgcaaccaaaaccgtcattctgctcaaccttcctcaggacgacaagctcgtgaatgctgtccagttcctctactctctagctatacttctaagcactccgcttcagctcttccctgccattcgaatcatggagaacgagctcttcacccgtagcggaaaatataaccccggcatcaagtggaagaagaacggctttcggttcttcctcgttatgatctgcgcgtttgttgcatggggcggtgccgatgatcttgacaagttcgtttctcttgtcggtagcttcgcctgcgttcctctcatttatgtttatccggtatgtcacttctagccgttgttattacccctagctgactttctagcccctccttcatctcaaggcctgcgcggagaccaagcgccagaaactcgcagacatagcgctcactgtcctcggagttgtcagctgca

SEQ ID NO: 19294 - DNA, 864 bp, Emericella nidulans
tggcggcagggcaggaatatatggagcagaacgtaagcttccttcaggaatttgattctatataggtgtcctgctaattggcatcggaaaccagtttaaccgctacgtatccattccagccctcaagcactacttcaacgtctcaaactcctacgtgatcaataagctggggcttgtgcttttcccatggcgacacaaaccatggtctcgacagcaagcacgtcttaccactgcctcgaccgggcctgatggccagatttcgcaccagcaatattcgtccatgttcctacctccgcgtgatgatatcaactcgcctgacatgtacatccctgtgatggcccttgtcacatacatccttttgtcggctatgttggcgggtttccgtgggaacttccacccagaactccttgggcgaccaccaccacagcaatcgcggtcatcgtattcgaaatcatctgcctgaagctcgccatgtacatcctcagcatcaacaacgactcccaattggtagatctggtcgcatattctggctacaaattcgtcggaataatcgtcaccctcgttgcctccgagatcctgactcctgggaggggaacaggtagctgggtcggatgggtagcattcatctacacgttcctggcgaacgcattctttcttgtaagttcgatcagcactgtgagtctgaaacttgctaacctgacccacagcttcgttccctgaaatacgtccttctgcccgactccacaagcgactcatctatgcgcaccggctcaatgcacaccgttgctcgctctcagcgcaaccgccgcacgcagttcctgtttatctactcctacgtcattcagttcatcttcatgtgggtgc

SEQ ID NO: 19295 - DNA, 865 bp, Emericella nidulans
ctagacaactcagccggaatggtaacactacttagcctgctgttcgctgtttttcttcatgcactctcccaagcagcgcctcttgcgacgcgtgctacattagcacaggttaccaactttgatcacaaccccgccagcataaggatgtacttttacgtcccagagagactcgccgcatcccctggcgtccttgtttctctccacggcgcgtctggcacctccctgcaacaatacttgtccacgccctacgcaagactagctgaaatttacggcttcgttgttatctacccctagtctccacagggagcatgggatgcaacatctagcaaatctttcctgcatggtggtgggggcgccagccagtctatcgccaacatggttagatacgctttcacaacttaggaggccaatcagagtagagtctttgtttcaggagtttcgtccggcgaaaatatggcagtaagctacttctctctcacgcggcttctacaattcaatggacagttttagtaaagaagacgagatgatctaaatgccccgcagaatacaacggcaggcggctacccggacattttcaaaggagctataatttactctgcaggctcttctggcaacattcggaacatgtaccaaggatatacaggaacgtatctaaaagtacagctatatctgggatctgaagatactattataggctcgacagccttcaacaccacactcgcggcttgggctgtcgtgttgagctatgggaacgcgcctaaacaggttatggttgaagagcctgaggacactagggtgacgtatttttttgggaggaagttgaaggaaatttgggcggaggggattggtcgctcagtcccgaccc

SEQ ID NO: 19296 - DNA, 866 bp, Emericella nidulans
tctcgccagcgtgcacaacctagcagcaacatacctggatagagggcgatggaaggaagcagaagagttatttgtgcagctagtagagacccgaaaacaggtggtggggttagagcatcccgacactctaaccagcatgcacaacctggcatcaacataccggaaccaagggcgatggaaggaagcagaagagttattgacgcacatactggaggcctggaaacgggtgatggggtccgagcatccttccactctaaccagcatgcacaatctagcctcgatattttggtgccaagggcgatggaaggaagcagaagagctgctgacggaggtgattgagacccgtaaacgggttctagggccagagcatcctgacactctttccagcctgcacaacctggcatcaaggtacctggatatagggcactggaaggaagcggagggtctgtggcgcaggtaatggagaccaggaaacaggtattaggaccagcacatccttctacattgacctgtatgcacaacctggcatcagcataccagaaccagggacgattggaggaagcagaagagttgcaggtacgagtgatggaggcctggaaacaggtggtagggtccaagcatccttccaccttaaccagtatggacaacctggcaaccacataccggaagcaaggacgatggaatgaagcagaagagttgcaggtacaggtgatggagacgtggacacaggtcctagggccagagcatcccgatacactaatcagcatggccaaccttgcatcattatactataatcaaggacaatggaacaaagcagaaaagctacaggtgcaggtaatggagactcggaaacaggtgctagggcc

SEQ ID NO: 19297 - DNA, 866 bp, Emericella nidulans
tccagacgccttcacacgctttctgacctagcacaagctactattcggcgatttgcagacgtctactcccagcagcgaaggttcggcggaggcgctggcggtgtcaacctacttcagacataccccggcaaagtgggggttcccagctccattttcgccccaatgggcagtcaccgagaggcacaagaagtcgccgacacgacgttcctcccagaagacgctgaggacaggcttgatcgcattgtgcgagcgacaatgaggacgaagaatgggtcgagccaggctggcgcaaagaagaggaagaccgacagcacgcaggagcccagtcgcgacgctaatgcggctaagaaggcgaggaagaacagtgaaagttcctccagacgaaaatcgggctcttctgccgtgggttttaagatgcccaagcgcaagagtaccaagaagaccggagacgactggtcctcggatggcgaagcggcaggtaatgtcgccagtagttccgccactcgaaggcgcagcaatagaggcagcgcttcacggcgaatcagctacgcagaccccgacagtgatgaagacgacatggagatggatgaattgaatcaggctcgagatgatgaagatgaaggcgaagatcaagccaaggacatcgaaaatggatctgacctcagcgaactgagtgaagcggatagcaatatgctagaggagcccgaggatgacgacggtccctcagaaaaagaagaccagcccgatgacaagcaaaacggcgacgacgatgcacagcctgcatccccggttccagtagcctcgaaggcgaaagtacctggtaaagcaatgaagaaggccacccttccaacgcgacgatcagctcg

SEQ ID NO: 19298 - DNA, 867 bp, Emericella nidulans
gtatcaagcagggaaagaaatatgacgatccagcctctgcaagtcaaattcgagacttcatcaactttcatcagctagacatgtcggaggttctactgcccctagatcagttcaagaacttcaatgagttcttctaccgtgcactgaaaccaggagccagaccctgttctgccccgcatgaacccgggattgttgtttcgcctgcggactgccgtacggtggtgtttgaccgcgtcactgaagcaaccagtgtctgggtcaaagggcgggaattctccatcaagagacttcttggaaatgcctatcctgaagatgtctcacgatatcagaatggagcattaggagttttccggctcgctcctcaggattatcatcgcttccatatccctgtcgacggcgtgatgggaaccccgaagaccatcgaaggcgaatactacacggtaaacccgatggcaatccgctccgcgctcgatgtgtatggcgaaaacgttcgagtcctggtgcccattgattcggtgagacacggccgagttatggtgatttgcgttggtgcgatgatggttggaagtacggtcatcacgcgacaggccggtgaaaaagtctcacgggctgaggagctaggatatttcaagtttggcggaagtactctcctactaccctttgaagaaggaaaggtcaactttgacagtgatctcgtggacaactcgcgaggagctctggaaactttggtaagacctaatcccttgctgctcgacacgtggttgctaacatcaaccccttgtgcgtctcaggtccgggtaggtatgtctgtgggccacagccctgatataccacagttcgagcctgatctgcccaagaagcccgagg

SEQ ID NO: 19299 - DNA, 868 bp, Emericella nidulans
gggtcccgtactgaccataccctactacagggctttcgaaccaccagggaatgatgtctcgaggcgacatcgaactttccgttatctcgaagaatttcttcttctcgttcttcaatctattcgtcatattcactgtcatcggcactgcaacgaatttctacggtctctgggagcatcttcgggactccttcaaagatgcaaccactatcgcgacggctctcgccaattcgctagaaaaccttgctccattttacatgaacgtctttgttcttcagggtctaggcttgttcccactcaaactccttgaggtcggaagcgtatttctgtaccctattaattacttgatggccaaaacgcctcgagattatgccgagctctccacacctcctacattcagctacggatattcgattccacaatcgatactgatactggtcatctgtgtgatttacggcgtattcccagcatcttggctgatttgcttctttgggctggtctacttcacaattggtaactttatctacaagtatcagctcctatatgcgatggaccatcgacagcactctacaggacgagcatggcccatgatatgcaaccgtgtcctagtgggtctggtagtgttccaacttgctatggcaggcactcttggtttgcgcaaagcaattaccttggcgctgctcattgtgcccctgatcggagccacagtgtggttcagctacttctattctcagagctatgagccgttgaccaaatttattgctctaaaaagcatttatcgcgacacaccgacatctggtgatatctctccctctacaacttcgacgttctcaccgcctcttgctctcgaccgtgatgcgttcccaatccg

SEQ ID NO: 19300 - DNA, 868 bp, Emericella nidulans
ggccgtggcttcgttggagagttcctccatgaggctggctacgaagtcgtcttcgtcgatgttgtcgacgacctgatcacttcaattcagaacactccctcatacgagatcaccgagatcagcgaagacggcgagaagacaaagaagattactaactaccgcgcactcaactccaagtctcatgaagccgacgtggtccaagaaatcgcgactgccgatattgtgacgtgcgctgttggaccgcgggtcctccagttcattgctcccgtcatcgccaagggtctcgaatctcgcaatgtttccaccccactcactgtcatcgcttgcgagaacgctatcaacgctaccgataccctccgcggccatattgagaagaagaccaagccagagataatcagcgagcgtgccgtttttgccaactgcgccatcgaccgtattgtccctaaccagcctccgaacaacggtctcaacgtccggatcgagaaatactgggaatgggttgttgagcaaactcccttcaaggagaagggcgtcgcgcaccccaacgtctccgccatccactgggtggataagctcgacccctacattgaacgcaagctgttcaccgtcaacaccggacacgccacgactgcctactatggccaccttgctggtaagaagactattgccgatgctctccacgacccgaagatccgtgaaaatgtccacaaggtcctagacgagactgcttccctgatcattaacaagcacggcatctctgaacaagaacagaaggagtatgtcgataagatcatcagccgtatctccaacccctacctcgaggacggcgttgagcgtgtgggtcgggccccactgcgcaagctctccc

SEQ ID NO: 19301 - DNA, 868 bp, Emericella nidulans
cagcgcaagcgcaacagtgacggtgtggaaggatgggagatcaacggggccaagaaatggcagacgggggcgcaccactgtacgcatatgatcatcttcgcgcggacgagcggtgaatcgggatcggcgcgcggtataacagcgttccttgtcccagcccacaccaaagggatcgaggttacgagctacgagtggacgttcaatatgccgacggaccatgcgactgtgaccctgaatggcgtctttgtcccccacagcgccatcctagggaagctggataacggcctcgcaattgcgcagacgttcgttcatgagaaccgcatccgacaagcggcgagttcgtgcggcgccgcaaaatactgtcttgacagggcgattgagcgtgcgaattcgagaaccatctggggcgaggggcggaagttgtctgagcaccagggcattcagttcccagttgtggagctcatgacccaagtcgagatgttaaggctgctgattctgcgcacgagcgtgcggatggacgatattgtgtctgagtgtgagaagacgggcggtaaggatgtgccctgggtccggattgaaaaggagttgagcggggaggttgccatgtgcaattactgggccaatcggttggcgtgtcaggcggcagaccgggcgattcaggtacgtactctccttctgagtctctattggctgtgaataaacgcgctgaccaagttgttgcgagtttagattcatggcggcgacggctactcaagacattaccccttcgagcacatctaccggcatttcagaagatatcgtattacggaggggtcagaggagatccagatacgtaaggtggcagcttacttgtttggtgtgaagggga

SEQ ID NO: 19302 - DNA, 868 bp, Emericella nidulans
gcagaacaaagtcttcgcgaacatgccctatactgactggaaagaaacggtgtcatgcaaggtcgcagggacctggaacctacatcttcttcttcccagtggtatggacttcttcattatgtactcgtccatcgttggcgggattggaggcacggcggcggtcaactacgccgctgcgtgcgcataccaagacgccttggtgcactaccggaacggtctcgtcgagcgcgcaataacactcaacttgggtgttatgctaggctacggggtactgcgcgataacgacatggtacgcaatgagctcacggcgtctgggtaccctattggcatctctcaaagggagattttcgctttgctggagtatcactgcgacccgtctcttgaaatcccccgcacaccgctcagatcacaggtgctggttggtctcaatacaccactgggcttagctgcagagggccgcgaggtccctgtcctcctcaatcggccgctattccgtggaacttggaatatcgtcgactccgtcgagtcgcccgccgccaatgcagccgaggatgcaggaggcaatgaggacatcctccgtcgactggtggctgtcacctccatgcaagagaccgccgatgtcatcgccgagtcacttatgcagcgactcagtaaggcagtcggcgttccgctcaagaacctagatgcgaccaaaccgatgaatcagtatggggtggactcgctggtcgctgtggagttgaggaactggttcaagtggaagttggatgcagatgtcgccgtctttgagatgctgggcaagatgacctttgaggagatgggccgtatcgcggcggtcaagagtctggtggttaagaggatactgtcgtct

SEQ ID NO: 19303 - DNA, 870 bp, Emericella nidulans
ccgagatggcgatcctgggttacatcgactttgcgtctatcatccttgccattggcatcaccatgattgccactggtgttgagagcaccaatgcccccggcgggctcagcgccgtgaactggtcggcctggcccaaggaggatattaccttcacggacgccttcattgccatgaccaatatcatcttcgcctacagtttcgccatgtgccagttctcggtcatggatgagatgcacaccccctcggactacgtcaagtccatctgggccctcggtctcactgagattgtcatctacaccttgactggagctattgtgtatgcgtttgttggccaggatgttcagagccctgccctgctctcagccggtcatttgatgagccgtgtcgcttttggaattgcgttgcccgtgatcttcatcagtggttcgatcaatactgtggtcgctgctcgtgtcgttcacggccgcatctttaaggactcccctatccgcttcatcaacacgaagatgggctggattacatggctggccatgattgctgttggtactgttattgcgttcatcatcgccgaggtcattccctttttcaatgacctgctctccatttcctcttcgctcttcatctcgggcttcaccttttacttcccggccctcatgtggttcatgctgatccgtgagggatcaatcttctcctcacgcaagaatatggcactcgccgcgctgaatgcgctgtgcttctgtattggtgtcgtgacactcgtggctggtacctactcgagtatcaaggacatcgtaagttatccgctctgttcttctttcgagtcattactaattcaatacagattgacaagtacaacgccaacgcggtccg

SEQ ID NO: 19304 - DNA, 871 bp, Emericella nidulans
agttctggtttggccccttctaactaccgtcttacgggtggtgaatggataagagctgactgttcttctactaggaaatcatgcacaggcccttgcgctcgcctcctcaactctcgggattcccgcgtatattgtcatgccgaaaatcagcactccctccaagatcgcagggacgcagtctcacggcgcagaagtgattttcagcggctcaacgagtgtagagcgggaagcggtagttgcggacgtccaagcgcgcacaggggcgattcttgtcccaccgtatgacgattaccatattatttgcggccaggggacgacgggactagagatgcatgcacagtatcttgatgctgtgcgcgagaagcctgagttgagtgtacatgagtccgagtctccgtccgctagggaaggtctagatgcggtgattacgccgattggaggaggcggtctcaattccggggttgcaactttcttctcggataagacgacgaaagtctttggcgcggaaccgagcttcgagggcgcggacgattgtcggcgtgggcttgacgctggacagagggttgagagcgtgaagactctgacgattgcggatgggttaagaacgccggtgggcgtgttgaattgggaggttatttcagacaagagcaaagtggcgggtgtgttttccgtcactgaggagcagatcaaggctgcaatgaggcttgttctggaacgaatgaaggtggttgttgaaccaagcgctgttgtgggattggctgtttgtctgtataatgaggagtttcgacggcttgtcgaacgcgaggcgccagccggctgggatgtaggaattgtgtttagtggtgggaatacgacggttgaggcgattggg

SEQ ID NO: 19305 - DNA, 871 bp, Emericella nidulans
ttcttcttcaacatgagctttattctcaccctctcctgccccgaccggcccggcatcgtcagcgccgtgaccggtttcctcgtccaacacaacctgaacatcatcgactcctcgcaatttggcgatcccacctcgcaccgcttcttcatgcgcatgcacttcggccccgatacaactggcgccagcgatggtgctgcggccccctcccttgaggccctccgcgaagccttcaccccgatcgccaccgcgcactcgatgtccttccagctcctccccgccgcccacaagccgcgtgtcctgatcatggtctccaagatcggccactgcctcaatgacctgctcttccggcagtccaccggccagttggcgatcgaggtgccactcatcgtatcgaaccacccggacttcgagaccctcgcggcaacgtacaaggtgcccttcatgcatctccccgtgacggcggacacgaagcagcagcaggaaacccggattctcgaactcatcaaggagtatgatattgaattggtcgtcttggctcggtacatgcaggttctgtcgccgacgctgtgcgacgctatgtctggaaaaattatcaatatccaccacagtttcctgcccagtttcaagggtgctaagccctaccaccaggcttatgaccgcggtgtgaagcttgtcggtgcgacggcgcatttcgtcacaagcgatctggatgagggtcctatcatcgaacagaatgtcgttcgcgtgaaccatgccttgagtccgaaggagttgactcatgccggaagtaatgtggagagcaatgttttggctgcggctgtcaagtattttgctgagcgcagagttttgttgaacggacacaaaacggtcg

SEQ ID NO: 19306 - DNA, 871 bp, Emericella nidulans
ccccagtcttttctgggatctggttgaaacctggaagccaacttggtactacgccacgccaaccatgcaccagatgattcttgccgagtccgagcaccgcccggacgctcttcgacagagcctgatccggtttatcatcaacgccggcggtggtctccctgctactctggccgtgcaactgcgagaggtcttccagtgcacagtcctgcccagttacggtatgaccgagtgtgcccccatcgtggctccaccgacagactacaagcttgagcgcgaggggacatccggccgacctgttggtcccgacgttgctattctcgacggcgccggtaagcatgcgcctaccggtgtgactggccggatctgcgtacgtggattccctgtattcccaggatacctgaccgagcaaggcgttatcaacaaggatgcctttgatgagaacggttggtttgataccggtgacttgggtcacctcgaccaggacagattcctttatatcacaggacgaagcaaggaggttatcaatcgtggtggagagattatctcgcctatcgaagttgaaaacggcattctctctgcggcccgcgatccctcttccattctttacgggcgtgtcaccgaggcacttgccttctcaacgccacacgatgtcctccaggaagccgtcggtgcggtcatagtcacaccccccggcaaagcgcgacctgatctgaggcagctccatgaggcactgggtgaaaggcttctgcagccaaagtggcccgccctcttggtgtacatggacgagggagtgccgaagtcgaacaacaagctgcagcggatccggttgagtcagagattagggcttcagaccctgactgactccgttccc

SEQ ID NO: 19307 - DNA, 871 bp, Emericella nidulans
cccgtcccatccagctccaagtcaagttcgagcaagttatcaggacagtgagccttagctaacaaattcataaccttgctacagccctatcgcccctaaagacttctccgcaaaacagcccgaaacaattcgtctctaccctctctccaactacacattcggcacaaaggaaacacaaccagaggaagacccgtccgtgctcgcccgcctaaagcggctcgaagaacactatgagaagcacggcatgcgtcgcacctgcgaaggcatcctcgtttgccatgaacacaaccaccctcatgtcctgatgctgcagattgcgaatgcgttttttaagctgtacgcaccccaactcacctcccggaggcgtccatcgttgactctgaccttttttggatgctgtgcagacccggtgattacctcctccacgatgatgacgaaatcgagggtttcaagaggcggttgaatgagcgccttgcgcccgtgggatcgcaattctctggcgagggagtaaatgaggactgggagattggagatacacttgcgcagtggtggaggccgaattttgagactttcatgtacccgtttctgccgggacatgttacgaggccgaaggagtgtaagaaattatattttattcagcttccgaagaagagtgagtgtctgcatacagcattaaagcaaggaccaaatgagtctcgtcggtcatgatatgctgatgtgtttgcgtgttgctgcagaggtactctccgtcccgaagaacatgaagctgctcgccgtaccgctctttgagctctacgataacaaccagcgttacgggccgcagctctcatccatcccgcacttgctgtcgagatataactttgaattcgtc

SEQ ID NO: 19308 - DNA, 872 bp, Emericella nidulans
tgagtatctccatctgatgggtttcatctatcgtgatttgaagccagaaagtgggtatcccaaacttgttcgtgaataaacaactgactcattcgtctcgcagatattctgctacatcaatcggggcatattatgctttcggatttcgatctctcgaaacagtcaggaccagggggtgcacctacgatgattcccgcacgaagcggcaattccaacacgtctctccctacaattgacaccaagtcttgtattgccgacttcagaaccaactcctttgttggcaccgaagagtacattgcgccggaggtgatcaaagggtgcggtcataccagtgctgtagattggtggactctgggcatcctgatctacgagatgctctacggaacgacacccttcaagggcaaaaacaggaatgcaacctttggtaatattctccgcgacgaagtaccgtttccagaacaaggaggtgcacaacaaatatccaagtatgttatcaccgaattctggttagtcgcagtactaaccaagttacagcatttgcaaatctttgatccgcaagctactgatcaaagacgagacaaagcgccttggggctcgagctggcgcctcggacgtaaaaactcatcccttcttccggcaaacgcagtgggcattgattcgccatatgaaaccgcctatgatccctcaccaaagccgcggaaatgagacagtcaacttccgcaatgtcaaagaaagcgcaagcgttgacattggcgaaaagaatccttccaagatgaagggagtccccttgaattccggcctcgccacgcccaacggcgaaatagcagacccctttgaagagttcaacagcgtcactcttcaccacgacggcg

SEQ ID NO: 19309 - DNA, 872 bp, Emericella nidulans
atcgccgacgtggtgacccgcgagtacaccattaacctgcacaagagggtatgttaaactgcgaaactcgtcattatctctcctcccttctttcggcggttcgacgcacaatcgaccaccgagctgtgatgctacggaagacaaggatgaaacataccttctctttccgacaaccgtgaggcatggatggagaacaaggacatgaaacccgcgccaaccagcgataagacaagcgcacgatttcccttaactgaagaaaccttcacttgagaaaagaaaggtggaagccgcagccttgcgggggaagcaaagcaagtcgtcgcgcatgcaactacagactggaaccaggaatcatgcttcaccaatctgaaatccaagtaattgggtccagatcatgatgaacctgtgaactgagtgagaaggtcgtcaaacgcaaaaaaagaaaatgaattggttttatgaagtccacctcatggccgcaatcgcagcaagaaaaaatattcctcttttcaagatggcattcgggcggaagactgattcttctttttttgttactcaatagacgcacggtgtttccttcaagaagcgtgctcctcgcgctatcaaggagatccgcgctttcgctactcgcgccatggttagtcacttccgtcccacaagaaacccctgtgaaatttgagcatgctctaaccaccttttgtccggtgggcagggcaccaccgacgtccgcctcgacccccagctcaacaagaaggtctgggaagccggtatcaagggcgttcctttccgcctccgtgtccgcatctctcgcaagcgtaacgacgaggagggtgctaaggagaagctctactcctacgtccaggccgtcaacg

SEQ ID NO: 19310 - DNA, 873 bp, Emericella nidulans
cccccaacaaatcacaaccaacaaagacggcaccaagaccgtagtttcataccgcttcaatgacgaaggcaagaaagtaaaagtcacccgccgcatcaaaacaaccgtcgtccgcgaacacgtcaatccgcaagtcgcggagcgcagaacatgggccaagttcggcttggaaaaaggtcacgctgctggtccctcgtttgacactacctccgtcggtgaaaacattgtcttccgcccgtctgtcaactggaaggcgcaagctgcggaggcggagaagaacggcggcgagaaaggaagcatcaaggaccagctgaaggataagaaggtcaagtgccggatttgttcaggcgagcactttaccgcgcgctgtccattcaaggataccatggcgcccgtggatgaacccggtgctggtggtgctgaaggtggtgctgcggctggcgaggatgcggctggaggtctgggtgctggcggtggtagttatgtgccgcctcatctacggaagggcgctgcaggtggtggcgaacggatggccgggaagtatgagaaggatgatttggcgactctcagagttacaaacgtatgtctcgtcgttttcagtgcctcgtttgtggttttttgcatcggggattccttcttggtcctgatggctaatggtgaacgcctaggtttccgaacttgcggaggaacaagaactcagggatctattcgagcggttcggtcgtgttaccagagttttcttggccagggacagagaaacccagagagccaagggctttgccttcatcagctttgcggaccggagcgacgccgcacgtgcctgcgacaagatgaaatggatgtacgtttctttccctcaccctatatctccct

SEQ ID NO: 19311 - DNA, 873 bp, Emericella nidulans
tggacaaagctctacagagcggagatgacgatcttgttaactacgttcttcttcatttgaagagcaaacttcctatcgcaagcttcttcaggatgatcaatacacggccaatggcgtctgcacttgtggaaacaaccgctcgggaggaagatcccgagttgctaaaagatctgttttaccaggatgatcgacccttggacgggtcaaatgtgcttctttcggatgccctgaaagagagcgacttgccgcgcaaacaagaaaagcttctactcgcttctcgactactttcggactctaaagacccgacattggtattacatcggaacctgttaaatgagtcgtcacaattacttaaaacacaggaagctctggacaaagacctggcggaacgatctgaattccttggcctgagcttgaatgagactgtctacaggctgatcagatcagggtacggtaggcgagcacaaaagatccaaagcgactttaaaatgccagagaggacgtattggtggttgagactacgagcgctagtagcgaagcgtgactggggagagctggaagagattggcaagatcaagaagtcaccaataggatgggaggtgagtaaagcaaagatatttatcatggtgtcatgcacgctgacatgatcgtgaagcctttctataacgaaattttaggagctggaaacacaaagctggcttccgtcttcgtcccaaaatgcaccaatctacccgcggaggaaagaattgagatgtgggtgaaatgcggaatgattgtaaaggctggagaggaggccttcaaggcaaaagatatcaatacccttgagcttctccaagccaaggcctcggggccgtctgccgtcgagataggccg

SEQ ID NO: 19312 - DNA, 873 bp, Emericella nidulans
atgtcgttaattaaatgtctaggctgccgttgagacattcggacgctcttctgagcttataccctgtctatcatttgctgatgctatcgctgccgtccaaaggagagacgctgactacgccattgttccattcgagaattcaacaaatggttcggttgtacaaacattggatctccttgtggatcgcaatggaagttataatgatgtaaaggtgtgcggcgaatattatcttacagtacaccactgcctcctagctcgaaagggtttcatttcggcagcacgacgaaactacagctccatcaccaagatatacacgcatccgcaggcatggggtcaatgcgagatatttctagcgaaatacttcaaaggcgtggaacggcaggatgtgtcgtccacctcgaaagcaagcgagacagtcttgaaaacaacctctgaggtcaacgccgccatagctagtcgcttcgccggggaatattacggcttagatatattggaggaaaacatcgaggacacggctaataataccacacgctttctggtgttgaggaacgtctactcaacgactacaattcagttccagcctgaattagcccgagaattatcaaaatctccagctgttttagaaacgaagaaggcgttgttctccttcatggtccgccaagacacccttgggaccctggcagatgccctgctgattttcaaggaccgtggattgaatcttacgagtataaacacccgaccaagtcatatacaagcctggaaatatgtctttttggtggaaagcgagacggatcaaaatcaagaagttcctgatatcatggatagtctgaggaaagtcacggaaaattgcaaacacctgggaacatgggccaa

SEQ ID NO: 19313 - DNA, 874 bp, Emericella nidulans
tccgtatcctccgccgtctcaagatgggtattggcatcctgttacctcgaccctgaactggtgcgaggaggtgagatttctgttcttgatgagaacaccaccgatgcaggactaatcatcgtgctctataggactactatgctaccatctactccgccgagatcgtcaacaccctcacaaaccttttgttcatggccttgggcgtaaagggcatccagagctgccggcgcaatgggcacgatacaatcttccaggtggcctactacggctaccttgtcgtcggaacaggcagcttcctgtttcactcgacgctgaaatgtaagccttcattattccttgtgccgtcgtataacaggggtcccatgtgattgtgaatgaaactgatcaccgtcgaaattcagacccaatgcagctagtagacgaactttctatgatttacaccacatgtctgatgtgctatgcctccttctcctactcccgctcaaacaattaccgcatcgtcctgagcatcttcctcaccgcgctcgcggtcttcataactctgtactaccactacctccagaacccggtctttcaccaaaacgcatatgccctgctgacggccattgtgctcatccggagcatgtacacaatggaaatgaagctgcgtccgtctttgcgccactcgacggaagaagacagactcgagcgggagaagaagggtcttccggttctttccaaggaacagcagcactatgagaatgagcgggacctgaagacgctcaagacaatgtggcttatggttgggtatgggctgagtgtcttcctggggggattcgcgatctggaatctggacaattacttctgtagcacgatacggcggtggcggagagag

SEQ ID NO: 19314 - DNA, 874 bp, Emericella nidulans
gcccgaaaggttatctctgtcgacaactcaaacattatcgacagggccaaagagatcgtatatgaaaatgggttcggcgatgttataacgtatgttaacaaaacttcagcaagtatatacgtccactgctaaagtttcactgtacagatgcatccgcggcaagattgaggaagtcacattgcccgtcgaacaggtggacattatcatctccgagtggatgggttatggtttgctgttcgaagcgatgtttgactctgtcatttacgcccgcgatcgctacctcgctccgggtggactcatggccccctcacacgctacccttcgcatcgcaccgctagccgaccccgacttggtccaatcacacattggcttctggcacgatgtatacggtttcaacatgaagagtatgctcactggtatctacgatgaagcacttgtccgtaccgtgccgtcatctgttatcgctgcagagtctcagatcttcctcacccttccactacacacaatcactgtggaggaattgtccttcttgaaagagtttgagttgaccctgaaagaagacgttgacgctctcgacggttgggctatctggttcgacatttttttcatgccgtccagggattctacgttccgcctaatgccactccagcggacctgcagaagaaagggattgtgtcttttaccactgggcctgatggtaaagagactcactggcagcaaacaattcttttaatcgaccatggaaagaagcacgcggccccgctgaagaaaggccagctgatcaaaggcaaggttgggtatcagaagaaggattcgaactccagatctctgaacatcaccgttgaatatgatgcgggagtcggcgaaaggggaa

SEQ ID NO: 19315 - DNA, 875 bp, Emericella nidulans
tgtgcattgtgctacgaagctaatcaagatcctgtagggcaaagtggtgttggtcaccggcggcgccaaaggcatcggccgcatgatctccgagggttacgttacgaacggtgcaactgtttacatctcgtcccgggacgcgaaggcttgtgagcaagccgtgaaggagctcaatgcgctcggcaagggcaaggcgcacgccattccggcggatttctacaaggaggaggatgtcaagaagcttgctgaggagcttgccaagcgggaaagcagtacgtgtcctaccctagcggagaaaggaagagctaatgggacttctagagctccacgtccttgtcaacaactccgggtcaaactggggtgctccctacgacgagtacccgtcttctgcatggactagggttcttacgctcaatctccaccgtgtctttgaccttacaaagctcgtgactcccctactggagaaggcagcggcgccgaacgaccctgctagaatcatcaatatcggtagtatcgatggactgagggttccggcgttggagacatttgcgtacagtgctagcaaggcgggcctgcatcatatgagccgtgttctcgcgaaccatctcgggaagaggaacattacgtatgtgctttgaaccgctgctcgattgttttgttggacgtatgggaagttactgacctagcatagatcgaacactctcgcctgcggcccgttccagagtaagatgatggctgcaacgctgaagaacttccgggagcagatcgagtctggtatccactaaaacgtatcggtacgccagaggacgttgcaggggcttgtctattcttgagtagtcgggctggtgcatatgttaatgggtcgacgatcgcag

SEQ ID NO: 19316 - DNA, 875 bp, Emericella nidulans
ccgtcgacgtagacagcttttgggtgcattcaagctcttttctattcaacctaaaccatttcgagttctgatggcaacgtgcttgggctggtttttcttggatcttcctctctacgggcccgggctgataagccgcatgttatcagcaccatctggcctggcagagataaccctgatctcgacatatgacttcctccttcaaaactcctaccagagcatggtcgtcgtgtcctctggcgcggtggtgggaaacctcatagctatcttcaccatcgaccggctcggacggcgcaacatccagctcaacgggttcttctggctttatatcttaaatatcgttgttggaacttccttctgtcaccctgaacagaggacagattcttcggcccttgtagtatatatatccctgtgtcagatcttcaactttggtgcgttcttctcctcctacttgaggcttgactaataggacctattgacaggaccaaacaccacgacttacattgtaagtatacctagatgtgtctgactgagaacgttgctgacatcgtattatagctccctgcagaactctttgcaacgcgccttcgctgcacatgccacggtctagctgcggccgcgggaaaacttggttcagtaatcgcccatatatttatatccttcgtcgactacggatcggctcataccataaagatgattctaggaacttgctggggttttctcttctttggtaagtttgccgatgtgtgatcgtttctacaaagccctgtcaatacgaatagcctatcggccttcatgttgttcggcctcgtcgccacctatttcttcgtcctgatgttcgggactctgatggaaaaattaagtcgcttgagaagttg

SEQ ID NO: 19317 - DNA, 875 bp, Emericella nidulans
cgttggatgacttctctgcgggttagtttacccgcatcacttagatagtgtccctgaggctaacaatgcattataggacagacccaagctatcgaaaccagcggcacagatgagaatgactttttagcccgtgagcgagctctcctcggcgatgatgccgaccaatttgcgactgcccaagacgtcacttccacagatgtgaacaatgacgaactactgggaggcccggaagaggcacaggccggcgctgggcctgagatttcgggctttgaatcctcgttcccggccattgacacacagaatgaggtatgcggatggcttgacgtcaaaactcatcgggtttatatgctgatattctacagcaagttgctcccggcggcaccattaccggaactggtgcgccctttccgccaaccggttactcaagctaccaggctcctgaggaggaggccgaacccgtcaggtacgggccgttgtgcctccaacccttatacaaatgttatatgtcaattgctaactttacgtttgctttcagggaatggcgcgagaggcgggatgcagacatcgcacgtcgggcggagctctcgaacgagaagaaggaagctactataaaaaaggctcaggaagatatcgacgacttttacgtatcttataacaacaaggcggataaacttcgggcccagactgcggccgaagctgagcaattcctcgccaatcgcgaagatacatcgtccgggggaacaagctgggagcgcatcgcgaaactcgtggatgtatctggaaagggcaccagaggcggtgcaagcggatcaggcaaagacgctttcgcgagttgctgctgagtctcaagaaggacgagagacggcctggcgcta

SEQ ID NO: 19318 - DNA, 875 bp, Emericella nidulans
ggcgggtattttccggacgatctatgactggctcttgaggatgttctggtaagtgggccgccgttccaatatgttccaataccagagcccccggcccgtccccgcagtatccagagttcggctggctgagtccagttatgcatctgcagggcgaccgagatggacgttaccatgatcggtcttcagaatgccggaaagtcgtcgctgttgcgtgtgctcgcggtatgtcctgcctgtccctactagccagacccaaactgttgcctagatcgctaacgtctatgatcggtatagggaggagaattcaccatagagtaggttctctctttaagtgcctcaaggctcttgtgccctggctaagtcgagtcggttagctctattccaacgatcggcttcaataccaagcgggtccaaaaaggacatgtgacgctcaaatggttcgtgaacctgcattcatccagggcatctctctaaccgcctcagttgggatcttggtgggcagccacggtttcgacccatgtgggagcgttattgccgcggcgtcaacgcgatcgtgtaagacaggtatcgatgattgattgcgacactgctgacatcggatagttatatcgtcgacgccgcggacagggcggctctgccgtggcgactgaggagctgcacgagctgatgaacaagcccaccttggatggaatccctctcctggttctgggaaacaaatccgacctgcccaacaagctatctgttgacgacctgatagaacagatgaatctgaaatcgatcacgcggcgcgaagtgagctgctacggcatcagtgcaaaagaggagacaaaccttgacgcggtcttgcactggctgattgcgcgagctagccggtg

SEQ ID NO: 19319 - DNA, 876 bp, Emericella nidulans
agcggcagaaatcgcgaccagaagatattgcaagacagctcagagaggagggatctcagactccaatggataccgagacaccggaagaagagcctggtttgataatcgacgagacttccgaatttgtttcaaacctacagaagcccgttttgccagagcctcgacgtcggacgacctcgccgagtgtgggcccccgcgccaaaactgaggaactagacgatgaaaagcctcagattgaaggagatattgatatgaatagatcttacaacgacatcgaggatgaggaagatcttaaagagcgtatcaagcgcgaagaatcacaacccacagcgcccattactggcaccggtttggaggaggaaactacgttgtcacaaggtctcggtgctacgttgggcatgctgaagaaacgtggtctagtgaaatcaacagacgctgcggactccaacgcgctccttcgcgatcgcaaccgtttcatcgcggagaagactcggctcgaaaccgaagcggaacggcgtgctcgccaacagcgtgagcgggaccgcgcatcaggaaaactcgaccgcatgtccgcacgcgaacgagaagagtacgcgcggcgtgagaacactaagcgtgaccaggaggaagcccggcaattggcagcgaagttcaatgaacagtacaagcccgatgttcagctgaagtacattgatgagtttggtcgccagatgaaccagaaggaggccttcaagcacctgagtcatcagttccatggaaagggaagcggcaagatgaagaccgagaagaggttgaaaaagatcgaagaggagaagaagcgcgaggctatgagtgcgcttgacagcagtcaacatactggtatgaacaacgccgttg

SEQ ID NO: 19320 - DNA, 876 bp, Emericella nidulans
aagttacccgaggctacgcaactgaagttactgaagctcatcccgctgccccggagattgattttaacaaggtacttgagagacgatccgcccgcgttgttcctgcatcaccctcctatttcactggaagcccaaggttctttgatcatcttttgaggctcgagaatatcctggcgaggtatgcagcactaccgacggtggctccaaacgaggcacccaggatggcttggctgaagctgccggcattccgggaatttgttggcgaacgggtcccgacaaagaagtacaagggcttgattaaggtgctgcagcgccttaaccgcatcaatcccgatattctccccgatgaggttcggcgcgcactgaaagatttcctccgacccggaaatccatacggcactcagtcaataacgactacggtggatgaactgggtcgtgcccgtggaaaaggaaagcgaaaggaatcttctgcggtcgtgtctctagtggaaggggatggagaggtccgagtcaacggaaaaaccttggtcgaggcgttccctcgagtgcatgaccgagaaagcgccacatgggctttgaggtgttcaaatagactcgacaagtacaatgtatgggctactgttaagggtggaggcacaaccggacaggcagaggccctcgccttggcgctcggacgagcattgatgatacacgagcccgcactgaagccaattttgcgaagaggtacgcattcctcatccattcagcagatgatattagtctatcttgatgggcaagtgctaacatttcaatttactaccagctggcgttatcacggtggatgcgcgtcgcgtggagagaaagaaacctggccatgtcaaggcacgcaagtctccc

SEQ ID NO: 19321 - DNA, 876 bp, Emericella nidulans
caccctaaactgctctttcagagccctagtagccgcttttcctttgtagttgccagcaacaatgaccggcccggcccggcattcccgtaggcatcaacgggccagctcaggcgactgtctgtcttcgcgtcatgggacccgcaagatgcgaaggagtgcgatttctaagcaggttgtctagagagtgttaacacttgcgattagactggcggagatccagcttactgcgcattgtggcatctgctgagaaacgacttcagttgccagtaaagcaacagccaaaggctccaattgctagcccatctcatcctgaaagagcatgatccgtcaagaattcaagagttgggaaataggacagacaaaaagacccttggacgaccttcacttgtccattccatagaactcttatccaacacgcgcaactacacagcgccctcagcataatttccaacaccctgttagttcgtccacggcgcagaggcatcacttttacgaaatacctgttggataccaggaataccgttctaacagataacgcaaaagttttgccggcagcaaaaccacagccctaacgttctcgggcatattctaccatatcctccgcacacctcgcgtctacacgaagctccaagccgagatcgacgccgctgcgtcctcaggtcaattaagcaccccgcacatcgcgtacaccgaagccgtcaaattgccgtacctcgtcgcctgtgtaaaagaggggatgcgcatgcacccggtcataggcgtctcgttcccgcgccatgcaccggcccaaggctgttcaatcggggggtactatatccccgagaatgcgcgaattggagtataccccgctgtaattcattttgataagaatattta

SEQ ID NO: 19322 - DNA, 877 bp, Emericella nidulans
tgggatcggcgatgatcttcttgacatccggtggagacacatagttctaatcccagctttcggtgccatcccaatgcttatggtctactttgtggactttggtgttacgcatgtcgttgtcccagtgccgttgcggccgtacctcggcgccttccttgaccttggcctcttgtactacgtctacatggccgcagttgctatcttctgcccaaactcgatcaacatgctagcgggaatcaacggggtcgaggttgctcaatcgcttgtgattgctgtcttacttatgatcaacgatgcgctgtatctgattacaccgtcccggcaccctgcaacggattcccaccttttctctctctattttctactaccgttcgtgggagtctcgttagcactactgtgccacaactggtatccgtccaaagtattcgtgggagacacatactgctactttgccggcatggtctttgccgttgttgggatactagggcatttcagcaaaacactgctgctcctatttatcccgcagatattcaattttgtttactcagtgccgcagctttttcacatcatcccctgccctaggcacaggctccccaagttcaacgcaaagactggattggtggacgcttcggtgactgaatggaatgttcctccttcgcccttgctcgccatggctctagagctactgcacagcctccgcctggcgagggtccgaaaaaatgaacaaggccagattgtcgaatcaagcaatctgaccattctcaacttgtgggtggtatggatgggccccatgaaggaagatcggctgacgttgagcatggtagctgttcaagctgtatgtgggcttttcggactgtttgtgcgccattgtctggca

SEQ ID NO: 19323 - DNA, 877 bp, Emericella nidulans
accataccaccaacgtttctcattaaacaacatctccctccaatacccgtacgcggtccatgaacggatatcgatctacgaggccgtcgcctgttccggaggaggaccgctcatcataatcgccatctggacccttttcattgacgggttattctcgcataacaaaccgatcaaagcgggagggaagaggaagtttaccggaccatacagatggaaggatagactgtgggagctcaactgtgggtttctcggcctgattctatctcaggcgttatgttttgtgatcacccaagctctcaagaacgcttgcggcaagcccagaccggatatcattgatcggtgtcagcccagaccgggtagcgcggatccaaagccgtacggtctgtcggatataagcatatgtactggggatccgcatctgttgaaggatgggttccgatcgtggccttcaggtatgtttcgtcactactcagttccgcgatgtctatgtactgattaagaataggtcatagcagctgtaagatactatcagtagacaatctgaacagtaattatgactaaccaactcagcttcctttgcgggcctattctacctctcgctctggctcggcggaaaactccacatcatggataacaaaggcgaagtttggaagatgttcatcgtcatgttcccctgcctcggcgcgaccttgatcgctgtctctcgaatcatggatgcacggcaccaccccttcgacgtgatcactggctccctcctcggcatcctctgcgccaccatctcctaccgccaatacttcccatccctagccgagccttggaagaagggacgagcctacccaattcgaacctggggtaccgagccaagctacccaggcgg

SEQ ID NO: 19324 - DNA, 877 bp, Emericella nidulans
ctctcctaatctcgtcgattctcatcttcataatcgccctcgctgttggtctcggcgtcggtcttggcctcggcctcaacaaggggagcgataatgacaatgagagcggcggtaacaacaccaccccgaccacccccaacaacaccgccatttggcagcctgccgtcggcacctcctggcagatcgtgctgcgctatgccctgaatgatacctcatatgacgttgatgtatacgacatcgacctcttcgataacaagaaggcgatcatcgacgagctccactccgacggccgcaaggtgatctgctatttctcagcaggcacgtacgaggactggcgcgacgatgcagacaagttccccgaagacgatatcggcgataaccttgatgaatgggaaggcgagagctgggttgacatccgctcgtccaaaatccgcgacatcatgctcgaccggctcgatatcgccgtgcaaaaaggctgcgacggagtcgatccagacaacgttgacgggtacgacaaccagaacgggcttgacctcactcaggatgatacggttgactatatgaatttcctggcggatgaggcgcactcacgcaatttgtcgatcggactcaagaacgcgggcgccgtgatcccgcgcgtgattagcaggatgcagtggagcgtcaacgagcagtgcgcgcagtatgacgagtgcgatacatatgcggcatttgtccggcgcggtaagccggtctttcatattgagtatccgaagggggatgacacgaataatgaggtccaggttacggggcagaagaaggcgacggcctgtgactttgacgactcgaatgagttctcaaccttgatcaagaacatggacttggataactggctgca

SEQ ID NO: 19325 - DNA, 877 bp, Emericella nidulans
ccaattggtcgcggtcaacaagtggcttcggacataaaattctcagttcccaaggatggactccgggaagtttcttaggagctcgtaatgcagcgcatgccgatatgtttactgctgcaagtgcgtcacatatcagagtcattgtgaaggacgataccctaggtctcggagcacgttcgaaacgtgatcttctagacgaacctactggccttgatgcttttaagggcttacttggaaggttgaatgggaaaacggatgtcgaattacaagccgatcagaggaaaagagacgatgtgaaactcgctcgttatgctgctaccaaatggcaagctgttaggttcattagcggtggtctcttggcgcaggaaaaggacgaatccaaagagactgccgagtgcacactaaagtcaggagcaaagaatgcaaaccctgtcgataacaattgtgcagatgacaagacttgcgccactgatttgtctcaagattcgaagtccaaaaaccgacgagctaaggacgatgagaaaagtgagaaagagaaggagagaaaagacgggaaagataaaaaggacaagaaagactagaagacatgaaagacaagaaagacagaatggataaaaaggataaaaaggatataaaggtcaaaaaggtcaaaaaggacacgaatgacaaaaaggacacgaatgacaagaatgacaaaaagagaaagcgagcagagcaacaagaggactctgacaaccctgtcccaggcccatcacacgcagtgaaggaacatcgtccacctggaagacatatgatccgaggtcgacatattgcgcaaaagaggaaggctttgatggatgataagtctttaaacgaggtagtgcccccattcatcctt

SEQ ID NO: 19326 - DNA, 880 bp, Emericella nidulans
gtgggaaccccgcgtctccttaagctttttgagaaatacggcatcaaagccacctggttcatccccggtcactcactcgagactttccccgatgaatgcgccatggtccgcgacgcgggccacgaaatcggcttgcacgggtacagccacgagaacccaacagacatgacaattgagcagcaaaaaattatcctcgacaagacctaccgcatgattacagacttttgtgggaaaccaccgcgcggcacggttgcgccgtggtgggagacatcccaggagatgacggaattgctgctcgactatgggatcgagtacgatcattccatgctgcatcatgattgtcagatgtactggcttcggacgggcgatagctggacgaagatcaattatagccagaagccagagacttggatgaagcctttggagaggggtaaggagacagggctagtggagataccgggaaattggtaccttgatgacttgccaccgatgatgtttatcaagaaggcgccaaatagtcatggttgggtgaatccgagagatgtggaggatatttggaaggttggttcatctctgtttccttttcccctgctctttgagaatttgatgttgacctccgtctcttaggatcatttcgattatttctatcgtgagtatgatgagtttgtctttcctatgaccattcatccagatgtttccggtcgtccgcatgttcttcttatgcatgaaaggttggtcattgcttaaagatgttcactaagaggttctggtatactaacagggttaggatcatcgaacacatcaataaacacgagggcgtggagtgggtgactatggagcagatgtgcgatgagtttaagagcaagaacaaacctcctgc

SEQ ID NO: 19327 - DNA, 880 bp, Emericella nidulans
tgtcatcacggaagaaggtcatgctgaaggtaccttacccgctgtgccactacgccgctgtcctgagctgacttttatcatttctaggtgattattctcggagacagtggtgtcggtaaaacaagtttgatgaaccaatatgtcagttaccttttattcccaagcagggctcgtttctccgctcacaccgattccccaacaaggtcaacaagaagttcagcggaagctacaaggctacaatcggtgccgattttcttacaaaggaagttctagtcgatgaccgcctagtaacgatgcaggcacgtattcacggtaccgcatgttccattcacaaattaaccaagtggagtagatctgggataccgccgggcaagaacgattccagtcattaggagttgcattctaccggggagctgactgttgtgtccttgtttacgatgtgaataactccaagagctttgaggcacttgactagtggcgcgacgagtttctcattcaggctagtccgcgcgaccctgagagtttcccattcgtaagtcgtcatcgggccgtggttgcgctcggctaatcgtgctttctaggttgttattggaaacaaaattgatatggaggaaagcaagcggatgatctcttctaagcgagccatgacgttttgccagtcgaaaggaaacattccgtatttcgaaactagcgcaaaggaagctgtcaacgtcgaacaagcttttgaaggtatttcttttcagtagtgttacactggaacattgctgatatccgccatagtcattgctcgaagtgctttggctcaagaagaagctgaagaatacggtggcgactacactgatccgatcaacatccacgatactaccgagcgcgacggttg

SEQ ID NO: 19328 - DNA, 881 bp, Emericella nidulans
gcagtgtctgcgattgggcactatttcaatgaaagacgtggagtagcaaccggcctcgcggctactggtggctccgtcgggggcgttgcgtttcctctaatactggagagcctgttccctaagatcggctgggcctgggctacgcgagtcattgctttgatctgcctgatatcgctggccggtgcatgtctattggtgaagtcgcggctgccaaagaagccagcctcgaaggagaacgttctgcccgattttcgtatctttcgcagcctcaagctcagcttcacaacggccggtatcttcttcattgagtggggcctttttatcccaatcagctacatctcctcgtatgctttggcccatggcacttctgagtcgctttcctatcagatgctagcatttctcaatgtgggctccgtcctcggaagagcaatccctggcttctttgcagaccatctcggcagattcaacactcttatagtcacagttgcattgtgtcttgtttgcaacgtgtgcatttggcttcctgccggagacagcgtggccataatgattgtgtattgcgtgatttttggctttgctagcggcagcaacatcagccttacccccgtctgcatttcacaactctgtaagatcgaaaattacggaagatattatgccacttcatacactatagtgagcttcgggtaagttaaaatattctcatttaatttgacatgatactaatgtctgtctgtcagcaccttgacaggaatgccaattgcgggtgaaattttggcccgctgcaacggggactactggggcctgataacctatacgatctgctgctacgctagcggtcttatctgtgtgacaactgcaaaattgctccatgttggctggcg

SEQ ID NO: 19329 - DNA, 881 bp, Emericella nidulans
gcgtggtactgttccggatcaacaaactcagaactgattgagaacctatgcagagaaggactgataaagaacgagagagttaaacaagcaatgatggcagtgagcatagcttcctccagctaccccagcagctcaaaaacccgcacctatcccaaacattacccgaactagcaatccatcaatgtttctgcactgctttggcttatggatttaacgcatcacgcctccacttccatgcatctctaaccaagggaacaaggtcgaccgcggtcattatgcacctgctagaccgtactcagactcgccgcagccgatcggccatggagcgacaatttccgctccccatatgcatggacatgcgtgcgagtatcttatcaactaccttcgacctggcgcccatgtcctagacattggctctggctctggttatctaacccatgtatttgccaaccttgtcgtggatacgtcatcgagcgatggcccaaaaggacaagtcatcggcgtcgaccacatacaagaactcgtaaacctggcacacgacaatatgatgaagtcagaggatggaagaaaactgctagaaaatggaggcgtgaagtttgtcaaggccgatggccgccgtggatggctagatggcgcgccatatgatgcgatccacgttggcgcagcagcacaagagctacaccctctgctaatcgagcagctgcgagcgcccggacgtatgttcatacccgtcaatgccgaggacgaccaagggaccctgttcagtaccgcattcggcggtgggcagtatatatgggtagtggacaagaagaaagatggcactatacacaaagagaaagtgtttcaagttagctacgtccctctcactgacccaccaaagc

SEQ ID NO: 19330 - DNA, 882 bp, Emericella nidulans
ccatcttctcggaccagggtcgtctttaccaagtcggtacgcattcaggacctagacagcgccttcattatcccgatctgctctcaagcatgacttccagcccatcttgatcccgctaacaggtgttcccaaactagagtatgcattcaaagctatcactgccgcgaacattacctcgataggcgtgaggggaaaggactgtgccgttgtgttgtcgcagaagaaagttgccgtatgtcgcccaagtcactccgatataggccgttctgaacgaagtctaggataaattgatcgacccctcgtccgtcacgcatattttcaggctctctccttcagttggatgtgtgatgaccgggtcaatcgccgatgccagagcttccgtcgaccgtgctcgtggtgaggctgctgagtttcgatacaaatacggttacgagatgccatgcgatgttcttgccaaacgtttggccaatatcaaccaggtttacacacagagagtgcgttgttagtccaagttacaggcaaaacctaatagcatataggcatacatgcgcccactcggagttgcgatcaccctgtgctctgtggactcagagaaagggccacaactgtacaaatgtgaccccgccggatactacgctggatacaaggccactgcctcgggcccgaagcagcaggaggcgctcaatcacctggagaagaagctgaagaacaaggattatgcagagggcagctgggaggaggtagtcgagctggggattacggcactgagcagtgtgctgagcgtggattttaagaagcacgaattggaaattggcatcgccggcggtcctcgaacagacggaaaagaaggcacagatcctcatttccgggcactgacggagg

SEQ ID NO: 19331 - DNA, 882 bp, Emericella nidulans
acccagagcgccaaggcaacaccgcctcctactcttacggtggctgcgccctcggtgttggagtacaggcagcatgccagaccgcaccggatgggtacaatctctacagtgtgacagggagtttccttgcgccggtgttgacagacagcaagatcacctgctctgtgcgtcggctccgggatacacgtacgttcgcgacgagacaagttgaaatctcgcaggtccagaatgccaccacgagactatgtgtcattatgcttgcagacttccacaagaaagaaaaagattctcttcttgaatactcttcccctccggatcatatctactcgaagccggaatcatgtctcacaccccaagaaactgggcagaagaaggttgagcagggcaccatatcaattgaatcgttatcgctctacaacacgcttttcggacttattgctcgcttcttcgaggcccgacaagccccggagggaatctctgcacataatctccacggcatggtgaaagaacagccccaaccgcctcatcaagcccgtcttcccctaacggcaaaaacgtccgcagactggttccgctgtcgcacccccttgtccgccaagtcagaccactacgccgggctggcgtggatgcttgacgcgtatctgacgttcacgccgctagcacatagcgggatgttccttgatgatgccgccgcttgtgcgacgctggattttgcgattaggttcttctgcgacgagtttgatttgtgtgactggttgttgagagagattaagaccatcgtggggggtgaggggaggtcgtatacggagggcagggtttggaatgagcgtgggaggctagtcgcgagcatgtcgcaacagtcaatcttgaggccgaaggtga

SEQ ID NO: 19332 - DNA, 884 bp, Emericella nidulans
cgcggctcttcccactcagcaaaccccgttgccgttggaggacccgatcaagtctcctttccccatccaccacagctgcaatgccaccgaacagcgccactagccaccgctctccaggagaccgtgacccttgctgagcacgccaaagaccatatcctccgttggggcaatgagagcgccatctatcgcaagtactttggcgacaggccctctctaaccgccatcggagcatacgacatcatcgtcaacggaaacccagataacatcctcttccgctgcgataaccccgacggcaactgtgctcttgagggtaagcttagagacccctgtcttgtgtgttcgaagctaacattcacaggctggggtggccattggcgcggcgagaacgccagcgatgagactgtcatctgcgaactcagctacaccactcgtcggtccctgagcacaatgtgctcgcagggatacaccatctctgagtgggagacgaacaccttctgggctggtgatttgctgcaccgactgtaccacatgcctgctataggacagggcttggttgagcactacgcggatggatacgagggcgttttggagctggcggaggggaaccggacagaagctgtgcatgactcggagacccttcagtactttgcgcttgaggtgtatgcatatgatgttgcggtcccaggtattgggtgtgttggtggagaggaagagaatgatggccagggtgaagaacagactgaggagcctgctcaggatgatcagcaggatgaggcggctgaggaggagattcctgaggtgagcgaatgtgctgtttggtgacagctctggagctaacaacccttagaattgccatactcatgaaggtggagagctgcactgca

SEQ ID NO: 19333 - DNA, 884 bp, Emericella nidulans
tcccttccgccggaacttcaagacctagacaaatccgaacaacttccccctgttccagccacacaacgcgatcccctccctccaaagcctacgcctgcttcgttctcaccccccgagccccgccgaaacgtctttgataaagacgtggatctcgctgaattggcgcgttccgctgataacaagaccatccacttcggccgcgcaaaccccagccaaacagccgacgacatcctagcagaccgcggtaatcacgccgccaacaaagcagccatcctttctgccctcgcagcctttgattccgatgacgacgaacgcgacgatacctatgacgtcgcggatgtcggtggcaccgtcgacgccacagacgacggcactgcagaagatcgtaaaagctcatcaaccgacgaattcgatctcactctcctccgcgcctacaagtcgacaccatccctgtttgcacgtgattcagcaacgcgccgatcccagccccgtaatgctctcaagcgcgagtctggtctaacagacgaagccatcgagggctgggcagtcatgctaaatcgtgatcccaaacgacttgccatgttggagagtaaactcgctctttcagctggtggcgatggaggcgggctatcacaacccgaaataccatcaacatcataccgccggccaaaaggtgatgcagattctgagagtgcaactgaaggcgagacaccgacgtctcaaaggccaggatggaacggctctgcgcggggccgtgggcgtgggcgtggcggccctcgtggaagaggacgaggtggtgggagcggaggaggtccgtctggagaccagaactcagctcgttcgcgacagagaaaagaagagaataaagcgagtcgggcgaacca

SEQ ID NO: 19334 - DNA, 884 bp, Emericella nidulans
gcggcggatatagttgactctcacgagaggggagcgtacatggggctcacgagtctgggaaatatccttgcgccgagcttgggacctgttcttgggggattgattacgagtcattgtggatggaggggggtcttttgctttcttgccggtgggggggtcgacgacttgctcgtgctgggtttctttttgccagaaacaagaaaggcacgagtgaatactttagaggttggatcggtagagaggggacaagctgaaggagcggcaccagacaaccagcaaagcaagagaagaaagaagccaggcctcccaaatcccgtgacgcctctccgcctcctagctcactttccaactagcctggtcttgctctcgaatgggcttgtctttgcgagctattatcgcgtcacggccggcataccgtcgcagtttgcgcggatttatgggttatctgatatggaagttgggctggtttttctaccggcgggagtcgggtcgttggtgtccgcgacatttaatggagctctcgtggattggaattatcggagggtaaggaaaatgtatgaagacacgaaagtgactgcagaaggagataatgaagtgagtggagctgcagaaggaacgcaaagcgattgggaattccctgttgaacgagcaagactgcaggtaggggggccaatgactgtgagtataactggagtgtattccgtattatctgcatcagtctctgatgtacagttgataataattatagctcttctgctcactcgtgatcttcatctacggcctggtgctggaccgacaccctccccttgcactctccctggccatgatcttcctggtttcattctccattacagcctcctacaacgtgatgaacgtcctcttgg

SEQ ID NO: 19335 - DNA, 885 bp, Emericella nidulans
atgacgagccttaagagccttttcttatctttcttcctagtcgtggctcttggcctggctcttgttaatgcctctgagccccgcggaccgaaaatcaccaacaaggtgagattgccctgacgctcggcggcttgtgttggcttaataacgcaacggatcttgtaggtgtacttcgatattcagcatggagatgagagtctaggacgaattgtgttgggactctatgggaagactgtgcccgaggtaggtatccctctctcctccgactgttacatatgctgagttgagaaactacagactgctgagaacttccggtatggcttttgagttacttgaactccagcggctttagcaatactgacagtatttattcaagtgctctcgctaccggcgaaaagggctttggatatgaagggtccaacttccaccgtgtgatcaaggatttcatgattcagggtggtgacttcaccaggggcgatggtaagctatgatcaccgaattgcggagatattagcgtgtgacattaaccaatctccaacaaggtaccggaggaaagtcgatttacggtgcgaagttcaaagatgagaatttcaagctgaggcatactaagaccggtctcctgagcatggccaatgccgggaaagacaccaacggttctcagttctttatcaccactgctgtcaccccgtaagttacactgtcaccctaatatgaataatgatggattgacactctgcctagttggctcgatggcaagcacgtcgttttcggtgaggttctcgagggctacgatattgtcgacaagatccagaacgttcctaagggccgcaacgacaggcccctcaaggacgtcaagatcgtcaagagcggcgaattggagatgga

SEQ ID NO: 19336 - DNA, 885 bp, Emericella nidulans
tcgcgtctcttggtttgctcaacaagcatgccaagctcttgttcctgggtcttgataatgctggaaagacgacccttctgcatatgttgaaggtatgttaacagtatttgtggcttggattgagagtattcggatgggaaatagagtttactccgcttgaagaatcggttagaagtgaaacaaaagctgacgaggtgaactcattcagaacgaccgagttgccatcctttcacccaccgctcacccaagtacgttatcacatcgactcaccgcatctcagattacgatagagagtgcggaggattggatcaataatggagactaactcagacacagcatctgaggaacttgtcattggaaacaaccggttcacaacctttgacttgggtggtcaccagcagggtgagtctagccgaatccatgcgttccaaactttgattctgaacaacaatactaatgctgttaacatcagcccgccgcctgtggaaagattatttcccagaagtcagcggaattgtcttcctcgtcgacgccaaggaccacgagcgcttccccgagtccaaggcggagctcgatgccctcctcgctatggaagagctctccaaagttcctttcctcgtccttggaaataagattgaccaccctgacgccgtcagcgaggacgaacttagacaccagcttggtttgtaccagacgacgggtaagggtaaggtgccgcttgaggggatccggcccatcgaggtgttcatgtgcagtgttgttatgaggcagggtgagttctacctcgcgattatttgtgcatttctcttttgtgggtggtgaaaaactaacttttatcctttgttaggatacggcgaaggtataaggtggctatctcaatatgtc

SEQ ID NO: 19337 - DNA, 885 bp, Emericella nidulans
ggtgagcgtgtgcccctgatagttcattgacaacatggcctaatcatgtaatagccgatttctcccatctcgcctcaatattcgtcctcttacacaagatgaagtcttcaagcgtgcgtccgccggcaatttgctactgatagactaactcaaggttagagctgctctgggctgtctttcaagtcacaggtcttgtatctgatagtttttgtgactcgctatcttggtaggtctcagggcatctcgtccgatgcttctcgatgccattgttactttagttgacgcgagatgacgctagatttgttctgggcgttcacggactcgttatacaatacgacctttaagattttattcatcggctcctctggttatatcatctatcttatgctccacgattatcgacctacacacgacccgaaccttgacacgttcaaagtgcagtacctacttgctgctagcgcaatactcgctcttattttccctcatgattatagcatctcggaggtcagttcatttcgtctagtaatcggccttttcttgacagactacagattctctggactttctcgatttggctcgagtctgtggctatcctacctcagctttttatgctccaacgtaccggtgaagcagataccataaccacccattatctgttcgcgttgggtctctatagggcgctctatatcccaaactggatttatcggtactttgcagaaaaccactttcaagcagttccagtcttggcagggattattcaaactcttctgtattccgatttcttttacatctattacaccaagtaagttgcccatctgtgtgtgctctagatagatcggtaacgtgtcagcagggtaatgaaaggcaagaaattctctctgcccg

SEQ ID NO: 19338 - DNA, 885 bp, Emericella nidulans
gcgcaccatggcaaacaagaccggtatgatggataatgagtctttcatgctcggtcaagcttggcaagcccttcgagatccccagacctggtttctagtgctgtacaccttctgcgtcaacttgtggaacggcggcgtcaccagtgtaatgtcttccctgacctcggctttctttatcgtgacagtctgtgctgatactttccggctccagttctcgtcgatcattatcaacagtttcgggtttagccagctcaggtctctccttatgcagatgcccatgggcggtgcgcaggtggtatttctggtcctcagcgctgctgttgccacctggttccctcggactcgcatacttatgatgatattcaatgttacagtatcgatggtgggcatgctgctcgtctggcagctggacccggatcaccagatcggccgcatggtcggtttagcattgggcgctgtcttcgccgtcaacattccgttgtcgctgagtgtgatcagcaccaatgtcgccgggttcacgaaacgtagtgtgacaagcgcgctgctctttgtcgcatattgtatgggaaatataatcgggccccaactcttcctgacttcagaggaaccagcataccctgtaagttgggcttgttctcactgctataatccattaaagagggtgggaactaatagagacaaattgatagacagggatgaaagcggctatttccggcctggcgctgggtgcattctttctcacttgcctgttatgctactatatctttgaaaatcgccgccgcgatgccaaatacgggccgccgactcaactgaccgaggaggaggagcggactcacgcattatcaaacaagacggacttagagattgagagcttccgatatttga

SEQ ID NO: 19339 - DNA, 886 bp, Emericella nidulans
gctgcgcaggaccacacgactaaggtgcttcagcggacactgcaagcttctaatgtatggcattccttagcagacatgggcaagaactaatcaggcggctctacagctccctcacatgctcttctacggccctccaggtactggaaagacgtctacaatcctcgccctcgccaaatctctcttcggccctgccctttaccgttcccgaatcctcgaactaaacgcctccgacgaacgtggaatcggaatcgtccgtgaaaaagtaaaaggctttgcccgtgtccaacttagccatcccaccgggttagacgccgaatattttgaaaagtacccttgccctccgttcaagattatcatcctggacgaagcagacagcatgacgcaggatgcgcaatccgccctacgtcgtacaatggagcagtacagtcgaataacacgattctgtttggtctgcaactatgtcactcgtattattgagcctcttgccagtcgatgcagcaagttccgcttcaagccgctggacaactcagccgctggggataggctagcgcagatcgcgcaattagaaaagttatcgcttgagaatggggttgtggacaagctgatatcgtgcagcgatggcgatctacgacgtgctattacatacttacagagtgcggcaaggctagtaggggcggcgaaggctgcaaaagacggggatgaggacgaggaaatgaaagatcaggggtctgatatgatcaccgtcagcactattgaggaaattgccggcgttgtccctgagagtgttctggatgggctaatccaatcgctgcaaccgaagaggatgggttctccgtatgaagcagtttcgaaagtggtgacggagattgtggcggatggctggagc

SEQ ID NO: 19340 - DNA, 886 bp, Emericella nidulans
cccaacaacatcaacattcgtcgtgatgtttccgatcctttctaccgttacaagatggagcccttgcagtctaagattgaaggcaagggtaacggtattaagactgttatcgtcaacttgaactcggttgctgggtctttgagccgtccacctgcctatgttatcaagtactttgggttcgaacttggtgcccaggccaacgctaaacctaccgatgaccgctggatcatcaacggcgctcatgattcccggaagctacaagactatcttgacggattcattaccaaatttgttctctgcaagaagtgcaagaacccggagaccgatgtcatcatcaaggacgagaaaattatcctggactgcaaggcttgtggtcagcgttcggatgttgattcccgcctcaaactcagcaccttcattcttcgcaacaacacctccggcaagggcaagaaggataaatccaccaagaagactcgccgcgagaggaacaaggaaaaggaggctgcgaatggagaaaacaatgggagcccaggcgagacaactcagacaatggcgatgagaatgaagatggcgcactcgaagccggcagcgacgatgagcttactcgtcgcattaacactgccgctcagggtattgaagcggaggatgaaatcgaggacgacaactggaatgttgacgtctcggaagaggctgtgaaggctcgtgccaaggagctcccggacgacctgaagcgcgctcttgctcttgacgagggagacgacgagggtgccgatggccctacagcttatgatgaactcggtagctgggttctggacactgctactgagaagggcggtatctctaaggtcgaggatgtcgagatctatttgaaggccaaggagctcgg

SEQ ID NO: 19341 - DNA, 887 bp, Emericella nidulans
tggctgagatccgccgcaagcttgttatcgttggtgatggtgcctgcggtaagacctgtctgttgatgtaagtcttcctccaggtcatctgaagtatcctttcagcatcatttacttactctattcttcccgtgcagcgtcttctcaaagggcactttccctgaggttagcttccacattcagttcgtgccgcccagcgccgtcgaactctgtctatgacctgggtgttctcttttacgcaaactaacggcgatcctctcaggtctacgtccccaccgtctttgagaactacgttgccgatgttgaggttgatggcaagcacgtcgagctcgctctctgggatacggctggtcaagaagattacgaccgtctccgccctctctcctaccctgactcgcatgtcatcctgatttcgttcgctgtcgactcaccggattcccttgacaacgttcaagagaaggtgagctttttttatcttataaataaaataatactcgcggacactatgctgacccttgaacaagtggatctctgaagtcctacacttctgccagggtctccccatcatcctcgtcggatgcaagaaggatcttcgccatgaccccaagacgatcgaggagctgaacaagacctctcagaagcctgtcacccccgaacaggtaagatctcgagggaaaatgtgattgtttggaacacaactgacatattctgtagggtgaggaagtccgcaagaagattggcgcctacaagtacctcgagtgctctgctcgaaccaacgagggtgtccgtgaggtctttgaggctgccacgcgtgctgccctcttgaccaagacccacaagagcaagaagaagtgcagcatcctgtaaattagtctattcccctcgcc

SEQ ID NO: 19342 - DNA, 887 bp, Emericella nidulans
accatgggtcccggaggaggaccagctgcttctccaactagtgcgcgaacagggcccaaacaataactgggtccgcatctctcaacacatgcactatcgctctcccaagcaatgccgggaacgttaccatcagaatctcaaaccgtcactaaaccgcgaccccatctctgccgaagagggcctggcaattgagcggatggtcaacgaaatgggccgctgctgggctgagatcgcacgccggctagggaatcgcagcgacaacgccgtcaagaactggtggaatggcaacatgaaccgcaagaagagaggtctccaacaaagcatcaacagctctccacactcgagaacgccccacggccgcatcgaagctccataccaccgcgcctctatcggaggcaccagtcccattttccgctctcggctcccctccgtctcctacgacagaccctatacctcatggacctctcgatcccctatatcctctcggcgcgagtctttctcaactgcctccacgttctcccgacaactcacgcccatctacacacttcctgctctcaaccgccctgttgaagcgcccttgacctcgcccgccttctcagatacctccaacgctccgtccctcgacccaccgtcgatggtctcggaccataactcggtttcttctgcctcgcctcgcactcttccttcgccacagcttcactctctccctcctttggtagatacacgctacccatatggagaggtatccaggccccaaacatcagacgatgtgtacttctccagcttccccggcaagtcttcaggactattttcagatccaaagccacgatgggctcctgagcaacgaccgtgctgggcttccgaggaaaaggtcgagcctcggcgtg

SEQ ID NO: 19343 - DNA, 888 bp, Emericella nidulans
caccccgctcaatccttgttggccattctctaaactccgatcttaacgcgctcaaactcacccaccctttcatcgtcgacactgtatttctatatcctcatccgcgtggcccacccctccgcgcaacctaaagtggctaacccagaaatatctgggcaaagaaattcagaaaggcacaacaggtcacgactctatcgaggacgcccgcgccgtcctcgaactcgtcaagcagaagtgcgaaaagggcgagcagtggggcacaagcgatgcttcaaatgagagtattttcaaacgcttgagccgccatagcgcaccgggtaaacccaatgtcgcagctggagggacaggtcgcactggcgccgtcgttgactggggcaatcctgagcgcggcctgggtgcacaagcgactgtcgcgatcggatgcagcgacgacgaagccgtggtgaaaggcatccaagccgccgtcaacggcgacgaaagcaagccgtctatccccggcggtggtgtagattttacttgggcacgaatgcgcgaactcgaaatctaccgtggctggtgcaaccgtattcccgatccgagcaacgcgaatacatccacattaattgcgttcgattcctcttcctcctcatcagagtcaagaacactaccaactgtcgtctcgcaaaccgtctcccgcatcaaagaggtgtacgatgccctcccagcatgcaccctgtttgtcgtgtactcgggcacaggagacccgagagaagtgagcagactgcaggcaatgcataagatctttcgcgacgagtatcagtccaaaaagccatgggatgaattgagtgttaaatggacagatacggaggagcaggcgctgaagaaggcctgtgaaagggcgagggaggg

SEQ ID NO: 19344 - DNA, 889 bp, Emericella nidulans
gagcaacaagtgctgggagattcgagggaaaacactaggtatacgaaatatatgacaagaccccaactcctgctcatgatcagactgactcttttcttaaaggcatcatcgggtatggtcacatcggttctcagctttcggttctagcagaggctatgggaatgtccgtcattttttacgacgtggtaaatctcatggagctaggcacggcgcgccaagtttcgaccctagatgacctcctgtctgaggctgatttcattacgtgccatgtgcccgagcttcctgaaacgaagaacatgctggggccaaggcagttcgagcttatgaaagatggtagttatttaatcaatgccagcagggggactgtcgtcgatatacctgccctgatacacgcgatgcgatccggcaagattgcgggtgctgctcttgatgtttatccaaatgaacccgccggaaatggagattacttcaacaacgagctaaactcttggggaactgatctccgttccctgaagaacctcatcctgactccacacattggtggtagtactgaggaggcacagcgtcacattggcgttgaggtcgcggaagctttggttagatatgtcaacgaaggttccaccttaggcgctgtcaatcttccagaggtcacccttcgttctctcacaatggatgaaccggatcatgctcgggtacgtaatttctgctacttggatatcatgtgttgacggttttcaggttatatacatccatcacaacgtccccggtgttttgcggaaaggtaagtaaatcggaacagaatagtgcttgatttcggctaaccttcccagtcaatgagatccttggcgatcataacgttgataagcaaatgacggacagtagaggagat

SEQ ID NO: 19345 - DNA, 889 bp, Emericella nidulans
tgaacccgagctaccggggtggctttgttagtgttggtactggactgtttgtcttcgccggcgtgttttctggttacttctctggaagcctgtacaagacattcggtgggaagagctggcgcaaaaatatgttgatagtgggtaccatagttcccccggtctctgttccctgcttacgtacgattagacagctcttctcttccctggacttatattctgcctcgtcttcatcctcaatcttttcgtctgggcacaggcatctagcacggcgatcccattcgttacacttattggcattgttctcctttggctgttgatccaggtgcctctagtgtacgccggtagttggtatggttttacacgcgccaagccatgggaacaccctaccaagacatccccaactccgcgccggattcctccacagccttggtacttgcataatgtccagcgagccattatcaccggcttagctcctttcgcagtcctctttattgagcttcttttcgtgtttaagaacctgtggcaggacaagagtggatactattacgtcttcggttttttgagcgccgtgacaacgatcttagtgatcactgttagcgaggtgacaatcatcgcgacgtacagtcagctctgcgccgaggtaggcattttagcctaggccataaacgagaggtcaaactgacgcactattttaggactaccagtggtggtggcagagtttcctgacgggcggaacagcgccttctgggtgttcgtgtactgcatctggtactactatttccacctgcacatcacgggcttcgtgtccagtctgctcttcttcagctatagtttcctcgcctgcgctgtgtatggcctgctaacggggactgttgggttcctgacggcg

SEQ ID NO: 19346 - DNA, 889 bp, Emericella nidulans
ccgcatctttgtccgcgtcagcccaacgcaggacaaacctcctcttctcctcgtccatgggttcccccagacccatgctgaatggcacaaattgacgccgctgctcactccgcattttaccgtcgttcttgttgaccttcgtggctacggggcctcctccattcccgccagtgccaatggctctggctataccaaacgcctcatgggccaggattgcctgtcagtgatggaccagctcgggtacgcgaatcagagattcgcagttgtgggacatgatcgaggagctcgcgtcgcctaccgccttgcctttgataaccccgagcggctgtcgaaggtcgtagttgtcgatattgttccgacggcggctatgtttgcacggttcgggaaccccactgcggggctaaaggcgtaccactggttgttccttgcgcagcccgaaccgttccccgagaagatgattggcaaggaggataagggaaggctgttccttgagcaggcactgtcttcctggacggcggcggggacgttgcaggctttcagcgaaacagcgatggagcggtaccgggaggcgtattgcgatgagcagcggatccatgcgacatgcgaggattaccgggcgggcgcttacttcgaccgggtttatgatgaagaagacctcaagaagggcaataagatccgggtcccggtgctggctgtttggggggaggagggcgggttcacggggccgaagaagagtgaagccaagaaggtgcaggaggggccgttggacgtctggcagcggtactgtgtggatctacggggcaaagggctaaactgcgggcattttatccctgaagaggatccccaggcgctggctgatgaaattctgcaattcctattatgaggtcgt

SEQ ID NO: 19347 - DNA, 890 bp, Emericella nidulans
gccgccagctctctagagaacctcaagatgaatgattcccccgtcaagaagctcaattttgaagctgccggcaaagagaacgctcccgtctcgaaccccatggtcgacgtgccggccaccaagcccgctacagagaagcctgttgagccttctaaggctgctcttgacgtcaaggctattgaggccaatgaacctctgcttcaagagaaccctcaccgttttgtcttgttccctatcaagtaccatgaggtcagtactatgcggcatctcacgcgtcacgcgtaaattggaaaattcttaccgcctaatgaaccacctccactgacgcatgtctccgcgatatatagatctggcaaatgtacaagaaggccgaagcttctttctggactgccgaagaaattgatctctccaaggatcttcacgactggaacaaccgtttgaacgaggacgagcgctactttatttcccgcgttttggcttttttcgccgcttccgatggcattgttaacgagaacctgctcgagcgcttcagcggtgaggtgcagattcccgaggctcgttgcttctacggtttccagatcatgattgagaacatccacgccgagacctactctcttctgattgatacttacatcaaggagccgaagcagcgcacctacctctttgatgccattgataccagtatgtttcttggctagttttgttgatcgcgctctaacatgatatagttccttgcattcgcaagaaggccgactgggctattaagtggatccaggacaaggagtccaccttcgctcaacgcctcgttgcctttgctgccgtcgagggtatcttcttctccggctcttttgcctcaattttctggctgaagaagcgaggcttgatgcccg

SEQ ID NO: 19348 - DNA, 891 bp, Emericella nidulans
tgggtttggcgttggaggtgaatatccgcccagtgcggcggctgggttagaggaatcagacgatgtaagatctctacgttcacttacatagagctatattgacaagggcagttcagacggcgctatcgaggtcctgtcttcgtctccttcacaaccctaatggcaacactagcctcgcccatcctgcaaatcatctatctgatcagcctgaaagcaagcagcaacaatctgcacattaccttccatgccatgtattccatcgctgcaatcctccccttcacagtcatgctcctccgcttcttcatggccgactcaacactctatcacaactcgaatttcaaacaaagcccgcagaaccgctctctgcgcttctacgtcttgctcgtccgccgctactgggcacgtctcctgacaacctctaccgcattcttcctctacgacttcatcaactttccgaacagcatcatgtctagcacgatcatttcgtctctggttacggacaacaacatccaaaccacggcaatctggcaagtcatcctctccgcactccctgttcccggcgtcgtgctaggcgcataccttaccaacgccattgggcgccgcaacaccggtctgctcgggttcgccggctacacggtgacgggatttctaattggagggctgttccataagatctcaaagcacatggctgctttcgtcgtgctatacggtctcctcaatgccttcggtcatatgggtcccggtgccacaatcggtttgatctcctctgaatcgtttccaactgctatgcgcgggatgggatatagcgttgcgttggcgcttggccggacgggcgcagcggtgggaacccagtgttttatgccgctgagggagaggggtggcgacagtgcg

SEQ ID NO: 19349 - DNA, 892 bp, Emericella nidulans
tcaataggtaccttgtttgtcaggtcccgtccaatatgctgctcaaccgtgtcaagcctgcgtggtatatggccggctttatgatggcttgggcaatcgtatcgaccctcgcatgcgtcgtcaaagactaccatggcatgctcgcttgccggctagtgcttggtatcatcgaagcaccgttctatcctggtgctctgttcatgatttcgcttttctataaccgtaaagaggctaccacgcgcatggcagtactatatactggaaatatgctggccagttctttctcggggctcatttccgctgctgtctttgctactctcgataagaaacatggacttgctggttggcagtggctgtttctgattcaaggagtcgtaaccgtggtggtggctgttgcattcttcctcctcccaaactctcctaaacagactctttggctcacactagaggagcgacagctcgcccacgacaggattgcgcgggacacgactcagaaagcagagggcacgagtgtctggactgggctccgcgaagcatgcttggattatcggacttggatatttgccttgatgtgcaatcttcatttctccgccaacggattcaagaatttcatgccaaccgttgtcgaaacgctcgggttcaactcgacagtgactcttatcctcacctgcccgccatacatcgtggcgactttcacttcaattgccgtttcttggtcttcaggacgttttaatgagagaacatggcacgtcacggtctccaagctactagcgatcgtggggttcgcagtagcttgcgggactctcagcacgggggcacgttacttcgccatgatcctgttcgttggtgccacttacggggtaaacaatatcaatatcgcctgggtggcagc

SEQ ID NO: 19350 - DNA, 892 bp, Emericella nidulans
gggcggatgtggtcgacgttctgctggaagctgtacgaaaggctggaattccagttcatttcggacggaagatcactgggattgacgataccagcgcgggtgagggggccgatgttggtgttaggttcgaggatggatcatcagatagtgctgatatgttgatgggttgcgatgggatccattcggcggtcaggaggttgtatgtcgaccgcgatctgaaactagagtactctggtctgtccgggcttttctcgattattcccacggcacagttgccgagtttcgtgaccgatcagttgacgggattgaatgtgactctaactgagaaagggatgttcatggcagcgccatgcacggcagcgatggacgaggtatactggggctttcagcgggagattcctgtgccggatccgcaggatgacagagacggatgggaggtccgcggacggcaagaggtggatgggttcaagggtaatctgcatgagatactagctagcggaaggggagactggacggatgcgctgagacaactcgtggacgcgacagatgtgatgaaattctacccgatataccggctaccactcgggggcacatggtcgcgtggccgctgcttgctgctcggagacgctgcacacgcaacgcagccacatgcgggtcagggtgtctctctggccgtggaggatgtctttttggtctcccggttactggcagatccctctcggtctgttgaagaagcgtttacattgtttcagcagattagaaggccacgcgtggccgaaatccacgagacagcagcgcaaaatgcaggagctcgcaaggagacgggaccaattactcagtggctgagagaaaatgcccttcgaattgcactttccactcgcttgggcttggg

SEQ ID NO: 19351 - DNA, 892 bp, Emericella nidulans
acccaatatcatctcgttgaaaacgaactctaactagtaccagtgacaccacagccggaaccctctcggccatcttctacgagctcgtccaacaccccgagcatatcaccaagctccgcgacgagcttgaaccacaccacctcgggaacgacaaccccaaaaagacagaattcctgcactcgaagattgctcaactagaccatctcaacggcgtcatcaacgaagcactccgcctctaccctgctgttccgtcctcgttgcagcggaaaaccccgccagagggggttgtcgtcgatggcacgtatataccgggggacatgcatgtggtctgcccgttatacaccattggacggtgtaagtggtttttacattattattgttctgtttaatatttctttttcaacagatttttttaatttgacaaagtggatatcaactgacattatcccagccgagatagcctacgaccaccccgaagacttcatccctgagcgctggtatagcaagccagaactggtcagacacaagggcgcctttgcgccatttagtcttggtaagctcttgaatcttgccctttcattcttaaaatcaatctccactccatttcctagtcgagctagactgaaggcatcaactgtttgagcgtaggtcacttcaactgtatcggccgacccctagcactcatgaacctccgcgtcacactcgcacagctgatcatggagttcgacgtgaagtttgcgccaggcgaggacgggaaacagtttctggctgacgcgaaggataatttcgtcatgtactttgggaagttggagttggcctttaccaggagggagaggcagaaagaatgagctttgactatggcagcgtaacctgtcagacgcgagacctgggg

SEQ ID NO: 19352 - DNA, 893 bp, Emericella nidulans
ccgtttccctctccctcttcctgttcaccctcttcctcctctaatcctgcacaacccactttctgttatcagtgtactactctcttacctcacctactttattgcccctcctcacgatcatgtccattctgcctatttcgacttaaatacgtcgtcggttcatgttaccgacgagaagaccgtccgagctttgtgggaaatgggtttctttggaaagggaagtctaagtagaagtgagccaacctggctggaacaagagaaaacgcggagaggactgctcggcggcgtcaccagtgaagaggttactcgccagcgaagggccgagcgacgtgaactgaaactacagcgagcaaggtcggaaaagctaatcatcgaacaacgacttcaagcggaagctgctgcaagagaaggtcgtacacttctggacgctcaggccgatctgttatccgtttccggcgtcacgaaatgcgctgccataactacagaaaagttttctgtaaaaaaggcgagagaatccaagttcctcgaggcacggcaattggcagaacgagatagggaggctgctagcaaaaacgttcgatttgctaccgttgaaggggacaccgcagaccgcacagtcatcaatctgcgtgacccttctggggaactggccataacaaatgaagaacacctccaactttccaacgaggaagcatttttcctcgtatacggattaggcgctttgcacatctttgaccatgacctcaagaccgtgctctcccctacttctttacttagaacgctttgtcaccattcatattcgcctccccgggatctatcgatggacttgaaaaccgacgacccattccttgtctcttacgttgtgtaccaccatttccgctctctaggatggg

SEQ ID NO: 19353 - DNA, 894 bp, Emericella nidulans
ggacggtaagccaaccccacaattgaggggttgatgaagctgactgaggcaggaaatgttcacgcgctatcgaaaacggacgatcgttggcatcactgtccagatgtttgcccaactgaacggaatcaatatcatctccttctatctcccgagtactctcgcctcggctgggtttgacaacaggaaatctcttctctttactgccgccaatgcaattccctacacagctgccaccattgctacttggtggctagcagataaatggggccgaaagcctctattaatcttaggaggtgagtccagagccttttaaaggtcacaagcagaaaatctgacattttcattaggtcttggcatggcagtactcctcggcatcgtctgcgccttcaccgaagcctcgctccccgttcaaaccaaagctgatggacaatacgccttcgtcatgctctacaatatcgtctatggctttacctggggccccatgccttggcttctgcccgccgagatcttccccctccgcggacgcagtaaaggaatggcgttggcgactacgagcaactgggtcttcaacttcattatcggcatggtctcgcctgatgcgttttccgggattcatgggtacttctatcttattatcgcgggattctgtctgttttcggccggactggtatatttctattatgtggaaacggcgaacagtagcctcgaagagattgcggcgctatttggcgatagagcgtttgaggatgaggccgttgtaggagggcatattgatgaggtgaggaaggatgaggggaaggaggttgtttgatcgtgaaattactggcgtgtgtaagatgtgatgcagtgtgatatcaaactctacgatgtactctgtatgttcaatctgccaat

SEQ ID NO: 19354 - DNA, 895 bp, Emericella nidulans
ctggcaccgccgtcgtcactggcgcacgaggaggcaagcctatgaacccttaatttcatatctttcctaacaacaccaggaatcggcgccgcaacagccatagcatttgcagctgccgggtgcacgcgtatcgcaatcaccgacctccccggctcaggtctgaatgaaacacacatgaagatccttgcggcgacctccaataaaccgaacgtgatgtcctaccctggcgacatcagcgacgagtcctttgtgaatagtttcattgaccaagtattcagcgcattcaagcggatagactacgtggttaattgcgcgggggtcctgcagaaggagttcctgcgctcgacggaggtcagctgtgagcaattcgatttcatcaacggggtgaactatcgtgggacgtggttggtctcgcgcgcggcactgaggaagatggtcagccaagagccactgtctgatggtatcgaggacggagaatggagacagaagagtcggggatctattgtgaatatcgcgagtcagctgggggttgtttcgagggctggtgccggtacgtaatactgactcagttatctgcccggaacatttcctccagacgcggttcagtgtttaacttgatgtgatgcagccgcgtactgcgcctccaagtccgccataataggcctgacgcgcgccgacgcgattgacttctccaaggacctgattcgagtcaactgcgtttgtcctggtgtgatcgacacgaacatgacgacgggggatcccgagacgaaagaggcgttacgaccggcggtgcagattgcgccaatgggtaggatgggcgatcctagggaggtggcagatgcagtactgttcttgagttcgagtagggcgtcctttgtacaggggcatgcgcttg

SEQ ID NO: 19355 - DNA, 896 bp, Emericella nidulans
tggacgaacccgaagaagtatgacaagatggatacgaagggtattgagactgttcgcagagacaactgcttgctcgtgcaaaacgtgattgaaacggtgctgcacaaaatcttgattgaccgtgacgtcgaagccgctcaagagtatgtactccgcgactctttcctcgttctttactgactcctttagatatgtcaaagacaccatatccgaccttttgcagaacaagatcgacatgtcgaagctggtgatcacgaaagctctgaccaaggattcctataccgccaaacaagctcacgttgagctcgcagaacggatgcgaaagcgtgatgcgggttctgctcctacgctaggcgaccgtgttgcctacgttattgtcaaaggcaccggtgccaagaactacgagaagtcggaagatcctatctatgtcctcgagaacaacatccctattgacacaaggtactatctcgataatcagcttgcaaacccgcttggccgaatttttgagcctatactaggagaaagaaaagttggccaactgcttcatggtgagcacacgaggtccagtcgccatggctgcaccgactatgggaggacttatgaagttcactaagaagacacaaacctgcctcggctgcaagaagccgcttactgggaaggatgtaatggcgggggcagtgtgtgaatcgtgccgccctcgcctaggcgagctatatactaagagtatgaacaagatgtcggacctggaagtgaggtttgggcgactgtggacgcagtgtcagcggtgccaaggcagtcttcactgcgaagttatttgctcgtcgagagattgtcctatcttctacatgcggatgaaggcgaagaaggatgttgaggatgcccaaaaggaactggca

SEQ ID NO: 19356 - DNA, 896 bp, Emericella nidulans
ggaggacatggcacgcacgatgccgcctccacctgatgagaacgactccgaggcgatccagacacacatggagtggcgccagaaactcaatgcgctgaaccaaaagctgtggaaccagatgaaagttatggaggccattgtaccaaactccaacaccccccatccctttattgcgttgctctcttatccaaagggcaagaaagccatcccgcgcatcttccgtcatatcgaccaggaacagcggattaccatcctcaccatgattgttgtcaatcttgataacctggacgttgtccgccgagcgcttcctgctccaggtgaagctcagcctcccttggcggccagggaagccattgatctattctctcaggccgtgatgccatgtcttctaggctatgttaacgaggccccattcaatatcatcattgggctccttggactggtgcttacccatacgcacgcgcagtttgttgctcggacacgaatcgggctaggtatcttgactatgcttctgagcagggcagaaattgtcaaggaggccggacaggccagcgagcaagactggaaacagtgggttgagaaattcaacatacttttcgacaccctcgagcctacttttgccgatatattcccgaactccattaacgcgggtgatgatatgtatgtttggcagttcttagcagctatcggaatcggagcaagcccggagcagcaacagcgcttggttatcgccgttaagtatgtgactcaatgccaatgtatcctttgatgatttactgactgccggctagggaccgtgttatggaaaccgtcacgcacagcaaaacccttccagctgacatggccagtcagcgacttggaaatgtcaatctcttcatgcgagctatcgggttgga

SEQ ID NO: 19357 - DNA, 896 bp, Emericella nidulans
tgctggcgagatccctgtcaatctgcttacgcatctcaacatcgcattcggttacattaacagtgctttccaaatcacaaacatggacggtctgtccgccgatgtgtacaaacaggtcggcaacctcaagtcacgcaatccaagtctcaaaatcatgatcgccctaggcggctggacgttcagcgaccccggtccgtggcaggccatattccctacactagcgtccaccgcagcgaaccgagccacttttattcagaacctgcttgggttcatgtccgagtacggctacgatggggttgacttcgactgggagtaccctggcgccgatgatcgtggtggttcggactcgatggtcgatggagagaattacactcttctgctcaaggagctgcaggaggccatcactgcaagtggacggaactaccttgtcacttttactgcaccaacgtcatactggtatcttcgccacttcgacctcaaagccatgatggagtacgtggactgggtgaatctcatgtcgtatgacctgcacggcacttgggacagcgaaaaccccatcggcaatcaaatcctcgcccacactaacctgacggaaattgacctcgcccttgatctattttggcgcgtggatgtggacccatcgtccatagtgctaggcattggcttctatggacgaaccttccagctatcatcgggctcctgctggaagccgggctgtccatttgatggccctggagcagggggtcggtgcacagcgacgcccggtatcctgtcctacatggagattatggagctcttggagaattccggcgcaacggcacacttggacgaggaggcggctgtccagtatcttgtctatgcggacaatagctgggtctcctacgatgatgcaacca

SEQ ID NO: 19358 - DNA, 898 bp, Emericella nidulans
gtaggcggcgatcgcgtgggccgccggtgagcccctctccattgaggacgttgaggtcgcacctcccaaggcccatgaggttcgcatccaggtccttcacactggtgtctgccacacaggtcagtgatcgaattgatgcagcgcgttggattttactgataacgacagatgcctacactctctccggaaaggaccccgaaggagcgtttcccgtcatcctcggacacgagggtgccggtattgtcgagtccgtcggtgagggtgtcacgtctgtgaagcccggtgaccacgtcattgctctctagtaggtttcgaaattaagccgagaaagcgcttggctaacaaacgcagcacccccgagtgccgagaatgcaagttctgcaagtccggcaagaccaacctctgcggcaagatccgcgctacccagggcaagggtgtcatgcccgacggcacatcccgcttcaaggcccgcggcaaggacctcctgcacttcatgggcacctccaccttctcacagtacactgttgttgccgacatctccgtcgtcgccgttaccgacaagatccctactgaccgatcgtgcctgctcggttgcggtatcacgaccggctacggtgccgccgtcgtcaccgccaaggttgaggagggctccaacatcgctgtcttcggtgctggatgtgttggtctctccgtcatgcagggtgccgtcaagaacaaggccggcaagatcatcgccgtcgacgtcaacgatgccaaggaggaatggtcccgcaagttcggtgccactgacttcgtcaacccgaccaagctcaacggccagactattcaggagaagctcattgagatgaccgacggtggctgcgactatactttcgactgcaccggaaacgttggcgtt

SEQ ID NO: 19359 - DNA, 898 bp, Emericella nidulans
gtctcgcgtgccggctcagttaaggggcacatgcggctggacaagatctttctcagctctttatccgccggatgtctgctagcactggcatgcggaaccactctgagcaccaacgctagtccctggttcacagagaacgcccccggcctgatccggacgatcagtgcgcttgtctttccctatgggttggtcttgatcatccttactggtgcagacctctgcactggctcatttatggtatgagattcatcctgcaacctgggcaaagagactggtgaatagtatactgactgcttgttcggttggtagtttacgaccgtcgctgctctccatcgccgactttcctggccgaaaatgctcctgcactggttcataacgttttgggggaacctttgcggctcgttattcgttgtcgccatcatctttggctgttcgtctcccttcctctgttttacatacacccttccagtcattggctgacactgtcactcagacggcgaagtcttctccgctgaccccttccgctccgccgtaatctccttcgcaaccaagaaacaagtgacgcccgaattccacagtatcttccttcgtggcatcggatgcaactggctcgtctgtctggcgtgcttccttggtctgcagggtcgggatatggcgtctaagataatcggcatttggctacccatctacgctttcgtcagtctgggctttgaccacgttgttgcgaacatgacattcatcccgttggcgatctggctcgatgcccccggaatctcggtggggctgtatatctggaaggggattatcccgaccttgttgggaaatatagttgggggtgggttgtttgtcggaacttattactggtatatgtacctgcttcagaccaacccggtcaccc

SEQ ID NO: 19360 - DNA, 898 bp, Emericella nidulans
ggcgcgcgatgaccgtattctgtatgcgtgcaagctgttaacaatcctgtttctcattgatggtatgtagaatgcgcgctgccttgtctgttcgggctctgctaaagccgtgggccagatatcctggaagatatgtccttggaggacggagaggcgtacaatgcccatctgatgcccctcatgcggggagatgtgctcccaaaccgtaagacatttttccgtgaattctagctgaacacgccagtacccagaacttactgcgatatgagagagacaggcgacatccccgtcgagtttatgatgtacgacctttgggaggagatgcgcgctgcgagcccgatcctagcggatggtattctcgagcccaccttcaccttcatgcgcgcgcagacagacaaggcgcgtctttcgatcaaggagctaggtcactacctcgtctatcgggagcgggatgtggggaaggcgtgagtcaagatccatttggcgtggtgatgcttgctaactcgcgggcgtcgaccgtcagtctcctgtcggctctcatgcggttcaccatggacctcgagctaacgcccgaggagcaagcggcgatggtgccgctcgagcgtaactgttcgaagcagatttcggtggtgaacgacatctggagctgggagaaagaattgcgcgcgtcgcagtcgggtcataaggaaggatcagtcctttgctcgggggtcaaggtgctggctgaagcaactaatctagacatcgcagcgacgaagcggctacttcaggccatggtcgaagagtggaatcgggttcacgatcggctcacagcggaacagctcgcggcgggatgtcgtccggccgtcaagctctatatgaaggggctggaataccagatgagcggcaatgagcggtg

SEQ ID NO: 19361 - DNA, 898 bp, Emericella nidulans
gctcattttgaggctgcaactatgcagagcgctttcaacggcagcggacaagcatcaacaacatcaagactacgattccccaaccctttgagagcgctttacatcctccttgaaccggacgctctcataatagtctcatccataggcctcttgatgctcacaaacgttgcactgctcaccagtaccccaagtctgttctcaaagatatacggcttcaatgacctccagatcggcctatgcttcctgtaatcaccaacagcccatacaaactgatctcagcatactaacacacattagtcctctaggcatcggcgccgctctcggtgcggtcctcaacggctactttctaaatcgcagctatcgccgccacgcccagtccctagacctccccctcgacccatctatagcgaccactctccaagacttccccattgagcaatcccgcctggaaatttacttcccccttattatcctcacaatcctaacattagtaccctatggcttcgtgctggagcggcgagcgaacctttccgcgcccttaattctgcaattcctcaacggcttcgggacagtcgcctgcacaaacacgctcaataccttacttgttgacctgttccctgatgagccggctactgcagctgcggcttgtaatctggtcagatgctggctgggagctcttggggcagctgttgtggattatatgttgagcggcatgggatggggttggtgctttatgtttctggggcttttgctgctggcatctattgggctggcttggtccgagtttgtctatggagcgaaatggaggggaagtagaagattgaggcgtgagagggaatgcgaaagtgggagggaaacaatagagattgctgaaggggaaggtgataggagatcaggc

SEQ ID NO: 19362 - DNA, 898 bp, Emericella nidulans
caccttctcgccccgcaaaaggcccaacacccacataccccaatactatccctcccgcctccgaagcagcctggccagccaagtttaaccgcatctggcgctacatttacccatacctcaacaacccgcaagctgacgccgccgttgccaactcttcaaagacatacccctacccagacggatacagcacagacccacaacctcccccacgagccggtggcgcagaaggcggcaatcctgctctctgggacgtcgcattttcagtgcaagtgactgtcaccaatacaggacaacattctggccgtgctgttgcgcaactatatgttgagcttcctgattcgctggggcttgacacgccgagtaggcagctgagacagtttgagaaaacgaaggtcctagagaccggacaaagtgaaacttttacattggaagttacaaggaaagacgtgagtgtttggaatgttgaggtgcaggattggaagactgttgttggtggaaagggggtgaagattcacattggggagagtgttctggatataagaactgagtgcgaggtcggtggacggtgcgttacattgtagttctcggtataataatctttggtttatgtatttatcttcacatttatctactttggattcaatcttgcttgtgcttatgggcactatgtacatcattagtaatccgcataaaatcagctcggataacctctatgatgtcttccgtcactcaaacttctgctcaacagcaaatcatcccaggacttaagttagtcgatcacactcaaatgttcaaagcagctcatacccgaggaatgagcctacaccatccactttttaatacatagcccaaccaatatcacaccacaaacaccgtcaagatgcagggcttcagtgcg

SEQ ID NO: 19363 - DNA, 900 bp, Emericella nidulans
cgcttcgttgggctcgctaatggcctacttgacgcgggctggaatgcatgggttggcgacatggtgagcgccagtacattgatggggctcatgcatgcatgttacgggttagggtgtgtgttgtcaaagccgaagctgccgaggcattgagtcgctgatatcgatgcaaccagagcaactataagtccagctatctcaacggcgatgatcgaccatggtctgaagtggtctagattctacctgactctagttggcggctctgctctggaactcatcacctgcgtgcctttgttctggcctgaaaatgcggagcggtttaggatcaacaaccccagagtgtcaggctcgacaagggactcgcgaacgactgaagccatcaagaatcgggttacttggattctcgctttcttcctctttgcttatatgggagtagagggtatcacggccggcctattcatatcactatatactgatgaattcaaccgtagtgtccgttggcggttggattgtcgacttcatgatgcaggttcgcgacggcggtgctgtggcctccggtcttgtccctactgggttctgggccggcatcacaattggccggattgtgcttgcttttgcaaatgaggcctttggtgagcgacttgccgtgatcatatatcttgtcctagctattgccctcgaactggtgttttggctcgtcccccacttcgttgtctccgctgtggcagtatcactaatcggattctttaccggccctctcttccctgccgcagttacagtagcagcgaaactgctcccgaagcatttacataccccgagtattggcatcgtctctgctttggggggcagtggtggcgcgatgtaagactcttctctaattcaatgctgacccctgcgagatcc

SEQ ID NO: 19364 - DNA, 901 bp, Emericella nidulans
ctcgctgtcatcatggccaaaacatttagtaaggaggacgtggctaaaaacaacaagcctgatagcctttggattatcgttgacgaagacgtatacgacctgaccaaattccaggacgaacatccaggtgcgttccctaatgcgcgacattttggtcgcattctttggtcttgcatgtgatactgactttagctccgcgaataggtggaaagaagagtacgttccgagtttgaaccccaaacagcgctcgcttggcccgcagcctttgagtactgactgctgctaccaatatagttctcacaagagtggctggtaaagacgcctcgaaacagttctggaaataccacaatgaggggatcctgaaaaagtacaagtcgcaattgcagattgggtcattagactctaagaaagcccctgaagccccggctgcggctgcgacggaagcacccaaaaagccccaggccgcacagcctgttgatgtctcctctgcgcagtcggcaggtcctcaggatccttatggtgatttgattccatttgccgatccctcatggtaccaaggagtgagtttattctgtccgtatgtaaagcagggttgaatttgttcgctaatcgtttgcttagtaccactctccttacttcaaccagacccatgccgcgctccgtgcggaggtgcgggaatgggttgagaaggagatcgaaccatatgtgacggagtgggatgaggccaaggaggttcctgccaagatctacaagcaaatgggcgagcgcgggtatctcgcaggtctactcggtgtcaagtaccccacgcaatacaccccgcaccgggtgcagtcggttgcgcctgagaactgggatctcttccacgagatgcttctaacagatgagctttcccgtgctggca

SEQ ID NO: 19365 - DNA, 901 bp, Emericella nidulans
acagaagatattttaacccaggagtcacgtgagaaagttgaactcttcaagcaatactatttcgtctgtttccgaacgttctatcaactcgacaagacgagcgagcagttcatggagcctgtgaacttctatatggtcgtcttccgcgatggtgttttgtcgttctcatttaccgagaatccccacgccgcaaatgtccgaaaaagaattgggaagctccgtgactatgtatcgctcagcagcgattggatctgttatgctatgatgtaggttgctctcccgctttctgctggttgcaagcagagacttggtgctaatggtctaaagcgatgacattgtagatagttttggtcccgttatccgggagattgaggttgaaaccgaagccatcgaagacctcgtgtttattgcgcgcatggatgacttcgaatcattcttacctcgcattgggaatttgcggaaaaaggtaatgagcttgatgcgtctcttgggaggcaaagccgacgttattcgtgggttctccaagcgctgcaacgagcagtactcagtgacgcctcggggcgacattggactttaccttggtgatatccaggaccacgttgtgaccatgatgtctaatctagcacatttcgagaagatgctcagtcgctcccatacaaactaccttgctcagttgaatgtgacaaatctggttctaggtaaccatgccaacaaggtcttgagcaaggtgacacttatcgctaccatactcgtccccatgaacctcatctgcggtctgtttggcatgaacgttcatgttcccgggcaagacgtaccaggatacggatggtttttcggcatcatcggggtccttgctgcggttgttattattagtggcctggctgctcggttttacaagctt

SEQ ID NO: 19366 - DNA, 902 bp, Emericella nidulans
acgcgcagaagagccggttgcgtcttcgccctctcaaacaaccagacctgagcaaaagagcttggaagaagaaacgttagcctctccttcagtgtgcactcggtttcattgctgacggacacagcacaaaacaaacccaaacacacgctgattcaactgtgaatgaatggtttgttctccctcgtttccattcgaaccgccgtgcaaaaagtcagacagaccttctcctaacactgtcctaggggagcacgtttaactgatcttaacatcaacgctcgattaccgagaagtgttcaagcactgtatctgcggccgctccgaagaaaagccgaatatggtctcccggtttgcgacctacagttaagatcgtacagtgtgcgaaatctcgagttctttgcggacttcgctatccgtgctgcctactacctgaatctccctgtttctggtccagtgcccctaccgaaaatcgtcgagcggtggacgtttccccgtagcagtttcgtacacaagaaaagccaagagaactttgaacgtattaccgtccgcaggttaattcagatcaaagatggcaactctcaagctgtgcaagcatggcttgctttcctccggaagcatgcgttttacggtgtcggaatgaaggccaatatctgggaacatgaaagtattggtaagatctctttgggctctgatgactgcattttccattttactaacaaagtctaaactcagaaattgcgaaaactatggaccaaactcttccggagattgagaaagcccttgaacctcatatttcacaattcggtcgtcgagaagatgcagagcccgctcatgatttgataaccaactttctgggaagcgaacgactgtcgctgagcaaggggccactgaccgatgtccgcgga

SEQ ID NO: 19367 - DNA, 903 bp, Emericella nidulans
tttcccgcggttttcttggaaagagcgaaagcaggataggggcggaggaccatggaggagcgatggaataatagcaaattgccatgagaaagaattgtgattgctaacggaggctctttgatcatagtcatccgtgccacccacactcaggaggttcttggagagcagggtcgccgcatccgtgagctcacctccctgattcagaagcgcttcaagttccccgagaactccgtttccctctatgccgccaaggtccagaaccgcggtctctccgctgtcgctcagtgcgaatccctccgctacaagctcctcaacggtctggccgtccgtcgtgcctgctacggtgttctccgctttatcatggagagcggtgctaagggttgtgaggttgtcgtttccggaaagctccgtgctgcccgtgccaagtccatgaaattcactgtacgtttgatacggcctctgaggttaccagtggaaatgcagctttcgaatgaagaattgaagtgtgatgacatgatgcgcaacgcgcggaggacacattcggaattgcgatttttcactggcttttttgtgtgtaaaacagctcactaacatctccttctctgtttaggacggtttcatgattcactccggtcaacccgctaaggagttcatcgactcggccactcgtcacgttctcctccgccagggtgtccttggtatcaaggtcaagatcatgcgcggctccgaccctgagggcaaggccggtcctcagaagacccttcctgactctgtcaccatcattgagcccaaggaggaacagcccgttctccagcctatcagccaggactacggtgccaaggctatcgccgcccagcaggctgctgagcagcagcgtctggctgaacaacaggccgcggaagg

SEQ ID NO: 19368 - DNA, 904 bp, Emericella nidulans
caaaaggtcctttgagaacgctcttgttatgactatggcattaggaggaagcaccaatggtgtgcttcatttcctggctatggccagaaccgcgggcgttgatctcaccttggatgacgtccaaagagttagcaacaagattccattcattgcagacctttccccaagtggaaaatactttatggccgacctttacgaaatcggaggcattccctccgtccataagctgttgattgcggctggcctcatcgacggtggtattcccaccgtaaccggcaagactctagctgaaaatgtggcctcatatccatctcttcccgacgatcaggtcattatccgtcctttgaacaaccccatcaagccgactggtcatctccagatcctaaagggtaatcttgctccaggtggcgcggtggccaagattaccggcaaagaaggaaccaaattcaccggaaaagcgcgcgttttcgacaaggagtaccagcttaacgatgccttgacgcagggcaagatcccccgcggagaaaaccttgtgctcatcgttcgctacgaaggtccaaagggaggaccaggtatgccagaacagctcaaagccagtgcggcgcttatgggtgcaaaactgaccaacgtggcattgattacggatggtcggtactctggggcctcgcatggctttatcgttgggcatattgtgccagaggcagcagtgggaggccccattgccgttgttcgtgacggggactctgtcactatcaacgcggagaccaacgaactcagcatggatgtttcggatgaggagattcaacggcggttgaaagaatggaagccaccggctcctactgtgacgcgcggtgtgcttgcgaagtatgcccggctggtaggggatgcttcgcacggtgccatg

SEQ ID NO: 19369 - DNA, 907 bp, Emericella nidulans
cagcaaactcaaggaggcgtgtggttttgagtacacgaacaagttgcagcggatgttccaggatatccagatttcaaaggatctgaactcaagctacaaggactggcttgagaaatctttcttggatgatgatgaccgaaagaagcttgtggactcgcacttccaaattctcgggaccggtttctggccactcacggccccttcaacttctttccttgctccgcctgaaattgtcaaaacttctgagcgttttcagaagttctattgcgataagcataacggtcgaaagctaacctggctctggcagctgtgtaagggcgagctcaaggccaattacatcaagaacaccaaggtcccatacactttccttgtgtctacgtaccaaatgggcatcctccttctcttcaacgagagcgacacgttgacatactctgatatacaaaaggccactactctcacacctgaaatccttgatccaaacctgagcattttcttaaaggccaaggtccttaacattagtcctgaaggatctaaacccgggccagactcgaccttctccctgaactacaacttcaaaaataagaagatcaaggtcaatctcaacatccaaattaggtccgagcagaaggtcgagacggatgacacacataagacaatcgaggaagaccgcaagctcttgctccaggtatgtcttcttgccttgtctacccaagtgattgtactatacttacttactatcctttgtaacagtccgcaatcgtcagaatcatgaaatccaggaagaagatgaagcacgtacagcttgtgcaggaagtaattcaccaggtcaaatcacgcttccccccccaagtacccgacatcaagaagaacatcgaagcattgatggagaaggattacatcgagcgtc

SEQ ID NO: 19370 - DNA, 908 bp, Emericella nidulans
  unsure (1)..(908): unsure at all n locations
gccgtaatctgggtcgacaacgtcggtcgcaaaccncatcctacttatcggcgccatcggcatggcagcctgccacttcatcatcgcgggtatcttcgccgagaacgaaacgcagtgggagtcgcaccgcgccgcaggctggggtgccgttgccatggtctggctgttcgtcatccacttcggatactcgtggggcccttgttcctggattatcatcgctgagatctggccacttagcgtgcgtgcaattgggacgagtttgggcgcttcggctagtatgtctcttatcagtctccttggttctctaggtacgttgctaatagacggtattcagactggatgaacaacttcatcgtcggccaagtgacaccggacatgctcgccggcatccgatacggcacatatatttttctcggtttaatgacgacacttggcgcgctgttcattttcttctttgtccccgagacgaaacaagtctcgctcgaggaaatggacgttatcttcggttcggagggcacggccgttgcggatcatgagcgacaggctgagatctcacgcgaaatcgggcttgatgaggcgttagccaggttttctacaaggtctggggctactcttgcagaggtggagccaaagaacgcatgatattggcttctggtttcattgtcttgggtgagctgagctgggtagtaatggacgataggagtagcttcgcgctgaataccacttgttggctagcgcacggggacaaaatataatcatcatcttttttggtggatatctattactctgtctcacttggatattcgatttggttgccttactcaattgtcacactcgccttttggcccatgcttaggccaacagacaagcctggtagtgtacatggttaagcaggatcaacaatgata

SEQ ID NO: 19371 - DNA, 908 bp, Emericella nidulans
ccgtcactttcacagcggaccaattcaaaggtatctatcgtgggggtaaggcctatcacgagcctgacattgcggaagtcatacaacgcgcaaaagaatatggctgcgaaaagatcatgctaacaacaatgtctctgcccctcgcgcatgagaatttggccctagtccgccaattcccagagacatgcaccatgacacttggtgtacatccttaccatgcaaaagaaatctatgtctctgaagcttcaggagccggcggcagaaccactgccgatggcgccaggtaccttcaggaactccggaatttcgctagaactatcctcgcagagcaaggcgttgcaggcgagtctccgctcgttgcctttggggagataggtttggactacgaatatattacacgttcggacaaggctacgcagcagcgcgcttttcgagaccagctggctattgcggtcgagcttcaactgcctttattcctgcacgtgcgggagtcctgtgccgatttcatctcaatcattaaaccctttttggcggatctcccacgtcgaggcctcgtgcactcctttgctggaacaaaggaggaaatgattcaactcacagctcttgggttcgatattagcgtgaacggtatctgttttcgtactgaggagcaattggaaatggtccggtctattcctctggataagctgcagctggaaactgatgcgccatggtgtgaaattcaggaaggagatgacaggatcaagcagtacctggagggtgccaggtcgcttccagggagcagaaaacacgggaagtttcggttaggcgaaatggtaaaagggaggaatgaaagctgtacgattgaaagagtcgccatggttgttgcagggttgaaggggatcgaggttgcagaggtcgcgacggct

SEQ ID NO: 19372 - DNA, 909 bp, Emericella nidulans
tgacatcgcccaagcgcatctcgatgacgaaagggcgaaattaacgggttttgacgacgagctacgggaccttgaacaaacgatgcagtccaagaactctcagatcactgaggagggcttggaaatgcagaaacttgggcatcagttggaaaaattacagaaagagcagaacgccgccgagcaggcagtagcccaccttgaggcagagcacgagtggattgcggacgagaaggacaattttgggcgcccaaacacggtatacgacttcaagaaccagaacatagccgagtgcaaggctacactgcgcaacgtcacggaacggttccagggcatgaagaagaagatcaaccctaaggtcatgaacatgattgacagtgttgaaaagaaggaagcggccttgaagaacatgatgagaactgtcattcgtgacaagagcaagattgaggagaccatcatcaacctgaacgagtataagaaggaagctctccacaagacgtggactaaggtcaacgctgattttggccaaatcttctcggagctcctgcccggcagtttcgccaagttggaccctcctgaaggcaaggatattaccgacggtctcgaagtcaaggtgtctttgggtaaagtgtggaagcagagcttgacggaattgagtggtggtcaacgatcgctcattgccctctctctgatcatggctctcctgcagttcaagcccgcaccaatgtacattctcgacgaggttgatctgcgctggacttgtcccacacgcagaacatcggccgtttgatcaaaactcgcttcaaggggtcacaattcattgtcgtctcacttaaggatggcatgttccagaacgcgaatcggattttccggacaagattcagcgaaggtacaagtgttgtacaggctctc

SEQ ID NO: 19373 - DNA, 909 bp, Emericella nidulans
tctttaaaagctccacgcgcaatgcttgtgatatacttcataggtagccttctggccagccttgttagtgcccgcaacgctgccgatcttatcgggacctggaccaccaaatctcgccaagtctttacagggccagtatgtttatcagtgacctgccgtgtgttcgttggagctgacggtcctgcaggggttctacgatgtagtcaaggatgaattgattgagccaaggcttacgggcatctccttctctttcacagaagacggacatttcgaagaagcattctaccgagccgtttccaatcgttagtatattctaccgatccagttggtcaagctctaacgccgtgtttgatgcacagctcaggacccgtcatgtcccaagggcattctgcagtggcagcacggtacatacaccgtcgacagtgatggttctatacacttgaatcccatcgcggaggatggccgccagctcctgtcagacccgtgctcatcttcgaaaggaatatacactaggtataaccagacggagaaatacagcgtacgttgaccccatattggcttaagggttatgctgacaccaccagtctttcactgtggatgtcgacccgtactatgacagtatacgcctcaacctatattcattcgatggatctcccatgattccgatgtaccttgcctataggccaccagagatgctgcctaccggacctctccaatcgatagtatccaagaaggccaagcgccatttcgacagtaagaaggtcacgccttttggcttgaggacactcatcagcaaagataaccttgtggacccgaaccgctggctgtgggtgggcattgtgatgagcgcgatgggcggcattacactcttcttcacctagtcctggagtgattggtacaagggctggg

SEQ ID NO: 19374 - DNA, 909 bp, Emericella nidulans
cttctactatctagacttatcccacactgaccgacttagtgtcgaccggaacaagtaccagattatgttgccgttgccgcccaagattgaccctagcgttacgatgatgactgtcgaagataagcccgatgttacatatggagatgttggaggctgcaaggagcaaatcgagaaactacgagaagtcgttgagatgccattattgtcccccgaacggttcgtcaacctaggtattgatccgccaaagggagctctactttacggaccccccggtactggtaaaactctctgcgcgcgagccgtcgccaaccgaaccgacgctaccttcatccgtgtcatcggcagcgagttggtgcagaagtatgtcggcgagggtgcccgaatggtccgtgagcttttcgaaatggcccgaacaaagaaagcgtgcattatcttcttcgacgaaattgatgctgtcggtggagcccgtttcgacgacggagcaggtggtgacaatgaagttcagcgtaccatgctggaactcatcacacaacttgacggattcgacgcccgaggtaacatcaaagtcatgttcgctaccaaccgaccgtcaaccctagacccggctctgatgcgtcccgggcgtattgaccgcaagatcgagttctccctgcccgatgtagagggccgtgccaacatcctccgcattcacgccaagagcatgtccgtggagcgcgatattcgatgggagcttatctctcgactatgccccaacgcgacaggcgcagagctccgaagcgtcgcgacagaggccggtatgttcgccatccgtgctcgacggaaggtcgccacggagaaggactttttggccgccgtggataaggtgatcaagggcaacttgaaattcaactcgacggcgacatacatgca

SEQ ID NO: 19375 - DNA, 910 bp, Emericella nidulans
ccaccccgcatgacggctacgacgaattcttctccgctgctcacaccaaaccaaccttcatcccagtcctgagccataatttccacactcagaacctctccagcataaagcacttattcgagaacggtagtctcgcaccaggccgagaccgacaatatggcgggttgatattcacctctcagcgcgcggtcgaggcgtttggggagacgctgagtggtgttgagggtatgtttcctacagcacactaccgctcacttgaatacttggtgtagagctgacggcaatatagaatcatacttgatttcatcttcgcgaaacctccccctctacaccgtcggccccgcaacggcacgctccttaacgacattgagagacagatatctcccgcacgcaacgattcacggcgcggagacgggaaatggggagaatcttgcgcagttcatgctcgagcactataacgctttgttcttccaacaagaggggcagcaagcacagaagaagccgttactcttcctcgttggcgagacaagacgcgatatcattccaaaaacgctaatgggtgctagtgtgaatccagagaggaggattggtgttgaggaggttgttgtgtatgagacgggcgtagtggagggatttgagggggatttcgaacgggtattgcaggattgttataatgatattgaggatgggatgatatgggttgttgttttttcccctacagggtgtgacgctatggtcagggttttgagacagaaagaggcgaggattgcaggagagaatgggaaaggagcccggaaattgttcgtggcgacaatcgggccaacgacgagagaccatttggtgaaagaatatgggtttgagccggatgtgtgtgcgcgaagccttcgcctgaaggggtgggggcagggat

SEQ ID NO: 19376 - DNA, 910 bp, Emericella nidulans
cctaacttgctgctgtgtagatatttactctattgctctcaccaccctttcctccctcatgaagaaatacaacattgaccccaactccgtcggtcgattggaagtcggtactgagactctgctggacaagtccaagtccgtcaagtccgtcctcatgcagctttttgccccccacggaaacaccaacatcgagggtgtcgacaccgtcaatgcttgctacggaggaaccaacgctctgttcaacagcatcaactgggtggagtcgtctgcctgggacggcagagacgccgtcgtcgtttgtggtgacattgctctttatgccaagggcgccgctcggcccactggtggtgccggctgtgtggccatgctgatcggtcccgacgctcctatcatctttgagcccggtctccgtgcttcttaccttacccacgcatacgacttttacaagcccgatctcactagcgagtaccccgttgttgacggccacttctcccttcgttgctacaccgaggccgttgatgcctgctacaaggcctacggtgcccgtgagaagacactgaaggagaagacccaaaatggcaccaacggtgtcactcacgacgagtctaagaccgctctcgaccgtttcgactatgtcctcttccacgcccctacttgcaagctcgtgcagaagtcctacgctcgcatgctctacaacgactacctcgccaaccccactcacccctcattcgctgaagttgcccctgagctgcgtgacctcgactacgaaacctctctgactgacaagaatgtcgagaagactttcatgggtctgaccaagaagcgtttcgccgagcgcgtgcgccctggtcttgacgttgccaccctgtgcggtaacatgtacaccgctaccgtctacgctggtctctgc

SEQ ID NO: 19377 - DNA, 911 bp, Emericella nidulans
ccgctggagtcgggtcgcttatcaatccagacgcggagaaggcgctcgccagggcagcagagtcaacggggatcgtagagattgtacgtcaggtcaggaagagtgagactctgctaactctcacagatcagcaccaactccgcacatcctttggcggacatagtcgaacaagcgcctggatatccctttctgttccagttatacctgaacaagcagagacaaaagtcaaaggagctcctccttaaagcagaatcacttggctgcagagccatcttcctgaccgtcgactcggcaggacgaggcaagcgcgaatcagacgagcggctaaagtcagacgagatgctccgtgacccagtcaccggaaaactcatgaaagcaggagctggcttgaccaggattatgggcagtttcatcgaccagggaatgacctggaaggatctggcgtggatccgcagtgttactaagctgcccatcatcctcaagggcatcacgtccgcagaagatgccaaaattgccatgcagtataaggtcgacggcatcctactcagtaaccatggtggccggaacctggattactcccctccgaccattctgctactgctggagctgcacaagaactgccccgaaatattcgacaagatggaaatttacgtggatggagggttccgacggggcgcagatatcatcaaggcgctttgtttgggggcaaaggctgtgggtatgggccggagcttcttgtacgcgttgaactatgggacagaaggtgttgagcatctcatacagcgtatgtttgctctcgatcactataagtcttttcacgacatgctgacgtttcccagtgctcaaagccgagatggaggcggtcatgaaactgattggtatcaaggacctctccgaggtctatcccggcc

SEQ ID NO: 19378 - DNA, 911 bp, Emericella nidulans
ttgcgaaattcaattcgctaacgggttctattgactgacgcggctttatgctagattacgtctgccagtgaattcaaccaagtcgtcttcaaggagtatgccaacgcgcctctggctcgcaagtttacctctctcttccccggtctcggttatgccgcaggttacaaggtcggtagaacaaaaaggtggctttggttaccattggctcacaaaacaccacaggttcttcagcgtatttacaagtacggtggtcagccgttcgctcgcgactacctggcgaagcaccacggtgccgactttgataaggcttttggaaagggcactggaaaggctatcatgcacgccacggccggtagtttaatcggcattggtgaaatcgtcctgcttcctctcgacgtgctcaagatcaagcgtcagacaaacccagaggctttccgtggtcgcggccttttcaagatcatctccgatgaaggtatggggctttaccgtggcgctggctggactgcggctcgcaacgcccctggatcattcgctgtacgttgtttcctctcgcaaaatgttatcacgctaacgatgacagcttttcggtggatctgctttcgccaaggaatacatctacagtctgcaggactacaacaaagcttcgtgggcccagaacttcgtcgcctccgtctgcggtgccagcgcctccctcatcgtctccgctcccctcgacgtgattaaaacccgtattcagaaccgcaacttcgagaaccccgagtctggcttccgtattgtctccaacatgatgaagaatgaaggccccactgctttcttcaagggtttgacgcctaagctgttgatgactggacccaagcttgttttcagcttctggctggctcagacgttgattcctgcctttggccagatcg

SEQ ID NO: 19379 - DNA, 912 bp, Emericella nidulans
atccgtccgtgtcactattcttaggtaaggaactccgcttctcaaaggatagacgatactgacagcttgacagcggcgatgtccatctagctgcagtcgggcagttctattcaaaccctgatctcaacacacccaaggataaggactaccgatacatgcccaacatcatttcgtcagggatcgcagacgcccctacgactgaaatgatatctgatacgctcaatcgacggaaccaggtgcaccacatggacagtaataccgacgaagatatgattccgatcttcacgcatgatgtcaataataaaccgcgcaataacaagcgcctgctaccacgacgaaattggtgttctattcgcctatatgagcctggtatgttaaagttatagtgttcgctttcgagctttcctaatcaagaacaggcactacaccacccgataccccagagccggagtccccagctcctgctatcgagccacggccgaatgcgctacaaagaactttgtcattgactcgcggagacagaccccagggccttttaagacgactctccggcaaaggccgcccgccaacaaaagagatcagcctcagccgccctcctcctgaacggcgaatgagcatggacgggccgttccctccagcaggaacaggggattcctacttcccggtaccagcagatttccgccctggtccgttcctccgacgaccaacgaacctgagccaaaaatctgccaagaaagcgaccaaacgaggagatgacggcgtaggcacattcgtcaacctagaaggcgggttggctgtcacgctcaatctggaactcaaccctaaagacccgtctggtatcacggtaccgtataagctcctcattcccgcactatggttcgaagggacagagtacgaccctcccgcagcacc

SEQ ID NO: 19380 - DNA, 912 bp, Emericella nidulans
ggccgggactctgtcgcagttctcgagcttgttatcgtattgtctgttcgactacttgcaaccatggtatttggatcgcgtccaccagcgctcacagaggccaacattggagatcagtcaggaaaggtacctacacccctctttccagccggcagccaaccgacgggccagtccatatcgagaccaagctaaccccagcgcgaatgctaggtcttcattgtcactggcgcaacctctggctatggcctgctgctgtctacatacctctaccagaacaacggcacggtctacctggccgcgcgcaacgccaaaaagaccgccgaggtgatcgccgacctcaaacagcgcttcccagcctccaggggcaggctcgacagcatctcgcttaacctgtctgatctgagcacgatcaagaaatccgccgaggagttcctcgctaaagaaaccagactgcacgtcctctggaacaatgcaggcgtcatgttcccgcctgcgggttcgacaacatcacagggctacgagctgcagctagggacgaacaacgtcggtccgcacctgttcacaaaactcctctatcccactcttgcggcaacggccaaggaggcgcccaagaatacagtccgggtcgtttgggtctcatccgacgccgcctcctgggcccccaagcccgcgatcgacttcaacaacctcgactaccgcagaaacgagtcagaccggtccaagtacgggcgctccaaggctgggaccgtcatgcaagccgttgagctggcgcgccgggccagaaaggacggatctggcattgtcagcatcgcgttggatccgggcattgcgaatacgggactgcagcgggatatgggccggttgatgtcgacaatggtcaaactgatcgcgaacaagcccgagatcggtgcg

SEQ ID NO: 19381 - DNA, 914 bp, Emericella nidulans
  unsure (1)..(914): unsure at all n locations
ctcctttcacaatatttttcaaagttggattatgcttgtatacctgaatctgctatacctaactctagactagggcatattgtagtagatgcactttcgttacccagcgatttcttcatctcgtctctcccatagtgatatcaacctcaccagcgacgaccagcccactggcagcagaggatcatggaagagcagtacgccgcccttgcatccaaaataacttctctcgctacatcgcaccagaagccccggtacctcgtcgcagtctggcgcgcgggctccggcaagacaacgctcgcaactgcagtggcggcacagataaaccgatctggactactctcacacaaaagcacaaatcaaagcgatgacaatagtcagacaaatgagatagcgaagagagctcttgtcctctccatggacggcttccacctcccacgctcagaactcgacaccctccccaacaaagagagaaccgaggcgtatcgntacgcggtgcgccgtggacatttgatattcctgcctttctggagtttatgaggactttacgattatgggcggactcgggctcgccatcgtcgtcgtcagaggagacagcaggagtattgtacgcgccaacattctcgcacagcacaaaggatccgataccgaactccattgtcatcgaccacacaacaagcatcgtaatcatagaagggaactaccttctcctcgataagccgcagtggcgcgatatcgcgccactcgtggactaccgagtgtttgtggatgtggatttagctgaggcgagggagagactagcgcagaggcatgttgaggcaggaattgagcagactctagaagagggttttctaagagtcgatcggaatgatgcaattaatggggctctggtaaaggggcacgtcgtggatggggtg

SEQ ID NO: 19382 - DNA, 914 bp, Emericella nidulans
tatgcggcttatagacaggaactgttagcatggctcaacaacctgctgcagttgaatatgaccaagattgagcagtgcggaaccgggtatgagcgagcccctagccttttaaaccatccttctcgaaaaccctggccgtcttagtgtatatggagatcctttgggtcgacaacttactgaccgtcaaacctgcagagctgcgctatgtcagattttcgactctattttcagtgagtgcccctttcagcgcagcgaacagcattgtgcggaaactgacacattgctcacacagtggacgtgcccatgtctcgagtaaaattcaatgttaacacggaatacgcctaccttcaaaatttcaagatcctgcagagtatgttacacaatcttcgataacgcatttccgccgttaacccgctcttctttaatagatgttttcgcacgtcaccagatcgacaagccaatccccgtcgagtctctctccaaatgccggatgcaggataacctggagttcctccagtggacgaagaagtactgggaccaacattatccgggaggagactatgatgcgctcgcccgccggaaggctccggggcccctcccggctctgcgggcacttcgcgtgcaggcgcaacctccgctagcagcgcccggcgtggaaccactcccaccgttggacgcgcgcgccctgctgccggaggagccagctctgccactgtcgctgcactgcaggcggaactcaactcaaccaaggaggcgatcagtggattggagaaggagcgcgacttttactttgccaagcttcgggacatcgagttgctgctccagaatgcgatcgaggcggacccggagctggagaaggatgacgattcactggtgaagcacattcagggcattctttactctacagaggtacg

SEQ ID NO: 19383 - DNA, 916 bp, Emericella nidulans
taagaatctcacgagttatattcgccctttggcaagctgttctaccacgacccccagatttctccccctcaccatccgccgcggcctcggtattccaccccaataccttcttgacgactacaccccgcgctacgccctcctcacgtctaccgacgctgccaaaaagcgcagcctagcctacacccatctctcgaattgcaatctctgcccgcgcaaatgtggcgtgaaccgcttcgaaacaactggccactgcctgatcggcgccgaaacggcaaaagtgaacgtgattgcgcctcatcgtggcgaagaaccttgcatccagggctttcacggcagcggcagcgtctttttctcggggtgtaatctgcggtgcgttttctgccagaaccacgatattgcgcataaacgtaacggcttcgatctcacccccgaggagttagcggaatggtacatgaaactacaggatatgggacacgtgcacaacattaacctcgtcacaccagagcatgtggtcccccaggttgtgttgtctattctagcggcgcgggatatgggcctgcggatcccgattgtgtataatacgtcttcgtttgatagcctcgagtctttggaactgttggatggactggttgatatctacttaccggatttcaaggtgtggaagtcggaaacgtcgaagaggctgctgaaggcggatgactatgcagagacggcaagagagagtatcaaggctatgcatgagcaggtgggggatttgtcatttacgagcgatgggattgcgaagaagggtgtgctgctgaggcaccttgtgatgcccgggaaggaagatgagggcagggagatcatgcggtggctggcagagaatgtgagtaaggatctgtatgtgcatattatggagcagtatcggcccgatgcg

SEQ ID NO: 19384 - DNA, 917 bp, Emericella nidulans
tcccgcgcctcctcaaattctcgaaatctctcaaaattctcctcatgatcgataatgagcagcatatcgacgtactggagaagtttagtggttccacagcaccatggccagtctttattaagattgatgtgggaaccgcagagctggaattctcaactcctcgtctgctctcccaaatctcgtgaagcgcgttgaggaatcctctgccgtagagctttatgggttctactgccatgcagggcattcctatgcttgtcggactgaggaaagcgcggttgccgtgctgaaggacgaggttgagggggtggttagtgcgtcgaagctcctgggaactgggcggaaagttgttgtgtcggttggctccaccccgacggcgcatgtggttagagagcttcgagaggttctgcctgaggggctggagctagagttacatgctggtatgtctgcacctgcccaattcttacgtcttgaaaccagtactgagagcagcaaaggaaactacccctgcaacgacctccaacaagtctcaaccggccttgtccctcacactgcgcaatccgtccgtgtcctagcagaagtttgcagcgtctatcccgagcgcaatgaagctctgatcaatgcaggcacaatcgcactcacaaaagagacgagcgagttccccggttatggccgagtcactgagcgcccgcagtgggctgttttgcgaacgagccaggaacacggcatcctaggactttcgccggcgccggctttgtcgttgttgggagtgaatgaggttaaggatgagaaggctgtggattccttcaaggtgggcgataaggtgcttctttattgccagcatgcatgcattacagcagcggcgtatccaacttattatgttgttgatgagcaagatgttgttcgggaggcttgggtgc

SEQ ID NO: 19385 - DNA, 917 bp, Emericella nidulans
atggcaaagcgccttgagggcaagacaatcgtcatcactggcgcctcgtcaggcattggccgaagcacagccagggaattcgcgcggacagctccaaaggaccttaagcttattgtgacagcaaggcgcatcgacgccctcgaggagctggcaaaggagattaaagaggaagtcggcgagggtgtcaagaccctgcccgtgaagctcgatgtcagtaacccggaggaggtcaagaactttgtcccatctctccctgccgagttccaggatattgacatccttgtcaacaatgcgtaagtctgctacgtagcctgctttgtaaaacaggtctctaataaacgtagtggtctcgtcaaaggcgtcgctcaagcccccaacatcgaccctgaagatatcaacatcatgttcgcaacaaacgtcactggattgatcaacctcacccaagctgtcctgcctattttcaagaagcgtaggattggcggccgtggagacatcatcaatattggaagcatcgctggtcgtgagccctaccccggcggtagatctactgctctaccaaggctgcggtcaagtcattcaccgaagccctgaggaaagagctcatctccacgcgcatccgcgtcattgagatcgaccccggtcaagtcgagactgtaagtgctcgatgccatcattgaggatagtgcttacaaagctggtaggagttctctattgttcggttctacggagacaagagcaaggccaatgccgtctatgcgtaagtcattcgacgtggacgttacgcagtgaatgctaatgagcttgtagtaactgcgagccacttacaccggacgatatcgccgaggtcatcgtcttcgccgctggtcggagggagaacgttgtcattgctgatactttgatcttccccagccaccagg

SEQ ID NO: 19386 - DNA, 918 bp, Emericella nidulans
  unsure (1)..(918): unsure at all n locations
tcgaatcgcacgtcccgttgatcgagaaggaggttttggattacatcaagacatctcctcggtttaagggagactcgggtgtccttgatgctcccgctgccatggctgaacttacaatctacactgctggtagcgcactacaagggaaggaggttcgcaagaagctcaccgcggaatttgccgacctcttccatgatttggagatgggctttactccaatcaacttcatcctcccatgggcaccgcttccacaaaaccgcaaacgtgatatcgctcatgctcgcatgcgagagacctacatggagataatcaaccaacggcgcaagaaccccgatgcacaagaccacgatatgatctggaacctgatgcacagcacatacaagaatggaaaccccgtgccagacaaggaaattgcccatatcatgattaccctgttgatggctggccagcactcgtcttcgtcgattagcgcgtggatcctgctgcgactagcctcggagcctcaaatccttgaggagctttaccaagagcagcttgccaatcttaagcgtgacccccgcaccggcgcctttgaacctttgcaatataaagatcttgatcttctcccgctgcatcagaatgtcatcaagtagacactccgagtccatttgtccatccactccctcctccgcaaggtgaagaacccgattccggtccccgnnccctccnccattatcccaaccagtcataccctcttggcttctcccggtgcaacggcgctcagtgacgaatactttcccaacgcgaacatgtgggatccgcatcgttgggagaatcaacggcctgacaaggaggacgaagagggagagctaattgattatggctatggtgctgtgtccaagcgtatgagtagcccgtatttacccttcggcggcggtc

SEQ ID NO: 19387 - DNA, 918 bp, Emericella nidulans
tgcgtggatgcgagagctcaaggacgacaccttgctctcgtcgttatccatcccgggaacgcacaactcccccacatgccatatcgcaccaccctccgtccgctgccaggccgtcagcccgcgcgagcagctcaagaacggcgtgcgctttttcgacatccgcgtgcagcccaaattccccaacgacaaggccaaggacgagcttgccttagtgcatagcacatttcccatatcccttacgggcgacaagtactttcgcgacttggagcgtgaagtcattgacttcctggaacacaacccctccgaaacgctcatcatctcactgaaacgcgaagggcctggaacccacacggacgaacagctcagccgcatcatccgcgaccattacgcacgcccagggagcaggtggtacaccgaccccaagattccaactcttggcgaagcccgcggcaaaattgtcctcgttcgccgattcaacatcctcgaggaactcaaggaaattcacggcgggcgaggctggggaattaacgcgacaggctgggcggacaactgtgccaatgcgacgtgtcccagcggccaaatcattatccaagatttttacgaagtcatggaaacgcagaacatcaacaagaagatccagtatgtgaccgaacactgcaagcgcgccagcgagacatgttatccctttgggatcctcccaggacctaaggcaacaagggcccatccattctacattaactttttaagcgcgagcaacttcttcaagctcgggacgtggccggaaaagatcgccgaaaaggtgaacccggcgacggttgattacctttgcaggaagcatggggagaaagagggcgcggattggtcgactggtattctagttacggactgggttggtctggatggtgattgggaccttgc

SEQ ID NO: 19388 - DNA, 918 bp, Emericella nidulans
gacaagttcgatatgcgcttgatgattagaaagacgacgaagaagcccgtctcgagggactgccccaattgcgcctccaagaccgaggaactgacaaactggaacttctgacggaacctctccaccttaggagcggtgaccacgacttccctttcagttatctgttcccaggtaacctgccggcgtcgtgtaatggttccctgggacagattgaatatttccttcaagcacacggacacaatgtgaacggtgaagagtacaattttagaatgccgctacacatgcgccgcgccattctcccagggaacgacaaatcctcaattcgtatctttccacccaccaatctaactggccgcatcgtcctcccatctgttgtccacccaattgggacttttcccgttcagatgaccttgagcggtgtcttggataaaggcgaggagacccaaacgcgttggcgctacgcaagatgatgtggcggattgaagagcaccagaagattgtctcaaccgcttgccccaagcacgcgcacaagattggtggcgaaggaaagggcgttctgcaccaggagacgcggatcattggacacaacgaggagaaagatggctggaagacagactttgataccgctggaggcgagataagcatggaatttgaagccaacattaacccaaccgccaacccggtgtgtgatcttgaggcaccgggtggactggagacgaagcacaatttggtcattgaactgattgttgcggaggaattctgtccaaaccgtaacaccagactcatcactccaacaggagctgcccgcgtccttcgcatgcagtttaacctgcacgttacggagagaagcgggctcggtatcagctgggatgaggagatgccgccagtatacgaagacgttcccgctagccctcccgg

SEQ ID NO: 19389 - DNA, 919 bp, Emericella nidulans
gccgagcgctcgcatagtcggctgcctgggatccgcaaggttcctctgcgctcaatagcggttatcttgcttgttgcgtttgttaatgtggtcgtatgggttgctgtagcgattgtcctggtatgtttctcgcttttgaatggtgttgggatatgacgactaaccaggtttaaagaaataccatccgtgagtctcccatcttcgtggcatgggcgtctagttgacgagaggttgagatcgttggtctcgaacgctgttctatcatatacccttggtctgcgacacgcctttgacgcagatcacatctcggtagacctccgcagtccttaacgtcttcagaagactcggctaatgtatccaggccattgacctaatgacccgccgtctgctcgcaacaggccagaggccagtaacggtaggtacatttttctcgctcggccactccactatcgtgatcatcacctcgatcgtggtggcagccaccgcggcggcggtatcctcgcgttttgacaagttcagcacaatcggcggtattatcgggacgtctgtcagcgcggcgttcctgattctgcttgggtttatgaatgcgtatattctatataagctgtacaagcagatgcagaaggtgcctgaacctgccagagggacaggaggacgaggcatggaagattgagggcgggggtgtgctgtttcgagtcttgaagcgggccttcaagttgattgatcggtaagactatatcctgcagcgcttgcacggctggctgctgatgtatggcagtccatggaaaatagtacccgctgggtatattgctcggactcggctttgatacgtcatctgagattgcacttctggggatatcgtctatcgaggctgcaaaggggacctccttttgggttattctcatctttcccatactgt

SEQ ID NO: 19390 - DNA, 920 bp, Emericella nidulans
gcgcttgtcgaagggcaagaagggtatcaagaagaggactgttgatcccttcaccaggaaggatgaatactctgtgaaggtaggcgcccatagggtaaccagatctggtaccttgctgactagaaataggctccctctaccttcgcgaaccgagagtgagttgaataccgactatcgtcttggacaacttcgttttttgagaggtggactgactgaaatgtgtgaagcgtcgggaaaaccctggttaaccgcaccagtggtttgaagaacgccaatgattcattgaagggtcgtatctttgaagtctctctcgcagatctacagggcgatgaggaccatgccttccgcaaggtcaagctccgcgtcgacgagatccaaggaaagaactgtctcaccaacttccacggtctggacttcaccaccgacaagctgcgttctcttgtacgcaagtggcagtcgctgatcgaggccaacgtgaccgtgaagactaccgatgattatctcctacgcctttttgccatcgctttcacgaagagacgccccaaccagatcaagaagactacatacgctcgttcttcccagattcgtgccatcaggaagaagatgaccgagatcatgcagcgggaggcctctagctgctctcttgcccagctgacgtcaaagctgatcccggaggttatcggccgtgagattgaaaaggccacgcaggggatctaccccctccagcatgtgggtatttgttggaagatttgcggtattgtcactaatcaatgtatcaggtccacatccgcaaggtcaagctccttaaatctccgaagtttgatctcggtgccctgctcaacctgcacggcgagtcaacgaccgacgacaagggccagaaggtggagagggagttcaaagagcaggttttggagagtgtt

SEQ ID NO: 19391 - DNA, 921 bp, Emericella nidulans
tcgcgagacgtcgctactggggactgtgaaaatgtgggagaagtggaatgggaaggcggatgaccggatacgggtttggttcggggcgaggacgccaggggggtatgtctctctcttccttttcttttttgtttctccttctcgctctcatacgctgctcttggatgcttagacgggctaatgggacggtagggtgtctgacgaactgtaccgcgaaatgacggctatctcgcgagagaagaatatacccatcacgatgcactgcgcagaggtcaaagccgatagggcattttttggctctgtgggacatacgcccatgacgtactgctcttccgtcgggctgctatctccgtccacagtcctcgtgcacatggtgcacctggacgacagggatatatccctgctgtcagaatcgggaacgcacgtcgcgcactgcccgacttccaacgccaaacttgcctcgggaacctgccgcgtgccagacctgcaaaccgctggagtgaatatcggtcttgggacagacggcgccccctgcaacaacacctgcgacctacttcaggagatgaagctggctgcaatcatccacaagggggcatcttatgacccaacagttgtttcggccgagtcggtgctggaaatggcgacaatcaacggagcaaaggcgttaggcctcgacagcgaaatcgggagcttggaggttgggaagaaggctgactttgtggcaattgacaccaggggggtgagcatgcagccttggttcaatccggtcagtgcggtggtctacacggccaccgggagggatgtggatactgtggtcgtagacggaagggtagtggttcggaatggggagttgctgaccatggacgaggggcagattgtcaaagaagcagagaggaggagtcgagaggttgtggagcgggc

SEQ ID NO: 19392 - DNA, 922 bp, Emericella nidulans
ggaccgctccttgggcctgtcgtcggacctattgctgaggctttatcgctgagtatacaacatggcgctgggttttctgggcaagctctgccgcagccgttggcattcagttggccgggtttgtctggttgcgcgagtgtcacccggcaaccctactacgaatgcgtcgggattgtctcgtcaaagaaactggcaacgagaattttcacgtcgaagagagggctgaggcactcactcataagctccttcacgccttcgagcgtccggttctgctatccataacccagcccatcgtcacctgcattgccgtctatatggcctacattttcggagtaacgtacctcatgctcgcaacattcccggatatctggactgaggtctacgacgaaacccgcagtatcagcagcgtcaattatgtatccatcgcactcggctccttcaccggcctcttcctcaacctcaagtttatcgaccgcatctacagagtcctcaaagcgcgcaacaacaatatcggcaagcccgagttccgcatgccggctctagcaattggctccatcatcagtaccatcggcctcttctggtacggctggagcatagggaccaggtattggattatgcctgatatcggcgctgcgatcttcgctgcggggactatctcttgcctgtaggggatgcagacgtacattgtcgatagctatcagacctacgctgcgagcgcaatggcagcatgtgcaattctgcgcagtctggcaggttttgcgttcccgctctttgcgccgtatatgtaccagtctttgggatatcagtggggaactagtgtgttggctttcgttaccataggtattgtgtggacggcgccgtttggattctggtattttgggcgatgctaaggactgtttctagatatgcttctggctaggca

SEQ ID NO: 19393 - DNA, 922 bp, Emericella nidulans
tgactttggccgcacgtggtccgccaactacgccgcttcttcggccacaggaccaggtcctgtggccatctccgcagacggcgacaccatcctcctgatgtcgaacacccagggcgctctccgctcacagtatcagtccacctttgccgctgtgacaagtctcccctcgggtgcggtcatcgcgtcggacaaggccaacaataccgtcttctacggcggcagttcgggtagtttctacgtctccacaaacacgggaacctccttcactaagaccgccacgctggggtctagctccacggtcaacgccatccgcgctcatccatcgcttgcgggtgatgtctgggcctccaccgataccggactgtatcactcaacagactatggccgcacctttaccaagactggaagctcctgtacagctggctggggctttgggctcggaaagccctcttcaacatccgcatatccagtaatatatggcttcttcactgtagacggcgtaactgcgctctctaagacggaggatgaaggaaccacttgggctatgatttccgattcggagcatggcttcggtgctgcgtcagcgaatgtggtgaatggggacatggggaactatggacgggtgtttgtagggacaaatggaaggggtatattctatggggagccgaatggaagttcacctccaagttcgtcttcaacgtcaacaactgcaacaacgtcgagtacatctacgacattgacgacgacttctactccaactaccacagtgacaacgacaaccactagcactacagccacagctactgctaccgcctcgccctacggccaatgcggcggcagcgaatacacaggaccgactgcgtgtccctctggatggacatgcacgttcttcaaccacttttactcgcaatgtaagcttgaa

SEQ ID NO: 19394 - DNA, 922 bp, Emericella nidulans
agctttcaggcgcggtcacgtcgcaactcaaatcaaccttatttgacagctctgaaaaaatgcaggaacgacattctccgcaagcatggcatcatcccggaaaagccgcaagacccagagccgttgatccaagaagccctcgtcgaagccgagcgcaaggcctacgagaaccgtttggaggataaagacttggatgaactagacgaattagaggacgttgaggatgaggcctttctaaaccagtatcggtatgtctgtccccgtccttgccctagcatcacttctctctgtccccgtatttggcgcggagaaagctaagaggaatcacgcacacagtcaaaaacgcctcgcggaattaagtaatataacgcagtcctccgtccacaatcaggtctacggtttgcagaagccagacttcacacgcgaagtcaccgaggcgtcaaagtcgtgcttcgtgtgtgtgaacctcacctcttcgtctagcaacaacgttgagtcgcggcggctctctgagatatggagacagctcgcggccaaatatggggatatcaagttttgtgaaatgcgtggaaatatgtgcattgaagggtatccggaccggaatacaccgacgattttggtgtataaggatggagagattgtgaagcaatatgtgacgcttatggcgcttaagggggcggcgaccagagttgagggtatgttttcgatatcttctactactctaatccttttactgggtgatgctaattgagtttgtagacctggagaatatgttgattgaagttggtgcgctcaaggagagtgacatccggctgaagaagaaggctgacgatgactcggaggatgagcggccgtcgaacttcaaaacgaagtctagtattaggaagggcgttactgtggaggatgatgatgatgactggga

SEQ ID NO: 19395 - DNA, 923 bp, Emericella nidulans
tcgttcggcgcaagatggtgctcttgtcagtgtaacatacgacgaaaattctggccatcttatctgactgggaaacagaggagatggcgcttgcggtaaaacctcggccctgaacgtgttcacaagagggtaagtcgcctcatattctcgagccaatcgtgcgatcgctgataaacgtcatttagattctttccaacagtctagtgaggctccttcatccaccccgaattctagtattgacctgcgatgcgacatagtgaaccgactgtctttggtgtgtagttctcccgcataaagttgacctggtattgacttgacccttttagagaactacgtccatggtatttgcgccctcgctccttgctcccgggctgtacttacattcgcaagatatcttcgtcgataacgtgcatatggaactgtcgttatgggacacggctggccaagaagaatttgatcgattacgtgcactctcatatgaggatacgcatgtcataatgctgtgctttagtgtaaggtcgttgcccagcctccggcctagtggctaatacatggaaaacaggtcgacagccctgactcgttcgaaaacgtggccagtaaatggatcgaagagatctcggagaatgtgcctggagtgaaactggtcctaacagcgcttaagtgcgacttgcggaaggacgaatatatgaatgacaacccgaatgttatcacatacgagcaaggactggcaaaggcgaaggaaattggggctgtgaagtacctcggtaaggcgtcgatgctgttctggagtgagcgaccggagttggtctaatgctttcacagagtgctctgcggtccaaaaccgcggcattagggaagccttctacgaagccgccaaagttgcccttgaggtgaaggctcaaaacaccggctcgtcgcaaagc

SEQ ID NO: 19396 - DNA, 926 bp, Emericella nidulans
tggtataatctagcccgtaaaagtcagttgtacggtcccaagtttgaactccccgcaccgttcacctactcgcaaaccgtctacgattggacatcgtcggccgaggttccagatcgcattcgtgacgcctccataataattctatccgccgcccgagttgatgctgccgcactgtctcgcgatgtgtcaccgcatctcaagcttattgtcatggtcgcttccggtttcgactgcatcgaccttgaggcctgcagtaaaaggggaatcgttgtctgcaattgcccaaactccaatattgaagctgtatccgagcatgcgatagggatgtactttgctgcgcggcgaagactcctagatatgcatatgtcaacaagggcagggaagtggaaggaaaggggacttctgatgtttgactatctggataaagacgggattccgcctctgacttgccaggatgaagtcgccggaatcattggaaacggcggcgtcggtaaggccacaataatttgtgtcttgagcaagaatttaacaagagcatcagggaagagaatcgccacacttgcgcgtaatctaggaatgaaggtgctggtttctggccgcaaggcgtctgcaacctcagatcccaccagggtcccgttcgagacagtcatcaagcagagtacagtgcttttcattgcggtcccgcttatgaattctactcggaacttcatctcaaccccagagttcgagaacatgtcttcccatgccatcgtagtcaacgtatctcgaggtggtaccgttgatgaagaagccctagttcacgcactgcgcgagcgcaaaatctctggcgcagcaacagatgtatttaacggcgagcctgcaggccctgatacttcgcccttgttatcagaggacgctaaagacctcaacatcattgccactccgca

SEQ ID NO: 19397 - DNA, 927 bp, Emericella nidulans
tggtgttgaagaggccgtttttgccttctatcgctatgatcccaacatggcggccgccgtgcttttcacactccttttcatcggcacaactgggtatcatatttttcagatgttcaagtctcgcacgtggtttttcgttccctttgtcattgggggcatatgtttgtgcactttcgacgtcctttggccggaaacaatgctaatctgctaagtcgaaattattggatatatcggacgagccatgtccagcaaacagactccccactggactcttggaccatatatcgtacagacactctttcttttgttggctccagccctcttagcggcatcggtatacatgttccttggtcgcattatcctgatattacaagcggaatcacatgccttactgaggaggaagtggttgacgaaaatttttgttacgggcgatgtgctttcattcctactgcaaggagccggtaagaatcacatatcacgagctcaaatcatgtgtcagcatgttaatttgatctaggtggtggcattcagagcagtggaaatctagaaaacatgaagaccggcgagcacatcatagtcgtcggcctctttgttcaaatctttttcttcgggttcttcatcatcacagcaagccactttcactggaagatcaagaaatacccaatcccacgttcctgtactccggacatcccctggagcaaacatctgcatgttctatatttggcgagtttcctgatcatggttcgctccatattccgactggctgaataccttcaaggaaacaacggatacctcttgcatcatgagatcttcttgtatgtctttgatgctctactaatgtttatcacgatggtcgtctttaatattgtgcatcctcaggaggtcgggcggcttctgagacgtccctctgattatgaattgactcgc

SEQ ID NO: 19398 - DNA, 927 bp, Emericella nidulans
tcaccacaaccgtggatacgcagtatggcgtgagtttacatcgcttgtctggctcaacacaaagacaaatttctggcccggctatgcctactatattgcataaagatccaccaacctcaatttcttactcccacccatatctcttgacgtcgcatgcggataatacactaaccgtatttcttgttgtgtcgacttcaagcaatttatttgtcagggggggacagaggctatggggccacacctcgtctgtttcggccgtgcaaataagcgaccgaggaaaagccgtttccgtgagtgcgcacggagatgaagtccggatatgggagcttgaatccttggtgtcatcctttggcagtcaaagagtcttccgcggcgacaatagcattaaaatcaaacccgaaaatcaacagcgcccacgggaccccaagggcttagggttactccatggagtgcctcaccgtgatcaaggccgggcagactcgccgcctgcaaaaatgccgcataaaaagattcaagcgcgagattgcgttggatttgatgatgaacgactgctcctgcttcgagagagagaacatgggtctcaacttctcgaactctacgacttcagatgacccctttcccacaacacgtgctaagagaaggctgggccttgttgaacttttacattttataaaattgtctagataccactccatagtaacgccagtctgtctttaccaatcatttggattattttatcgaacaatgactgaaccagaaggtcgacggatcttggatggcctggggaccttgggacggtcggttagaaaaccctcacgcgttcgcatcgaacgcccactaataaatctgtttctgtttctgactgaagcctcccttcaacctcgctgatatttgtggaatctggctctttggttcttggttacggga

SEQ ID NO: 19399 - DNA, 927 bp, Emericella nidulans
tggggttcccaagggtgtcatgctcagccatcgcaacattgtcgccaacagccttcagttggctgcagcgaagccggtaacctgacgtggaatggcggggcagatggtaagggtgaccgcttacttgctttccttccattcttccacatatacggcttgacatgtcttgtccaccaaacgatctacaagggctatgagctttttgtcatggccaagtttgacctcgaaaaatggtgccagcatgttcagaactaccgtatcacattcagctacgtagttcctccggttgttctccttctgggcaaacaccctatagtcgaaaagtacgatctttccagtctacgaatgatgaactccggtgccgcgccgcttactcaggagcttgttgaagctgtctacaaccgcctccacatcggtatcaaacagggttacggtcttagtgagaccagccctactactcacactcaaccatggggtgaatggcgcgagagtgtcggctcggtcggtaaactcctccccaacatggaggccaagtatatgacgatgcccgaggacggttcagaacccaccgaggtgcctacaggtgaggttggggagctctatctccgtggaccgaatgtcttccaaggctatcacaacaacccagccgcaacagcagactcaatctctccagatgggtggtttcgcaccggcgacgtcggctaccaggactccaagggcaacttctatatcacagaccgtgtcaaagaactcatcaaatacaagggcttccaagtcgctccagccgagctcgagggtatcctggtcgataatcctgcagtcgacgatgttgccgttgtcggtgtcgagagcgctgaacatgggactgaggtccctgttgcatttgtcgtaaggagcgcgaagagcaagagctcgggtgtttcggcg

SEQ ID NO: 19400 - DNA, 928 bp, Emericella nidulans
gatgctggcctcctgcgtgaactatgggacggagaaccggaatgattcgggctcataccgtatcccgattgccctccaactcctctgggcgatcattcttgggataggtctgttcgtccttccagagtctccccgttattatgttcggaaaaacaatctggctgaagcagccaaaaccctcgctcgcgtgcgaggccagcccccggagtcagagtatatcacgcaagagctggcagaaatcgtggccaacaatgaatacgagatgcaggttattccccagggcggctattttgctacgtggttgaactgcttccgtggaggtctccggtctcctaacagcaaccttcgtcgtgttatccttgggacctctcttcagatgatgcaacagtgagtcgagacccaacctccttgagttctatcagtcatcagattgttggtgctctaacgcaatgcagatggactggagtgaacttcgtcttctattttggtactacgtttttccagaacgtatgctaccctgatacctcctgtgcggtgatggtggctaattttgattcagctcggtaccattgacgaccctttcctcatcagcatgatcaccacgattgtcaatgtcttttctactccgatctccttttacacgatggagaagctcggtcgtcgccctctactgctttggggcgctctgggcatggtcgtctgccaatttattgtggcgatcgctggaaccgtggatggagacaacagtaaaaccgtctcggcgcaaatctcgtttatctgcatttatatctgtaagtggtatacgcactatgaatcttgcgtctggctgatcatcattgcagttttctttgcttccacttggggccctggcgcttgggtcgttattggcgagattttcccgctgcccattcgttctcgtggcgttgcg

SEQ ID NO: 19401 - DNA, 930 bp, Emericella nidulans
ccgcgcaaccacaaccatcatcgcaatcgccttcactacgaaatcttccaatcgttccatatcctccgcaagatcaaaatgcattcaaattccggaacctcctccacgttctttccgtaacgccaacaaagtacgaaaaccccggtcttcttgacgaggccctatccttgatcccactcgacaagctgtactcggaagcggatgaggagtgtcagattattcaggcccaggcacggagccttaagagaaagcccgaatggggttaccaggactgtgtcatccgggcattgttaaggttcgtagccgctgtttcccatatttctgttcgacatcttggtataactaaccacggctatcatttagatggtttaaacggtcttttttccactgggtcaacaatcccccttgctcgcgatgccttacaccgacgattgcacatggcagagccccgccgacgccagatgaggccgccaggggtgccaaccgagtcgaactgtatagatgtgcagatccgtcctgtggcgcctacgaacgtttccctcgctactcggacgtatggcagttactgcagactagacggggtcgagtaggtgaatgggcaaattgcttcagcatgttctgccgtgcgcttggtggccgtgtacgctgggtgtggaactccgaagattacgtctggactgaagtctactctgaacatcagaaacgatggattcatgtagacgcatgcgaagagacatgggaccagcctcgtctctatgccgaaggtcggtatctcctcccagacatttagtatctccggactaatttctctttaggatggggtcgcaaaatatcctattgtattgccttctccattgatggtgcaacagatgtcacgcgacgatatgtccgaagccccgctaaacacggagcaccccggtcgcgtgttcc

SEQ ID NO: 19402 - DNA, 930 bp, Emericella nidulans
cgcaaccgcaaagcctccacaaatcgccccgcatcgctcccacgacccttccaacaacctcaaacggtcagacccgttccaattcggctcccgcttcctcgaggaaggcgatgatgtatatgagttcaacgcatgggaccatgttgaaccggacgccgagttcctggcatttgcagaggctcaatatgcgaaacagcgcgaagcgcaagcctcagatttcgacaagaaacgcttcaacgccgacccggtgaaatggtggaatctgttctacaagaacaatacggcgaacttcttcaaggaccgtaaatggctgcagcaggagttcccggttcttgaggaagttgcgaggaaaggggccggcaagcaggttgtgctggaggttggcgctggcgcgggaaatactgcgtttccattgatccgaaacaatgagaatgaggagctcatggttcatgcgtgtgacttctcgaagacggcagtccaggtcatgcgcgatagtgagcactatgacccaaagcacatcacggctgatgtgtgggacgtcagtgccgagccaaccgaggaaagtaatgggctgccgcctggtctcacggaggggtctgttgatgttgttattctgattttcatcttttcggctcttgcgcctgagcagtgggagagggctatccggaatgtataccgggtgctgaagcccggcggccaagtcttgttccgtgactatgggaggggagatctagcacaggtccggttcaagaagaaccgctatctggccgagaacttttatgtccgtggcgatggtactcgagtctactttttcgacaaggacgagttggagcagacgtggagtggatggactccggagaagggtctcccggagttgaacgtgccttctgatgccgaaggcgaggctcagacttccgtgccagctgctgc

SEQ ID NO: 19403 - DNA, 930 bp, Emericella nidulans
ccgatgaggtctaccgccagctcggtaaatcgtatcagatcaagcccgagcgagttatccagggcaccttcctcaccagtctgaatggactcgggttcagcatctcactgctcaagctggcagacaccgggctgggccccggcaagtcgttccttgagctcctcgacgctcccgctgaggcggtcggctggtccgcgcctatcaagcctgcgacgtgggaataccgcaatgcccccggaattgaagtcaagagagccaagccagccgagcagcctcccagcaacgtcaagcgtacgtcccgtgcctccctttattgacacgtgctaacagtacacagtggatatcgcaaaggttcgcaaagtcctcggggccgctcttaagcgcatgatcgatgcggagccccagatcacccgctacgacaccatcgtcggcgacggcgactgcggcgtcgggctcaagcgcggcgcccaggctgttctcgacctcctcaacgacgcctctgcaaacctcaacgacgatatcgtccacacagttaatcgcatcgtcaccgtcgttgaaaacactatggacggcacctctggcgccatctacgccatcttccttaatgcccttgtccacggcctccgtgagcaagacaagggtaccgaaacgcctgctgataccgacgtctggggcactgcgttgaaatactctatctccgcgcttgggaagtacacccctgcccaggtcggtgaccgtaccatgattgacgccctcgtaccgtttgcgcaaactctagcggacaagcgggatgtgcatgctgctgccaaggccgcggaggagggcaccgaggccacaaagcacatgaaggcgtcgctggggcgggcggtgtatgttggaggcgagcaggaatgggttggcaaggtgccggatccaggcgcctacgggctc

SEQ ID NO: 19404 - DNA, 932 bp, Emericella nidulans
gctatatctagcctttgtcgaactcttcaggcggtctatcttcgggagcggacagaagtttgtgataatacttcaatcgaataccgagggtggagtcatggagtggaaaggtgcaagagaatgggctattgagcgaaacagtatctcgaataagaaagaatatgctaaacgatgggggtataaactggaggttgttaacatgctagcaaagaagcgctactctcatgaatggcgtgaggggtgggagaaagtcgatatcctacgtgagaccatgaagaaatacccaaccgcagaatggtacgcgacccaggaagcctacagggtggtgacatctaacagtatataggttctggtggctcgacctcaacacttatatcatggaaaactcgtactcacttgaggatcacctatttgatcgccttgatgaggttgtttatcgcgacattaacgagtacaatcccctaaacatcacacatccgccaacccagccataccttgatgaagtatctcgctcggccattggtgacaatgacccaggctcaatccatcttctgctctctcaagactgtggcggcttcaatcttggctccttctttgttcaccgatctctattctcagagcggctactagacacatggtgggaccctgtgatgtacgagcagcggcatatgcagtgggaacacaaggagcaagacgccctcgagtacctgtatataaaccagccgtggatacgcagcagtgtcgccttcgctccacagcggtacttcaattcgtttcctcctggggcttgcggagactcccttgacccgatggttcactatacaccagatgcgcgagattttgttgttaacatggctggctgtgattttggtcgcgactgctgggatgagatgtaccagtaccgggaatacagcaagtggctgaaccggcca

SEQ ID NO: 19405 - DNA, 932 bp, Emericella nidulans
acctcaatccgcgccctcctgcaagcctctcccacatcacgcacggtaacgctggtgcagcgcccggtaccgtccccggatccctcgaaggatgaacacctgatccgcgtgcacgccgcatgcccctgcgctggcgaactcaactggcccacaatggtcgccattgacaaagagattatcacctgcaatgacgtcgcgggagttgtcgtttctgccccacccagctcccccttccagccaggcaccgaagtctacgcgcgcacaagctactggcgtcctggtgatgcgcgagactacacgatcgcaacgacggaggagcttgcgcatcgggcgaaaaatctctcgtgggtggagagtgcggcggtgccgtttcggctgagacggcgtggcaggcgttctttacgcattcgggaatcgggaaattcgggagtgaggagtggaaagggaagaggatccttgttaccgctgcggcggggggtgtcggggtctggctggtgcagatcggggcgttactgggcgcgagagttgttgggacttgtggaccgaggaacagcgagtttgtgaggggcttgggggcgactgaaattctggactatcacaggactgatttcaaggcctggggactgcaaccggagaataaagtcgatttggtagttgactgcgtgggtgggaaggcgcttgaagatgcctggtggacgctaaaggacaacggcacgattattgggattgtgcagccgccggagcagaaacggccagaggatttagaagtaactggtgtgactgacaagttcttcattatgtcgcctagtggaaaggacttggagcaggtcacgaaatttgtggaggagggcaaatgttggcctgtcgtggacagtgtttggtctctagagcagtttgagcctgggtatgaacgattggagagcgggcatgcg

SEQ ID NO: 19406 - DNA, 935 bp, Emericella nidulans
tccagccaccttagaccgcaaactcgagagagtcacacgagatatggtaacttatagtcgagagtgcgtcaaaaagtgtctttacaagtcaacgtctactgacaagatcttaggctaggtggcagtcgagaagaaatccgcgcggaaggaccacggccatcaaggctcatcagcaggctctgaaacaggtggaagaatttgggatgcttcttgaagttctgccacgccttactttcatatctagcgatcatcactaacggatattgcataggttctcaaagctagtctcaatcatcgtaaggagcgctggcgtgcttttagatcacatatctcctctcgtgccaaagcacaattcacttatcttttgagtgaaagaagcttccgcgggcgactcttggccgatcatgagaacaaaactttagacttgcaggtatatccatacgacaagctctgaatcaacatgtgcttacttcgcaggttgaaccggacattactaaggatagcagcgaaggacgtggcgcgagaaccctttccggaggggagaaatcattctcgcaagtctgccttttactggcgctctgggaagccatgggatcaccaattcgctgtttagatgaattgtaagcagctatcgctaaaagcctgtcagcaattcctttactaagacttgctgcagtgatgtttacatggaccatataaacagaaagatggcgatcgatatgctcgtatgtgatcctccgtacaggcaaggaaaggagattgctaagtaaacctatacagatgtatgccgccagacggtctgtcggtcgccaattcatactcatcacgcctggctcaagagctgagattagtctagcgcctgatgtcatggtgaaagagtacgggttaacagattttattcaggataaagctgactggcgtataggttagcagaa

SEQ ID NO: 19407 - DNA, 936 bp, Emericella nidulans
cctccgccccggagtttacgctccgacaatgaccttcttcgacccctctactgaagacctcgacgtgcccaccattcgaaaacacgccgtacgcctcgcgaaggccggactcgttggccttgtcgccatgggctcaaacggcgaagctgttcatctcacactcgaggaaaagcagaccgtcatccgcgagaccaggtccgccctcgatgaggccaacttcacgaacgtccccgttatcgcaggtgcatctgagaacagcatccgaggcacgattcaattgacgaaagaccttgccgctgctggcgcagagtacgcgcttattgtcccgccaagctactaccgctacgcgacggggaacgacgagacgctgtatgagtacttcacatccgttgcggatgggtcgcccattcctcttattctgtataactaccccggagccgtcgcgggaattgatatggactcagaccttatcattcgcatctcccagcacccgaacattgtagggacgaagttcacctgtgcgaacacaggaaagttgacccgtgttgcgagggcgttgcatgctatcaaacctgagtcaccgcttgcgccgaccaagtccccggtgcctgtgaccaagagggctgcgaaccacccctatgtggcatttggaggtattgccgacttcacgttgcagacgttggcgtctggtggatcagccatcctggccggtggtgccaatgttatccctaagttgtgcgtcaaggtgtttacactctggagcgagggaaagtataacaaaggcgatggaggtgcagagtctccttagccaggcggactgggtgctgaccaaggctgccattccgggtacgaagagtgcgattcagtcttactatggatacggcgggtatcctcgtcgaccactggcacggcttagtgatgcgcaggtcgaggctg

SEQ ID NO: 19408 - DNA, 937 bp, Emericella nidulans
cccacccctcgaccctgagctagccgtcgctcaaaaaagcttccccagaaccccgctacgcgaaagcctttctgcacgccgcaaggccgcaattctaacgtgggagtccataagcggcggcagagaggctttaatctcgcactcagaagtcgacatcccaggccccgcaggaacattacgcacttcagtcttgcgctcgacgaaagccgaacatcaagctcagccagcatcgaagactgtcggaattgtccattttcacggcggcggccacgtcacggccgatcggttcgttgggctcaacacgctcttcgacatcattgagaaactcggtgcggttgtggtatctgctgagtaccggctcgcccccgagcacccgcagccggcgcaggtcgaggattcttacgcggcattacgctgggcccactcccacgcctcggagcttggattcaaccccgataaactggtaacatgcggcggttccgcaggtggaaacctcacagcgggcgtctcgttacttgcacgagaccgtgccgggccgaagcttctcggccagatgcttttctatccttgggttgacgacgccacgacttctcattccatagaacagttcggtgatgttgcgccctggacaaaagacgataacgcgtatggtctcgacctcgcgcttggtaaaaaccgcgaatatgctagcatttattcactgcctgcgcgtgcagccgaaacacaacaaggtctgtcgggtcttccgccgacgtacctagatgtcggcgaggcggatgtctttcgggaccaggatatggagtttgcgggaaacctttggaaggcaggcgttcagacagagctgcatgtttggccaggggcgtggcatgcgtttgatacttttgcgccggaggcgagcgttagtaagagggcattcaaggcgagactggaatggctg

SEQ ID NO: 19409 - DNA, 937 bp, Emericella nidulans
ggccctcgtttccagggaggtgaatgtccctcccaagctcgaagagatcaccctcgacgatatccgcgccgacgaggtgctcgttgagatccacgctaccgggatctgccacacagacttctcctgcatgaacgggacacttcccgctgcattccccagcgtgctcggccacgaaggtactgccttcgctctcccatattcaccaaagatcaaggctaacccaccatcccaggcgccggggtggtcctcgaagtcggtgagaaggtcaagcacgtcaggaagaacgacaaagtcctcctcagcttcgaccattgcggagcctgctcccaatgcgacaaaggccatcccgcctactgttccgaatgggtcactcgcaacttcggccagaagcgatcggacggaagcctgacgctagcggatgctaacggcgccaaagtgcatggcaactttttcgggcagagctcctttgcgcgacacacgatcgtcagcagcgcttcggtcgtcaaggtcccctctgatacccgcctcgacctcttctccccgctcggatgcggaattcagactggcctggcgccatcctgaacacgttggacgtgtagccgggcaaatctgttgccgtcttcggtgttggctctgtgggcatgagtgcgatcatggccgcaaagttgcgcaatgcaaaaacgatcatcgcgatcgacttgcagccgcaacggctggagctggccaagaagctgggcgcgacacatgccgtgcttggctcggacaccgacgtcgtggctcagatccagaagatttcgggcagcaacggtgtcgacaactccgtcgactgtgcgggcatcccccagatccgttgagaaggcgctggattgtcttggaactcggggcaaaggtgccaccgtcggtgctcctactcccggtgtgcgtgcaggtgtcgacg

SEQ ID NO: 19410 - DNA, 938 bp, Emericella nidulans
actctaacaaggtgttctgacggtatgtggtcataaatattgtaaagactgcttacgtctctggtggcgtcaacaccggacttgcccggtttgcaaaaagcgtcttggggccaacgatttttatcagatcacatataaacctcaggagtttgtggtccaggaggagaaatcatcatcaaacattatactggaacaacattccagcaattctatatatactgatatcggatcagggactctacacgaaatcaaaaatattgacctgaaagactcatttggaaccaagatcgacaccttggcacgccatattctgtggctgcgagaacatgaccccggtgctcaatccattgtcttttctcagtataagggctttcttgactacctagcaaatgcattcaggcgcttcaagatcgggtacagtagtgtcgatgaatcagacggcatagaaaagttcaagaaggatcctggggtaggccatcattcattcctgggttcaaagttcttaaaattgactcccacctagatcgaatgctttctcctgcatgcgaaggcgcactcgtcaggccttaacctggttaatgcaactcacgtcttcctctgcgaacccctgatcaatacggctattgaattacaagctattgcacgagtgcatcgtatcgggcagcatcggccgacgacagtctggatgtacttgatctccgatacggttgagaagtcaatatacgacatctcggtctctcgccgcctagatcacattatccagaaggaacgggaacaaaaggccggtgcacccacggctcctgaaaacagagtgaacagacctgcaattggggaccttagcgaggtagctattgattctgctaactccatggaggtacaagatgcaccactggccaagctgatggagggcggcgcatatggtggcgaacgggtcaaga

SEQ ID NO: 19411 - DNA, 938 bp, Emericella nidulans
ctcatcattggcgccggaccagcaggtctctcgacggccctcgggcttgcccgtcagacgtattccgcgattgtctttaactccaatcaatatcgtaacgcctttgctgatcggatgcacaacatcctgacctgggaccacaaaccccccagcgattttcgtgccgctgcccgagacaacatcgagtctcgatatagcaccatccatttcatgaacgcaacaatcacatcggccgcggcgaaagaagacgggacgtttgaggtggtggatgagcaggagaataaataccagggaaggaagctcgcccttgccacgggcgtcaccgacgtcttgccggatatcaaggggttcagcgagttgtgggggaagaacatattccactgtctattctgccatggatttgaagagcgcggtgccgagtctgctggggttctgggaggcggcttcatcaccgagcctgccatgatacttcatatggcacggatggtatcgcctcttgccaaaaaggtcactgtctactgtgacggaaatgaagagcttgctgcgcacgtgcagaaagagttcaagggcaagccattggagatcgaatcgagaaagatcactgctttagagaagcaaggcgagacgtcactgtgcggttcgacagcggtcagagtcagcaggagggctttctggtgagcaccatcatagttaccactcacctgacatgataaaggcgtactaacgatggatcctgctaggtttctgcccctcgcgtccggatcaacggcccgtttcacgaacagctgggcctgaatgtcgacccgatgggatttatcaagacaaacgcgccattcaacgagacaaatgtgccaggctgtttcgctgttggcgattgcggatcgctgatgaagtcggtgcctcaagcactcgcgacaggctcctttgcggcacgaggt

SEQ ID NO: 19412 - DNA, 938 bp, Emericella nidulans
gcttccccgaaaaactccaatccgtacattcataaaatcgcaaattcacctcataacctataccttccttcacattttctttggtatcgccgtgcgactcgttcagacctatcatgctgttctggatcgaattctggcgatcatttactatcaccaccgaacaccagaactgatacggaaagatgtaaaggacctggatcgcttacccgggcacttgagcgtgattttgtctctccgcaaagaagatgacgccctgccaatcttgatggacgaagttgcggagcttgtatcttggtctgctagtgctggcataccagtactgagtgtctacgagaagagtggtaagtacgcgtttaaatagtaaatgcagctgaactaatattgacaggtctcctcaaatcgtgtattcccatgttacaccaagtcatcaccaacaagctgtcttcttactttggctccttgcagcagcctacacttcaactcttcgcaccacaccacccaatatacaaaactcgtccggctggtgacgccgccaaaaattctctggtcgtccttttattgtctgcgaccgacggccaggaaaccctcgtcgatttgacaaagactctggcagagatgtcccagaatggaaaactctcaccggacgacatcaccatggaattagtcgatgcggagatcagcgagatcactacacagccatcccaggatgttgcaccgactgcgaacgaccacaaagtgtcaaaaccccttcaagtcaagccagagccggatctccttcttgtctttggaccttcactgaagcttaatggttacccaccctggcatatacgcctgactgaaatgtactgcacgggagtcaacagtgatgggtttacaggctacggtgataatgtggagtatcaaggatttctcagaggcctctggcactatgctggtgc

SEQ ID NO: 19413 - DNA, 940 bp, Emericella nidulans
accggtgccgggtctcgtctggctggtaagccccttcctcagctggctgtgttcgaattcacctcataattccgcaggggagattggaaacggccgcgcaacagcaatcttgctcgcacgacagggcgccaaggttgccctggtagactacaatgtcgattgggcacaagagacaaaacgcatgattgatctcgacggtggtcaatccatcgtgattcaggcggacgtgacggatgaagaaagctgtaaaaaagccgtggcgcagaccatcggggcattcgggaccgtgaatatacttgttaacattggtaagcctcccaaagaacattctgggccagaagctaataatgcattttattccagtcggagttggaggtgccatgggagacgctacgcgacttgaccttgcagcatgggacagagacttcaggatcaatgtgactagcatggtgctgatgagcaggtatgtcataccggagatgagaaaaaacggacgcggcgcgatcgtcaatatgtcctctgtcagtggtcgtacgtattcatttctaaatgtcctaccttgtgcatgacatactgatatgaagtgcagtcctcggcggtaaccctagtttgctgtaccctacaacaaaaggagccattatccagatgactcgggcgatggcggcgcaacatggcccagaaaatatccgggtaaactgcgtttgcccggggatggtgttcactcctatggtacgcggtagaggaatgacggacgagatgcgccaggctcgtatcaatcagaacctcctgaagcaagaaggaacgggatgggatgttggttatggtaagtgtactggcaagagaagagagcatggctgacgtgcgctacctagcaattctcttcctctgcagcaaagaagccaaatggatcacagggctaatcatgcctgtcgacggaggg

SEQ ID NO: 19414 - DNA, 941 bp, Emericella nidulans
tcgacaatggcagcggtacgatccgtgccgggttcgctggtgaagaaatcccctcatgctacttcccgtcatttgtcggtcggccaaaacatccccgggtcatggccggcggtctagaaggggacgtctttatcggacaacgagcccaggaattgcgcggcctgatgaaaatccgctatccgctggagcacgggatagtgacggactgggacgacatggagaaaatctggcactacgtgtacgagaacgagctcaaaacgctgccggaagagcaccccgtcctcctcaccgaaccgccgctcaatccgcgcaagaaccgcgatatagctgcccagatcatgttcgagactttcaacgttcctgctctctatacctctattcaggctgtgctgtctctttatgcttccgggcggacgaccggtgttgttttggattcaggggatggagtctcacatgcggttccggtgtttgagggcttcgcaatccctaatagtattcgaaggatagatgttgctgggagagatgtaacagaacagttacaactgctgcttcggaagaccgggcatgtgctccataccagtgctgaaaaggaggtggtacggatgatcaaggagaaagtctgctacgtttctctggatcctaagcgggaggagaaggaatggatgaatagctacaagtcggaatcaaagcacgcggactatgtcctgccggatgggcataagatcaaagtacgtatgccctggaagcagattgtggaagtgcaagctaacagacggtttgtagatcggccaggaacgtttccgtgctcctgagatcctctttgaccccgagctcattggcctcgaatatcctggtgtgcaccagatcgttcaagacgccattatccgtacggatctcgacttgcgcaagtcgctttacctcaacattgtcctctccggagg

SEQ ID NO: 19415 - DNA, 942 bp, Emericella nidulans
gaagcacgccacccctgcatggagatgcaggacgacatctccttcataactaatgatgtctcccttatccgcgacgagtcctcattccttatcatcactggccccaatatgggcggtaaatcgacctacatccgcatgattggcgttatagcgctcatggcgcagataggctgcttcgtgccctgcaccgaagcagagttgacgatctttgactgcatccttgcccgtgttggtgcgagcgattcgcagcttaaaggcgtttctacgttcatggcggagatgctcgaaacgtcaaacatcctcaagtcagcgacctctgagtccttgatcatcattgatgaattgggccgcggcactagcacttacgacggattcggtctcgcctgggcgatttcagagcacattgtgaccgaaatccgctgctttggactattcgcgacacacttccacgaactcacgacacttgcagatcgataccccaagtctgtcaagaacctgcacgtcgttgcattcatcggcgacggaacaacagcgaacgaagaagacgaaaaagagaagagaaagacccggcagaaggtaacattgctctaccgcgttgaaccaggcatctgcgaccagtctttcggcatccacgtcgctgagctcgtccgcttcccagagaaggtagtcaacatggcgcggcagaaggccgaggagctggaggattttacgtccgctgattccgctggaaatgctgcgtcagcgacgattgataagtactcgcaggaggaagtcgaagaagggagtgcgctgttgaaagcgctgctggtgaagtggaagagtgcaattgaggagccggggagagagctgacgcttgaggagaagaggcaggttatgagggatttggtaaaaggggacgagaagttgcaggcgaatagagtcttccaggggattcaggcgctg

SEQ ID NO: 19416 - DNA, 942 bp, Emericella nidulans
taccacggagggcatgtggccatacagctactatgacgagtgcgacgccgggatcacgccgaatcaaagttctacggatggcataagttggctcccgggcatgcgtttgccggcgtgtacatgtccgggttcggaccatcccagccctggacggtctcgttctgcgccagaaattgatgtaattgaggccagtgtttcgccgctgaatggcgatgccgacaagatggtgggatcggtgtcgcaaagtttgcagatggcaccatttgatatttggtatatgcctgattatggtgagcccaactgttcgacgttattaaccgtgttgacaatcttcgactgactgttctaccagacttcaccgccgtctacgacccctccataacccaaataaacacctatcgcggcgggccctaccaacaagccatgtccggcgtcacaaacctcaacaacgattggtacaacggcaaagcataccaaatctacgccttcgaatacactccagggattcaagggaacgtgagctggtttgtcggcgccgacaagacatggacgcttgacgggcgagctatcggtccaaacggcaacgtagggcagcgcgttatcccgcttgagccgttgtccatcatcatgaatctaggcatggcgtggaactttgcgcccattgacgatgacattcagaaatatacgccggcgtacttgcggtttgattatattcgcatctatcaggacccagatgctatcagtgtgacttgtgatccggagggttgggagacgacagagtatatcgaaaagcatccgaaggcgtacatggatgctaacaagacccattggtatgttctcctcaatgctatttactctccttgcaggcgactaacatggttcaatcactctagggctgatgctggatatgaatggccgacaaacacgcttatgcataaatgc

SEQ ID NO: 19417 - DNA, 943 bp, Emericella nidulans
cagcgcttgcaagggttcgagaaaccgaccaagaggtggaggatgaacttttgcgaatccgtgaagctcttgagtatgagaaggaagccatctctagcaactactctgctctctggaaggataagtctctgcgcaagtagtggtactagccttgattatcaatgctggccagcaggtcaccggccagggaagtctgaactcttactcgaccaagatctaccagaaggtcttccctagctcaagccagattgctctcatcaacgccctcaacgcgactttcggaatcctctttaccctcaatgctgtgtggattatcgaccggtttggacgcaaattcttgctgattgtcggaggcatcggtatgggcatttgcatgatcatcgtgtctgccgtcgaaaccgagacaccatcgcccaacgatacaaagagcacgcccgttggcatatcgatcgtgtttctactcttcttgttcatattcttctgtaagtacgctaagctcttcccgtcacccaccaactaataacatccgtctagacaaaccctcttggggtgcaacagtatggatctggacatccgagatcttctccatgaacgtccgagcccaggctgtcggtatggcctctcaaacccagaatgtcgcaaacgccatcttccagcagttcttccctatcttcctggacaactgcggattctacgcattttacatgtttgcgggcatcaacttcctgcttgcggtgttcgtcttcttttttatacccgagaccaagcaggtgcctctggaagagattgatgctctgtttggtggagccaaccacgtcacccgtggtgaagagctcattgggtctgaaaagcaggaggtgactactacccacaaggagtaaacgtgccgcaagtaatgttgaggatggaggtgccacgattatgtatatcaaataatagtacg

SEQ ID NO: 19418 - DNA, 944 bp, Emericella nidulans; identical to SEQ ID NO: 16919

SEQ ID NO: 19419 - DNA, 944 bp, Emericella nidulans
gaagcgcgcgctatccgactacaccggtgtcttcgacgctatcggcgcccaagtcgccactgtttcatccaccgtggcctcctacgtggcgggctcgacctccggttcggccgtgcaagatgcgtcaaccgagcttgtgacgattatcaacgacggcgcggccagcgtcgccggttttgactctctgacttccctcgaggcccttcaactagtcgctcccatccaggatctgacgggcgacatcagcgaccttattgatgctgtgatcgcggctgagcccaacttcgtggcagatggtcttgatggcgatgttcttacctcgcttcaggatcagaaggcggccgctgagggtctgcgggatgcgatcacgcccaaggttccggccgctttggaggatatcgccaatgaattgtccgaggggattgtcgctgagattgaccggggcattgcggcttactctgactaagtcgatgctttaacgtgatgatgatttggatgacggggaaatggtactgatgaggggacggaagactgttcgcccaggcgacatcgagctagttctgtttgatgagtgttgttaagagatggatctgccgactcttaaggctttggtgtttctctgtcaagtagccacctttagagtagtgaatgcatgatcaagtatatccccagtacagatttgtaaacgctgatcctagccttagtaattgcggctaaatatttccacgtagacagagtccaggacaaagagagatttcctttgataggccgcctgcgtggtgattatatcttcggctaacaagatatggcagtaagtgctagctcagtccaatgaccctgtaaactcccagtcaggggaccaacctctaaatccagcatgtcctgccaagtactctgttggcgctgtccataaatttgagacaaaagacggtggcttgatgtcg

SEQ ID NO: 19420 - DNA, 944 bp, Emericella nidulans
cgtcacgaaccccaagggacaacacttcaagtcactcgggcaggcagatcgctggggccgggtatggttacttcccgaggaggctctgtacttgctggaaagagggagtcttgacatacggtggccccgctgtgctgttggagctggtgacgaagatgatatcgaagactctgggatacctatgagcttacaagctgcctacgcgtgtctgatggggcgtggtgggctaacgatggagaggttctccgtttttactggtcttaggcggttgggttacgttgtcgttcgagcacctggatggagtgaaagtgaggaggagaaaggcgcacagtcggtcacgaaatccggaatccaacaggggccagggttagccgggatcttttctcgcttcctgcaatggttacgcgatactgcgcccactacagcattgggacctgttgctggcctcggctttcatcacaactacggtatgaacgtcctggtaggtgtctctgaatgctgctaatgctacctcagacagcatatttcgcagactctcaatcataccttattacgaccccgttacttcggcgtcgtcttctccatcgccagagctgccctatgccgttgtatggtatgtctacaagccgtcaactaattttcgcaagtccgctccaccaagtcccgatttcaagattgctgtcatagacgctcggacaactaccactatacccaccctgtctcaaattgggaacctgcttgagagcacacctttagacccgcctaaccctgataagcagctttatgtgcggctgaaaaacggctatcgtaatgtcgtgctggccgtagtcgatcaaggcgttgtgagctatctcagaattgccgacgcggcctttggcaaagaaaaaatctatgcacaacggttatccggtggtaataaatttcgtggaacgccccggcataaa

SEQ ID NO: 19421 - DNA, 944 bp, Emericella nidulans
cgccccaccgtctccctacctgcgcggagttgatgtcggacggaattcccagaccgtccttttgactggagccgggatttcagtagcgtctggattgtccgattaccgaggagagaacggcacctatgtgacgaataagagataccgtccgatttacttccatgagttcgcgacgcgacatgaatccaggaagagatactgggctcgcagcttcatcggatggccggggcttctgaaggcgagcaactcgactcactgggcgattagagatctaggcgtcaaaggctacgttagctctgtaattacgcagaatgtggattcctttcattcaatcgctcatcctgagattccgtcgattgaacttcacgggtatttgagatccgttgtctgtttgagctgccgtaaccagtttccgaggtccgagtttcaaaagtctctcgagaggcttaatccgtcctgggcagagttcttagcgaggatggtcgatataggggctcttgacacggacaacccagaggaacaaaggcgcagaggattgaaactcaacccggacggagacgttgagcttccagaggcaccgtactccacatttcgctacccttcatgttcaacttgtctagaaaagcctcctcgacttgcggatggtactccagccagagttgaggttgagaaagacggcgcctggctgccgacctcggaggcaggtatcctgaaacctgcggtaatcatgttcggagagaacattgagccgccagtgaagttggctgcagaagaagccattgacgacgcggggagattgctagtactcggcacctctctagccacatactccgcatggaggttagtggaaagagcctataagagaggaatgcccattggcatcataaatatcggaggcgttcgaaacgaatccgttctcctcaaggaagcagacaaaggcagcg

SEQ ID NO: 19422 - DNA, 946 bp, Emericella nidulans
cgtctccgtcgtgcgcctaaaaaaaggcaagaaacgcttcgaactagcctgctacaaaaacaaactgttggaatatcgttctggcgccgaaaaagacctcgacaatgtccttcaggtccccacgatcttcctttctgtctccaaagcacagaccgcacctgcagcggaattaatcaaccgctttggccctgacacgcccgccgacgaaatccgccaggaaattttacgaaaaggcgaagtgcaagtgggggagcgcgagcgaaaagaaatcgccgagcgaattgagaaggaggtacttgatattgtttcaggtcgactgattgatccgacgacgaagagggtttatacgccggggatgatttcgaaggcactggatcagttgacagcggcgagtgggcagatgcagcagcagcaatcagcagcgcagacaggagaaaatggagcgggtgatgaagacgccgcagcgcctaggcaacagaagaaacctctatggacgggtgtgaacccaaacaagtcggccaagagtctcgcgcttgaggcgatgaaggcgttgattgcgtggcagcctattccggttatgagagcacggatgcggcttcgagtaacttgtcccgtgtcgctgctaaagcagagtgttaagtccgcggcgccggctgggtcaaataacaaggagaaggaatctcaaagcggtggtggtgttcaaagaacaaaaaaggtggaaagggaaagaaatcggctcgccgcggtgacgacactgactccgagggtgagagtgcgcctgtccagccaaagggcccgagcaacgtcaaggataagatcctgagttttatcgaatccattgagtcacaggagattgctagcgatgaatgggaggtggttggttttgcagagcctggtgcattcaaaggactgaacgagtttgttggcaatgagactcgggggcggg

SEQ ID NO: 19423 - DNA, 947 bp, Emericella nidulans
ctcgcggagaccgtggtggtgaccgccgtggacgcggccgtggccgtggtcgtcgcggaggaaagactgaggagaaggaatggcaggttagttggatcactcgtttggcccatgaagtgctcggatacggggatatgtcactaacaagtgatggcagcctgtgaccaagctcggccgtctcgtcaaggccggcaagattaccagcatggagcagatctacctccactctctgcccgttaaggagtaccagatcgtggacttcttcctgcccaagctcaaggatgaggttatgaaggtacggatacgaattcttttgcggaacggattgcgccgatggacgtggaattagaggatggacgatacgtgccacagagtggattggaatacaggaatatacagcaacaggcgctgactgccgcgttatagatcaaacccgtccagaagcagacccgtgccggtcagcgtacccgtttcaaggccgtcgtcgtcattggtgactctgagggccacattggtctcggaatcaagacctccaaggaagtcgctactgccatccgtgccgccatcatcatcgccaagctcgctgttctccccgttcgtcgcggttactggggtaccaacctcggtgagcctcactctctgcccgtcaagcagagcgccaagtgtggttccgtctccgtccgagtatgtttcgcactcccactccctttttccctgttacttacatacctagcttatccccgctccccgtggtaccggccttgttgcctctcccgctgtcaagcgtctccttcagctcgctggtgtccaggatgcctacacctcctcttccggctccaccaagaccctcgagaacaccctcaaggctaccttccttgccgtcgtcaacacctacggcttccttacccccaacctctggaccgagaccaagctcacccgcagccctc

SEQ ID NO: 19424 - DNA, 948 bp, Emericella nidulans
ccaccctcgactccatctgcaaagatatccaaactggcaaaatcactcgcatcgttgcattagtaggcgccggtctctcgacctcctctggactcgccgactttcgcacaccagatacgggtctctacgcaaaactcgaacccctccaactgccctacccggaggccctcttccacatctcttatttcaagcacacgcctgaacctttctatgcaatcgcaagggggcgccatccatggaatacgaagccgggtgttggacatgcatttctagcacttttagagaaaaagggcgtgctcgggttcgtgtttacccagaatatcgacggtctcgagctcgatgcgggcgttagtagggaaagagtcatgaatctccatggtgattggagtgatcagcactgcatcaaatgtcgatcttcctatcccgcggatcgaatgaggaaggcaatcctaacgggcgaagtgcctttctgtgttcaggcaaattgtgaaggaatcgtcaaacctgctatagttatgttcggcgagagtcttcctgagggttttgacagcagggaggaggagatgctctccactgccgatctgttgctggttatcgggacgagcctgaaggttgcgccatgctcggagatcccgcgacgacttccgagccatgtaccaagggtgctggtaaatcgagagctcgtgggcaatattgggactagggaaagcgatgtctgtctcctgggggactgtgatgcgtggttgagggaggtcgccagacatctgggttgggacgaggaacttgagagcgtttggaaggatactctggtacgcaaggagaagagttcgagggacaaggggtgggatgataaggctgagcagagcccaacgttggaggaatgtatagtcagagcggcagagcagatgaaagtgcgaatgggggtgtcggaggggcatcgacgcatgt

SEQ ID NO: 19425 - DNA, 949 bp, Emericella nidulans
ggcatcctcgtacatctacgcctcagacaacagaccctacttcatcgtctcgcatgtcggaaacccagggcccggttactatagatactccatccttgacgtcagcaatcccagttactaccggcaatatgcataccagggctcagaggccgatccagtctcggtacacatcaacggtgcaaatatcacgttaccaacgtacggctttgaggcggtggaccctgcagataccctcgctgccatgcggacgtggagtacgtccgattttgaattcgacttaacgtttgagctttcttcacctgtcatcttgaacggtggctcaggcacttttacttggggtccgtacctgacgtacgagtggtcacttgttgggggcattactatgggaaactttgttgtcaatgatactaggctgaccattgaccccgtccgctctctgacctggtatgaccgacaagtcgtctttgccagtggaatagatccaagcggctctgcagcatcgcagaactggacttggttccagctgcactacgaccgtcccgaacatcgaaacaatgagaaaaattcgcagtttcgaccctccaaaatctccgtgtggatctgggactacgactccaacccccgcgtgcaattcgcgacagtgctcgggtttgaacagttagcaggccaacagcaagtcctctccgtaactgagttcaccccgtccggcagaacttggacatcacccgggtgcggaggcacatatcctttagactggactattgcacttccagacggaacgaggctgtacatcgaagcaatcagggacgaccaagagttttgtaatgcgagtcagccatttcagccgacgtatgaggggttcgtctcgtttaagggggtggacggggtgggaaacaatgttggtgggtttggtcttgtagaggtttgtttgcagaatatatgatgacag

SEQ ID NO: 19426 - DNA, 950 bp, Emericella nidulans
gcctcctttggcggcaagcttctcaagctcagccatgccgccaaatccacaaattgcgagatggccttcaacctgtacctcccaccacaggcatacaagacacccagccagaagctgccgttgctgatttacctgtccggtttgacctgcacgggagacaattgctctgagaagggctttttccagcacggcgcctccaagaagggcattgccgtgctgtacccagacacgagccctcgtacgtctctcccggcaaaagacaaggtgaaaattacttactgacgatcgagaaaggcggactcaatatccccggtgaaaacgacacctgggactttggcaccggcgcgggcttctacgtcaacgccaccaaagagccctacaacaaagggtacaacatgtacacctacattacagaggaactgcccgccactgtcttcgaggccttcccgcagatcgactcttcccgtgtcagtattacgggccacagcatgggcgggcacggggcgctgacgctcttcttgcgcaatccgggcaagtataagagtgtctctgcgtttgcgccgatctcaaacccgatcaattgcgcgtgggggcagaaggcgtttggtggatatctcggagaagagaataaggagaagtggaaggagcatgacgcaactgagttggtgaagggatgggcagggaagaatgtggatatcctgattgatgtggtgagttcctccagcattttgctttcgatataaggtgctttctggaggtgagctgatcgtaattgccagggaaccggcgacaacttctacaaacaaggccagctccttcccgagaacctggaaaaggctgccaaggaggctggcgtgacgggcatcaatgtccggtaccagccggactatgaccacagttattacaccatggcgacgttttcggatgatcatgtggagcatgcggccaag

SEQ ID NO: 19427 - DNA, 950 bp, Emericella nidulans
tggcgccaatacttcccaaagggagatctatgggtattcggctatgggtgagtccagtgctcaacatattaatcattcttagctaactagtcaaaaggagtctgatatggaagccaccgcctcattttggtatgtcctagtcacgataagtgtgaaagcaagctaggccagctaacgaaaacgacgatagatcagcgagtaccggggtatatcgaaggctatgtgcgccggttctggcaggtttgtgtcctttcttccatgcctctcgacccagaaagctgacatttcatataggccaggtaagcgggtttctttcgaaaccctcacaagacacaagggccgtcctaatgtaatatgtgcgaataccagtaccgaccacagaggtacccccgagcagcccggccgtgtggtaacggtgattgaacgcaatttctgggagacgctggatgatccggtaattttttttttgccttttaggcgtcatactacaatattatcaactaacaacctagcagctatcccatctagagtcttccacaacccgcgtctggggcgccgcataccacatcccagcgtcccacgccgaggaagtccatgattatcttgatgtgcgcgaaatagacgggtacagtgtgcactatacaccgtttcaccccgtgacgagcacagccaccgctactggcacaagcacagaccaatccacatccgcatccccgatgacatgcatggtctacattggccagcctagcaacccacaatttctgcgcgacccagcatgccgcgatccacaagacgtcgcggaggtgatctcccgcggcgtcggacaaagcgggaagaacacagaatatctgtatttgctggagaaggcgctagagggtattgggctaggaagtgcagatgagcatgtcacggatctggtgaagagagttagggcaattgagggttcggga

SEQ ID NO: 19428 - DNA, 951 bp, Emericella nidulans
tgcaggaccggacgagtggttagaggcagccaaggactgcaaatacctctcggagtcacatatgaagcagttatgtgagattgtgaaagagtatatgatggaaggtgcgttctgcgcgagctagctgaaactattttcagatgctgagatctgtgcgtctgcctagagtccaatattcagccagtatcgacccccgtcaccgtctgcggagatattcacggacaattctacgacctcttagaactatttcgcgtctccggtggtatgccagacgcgtcgctagctgaacctccgaagacttcttctgctgtgattacatcggacgacattgaaccgcccaccacgataacagatccagagttgagaaaaaagttggggaagccagggacagcaggagatgatgatgatgacgatgatgataataatgagaatgctggtcaaaaagaaaagtcttcgagttcagggacttcggaaatagctgtcaaccgcaacttcgtgttcctcggcgactatgtggatagaggatatttcagtctggagaccctgacattattattgtgtttgaaagcgaagttcgtcatccagactgtttttgatatgggtgtagctgactattgaaggtatcctgaccgggtgacgctcgttcgtggcaatcacgagtctcggcagatcacacaggtatatggtttttacgaggagtgtttgcagaagtatggaaatgcttccgtctggaaggcctgctgtcaagtgtttgattttatgaccctgggtgctattattgatggtcgggtcctgtgcgtccatggaggactaagtccagaaattaggaccctggatcaagttcgagtcgtcgccagagctcaagagattcctcacgaaggtgcattctgtgacttggtctggtcagatccagacgatgtcgagacatgggcagtcagccctcgaggagcc

SEQ ID NO: 19429 - DNA, 951 bp, Emericella nidulans
agagatctccctgatcatggagttgctagttgggtatcggcgaacgacaagccgtctgtcgtgtcgaagcccacctccggggatgctgctgaacagcgactcaagacggaggtaatgcaattaccaccaagagatcgccggcggattaaagcgattccagaggtatgctacaatcatttcttagctgtgaaatctcgaatgaatcagggaagactgaccataagtgtttgcaccagcgcgacccccacgatgcagtacgcaacgaattggaggagtaccatttggccaaacagataaaactgccaagtcaggttccagcaagcgcgggtggtctaaacatgacaagtaagtagaatcatgtacggcttgactttcggccgaggcttaccaatatgggtgttttagactgggagttagaagtccgaaaacggtatgtgcagccgctcgcctcggagaccggtgaatttccggacgctgaatcgatacacgcccgaatgacacctatttgctacgaagagtcggtcgttaatggtgcgggtgtcgcatgcgccgagttcatggcaatagctaccgaaacgttcgtcaaggaggtactttcagtagtgttttcccgaacacgatgcaatggtccttctggtaccatcaacggcatgatgaaacgatcatataagcaacaactcgagcgtgaagagcttgccttcacgcgcggtgaaatcgccaaagacggcgcaactggcttgcttcccgtggaggccaaggaagccaggactcgcagcgcccttggggttcgggacctccgtttatcgctagagctcggaagcggagtcctgagccatatgccattactggtagaccaaattatgggaggctatttcgaagacgagttagaagccgacagacgaggacgtactgatacaaatggcacagaacccacggacatggatgaaatgg

SEQ ID NO: 19430 - DNA, 953 bp, Emericella nidulans
cagaagccaacgccgcttacgagagtggtgacaaagagcgagcatttatcccgatgcttatggctgcagaacaagggtatgaacatgcccaggcgaatgtggcattcattctcgatgaacagcgttcattgttaccattggagagatttctacctggattgaggaagtcccagccccctctgcttaagaacgccgctttggctcttatccagtggactcgctcagccaaacaggcaaatgtcgactctctgctcaaaatgggcgactattacttaagtggcaatggcgttgacattgacaccgagaaagcttccacatgttaccacacggctgctgaagcccatttcagtgcgcaggcgtattggaatttggggtggatgcacgaaaatggtattgccgtcgagcaagattttcacatggctaagcgctattatgacctggctctggagacgagcagcgaggcttacttgcctgttaaactgagcctgctgaaactgcgagcacgcagtgcatggaaccggctcactaatgggaaggtcaattccattcgagaagatgacggtacgaaatattattcccagatgctagtctgctgagaacacagctaacacctcgtagaacccaaaccccggcgcaccttcagtgagtggattgcagcgttcattgaaaatgatgaggaggaagaagccaactatcgtgcacaactatataagcatggcgaagaggatgacgacgatatcttgtcgggtagtgagcatcaccgtcttgacgaccatgaggatggttactatgacgacctcgagcttgatattgacgaaagtattctggagggcctcatcattttatcgttagctgcgaccctcatggtcttggtgtatttgcgacagcaacgtaataaccgagagagaccaaacgacgaccaagccgcgaacgcagcaggacaggccaacgca

SEQ ID NO: 19431 - DNA, 956 bp, Emericella nidulans
agaggcactgtcgtatactatgtcgtggatcactcaacgtttgtcttcacacaacctttgaaaggcttgaagggaagtgatgcgtccaacttccacgatgaggaagtcggcgaagatgaagtggagttctccgacgacgaacaagaagctgaatataggcggaagttgaagcagaagcgccaggagagaaagggagcgaagaaccaggacggcgggccttcgaagcctgcaaaggggccacctggcccatcgaagttgagtcatagcgagctcaattacgatgataacgtacccgaagatggctacaccccgcttgcgagacctaaaaatctacacgagatgatgcagcagggagctcccgtggagaatgatggttctttcaacaggacttctggcttcggtggcagaggccgcggccgaggttctgatcgtggcagaggtagtcgtggtcgtggccggggtggtagggatcacggacatcagtcataccacgatcgtcaggcgtaccatcaacaggagaggtcggattctcagcctcattcccaatctcaacaacatcaaccgcagccctatcccgcctacagcccatctcagcaatatccatcgtacccgactcttccacaacaaccgcaacaacctcaacaacagcagccatacgctcaagctgcaatcccaacagcacccttcaatttccagatgccgtatcagcaggcttaccagcagcctaatccttatcagcagatgtcgcccaccccccatatcaacccgctgttcttggctgcgttgcaacagcaacaacagcagcaacaatatcagcagactcaagctcttcctcagcaacaacctggggcagggcaaccgcagcctcaaaaccaggctatgaattttgaccaggtgaaggcgcagctggatcttctacgacagctgagcaatgggcaaaaccaatggccgcctcg

SEQ ID NO: 19432 - DNA, 957 bp, Emericella nidulans
tcgagctcaaagtgcgcgaatggatctgcgaatggaaagccggtgtacgccagcactgggatgtctacagcggaagacctatccgtggaaaccgacgctgtccaggattatcaaaagcacaagttcctggatctcaataagcctctgcttatgcagctgtggaacagcgggttcagcaaagagttctacctagaacaagttcaccggccacgtcactacaaagggggagactctgctcctctctttggaaacttccttgagcctcttagcaaaaccgcttggtatgttgtaccgattgtgtggcttcctcctgtcctctacgggacttatcttggggcttctggcctgggacgtgctcctgccgcggctgcttattggctgttcgggttcttcttatggagtttgattgaatacctcatgcataggtttttattccaccttgacaagtacgggttcattgtctcctagctctctaaacaacactaactttcttcagataccttcctgataaccgagtcggaataactctacatttcctcctgcatggcattcaccattatctaccgatggacaagtatcggcttgtgatgccgcctagcctttttgtcatcctcgctacgccgttctggaaacttgcgcacacggtattctattacaactggaatgccgccgtgctcgcgtactgtggcggcgtttttgggtacatttgttatgacttgacgcactatttcctccaccatcgcaagtgagtacaccagactatcgacgttatcagatttcaactctaacgctttatcccagtctcccttcgtactacaaggggctcaaaaaatatcatcttgagcatcactttgccgattatgataacggctttggcgtgaccagccgtttctgggactgggtattcggtactgagctcgaactccctcctcccaaggttctgaagactcaatagat

SEQ ID NO: 19433 - DNA, 957 bp, Emericella nidulans
gcaagtcgagcccggacagcccagtggtcgactatttcaccgttctatctcgcaacgtggaaaccggtgagatctcttcgaggagtgcccgcaaggtcgtgcttgccctcggtggaactgcgaacttccagctgagctgccccaagaccccagaatcatgcactcctccaagtactgcactgccctgccaaatttgctaaaggacaacaacgagccctacaacatcgcggttctgggaagcggccagagtgctgctgagatcttccatgaccttcagaagcggtaccctaactccaggacgtcgctcattatgcgagataccgcgatgagacctagcgatgactcaccattgtaagtcatttttacctggtgcatgactgtgagctaacccagccaccagtgtgaacgaagtcttcaacccggagcgaacggacaagttctacaacctctcggccgctgagcgcgagcgttcgctcaaggcggataaggctaccaactacagtgtcgtccgactcgaactgatcgaggaaatctatcacgacatgtatctgcagagagtgaaaaaccccgacgagactcaatggcaacatcgcatcctccccagccgcaagattacacgtgtagagcactacggaccgaataagcgcatgcgggtgcatgtcagggccgtcaaggacggcaaggacagcctcattggcgacggcaaggaggtcttggaggttgacgcgctcatggtcgctacgggttacaaccgcaacgcgcatgaacagctcctcagcaaagtacagtacctgcggccggcgacgcaggatcgctggacccctagccgggattaccgcgtcgacctggaccggagcaaagtcagcgccggcgctggaatctggctgcagggcagcaacgagcaaacgcacgggctaagtgacagcctcctgtcggtcctggctacacgaggtggcg

SEQ ID NO: 19434 - DNA, 959 bp, Emericella nidulans
tgatggggcattcttcatcaacgaactacgtcatatgggctgtcgagtcaagcccgtgagctgcgacgtgtcgctcgctagctcactaaccgtggctctcagggcctgtgaagacgacggctttcctccagtgcgcggcgtcatccagggcgccatgttactgcgcgacgccatcttcgagcagatgacactcgacgactggcgcagtggcctgagtcccaagctgtacggcacctggaacctgcacaccgagttttcgcaaccggactctcttgacttcttcatcatgctgtcgtctgtctcgggcgtcgcaggtattgcatcgcaaagcaactatgccgccggtggctcctacgaagacgctatggctcgatggcgccaatctcagggcctgcccggtgtagccattgacctaggtcccatttctgacattggctacgtttcgacagaccccagagtcgccgagcgcctgcgcaaggatggtgaattcgccatgcttgacgagggtattgttctccgtgccctcaacgctgcgattttacatccactaggccggtctcagataatcatcggtctcacatcctccccgggtcctcattgggaccccaatggccgctctcagctcggccgtgatgcgcgctatgcaacgctgcgacctcacactaaggtctcggcacgacaggacggcgaaagcaccagtgcctcgctcgccacgcagctcgcagataccaacgacccgcaagagggagcgaggctcatcggagcggctattgcagagaagcttgcggacatttttatgacgcccatagcggagatcgatctcagcaagccgccggcccactatggggtcgactcgctgattgcggtagagctgaggaatatgcttgcattgcaggcggcggcggatatttccatcttcagagcgttacagacggccagtctggctgcgttggctgggt

SEQ ID NO: 19435 - DNA, 959 bp, Emericella nidulans
gcgcgcaagaacacaccctgtattattttcattgacgaaatcgatgccattggtaaatccaggtccgccaaaaacttcagtggcggaaacgatgagcgggaaagtaccctaaaccaaatcctcactgagatggatggttttaacacttccgaccaagtggttgttttggctggtaccaacagacccgatgttcttgacaaagctcttatgcgacctggacgtttcgatcgacacattagcattgatcgacctactatggacggtcgcaagcagatcttccgtgttcatctgaagaagatcgttaccaaggaggatatggattacctgacgggcaggctgtctgctctgactcctggctttgctggtgctgacatcgccaactgcgtcaacgaagctgctttggttggtatgtaaactccctcatccttcctgttcccacaatatagtttcagttcactgatctgtgtgcagccgcccgtgaaaacgcagagagtgtaaccatgaagcatttcgagcgagcaattgagcgagttgtcggcggcctggaaaagaagtctcttgtgctctcaccggagagaagcgcactgtggcttaccacgaagccgggcacgccatctgcggttggtatttccgctgggcggatccgttgctcaaggtttccatcataccgcgtggccaaggggccctgggatatgcacaatacctgcccgccaatggagatacatacctgatgaccgctaaccaaatgatggaccggatggccatgaccttgggaggacgcgtcagcgaggaactacacttcgacactgtcactagcggagccagtgacgacttcaacaaggtcacccgcctggccacagctatggttacaaagttcggcatgtcgccgaagctcaagtacatctactatgaagaggacccatcatcacagcttcacaagcccttctcggaagagaccg

SEQ ID NO: 19436 - DNA, 961 bp, Emericella nidulans
ttctcgcgatacaccatgtattgaaggtgtagctaatcaggtatcaattggttattaggaatggggaactggtgctgtccgccctgagcagggtattctcaacgtgcgcaaggaaatgggcactttcgccaacttgcgaccatgcaatttcgccgctccctcactagtagagagctctcccctccggcctgagatctgccgcggcgtcgacttcaacatcatccgtgaattgactggcggtatctacttcggtgaacgcaaggaagacgacggcagcgttcgcccttgacacggaaccctactcacgcgctgaaattgaacgcatcacccgtcttggtgcccacctcgccctgcaacacaaccctcctcttcctgtgtggagcttggacaaggccaatgtccttgctaccagccgtctctggcgtaagacggttaccgaaatcatggcgaaggagttccctcagcttaagcttgagcaccagcttatcgactccgctgccatgattatggtcaaggaccctcgcaagctgaatggtatcgtcatcaccagcaacctgttcggtgatattatatcggacgaggctagcgttatccccggatctttgggtctgcttcccagcgctagtctgagtagcattcctgatggaaagggcaaggttaacggtatttacgagcccattcacggtatgtattcctatgttattgcacctctcgaggattgatatgctgaattgattttactaggctccgcgcccgacatttccggaaagggcattgttaaccccgtcgctgcaatcctctcagtcggcctgatgatgcagtactctttcgccctcttcgaagaggctcgcgcggttgcgaccgccgtgagcaacgtcatcgaggccggtgtccgcactggtgacattggcggcaaagcttccaccaaggaagttggtgatgctgttgctgctgagctgga

SEQ ID NO: 19437 - DNA, 963 bp, Emericella nidulans
gcgcactcttgcccaattctctctggaaaacagggtcactctggttactggcggtgcccgtggtttagggctggttatggggcagggcattgtggcttcaggctcggatctggccattgttgacctaaaccgtatgtgctggttatagtcagtcctgaagtgaccgtcgctaactccatcccaggagatgaggccgaagagtctgcgcgaaaactggtcgagcaattccaaaaggagaaccccgggttagagcagtacgtcattgtttttcgtgaatagtcctgaactgatactgacggttattattgcccaggttgcccaatgtcaccgcgcactacgccgatgtctcgaaccccgactctgttaataatgccctctcagaggtcatcgcaaagcacggcaagattgaccatctcgtcacgtctgcgggatttaccgaaaacttcgacgccatcagctacccatacgaccgtatgcagaagctctggggggtgaacgtggacggcacatatctgtttgctacgggcgtggcaaagcacttgatggagcgcaaggcgcccgggagtattgtgatgatcggtagcatgtctggtgccatcgtcaacgtacctcaaccacaagcgccctacaacgccgccaaggcagccgttcgccaccttgcttcgtctttcgccgtcgaatgggcaggacatggtatcagggtaaactgcattagccctggatacatgctgactgctctgtaagttgcccgaatctttacaaaatagctgagcacgaactatatgctgatttgttgcaaccaggacccgcaaaatactggatgagaaccccgaactgcgggataagtggatctcgcttatccccactggcaagatgggtgtacccgaagatctgatgggcgcggtgactttccttctcagcgacgcgtccaagtacatcactggtgccgatctccgcgtggac

SEQ ID NO: 19438 - DNA, 964 bp, Emericella nidulans
tgcctcccgcaagctgtctgaggctgtccttgagaagatccactcggtcatcccagaacttttgtctggttccgccgatctgactggctccaacaacacccgctggaagaacgctgttgacttccagccacccgagtacggcattggtgagtggtctggccgctacctccgttacggtgtccgtgagcacgccatggctgctatcatgaacggtcttgctgcatacggtaccgtcatccctgccgccggtactttcctgaacttcgtttcctacgctgctggtgctgtccgtctgtccgccctctctcgcgttcgtgccattcacgtcgctacccacgactccattggtctgggtgaggacggccctacccaccagcctatcgagactctcgctcatttccgtgctcttcccaactgcatggtctggcgccctgctgatggtaacgagaccagtgctgcttactattctgccctgactgctaagcacactccctccatcctggctcttacccgtcagaacctgccccagcttgagaactcaagcattgaggctgctctcaagggtgcttaccctgtcttcgaggctgctgacgccaaggttaccatcatctccactggatccgaagtcagtatctgtatcgacgctgccaagtacctgcaggaaaagcacggcgtcgtggcccgtgtcgtctctattccttgcttcgaggtcttcgatgctcaggacaaggagtacagactcaaggtcctccccgacggcatccccattttgtctgtcgaggtctgctccaccatgggttgggagcgctactctcacgagcagttcggtctgaaccgcttcggtgcctctggtccctacaaggaggtctacgccaagttcgagttcactcctgagggtattagcaagcgcgcccttgccaccattgacttctatagggtgttcccgttcggtcgcccatcaacc

SEQ ID NO: 19439 - DNA, 965 bp, Emericella nidulans
gggccatcccctcgcttcaagcctcgcgtcttcgatcgctcatgcttgaagcgtacgccgacagatccaaaatcctcgcttttccatgtagctacgatggtctttcgtcgcggctaatcgaggaagccggcttcccaatgctcttcctgtccgggttcgcggtctccagcacacatggcctcccggatacaggctacatcgcaatggcggagatgtgcgataagattcaggagacagtccgcgtaacaagtctaccgatcatggtcgatggtgatacagggtacggaagtgcaatgaatgtcaagcgcacggtggagagtttcgctgcagcaggcgcagcgggggttatgattgaggaccagacctggccgaaacgtacgtcccctgtcacagttccactgatgatttcgaccaggcctaatactgatcttgtgaaaaggctgcggccacaccaaaggcaaatccgttgtatctcgcggcgaagcatacgctcggatccaggcagcctgcgacgcgcgcaacgagggtcgagatatatttattctcgctcgcacagacgcattgattcatggatgggacgaggccctagctcgagcgaaagagtttaaagggattggcgcagatgcagtgtttgtagaggcattacctgatcgcgacgcaatgaagcgctgcgtccaggaactacagatgccgatgcttgcaaatatcattgaaggagggatgacggagaatctttctgctaaggagctggctagcttggggtttgcggcggtcgcgtatccgtggacgctagtcgctgcgaaactgaaggccattaaggacgcgctggagggactgaagagaagtatgctggaggatgcacccccaccgatgatcctgggatacgatgaggtttgtgagggagtcggcttcaaaaagtactgggtaaggtccccatctaatgactacaggatgatggaaaagat

SEQ ID NO: 19440 - DNA, 966 bp, Emericella nidulans
cgcgtcgcagtgggcattgccgctggtcatgctgagcctggtctactttgtgcctgacccgccctactggctcgtacgtaagggccgtacggaggatgcgctacagagtcttcgccgtctggctgctagtggtgtcgatgtcggccacaagctggcccatatccgcgagacactgcggctagaagagagcttcagcttgcaggggtcgaccaggcccagttacctcgagtgcttccgcgggccgaatctccggcgactgacgatctgcgtgatggcgtatagcatgcaggcgtttacgggaaacgtgtttttcatctcgtatgcggtgcactttatggaactcgcggggctggatgcggccgatgctttctccatgaatctgggactgacaggcgttggattcctgggcacctgcatctcctggttcctgctttcctaccttggaagacggacgatgtatctgttcggctgctgctcgctggcacttgtgctcttcgccgtgggcgcggtggacctcgccccccggcaggcggcagcgagatgggcgcaatgtgcgctcatgctcctctgcacattcatctacgacctctcgctgggacccttctgctatgtgctgctggcggaagtatcatctgcgagactgcggggcttcacaattgccttgtcaacagtcgcctgttttgtgtggagtgttgtctttgcggtcgtgattccgtatgcgatgaatgaagaccaggggaattggcgcgggaagatggggttctttttcgctgggacgagtacattgtgcgcagtttactgttactggtgcttgccggagactagggggcggacatttgaggagctggatgtgctgtttgagcagaaggtgccgagtcggaagtttgcgagcgcgacggtgaacatcaatctctctacagacgaaggctctcgtagagaagccagagtataaggatagaggacgaa

SEQ ID NO: 19441 - DNA, 966 bp, Emericella nidulans; identical to SEQ ID NO: 19440

SEQ ID NO: 19442 - DNA, 971 bp, Emericella nidulans
tcgcctggctcgaaaacgaactggttaacaaaaagtcgactttggacgaggtcgatgcagctgataagctggaacaactcaggtctaagcaggagctcttcgcaggtctttcttttgacactatctcctcgaccggtccgaacggagctgtcatacactacaagcctgagaagggaagttgctccgtcatcgaccctaacgccatctacctctgcgactccggaggccagtatcttgacgggaccacagacgtaaccagaacttttcatttcggccagcccacggagcttgagaagaaagctttcacattggtcctcaagggttgcattgggcttgactctgccgtcttcccaaaaggcacgagcgggtttgcgcttgacgtcctagctcggcaacacttgtggaaggagggtcttgacttcttgcatgggacaggccatggaattggttcctacttggtaactcaagagcgccccggaacaagcgtactccgctgactgtttttagaatgtacacgagggacccgtaggcatcggcactcgtgtgcagtatactgaagtgcccttagcgcccggaaacgttatatctgacggtatgcatatagaattagtaccatgagctctgtttactgactaccccagaacctggtttctatgaagacggcaagttcggaattcgcattgagagtaagtcccttcaataaactctctggattcactatctgactcttgaaagacgttatcatggtacgcgaggttcagactactcacaagttcggtgaacggccttggctgggctttgagcatgtcacaatgtgccccatcggacagaatctgattgagccttcacttctgagcgactccgagatcaaatggctgaatgactaccatgcggaggtatgggaaaagacccataagtactttgagaacgatgaagtcactcgtaaatggcttgaacgggagactcgcccg

SEQ ID NO: 19443 - DNA, 971 bp, Emericella nidulans
gggccgtcactcatccctccgagccaaactactgcgcttcccaaggaggcgatacattcggtatggataatgacgacttcaaccagattccggccaatatctccaccattgcggatatgttcgacactaagaacatctcctggggcgagtaccaagaacacatgccctaccccggctaccagggcttccgttatcccacttcgggagacaacgactacgttcgtaagcacaatcccgctatcctctacgactcaataacagaggaccccacgcgcctgcgccaaatcaagaacttcacctcgttctacgaggaccttaagacccaccgtctgcctcagtacagtttcatcacaccgaacatgacgaacgatggacacgacacggacatctctttctccggtaggtggacgtgggagttcctgattgacctgctggacaacgagtacttcaccaacgacacgctgatcctcttaactttcgacgagaacgacacctacgagctaggcaataagattttctctttcctgcttggtggtgctgtccctaaggacctcatcgggaaggaagacgacaccttctacactcactacagtatcatctcgtctttgtctgccaacttcggccttcccagtttaggccgctgggactgcggcgcaaacctgctttctttccttgctgagaaggtcgggtacacgaactatgaagtcgatacgagcaacctgtacctgaatgtttcgtataacggacccatggctgcgggtgaatactctcagaagacctacgagtggccgattcctgcgaccgagggtcagtgttccggtggttatgggatcctggacgtggtcaggaagacctacgccgggttgaccgctacgcatgactacaccagtcccgtgccttttgatgtgaagaccggtaacagtgtgggcatcgagtacagtcgcacacttaagggtgggaggcacgagagg

SEQ ID NO: 19444 - DNA, 973 bp, Emericella nidulans
tctagatatccccagtcattccttacgcagattcacattgctaatcaagaatagggtccactcgacctcacagtttccacccttccaactccgtccccctccccgtccgcctacctaattgaaatccactcggcagggacaaacttctttgacctgcttcaaatccgaggcaaataccagcaccagcctccgctcccatggatcagcggctctgagttcgcaggcacgattgccgccgtcccaacaacaagcgggccatggaaatacaaagtcggggaccgggtgttcggtgccacgcagggcgcgtatgccacgcatgtcctggcacccgagtcggctctgctccctgtaccgcagggttggagctttgaggatgcggcaggactgttcgttacggcgccaacatcgtatggtggactggtgcatcgggcaaatgtgcagcctggggagtgggtacttgttcatgcggctgctggaggtgttgggcttgcggcggtgcagattgccaaggcgcgcggagcgacagtgattgcgacggcggggaccgagagaaagagggaggttgcgaaagctttcggggcagactacgtgatcgattaccgggacaaggcctggccagagaaggtgaaggcgttgtgcgcagagcatcggagcgggaatggtaaggccggcgtagatgttgtttacgaccccgtcggcatgattgatctgagtttgaagtgtgtggcgtggaatgcgcggctgctggttattggatttgcggcaggaagtatagagaaggttgcgctgaaccgggtcttgttgaagaatgttagcattgtcggactgcactggggccagtatgcgaagtttgaaaccgagacggtgggcgccgtgtggaagggcatctttgatctgatcgcgcagggcaagttcaggggcacggctttcagggacgaaagctttgttgggttggagagtgtgcccagggcac

SEQ ID NO: 19445 - DNA, 974 bp, Emericella nidulans
cagtccgtttgtggggtctggactttggtgactgtcataagtcattcctcgcgcacgaagacagcattatggccgtggctttcgtgcccagcaacaacgaaggcaacggtcacaacttcttcagcgtcagaaaagaccgcgtcatcaagtactgggacggcgataaattcgaacacatccagaagctgtctggccaccatggcgagatctgggcgatggcaatcagccacaccggcgagttcattgtcaccgccagtcacgacaagagtatccgcacatgggaacaaactgatgagcaactattccttgaagaagaacgagaaaaggagctcgaagagatttacgacaacaacctcgcagcctcccttgaagaagaagaaggcggcgccgacggcgaaaaggccgaagccgtggatgccgggaaacagacaaccgacaccctcatggccggggagaagatcatggaagcgctcgatctgggaatggaggatctcgaagtcatgcgcgagtggcgcgtcataaaggcgaagaacccgaacgctgcacctcccgcccgcaacccactgtacatggcccttaacaacatctccgccgagcaacacctgctcaacgtcgtgcaaaagatccccccggccgccctgcaggacgcccttcttgtcctccccttctcgaaaatccctgccctatttaccttcttaaatatttgggctagcagggagtggaatgttcctcttacatgccgcgtgctgttcttcatgcttaaaacgcatcaccgccagatcgttgccagcaagctgatgcggcccatgcttgacagtattcgctcatctcttcgtcgggtgcttacgcgccagaaggacgaaatgggcttcaatctctctgcattgcagttcgttggcgagcaggtcaaagctcatggtacaaaggattacattgatgagcaggcttgggaggaagagcagcgaacaacggga

SEQ ID NO: 19446 - DNA, 974 bp, Emericella nidulans
ggctccttcaccgtggaagctccttcaaactgggacgccatctactcaatcgtcaaaaagatgcgcgaagacaacccgactgcgcccgtagatacgatgggctgtgcagagctgtactggcgggcttcttctccgcgagatagacgctttcagacgctgattgctttgatgttatcttcccagactaaagacacagttaccgccgtggcgatgcagcgtttgcacactgagctgggcgaaggcggtgctccggctatcaagctggaaacagaacatgcggagtcaattgtcaagcaggaagcggagaatggcgagccagctatcaaacaggaggcgaaagatggtgtaccaccagccaatccctcccacgatagcacactgaacttggaaaacatcctggctgtctctccagagcgtctcaactcactcattggcactgttggcttccataacaacaaaaccaagtatatcaagaaagccgccgaaatcatccgcgaccagtataattccgacattccttccacccccgctgaactcatgaagttgcctggcgtcggtccaaaaatggcgtatttgtgtatgagtgcggcttggggaaagcatgagggcattggagttgatgtgcacgtccatcgtataactaatctatggggatggcacaagaccaaaacgccggaagagactcgcatgtcgctggaatcgtggctgccaaaggataaatggcacgagattaacaaattgttagtaggcttggggcagacggtgtgcttaccggtgggcagaagatgtggtgattgcggtcttgcagggacaaagctctgcaagagtgaaattaaaggcatggctccgaaaaacaacggtcgaggcttgccgaagaaggagatcgttgttgaaaccttctcattaaccggagagccaaaaataaaggttgaaggggagtaggtgcttccggaaaatctggatgagcaagtatt

SEQ ID NO: 19447 - DNA, 974 bp, Emericella nidulans
ggcgcaacctaaccgcatccgacatcaacaacctcatgcacgtcgcaaataccattcacccagacctaccagaacgtgctagcatcttcgctgagcgcgtcgccctctacccggacgggtgtctggccctcgttaacgaaactggcgagcttcacggctacgccatctcgcatccaatccgacatcaccagccgccagcactgaataccctgctaggtgagatccccgctgatgcaggtgagtactatatccacgatgttgcggtcctgccgggactgagggggcagggtctcgctgcgcaggggataggccgccttctaggggttgcggctgcgaaggggttctcgaggacctgtttagtatcggtttatggcacggaggctttctgggggcgcttcgggttcagaccggaggcggttgaggagttgaaggagaagctcagggggtatggtgacggagctgtttatcttacccgggagtgagcagggtagaatactccgtagcttttaacttatgtctgatgtttagagtggttttttcggactaggaaggggttacagatgttacagccgcttgggctctgaacattgcgatatattaatcatatgatgagatagaatttatttcacccctggcgactctcatggtcttcgctcgaagattcagtctagttcgtctggactttgaaatacatcttataaccctaaatttttgagcagtggtggggttcaatatctgatctacccacgaaaaggcataggagagagtatgtccagccgcgacgggcagacgccatgaaacttcggcccgcttagaacctgtactcttcaaatgacaacaaggctgggtcaacgaaaggaacctgatcctgctcatagccgctctcggaccccgtaacgtcggggccccagtccgcaaaatccacctgcatcttcgaggactcgggatagaaactgccccggtccaaatcttca

SEQ ID NO: 19448 - DNA, 975 bp, Emericella nidulans
ccggagctcctctcgccaaaagctattctcaagaacatcataccgcgcgttggaacggagatatcgggccttcagctgacgccggcaggcttgggccaggtagccctcctggcagggcggctcaacgatgtgtccttgtacttgtaagtcaataatggccgcgtggctcatataccttctgccattactgtggagttgaccatacaaagagggaccaggacttcgccgatatagggccagagaggcaattggctattgcgagacattttggtccgctgcacaaggcacggccagttcgtccgatctttagcggcggctaacgtaacgatagcacccgaccatgggatatccaaagggtactgggccaggactccaggtcgtctacagtgacgaaaaagtgtaagtctgacctaactttttcggcacccggggacgatactaacagcacatagaggcaatctccgccatctcctgggctcacgaacaacttgtggcatatcggacaaaccttcaccccaaatacacctggcctgacgttcttccgggtccttgaagttcccgcatcaggcgggggagatacagccttcacttcgttgacagcagcgtagactgccctctccccggcatttcgcgaaagcccccaccgtctaaagcttttacacaccagtgccagtgttggggaaatcgcgggattagggcaagagcgagctctcaagggggcggtcaggacagagcacccgctggtaatatcacaacagtgacgaaggagccggtcgtgttcgtgaatccgacaatcgctctcaggtcgtcgagtataagccgagtgagtcggacctgctgctgggcttcttgcatgatatccggtcagtggacgtttcgtgtcgagtttcttgggagaaaaggacggttgttgcctgggatcagagaacagtcgctcactccgctgttccagatttcaaagagggagaacgctgc

SEQ ID NO: 19449 - DNA, 975 bp, Emericella nidulans
cctctcaggcataccgcaaccgccgtcgctttatcaaacatgaacgcactctgcgtaattgcacgggaagtggtcacttcagtttcaacctctcgcaagcagctggagagtgagaagaagaaaaagaccgtcaacaaaggccgtgttgatgcgattaagtcgtctattcaagagggcgaagctaaactcgagcttatagatgacctgctcaaggacggagtgaatatcattttcgtcaatcgctaccgggacgtcgaccccaaaatccgtgcactaagcatagcagcactaggatcgtggatgcgcacttacagagaatactttttcgagggccaatttcttcggtattgtggttggattatatccgacagcgatgttcatacgcggtccgtagcattgcagcaacttttggatatatactcgaataaagacaacattgctggtgtgcgttcctttactgaacgatttcgccaacgatttgtggaaatagccacccatgactccgacgtcaggatgcgtaccatggcgattgaactgcttgacctgattcgagatgccggactgattgaacctgctgatgttgacactgttgggaggctcatcttcgattcggaggcgcgtgtgcgcaaggcagcgggccccttttttgtcgcaaatgtacaggacgtttttgactcgacggtggaagagcttgcagacgagattggtgaagtgttcggggacgatgaagatgaagaagattttgaatcgcccaaacgttcatggatcaagttcaggtgtcttgcagacatcattcaggcttatgatactccagaagacgaatcggcccctgagccaagtataaaagctcgagacgccatctcaggggtctcaatggactcgcgcttcgttcttgccactgaagctgtctacccacacttcgatgaactttcgaattggcagactctggctggctatcttctgtttgatcattcc

SEQ ID NO: 19450 - DNA, 975 bp, Emericella nidulans
accatggtcaaactgcaatatcttctgtcaattcttctatacgcttacagctgcactgccctaatgttggaccgacgtgatccaacgcctgggcagttgtcgcaggttacggattttggcgacaatcctacaaacgtgggcttctacatttacgtgccgcagaatctggcgtctaaccctgcaataattgtggcgatccactactgtatgacccctcgattatcctttatgaaccaccgagcctgatgaatttccaaggcactggaaccgcccaggcatactactccggaaccccctacgcgcagtatgcagagacctacggcttcatcgtcatctacccggaaagcccttactcaggcacctgctgggatgtcagctcgcagtcaactctaacccacaatggaggcggcaacagcaactccattgcaaacatggtagactggacaattaaccagtacaatgcagacgcaagccgtgtctatgtcactggaaccagctcaggtgcaatgatgacagtacgtctttaccacaacaacccttctgaaaccatcccgatgagagctaacagccccagaacgtaatggcagcaacataccccaatctcttcgcagcaggcattgcatacgctggcgtcccagctggatgcttctactcggaagccaacgtcgaagaccaatggaacagcacctgcgcacagggccagtcaatcagcacacccgagcactgggcacaaatcgcacaggcgatgtactccggctatgagggatcccggccaaagatgcagatctaccacggcagcgccgacgcaactctctacccgcagaactactacgagacatgcaagcagtgggccggtgtctttgggtacaactatgatagcccacaggaggtgcagaacgatacgccggtggccggctgggccaagactatttggggcgagaatttacagggcatattggctgatggcgtcggtca

SEQ ID NO: 19451 - DNA, 976 bp, Emericella nidulans
cctcgagcgcccagaatcccaatgcgaggacgattgaagtgctacagcagatgctggattactatacccggaccgcagaccactggcgcactttggcataccgaaaggcaatcagtgcccttcgcagtcagtcaaagaaggtgctcagccgctctgaagccatccgaattcctggaattggggagcgtctagcggacaagattgaagagattgtccttacgaaccgacttcgccgcttggataatacaagcaatacagtcgaggaccgcctacttcagacatacttgggtgtctacggggccggaattacagtggcttctaggtggatagctcaaggctatagatcgctggaagacctacgcacaaaagcctccctaacacaggcacagcgcattggtctcgaccactactttgacttttcccaacaaataccgagaaccgaagtccaggctcatggaaatttcgtccgacgagtcgtacgaatggagagccctgatatgcaagtcatcattggcggttcctaccgtcgtggcgcggccacttccggtgatattgacttgatcatcacaaggcctgatgccacgatcgaggagattcggacactgatgctagataatgtcgtgccaaaactatttcaacaagggttccttcaagcaagcttggctgctacatgtcggggggaagggtcaaaatggcatggcgcatccaaactgccagatggtcaattgtggcggcggatcgatctgttattcgtgcctggtgcagaactcggtgcagccttgatatactttactggtaacgatatctttaaccgcagcataagactgcttgctagcaagaagctcatgcgtctcaaccaaagaggactgtatgcagacgtgccgcgtgcttctcaacggacgaaggtaaaccccggtcgacttcttgaaagtcgagatgagcgccgtatcttcaaaatcctgggagtgccctggcg

SEQ ID NO: 19452 - DNA, 978 bp, Emericella nidulans
cagcccaaatgggcacaaccaacaaatgggacgaccgaaccgatacattggctcgaatgatcgcactgctcagagaagccgcatcgcaaggcgcgcaggtcgtcctcttccctgagattgctttcaccacgttcttcccgcggtacctgatcaccgacgaaaccgagttggagagctggttcgagcacggcgacatccgcacagcacccaacacaaaagccctctttgatctgcgcatgaattaggcgtcgatatctgcgtcgcgttcgcagaagcgactgaatcaggcgagcactataacagctgcgtgtactatcatgctccaccggcgacatcttatcgcggtaccgcaaaatccatctgcctggggacttcgaaccgcttcctgatccgacagccgtgaaccagctagagaagaggtactttcttcctgggaatctggggttcaaggcgtttcgggtgccggggcttgtcgaacaagtcctcaagtctgattctagcgctggcacagaaggaacggcgaaaggagacccaatcttggggctcatgatttgcaatgatcgccgctgggccgagtcctggcgtgcgtacggactgcaaggcgttgagatcgtgctgtgtggatataatactaacggctttgcgccgcaattctggggacagagcggagatatgtcccgagaagaggcggaagcgctctcactctttcaccacaaactcgttatgcaggcacatagctacacgaatgccaccttctctgtcagttcggcacgctgtggcaacgacgacgggaagtaccccctcatcggaggcagcatgattgtagacccagaggggcgggccattgcagagacgaagacggttgaggatgaggtgattgttgcagattgtgatttagagctttgtaacgctggcaagaagcggacgttcgattttgcaaggcatagacgcgtggaacattataagatcctggtggag

SEQ ID NO: 19453 - DNA, 981 bp, Emericella nidulans
ttgaacatagctatgctcgctgtcagcccaaagatagttgccgatataaatctgctggcgggttacctgagttacccacagctccagctcgaagatctatcatcaatttccccagccgacagcatcattatctgtgcctccatgatccttcatcaggcggagtctcttttccatgcccttcaagaaaacccatccctcacgaaaaccttggtcctatgtggcggcatcggccattcgactcaatatatatatgaagcagtggcccaacacagccgcttttcctccattagcaacgacatccaacatctgcccgaggcctgggtcctagagcgtattctagataccttctttgatcgagctgtcattacaagtcaagggtgtcgcatcctgatcgaggaccggtccaccaattgtggggaaaatgccctatttagtcggaaagtgctggacgatgcgggattgcataatctccacaggtgtgttcttattcaggaccccacgatgatgcggcggaccgtggcgtcgttccagaaagcctacgaagagcggacagagatgcctttgtttttaagttgtccgctccttgttccgcaggtggaggggtcaaaggaaccaggaggaaacctgcgctatgcgatgtcggaagtgaggttatggccgcttgaacggtttatatccctaactctgggagaaatcccgagactgagagatgatgaagatgggtatgggccgaggggacggaactttatctctcatgtaaaggttccggtggatatcgaggcagcctggacgcgactgcgtgcctccttcaatacacgtaggtgagcaagtgcactgcggtgtagttgatccgttcttacaagaatgatgccacgtggaaagaagcaagacatgggaaactcgattgatttcatccacggagggcagatagcctgtcatgaccgaacacatgcagaaagatcaaaagaaatgttgatgcgt

SEQ ID NO: 19454 - DNA, 982 bp, Emericella nidulans
cggctatattagcggcgctatcggtataatcattgggaatccccttgacctaattaaagttcgactgcaagcaagcagttctgccaatggccctgtatcacctcgacagttgactcgatttgagagcactagttctcttgtgcgaggtatgtgaactcctgcgtggttgtccactactattcgtcatttctgattcttccaggcgctgcggctccaatccttggatatggagctctcaatgcactactctttgtgtcttataaccgggcattgatgctcttggatagatcagtcactgaccccaccaaccctcaaaattgtgctctatataaactttggcttgctgggccttaggcggaattgccagctggacagtttcctccccaacagaattcatcaaatgccgagcacagcttgacgcttgcccgggagtctcatcgtggacagtcgccaaggatatcgttcggactcgcggctggaggggattatattttgctggtggaataacatgtgctagagactctataggatacggattctagtacgtatttcctaagctctttgatagaaggcgtttgtttacaggttgacagcttctggtcctacgaatactgcaagaggttaatgtcctctcccgatggagaagatacgagcaatactgccttgaaggtgcttttttgcggcggcattgctggaatagttacatgggcttccgtcttcccgcttgacgttattaagacccgtctgcaagcaagtacgattgcggactatgctgaagcacgccctttattacaagcgcagaccagcaaacagacgctaggttcgttcgacctggcaagggagatgtatcgagcggaaggcttcaaagccttttatcgaggcattggggtatgcagtttaagagccttcatcgtaaatgcagcccaggtaatgttctttcgcatctttgtggacatggctaatattcaaactagtgggcgac

SEQ ID NO: 19455 - DNA, 982 bp, Emericella nidulans
ccgccatgccatcgctaagtcaagactacttctgtgaccttgtgtcacgctctctcaatggaagtatcgcctgttacagctttggcagattaacgctggtccgtgccgaatttcattctgaagctaggctgatcagctttcgttttgaaagctggtcgttaaggactgggcagtgttctgtttttgagttgagtactgcttcgccatcggcgtcttcatagcagagctcttagtaacatttcacacatcgctatttctttttgctttttttatgggggctttcggttttgcttcaatttaaattgtatgctataatggtgtgctaactggtacactaggctgcttgggtacgtcacttgtcaaaggactatcctactcttgcattccacgcttcgatcaacaactcttttggtaaaggatctcttatccaactcctgaggcaattttcatcactccactccgaccgaaaacagatctcggttggtttgatcggctatcctaacacaggaaagtcttcaataatcaatactctccgcaagaagaaggtgtgcacagttgctcctatcccgggcgagaccaaagtttggcagtacgtcactctgatgaagaggatttacctcatcgactgtcctggtgttgtcccgccgagtcagacggataccccagaggatattctcctccgaggtgttgtccgggttgacaacgttgaaaaccctgagcagtatattccaacaatattgaagcgcgtgcaacccaagcatcttgagcgcacttacgggatcaaggaaacaagcgacgccatcgagttcctcagccatcctggccgggagggcgggagggtcctttggtgaaggtgacccggttctcgatggcgttgctaagatggtgatcaacgatttcctccgaggcaagattccctggtttactccccctcctttcacacctggtgaggagggtgagaagattgaaggccgcgaaggca

SEQ ID NO: 19456 - DNA, 982 bp, Emericella nidulans
tccgcgcccaattcgaaaactccaacgagttcgttcttttttttcttaataaatgctgcctcagcgactgacctaatatcacagagtcggcgttttctcccgactaacaaactcatacgcgcttgtggccatcggcgcctctgaaaacttctacaggtacctcccccatctcgtataggaatttcaaacctgccgatactgacatacgatagtgtgttcgaagccgaacttcaagacgtcatacccatttgccatgccacaatcgcaggaacacgcatcattggccgtttaaccgcagggtgcgtcgaacgcttctccagcacaaaccaatactcccagatgtacatatactgatggacaacctgcgcagaaaccgcaagggactccttgtccccacaacaacaacagaccaagaactgcaacacctgcgaaacacattgcctgatgatgtgaagatccaacgtatagaagagcgtctgtccgcgctcggtaatgtcatctgttgcaatgaccatgtcgccctcatccaccctgatttggagcgtgagacggaggagatgtacgtaccaacgcagtcacatgcaggaaacatggaggaggaacgcaggctaacatttacactagcatcgccgacgtcctcggtgtcgaagtcttccgtcaaacaatcgccgacaacgtcctaacaggctcgtacatggccctctcaaaccaaggtggcatcgtccaccctaagacttctattcgtgatcaggatgagctctcctctcttcttcaagtacctctagtcgccggttccgttaaccgcggtagccccgttgttggtgccggtctcgtcgtcaacgactggcttgctgtgacgggtctcgacacaacggcaacagaattaagcgttatcgagagcgtgtttagactgggcgagaatgggcctggcggtattgggcagggagttgcgaataaggatagtattgtggagagtttctac

SEQ ID NO: 19457 - DNA, 982 bp, Emericella nidulans
tccgacccgaagaacgaggcaagagtgttgccatttacagtcttgctcccctcctcggcccagcagtcggccctattgccggtggatttatcgcagagaacacaacctggcgctgggtgttctatgcaaccactatcgccgacggcgtcattcagatcgcaggcctgatcttattgaaggagacctacgcgcccaagattttgcgaacgcgggcaataagactccgcaaggagaccggtgatctatcctaccaaaccgaagtcgagcgccaaaaaaagaccctcagcgagaccatccgctcagctctcatccgccccttccgcctcctgtttacgcagcccatcgtccaagccattgccgtgtacctcgcctacacctacggaataatgtacctcgtcctctccacgttcccgagcctatggactggcgaacaatactataatgaatccatcggcatcggcggcctaaactatatctccctcggaattggcttctggctgggctctcagatctgtgctccactcaacgaccgcatttaccgcagcctgaaagcccgcaacaacggcgttggcaaacccgagtttcgcgtcccactcctctgcgtcccggccttcctcacccctgccggcctcttcatctacggctggacaggtcagtaccaaacacactggatagcgccgaacattggcgcggcgattttcggcatgggaacgatcgtcaccttccaatgcgcgcaaacatacatgatcgactcgtatacgagattcgcggcgagcgcgttggcagcgagtgcgtttttgcggtcaatttgcggcttcgcgtttccgcttttcgcaccgtatatgtatgacgcgttgcattatggatgggggaatagtttgctaggcttcatcagcttgggtttgggaatcccggcgccagtatttctttggaagtttggggcgttgctgaggaagaagagtacatatgcggcgggttgaca

SEQ ID NO: 19458 - DNA, 983 bp, Emericella nidulans
ccgtgacgcaagaagatgggaaaatactcggatggagctcgaaagactctcgcatcccagtctggacgttccagcccgcgccaggcgagaagatcatccgcgccactgcccgcccacctcacgacccagttgcttccatcggcaaggtcctgggcaaccgatccgttctgtacaagtatctaaccccgaacgcagctctcgtcactgcggcgggcgaagattcggccacattctacctgctcgacggggtcaccggccgcattctccataccagcacgcacaaaggagtggacactgcgcagcccatcgcatctgccatgtcagagaactggttcgcatactccttctacgccgagggcaccgatccctctgagcccaagggttaccagcttgtcatttcggaaatgtatgaatcgcccataccaaacgaccgtggccctctaggatccgcgtccaactactcctccattgccgacctgccccaacctcacgtcatctcccagtccttcatcatcgcagagccaatctcttacatggccgtcacccagacccgccagggcatcacaacgcgccagctcctcgccacacttcctgcgtcgaacgctataatcggcatcccacgtccagtccacgacccccgccgtccagtcggccgagaccctactcctacggaagccgaagagggcctgatgaaatatgcgccctttcttgatttcgatgggcggtggtacctctctcacgcgcgtcaggtggcaggcatcaacaccgttctgtccgcacccacgctccttgagagtacaagtctgatatttggtttcggaaacgatattttcgcgacgagggcgaccccgtctcaggcttttgatatcctgggcaagggattttcgaaactgcagttgcttttgacaattgttgcgctggcaattggtgtttcgatgttggctcctatggtatgtctcttccaacttccccttgtaatttcc

SEQ ID NO: 19459 - DNA, 984 bp, Emericella nidulans
tctcggcgagcacccgaaacttgaacttctccatgaaaataggacatatcccttcgcccatgaagctccagtctacatcccggacacaggtgacctcttcatagtcggcaactaccagaccccaacaggtggccaagcgatccaaatctcccgcatggttccccagaagaatggcagctatgtgcgcgagatcattcaccccgacattcccatggccaacggggctatcaactacaatggcggcattcttttctgtgaccagggcacaaaagagcgtccttcttccctgatcttcatgaacgcgaccgccccctacgagaccaaagtcctgctcgacagcttctacggccgtcactttaacagtcttaacgacctcgacgtgcattcagacggcagtatctggttcacggacccgacatacggctacgaccagggctttagcatgaagccggacctgccaaaccaggtctaccgattcaatcccaaaaccggcgacgtgcgcgtggtggctgaccagattggccaaccgaatggcattgccttctcgccggacgagagtatcgtctatgtaaccgataccgatgctgtttggggaaacggcgataatgactccaccaggcctgcgactatgtatgtctctttctatcattttcctctgtacaacaggaaggtactaatagctgcagctacgcttttgacgtcaaatactactccggttctcctttccttatgaaccgccgtgtctttgcgtacaccgataacggcatccccgacggtgtcaaaacggacaccgagggcaacgtgtatgccgggtgcggcgatggagtccatgtctggtcccccgccggtgtgctgctgggcaaaatccagcttcctggcacctcggccaacctggcgtttgccaaacctggcgagatgtttgcgctgaacgagtaccggctctggaaggttactctgagccagaatgttcaggggactattctc

SEQ ID NO: 19460 - DNA, 984 bp, Emericella nidulans
gacttgtttgatgatgatgaggcatcagttcaagatagtgacaatgagcctggtgttggtcgtacccaccaatcgacgcacgagaagcagcgcgcgcgcattgcagatgagattcgacgcttagaagctgctaatgtggctaagaaagaatggatggtatccggcgaagctcgggcagcggagaggcctgtcaactcactcatagaagaagacttggattttgagagggttggaaagcctgtgcctgtggtaaccacggaactgtctgaaagtatagaggaattgatcaagcggcgaatcatagccaaagaatttgacgaagtcatacgccgccgtcccgggctgttagaccgacaacttacccaaaaggctcgggttgaaattgaagacagcaaaccgcagcagggccttgcggagctctacgaaacagaccatattcggacaacggattcaaattacgttgacccgaagcaccagaagctcctgaaagagcatactgaaatcaccaacctctggaaggagatcagttctcaactagatacgctctccaactggcattacaaacctaaggcgccgcaggcaagcatcaatgtggttacggacgtggcaacaattactatggaggatgctcaacccactgccggtggtgctatacgcgcatcggcagcactcgctcctcaggagatttatgcaccgagcgagaccacgagagccactggtgagatcgtgatgagagacggggtgcccgtaaccaaagaggaaatgacccgagaagacaaggcgagattcagacgccggcagaagaagatggctcaggcgtctgctaattccaatcagccacggtctaggaaagcacttgaaaagcagcagattgtttcggacctgaagaaggccggggtcaaattgattgggaaagaaggcgacatgatgaacattaatgggagtaagattgttgggacagttgataggaatggggcccatgcg

SEQ ID NO: 19461 - DNA, 984 bp, Emericella nidulans
ggctctggtttcggcgctcttctcctcgaacgtctgtccacagaatacggcaagaagtccaagctggagttcgcagtgtatccttctccccgtgtttccaccgctgtcgttgagccttacaacgctgttctgtccacacacagcacaattgagaactccgactgcacgttcctcgttgataacgaggctgtttatgatatctgccgccggaacttggatattcctcgccccagctttgagcaccttaaccgtctgattgcccaagttgtcagctctatcacctccagtcttaggtttgatggtgctctcaatgtggatctgaatgaattccagaccaaccttgtgccgttcccacgtattcactaccccttgatctcgtacgcgcccgttatttcaagcaaccgcagctctcacgagagcttcaaggtccaggatctcactctccagtgtatgttttcactttggctgctaacgtattccgtcgcctacatcacagaaatataataactgatcttgcatctaggtgccgagcctaacaaccagatggtcgtttgtgatccccgtaacggcaagtacatggccgtagccctcctgtatcgtggagactgcgtgccccgtgactgcacccaagccatcgcgtcgctcaaggccaaggcttccttcaacctagttgaatggtgtcctactggtttcaaggtgggaattaactaccagaaacccgcgcgtgtccccggaagcgaactcgcccctgtcgaccgctcagtcagcatgctttccaacacaaccgccatttccgaggcatggagtcgtctcgaccacaagttcgaccttatgtactccaagcgggcgttcgtgcattggtacgtgggtgagggtatggaagaaggtgaattctccgaagcccgtgaagacttggctgcccttgagaaggattacgaggaggttgctggggacagccttgatatggagggcgaagaagccgag

SEQ ID NO: 19462 - DNA, 989 bp, Emericella nidulans
caggccgtggggcaactatgttcaacagcaaacatttcctccaacctcgcgcaatgtcgaacccttgtgcgaaaggccgttgaagctggcgcgaaggtactctctaggtagtcttagagtttaaccttctttatctgatgggttatgcttaaacaggctctattcctacccgaggcagcggactacatagggtcgtccccagcagagacgatatcgcttgctcgtcccgtacaagaaagtgaatttgttcttggtctccaaagtgaggctcgagataacaatctgcatataaacgtcggaattcatgagcctgcagcaaacggaagggtgaagaatacgctcatctggattgacgacaagggctatatcacgcagcggtatcagaaggtacacctgtttgatgtagatattaaaggagggcctgtattgaaggaaagctcgtgagttccccgctgatgcaacctgtgagtttcgagctaatggctgtacgaaggagcgttgaaaaaggaaacgaaatacttccgccattcgacacagttcttgggcgtattggattatcaatctgctttgatgtaggatcccgttggcttgttatctcttctagcaaaaagaggaaatgcttatggcacaattttacagctacgcttccctgagatcagcttagcattaagacgccagaatgctcagatcattacctatccatcagcatttacggtccccacaggcagagcacattgggaaacgcttctccgggccagggctatcgaaacacagtcctatgtaatagccgctgcgcaagcaggtcctcataatgagaaaagacagagctatggccactcgatgattgtgaacccctggggagagatcatggctaagcttggcgacgagtatgaagagccacagatcgtcgttgcgaatattgatctggagcttctgggaaaggtcagaacagagatgccgctgcttagaaggacagatatataccctga

SEQ ID NO: 19463 - DNA, 989 bp, Emericella nidulans
cgcctgatggtgactgcaggattcctcagcgagagacctagcgggcacgttgcgcataccccactatcagcctcctttgtcacggagccagagctgctagacgcagcgcttttcctggcccaggttgcggttccggcggctctgaagatgccacgctcaacgtgccagccggacccttatgatcgtggcctctctccgtcgctgattgctcgatcagagagtagggcaacgggattggaagatagacctgatcctgcacaacccaaggtgcaacgccagtttgcagcctatcttgctcgagggattcttgatgagcctttggccgttgatgaggtgcttcgcttggtagactggggtgccattgggccggccaccatcgtggatgtcagcttaccatatcgtcgatccagatcatcccgctgacagcatccagatccatcccccgtccaccagcaccatcggcatgattgctgccctgggtcctgccgcccagttagttatccagacaagctcgcctggtaacggccagtcgggcccgataacgggctctgagccatcctgggtgacataccagctgccaccgtccatcagtaatcgtgtctcggtgcattcgcggggggccggcgccccccagacggtcttaggtccagcggtctacatcgtccgcatcccgtccccctcacccatgctaccttggacgaaattgcggagccaaactgtgatggagctgcaggcccatctccaggttctccgcactcagcccacttcccgcctgatgatagcggccttagtcctgccgtcgcctggaacagtcaatcaggagacggaatccatggtgcgactgcgcgacatgtcgctcctgcagttgtctaatgagcggcagcctaccaagacagagatcgtcgagattgttaccggcatcagggactcagggggctgtttagtggtgacacgcgagatacacacaacagccagtgctgcaattgggc

SEQ ID NO: 19464 - DNA, 990 bp, Emericella nidulans
cgtgcgtgatcttgtgacgttggaggaaatcatgagtgaggatcacttgggtccgaacggcggtgttttgtatgcgttggaagagctagaggagaactttgacttcttggaggaagggttgaaagagctcggaggtatgcgcattttgtgccgatgctttgacttctacaataccgtcataagctaatagctttggcgttattagaggactatattatcttcgattgtcccggccaggtagaaattttcactcaccattcgtccttacggaatatcttcttcaagatccagaagatgggctatagagttcgttacgcatttgtccttatttaatggcatagccccggctaacatctgtgcgtacagctaatagtactacacctaatcgactcctacaacctcaccctgccatcgatgtacatctcctctcttattctatgcttgcgtgccatgctccaaatggaccttccacatctcaacgtcctaacaaaaatcgataatttgtccaattatacttcgctgcctttcaacctagatttctacaccgaggttcaggaccttacatacctcctcccccacttagaggcagagtcctcccggctatcgcacgagaagttcggagcactgaacaacgccatcatcacactgattgaggagtttggactcgtgggcttcgaaacactggctgtagaagataaaaagagcatgatgaatttgctccgggccattgaccgcgcaagtggatacgtgtttgggcctgcagaaggcgcaaatgactccgtttggcaagtggctgttcgggaaggaatggggtccatggatatccgtgatattcaagagcgttggatagatgccaaagacgagtacgatgagttggaacgacggcagcgagaggaggagataaaaaatcaccagcaagctgcaacctaccaggcagggaacgaggacgacgacgatgataacgattacgaattcgggcgcaggatgcct

SEQ ID NO: 19465 - DNA, 991 bp, Emericella nidulans
tccccgtctgcgcctgcttaacaaattgcgccgaaatgaatacccccttatgacattcatggctttgccatctgtgcgcattgcccagatcctctcactcaccggcctagacggtataatcatcgattgcgaacacggccacatctccgacgacagcatgcacaacgccgtcgccgcaatctccgccctaggcgtctcccctataattcgcatccgcgggccagcgcatgatatcataaaacgtgcgctagatacaggcgcgcacgggatcatggtccctcaaatcaacaacgcggatgaagcgagggcgatcgtggcttcttcaaagttcccgcctcaggggctccgcggtcagggctccgcattcccggcgatagggcacggccttacgacacctgaatacatgaaatccgcaaatgagacgattatcacaatgatccagattgagacaaaagacggagtcaagaatgtcgaggagatatgtgcggtggaaggggtggatatggtgttcatcgggccgaatgatctggcgatgagtctgttggggtatgtccctgctagaggggatgagcctgtgtttgttgaggctgtagagaaggtcatttctgcggcgagaaagtatggaaagtgggcagggaggatggtcaatgatgggactattgcgaaggccgagagggagaggttcgacaccgtcgcggtaacgggggataccaaggcgatcacgaattggtatgtgaaagagtttgatatcgctagatcgtagactacatagacttgcttaatatgggttactgttttgttcacaaaatcactgtacgagtacgcttcaaaagtttgtaagcggacttcgtgaacgtcacccgttcatgatagctcctcactctcgcaatgtatgctttaagtgttggtagatgatataatgtcgacagaagaatatccaagacagtttacagctggttatagagtaagtttggtcacaaaatggtaggta

SEQ ID NO: 19466 - DNA, 991 bp, Emericella nidulans
tgaggcatacaagccgtctcccactatgtttcaagatcacttccatccagtcggctgcttcaccaccgcctcccaatctatccccctccgacagcgaaccgccaggacgccatcgccatgactctgatcttacccctctggattttgttgaccctcgccctagtcgcaatcgccgacgagcagaccgactgcaaccccctcaacagcacctgtcctgctgatcctgcgttgggcaccgagcatacctggtggttcaactccacgctcgatgatgctctctggaacatgacaaccggtacccctgactatacatctgaaggcgccgagttttcgatcaagacggagaacgcttcgaccctgttgcagtcgaacttctacatctttttcggcgtggtggaggcgcacgtcaagatggccaagggcgccgggatcatcagcagcgtggttctccagtccgacgacctggatgagatcgattgggagtgggttggatacaatacgagcgaggtgcagtccaacttctttggcaaggggaacacaacgacaagcgatcgaggcggattccatccggcggcggatgcggataccgagttccacaactacaccacctactgggatgagaaacgtctggagtggtggattgacggggagctgatgcggacagtcaactactctgagcccttgacggtctacggcaagaactatccgcagactccatgccgggtcaagatcagcgtctggcccgccgggctcccgacgcagtcgataggaaatattgaatgggctggcggccttgttgactggtctgacctccctttcacaatgaccgtgcaacgggttcgagtcaaggacttccaaagcgccaaagaatatacctattctggacactcgggttcatacgatagtattaatatcgtcaggtcagtctctgctgtacatgacaccaatttcagaccgagtagctaacccctacagtggaaactcgaccgcg

SEQ ID NO: 19467 - DNA, 992 bp, Emericella nidulans
gtatcatcatctccaactcccggctttctcaccgcattgcttcaatgacaacattcatctggatattttgctgcacgcatatcgaaacatgaccgccttactgaagaagcccctcaaacttgccttggtgcagcttgcatcaggtatgtctttcctcaatctgcttagcgttcaatctaataggtgtcggaacacaggcgcagacaaagccgctaatcttgcccacgcccgtacgaaggtcctcgaggctgcaaaggccggtgcctccttgattgtccttcccgagtgctttaactccccatacggcactcaatattttccaaaatatgccgaaactcttcttccgtctcctccaacaaaggaacagtctccgtcctatcacgccttatcagctctcgccgctgaggccaaggcgtacctcgtaggaggcagcatcccggagcttgaaaccacatccaagaaatattacaatacgtcgctggtattctcaccgtccggcgcgctcattggaacccaccgcaagacccacctgtttgacatcgatattcccgggaagattacattcaaggagagcgaagttctgtcgcctggaaatcaactgactattgtggacctacctgactacggcaaaatcggtctcgccatctgctatgacatccgtttcccagagcccggcatgactgctgctcgcaagggtgcattcgcactgatctatcctggtgctttcaacacgactactggtcctttgcactggcagttactcgctcgcgcccgcgcagttgacaaccaggtgtatgtggcattgtgcagccccgcacgggacacaactgccacctaccatgcctacggccatagtctggtggcagatcccagtgcgaagattctgtcagaggcagaagagtcggagactatcgtctacgccgatctcgaccccgagacgattgaaagtacgcgaaagggtatccccatctacacccaacggcggttcgact

SEQ ID NO: 19468 - DNA, 992 bp, Emericella nidulans
tcgtcctcgtcggtgacggtggtactggaaaggcaagtttctttgcacccctcgggatccaaaccatcctttagtcgttttcctattttcaatatctttcattattcgactcgtccgtgtggcttcttcccacatattcgcaacgactatcaacgaggcaaaactcggccccgcgcctttcagatcggcacgaagaacgtcgactaacctgagattttctcccttcgcagaccactttcgtcaagcgccacctcactggtgaattcgagaagaagtacatcgctactcttggtgtcgaggttcaccccatcaaattcaccacggtatgccccgctgttgaccccgcttcggcccttccgccgtctcttttgtcgccccgactaacgcaggtatcagaacctgggcacaatccaattcgacgtttgggacacagctggtcaggagaagttcggtggtctgcgagatggatattatatcaacggacagtgtggtatcatcatgttcgatgttacctcccgtatcacctacaagaacgttcccaactggcaccgtacgtgctctcatgcccttttagcagaacgtcactcacaaatacataggtgatctcgtccgtgtctgcgagaacattcctattgtcctttgcggtaacaaggtcgatgttaaggagcgtaaggtgaaggccaagaccatcaccttccaccgcaagaagaacctccagtactacgacatctccgccaagtccaactataacttcgagaagcccttcctgtggcttgccaggaagctggtcggcaacgcctctttggtcagtcgattcctgggtacccgctgcatcacaacgcatactgacagaaacttttgtaggaattcgttgctgctcccgcccttgctcctcctgaggtgcaggtcgatgccaccctcatgcagcagtacagcgacgagatggccgccgccgctaaccagcccctgcccgacgaggacgacgccgacct

SEQ ID NO: 19469 - DNA, 993 bp, Emericella nidulans
cctggcctggggtacgagccactacatcggccacgtcatatcctggaaattgctcttccttgttcttggcgccgcaacctgtgcctggggtctcttcctgagctggtacatccccgacaggccgatgaaagccaaatgcttcagcgaggctgagaagcggctaatggtcgagcgggtgcgcgccaacgacactggaatccagaacaagcagtataagcgctatcaagcggtcgaggcgctcatggattcaattgtttggttatgcgtgctcctccagctgagcagcaccctggttatcggtagatgggtgtgttttcgaatatcatcatcaagagttttggatttacgactctccagacgcagttgttgaatatcgcgcaaggcggggtgaccattgccgtgatggtgggtggtgcgtcgctggcaacgtggacgcgccggacggtgatgataatgcatctgtgcactttgtacgtccacctttttatcccactcaccagctatatttctgactggtgacgggaatagcccagctattgtcggcaccgccgtcatctactccatttctcctaccgcagcatctagagtaggcctcctgattgtcttctactgcacgcagttcattctcgtagagggcaacctcctcttctcactgatatcacgcaatgttgccggccagaccaagaggtcgactgtgcttgcgatgacctttatcgcttgggctgctgggaacgccactgctccccaggtacataccgtagctactctctttcactaccgcctgtctgtcagcgcaggtataacaggtgaaaccacatcttccaatctagcgacgccccgcggtacgcaaaaggcttcacggcgcacttctgtctatatggactcttcaacgtcctcatcgtcgcgttgcagatgttgtatatctggcggaatcggcagacagctgcctccagggccccggggtgaaggcgaggaacgggaccacgcaaatgc

SEQ ID NO: 19470 - DNA, 993 bp, Emericella nidulans
ggctcaataaactaacatcttctctgcaaaacagtcatattcaaccccccaaataccgctgtccccgatgctcaactcgaacctgctcgcttccttgcacgcgccgccacaagctctggtcgcagtgctccggagtacgcgacccagccgcgtacctacgacgcaacgagctcgccacggaatccgcctttgatcgagactttaatttcattacgagtatcgagcgacggctagagcgagcaacgcgcgatgcggagaacaggggcgtagtggttgatgggagacagggagttagggagccgggaattgtggggttggatgaggatgagctggggcaagctgatgctatggatgggaggaagagaaagcgcgcgggccctggagccgggaatggtattggtcatggttttgagagggggttggcgaagggcgaagcgggatttctgaagcgagcggctgaggcaggggtgagggttatcaaggctccgaaggggatgagtcgggcgaagatgaatggctcaaggtggcatacaaagtgagtgttcacattattcacgtatcttcctacgtcggactttgttaactgttattgcggtataggcagaaatgtctgcaatggacaatcgagtgggtgacggacaacgggacgaaaaggatgaattgcgcagagaccgcgactgttgcagaggcatatgatcgcgcattcccgctgacgagggaggagagacaggtccgcactgaggagtctacatttaaatcagagcccaagctcgcgtccgcgcaggaaccggcgaaggaatctacgcaggagaccaagaacgtcgagcccgacaaaaatgcagagccctcacaatcgcaatcgcaaacacaccagccgcctaaatcagacatgtcgttttctgaatctatgccggagaccgctcagccacacgtcctttcttcaaacaaccaccctacaccggctcaagacgacacaacacaaccgacatcaga

SEQ ID NO: 19471 - DNA, 993 bp, Emericella nidulans
gcgttatctcccatccacatgatgcttatgaagagtgatatgctaaaaagctgcaggatgatccagatccagatctcttcgcgactgaagtgcgcaattgtgcaggatcccgagttacctttgcagtatggagcgcaaaagtatatagtctgctactgtctccctagagcgtatcgctaaccagtcactgtgctgtctccgtctcgcagggccaaagaacgcacactatctcgattgccgttcccccatcaaatccaacactcggcctagccctgcaattagctcccctatcctctacacagaacatctggcatgtcctgaatatcccgtcgcccctgagccctgcatatagagccggtcttctccctcactccgattacattatcggcacacctagcggcacattaagaggcgaatcggcattaggagaattagtcgaagaccacctgaaccgtactctagtgctgtgggtctataacagcgaattcgacgtggtgcgaactgttgatctggtgcctacacgaggctggggtggcgaaggtgccctgggggctgagttgggttttggagcgttacatcgactgcctgtggggttgggcgaggaagtcgaggggccaggggaggtggtgtttgaaacgcgcgctgatggagtgtcgacgcctattcctgagccaacggcttcgtctatgcctacgcaagctggaattcctgggcaatcgccgcagttccttgttccggcgaatataacctcgcctccgcctttggcacccgcggcttcggctccccaagtgtcgcaccatgggagaaaggcacgagggaatgccagagcttcacctcaaagagcgtttgatgattattttgcagagggcgaacagaaaagcaaggaacaggatcatgtaccgtcacggagaggaacaccgctcccgccgccgcccaaggctgggcaattgcaggagcaaaaggaatccggatagaagagatttgtttacgact

SEQ ID NO: 19472 - DNA, 993 bp, Emericella nidulans
acgcagtccgacgcgacatcgccgcgcagctcaagaagcccggctacgatgatggtagcgcaggccccgtcttcgtccgtctcgcatggttcgtccctgatacagaacttctcttgtatcccgacggtgaccgctaacaagcttttaataggcactcctccggcacatacgacgctgcaagcgataccggcggctctaacggcgcgggaatgcgctatgaagccgaaggtggcgacccggcaaacgccggtctccaacacggccgcgccttcctagagcccgtgaaggagaagcacccctggatcacatacagcgatttgtggacgcttgcaggcgtcgtcgcaatcgaagagatgggcgggcccaagattccgtggctaccgggccgtaccgactttgtcgacgactccaaggtgcctccgcgcggacgattgcctgatggcgcacagggcgccgaccacctccgcttcatcttctaccggatgggcttcaacgaccaagagatcgtggcactggcgggcggacacaacctaggacggtgccatgctgatcgctcagggttccagggcccttgggtgaacaatccgacgcggttctcgaaccagttcttcaaactgctgctgaatatggagtggaagcccaagacgttagagaacggtgttagtcagtttgtgtatattgatccggaggcggaggaccatgaggagccgctcatgatgctaccaacagacgttgcgttgagggatgatcctgcgttccggccttgggtggaacggtatgcgaagcacaaggatctcttctttgaccacttctcgaaggcatttgccaagttgattgagttggggatccagagagatgcgagcggcaaggtcacgaataccgataacgtcaagggtggctaccactctgcgcccaagaagagcgatgagccgactgggccgccccgtccgcatacagctcagcgtgctgctaagctgtaggccgatgctgggg

SEQ ID NO: 19473 - DNA, 993 bp, Emericella nidulans
ggggtgcgaaccagatggtgattgcaacgaagtattcggcgcagtaacgaagtcatgattgggataatgagccgtacagagcaattttgtgggtaactcggcaaagcgtatgtttgtgtctgggagggatagtctgaagaagctgagaacagactatgttgatgtgctctatgttcactggtgagttagccagacgtattccttgcaagttgacactgatcttgtaggcgtaggtgggatttcgctacctcggtggaggaagtcatgatccatctgcattcacttgtcatgtcgaggcaggtactgtacctgggggttttctgacatgggtcgttgtcaaggccaacgagtgtgggttcatatattgagattctcgtccccgaaatcaactaacatcatccccgatagtcgctcgaaaaaatggcatcactccgttttcaatataccaaggcaaatggaacgctgcgttccgtgatatggaagccgagattataccccatgtgtgaggaccagggcatggctattgtcccttgggcggcgctcggcgggagcctgcttctatcttgccaacagaggcaagagcgtgagaaaaagcaggctggccaaaagagcttttacgaattgggtccgcatgagctcacggtgtctggcgcactggaaaaggtcgctgttgccaagaagactacagtgcaggctatcgtgagtcaacactctatcccaaactcttgaaacttcagtgtacggactgctgagcagctaaattaggccctggcgtatttgttccacccatcgacctacgtagtcccaatcgtcggcgtccagacgatagaccacgtcaaggggatgaatgatgcaataagtgtcaagtctcgcccgaagagatccagtcaatacaagatcgtgcgccgttcaaccctctttttcccatgaacttccttaatcaactgcaaggatggcaaggggttcaggactcggttgacgccggtggaccat

SEQ ID NO: 19474 - DNA, 994 bp, Emericella nidulans
acacccttgcaaagaagatcatctttagcggaactaaagctcgaagcgtcaaggttgagactctcggcatatcttacactctcacagcaaagaaggaaataatcgtttctgccggagccttccagtctccccaaatcctaatggtttctggaattggaccaaagtcaaccctgcaagagctcggtataaaagtcataaaggacctcccaggcgtcggtcaaaacctctgggatcatgcactcttcggagtcgtcaatagagtcaatgtcgttactgctagccgccttgtgaacgacgccctcgccgccgcagaagctttagcccaatacgccttccaaaagggacccctcactgctcccggtttcggcgtcctaggctgggaaaaacttcctaacgatatccgcaagcatctcacaaacagcactcgtgaagcgctctccgcctttccctcagactggcccgaagtcgagtaccttagcctcgatggcattctagatggttggcacagcgccgatgaccagaacttaggagacggctacgaatacggcaccattgcggccgcccttgtcgcccctctctcgcgggggtctgtctctataaacagcacagacaccgccgaacccccccttatcgaccttggttacctcactcaccccgcagaccgggaagtcgccgttgcagctctcaagcgcgcccgacaggctttcaacgcatctggtgtcacaattcccggggttgacgagcatcgccccggcccggatattcagaccgacgaggagatcttggattttatccgctcgactatcgtgcccgtttggcatgctgcagggacgtgtgcgatgggtaactctagcaaccctgatgctgtggttgactcgaatggccgggttattggagtacagaacttgcgcgttgttgatgcaagtatctttccaactttgccgccgggacatccgcagagtacgtgctatatggttgccgagaagatcgcgga

SEQ ID NO: 19475 - DNA, 994 bp, Emericella nidulans
tggtctgcagcgagcccttgcttgttggtgtcggtattgtcatcaggtgtgtcctcatgtcttccatatcgctcctgctgaatgatggagctgatttggttgaaaagctacttctttgactatggcatgagcttcgtcggtggccagattgcatggagacttcccattgcatgccaaatgctgtttgcactcgtaagtcttgcccagttaattttctttcttttttgctttttcttcctctttttccttttttttccctttttttggtggtatactcaccccagccaggtcgtcattatcctcatcttcggagtccctgaatcgccacgatactgctaccaaaagggacacaacgaacaggctttgcaaattctaagcgacgtctatggcaagcctaaggatgaccccaagatccaggcggagcaaactgagatcctcgaggcgttggctgtcgaaacgaagaatggcgagtacaagtggaggaatatcctcaagcccgatagcgtttcaaccggacgcagagtgtaagtcaagcgtagcccccgcgaccatgacaaatcgctgactcggttatctagtcttctcggctacgggatgcaattcatgaatcaggtcggcggaattaacctcatagtgtacgcctcctcttctccctgactgagctatcaaacgtctacctgagcaacactgatagcccacagatatttcatcccaaccgtccttcacgacaatgtcggcctaacccgcaacctgtccatgatcatcggtggctgcgtccagatcatgtttgtcctcggcagcttcttcccaaccttctttgtggacagggtaggccgccgcgcacccatgatgtgggggtcgttcacccttggagtctgcatgatgatggtgtctatcctactcagcttcaagggcaaggagaatgagcacgccacctcttcggcatccgtcgcctttttcttcgtctacatgtttgcttttggcgcatccgtca

SEQ ID NO: 19476 - DNA, 995 bp, Emericella nidulans
gcctcgtgattaccatgtcgcagtggtcttgacagctacagaagcccgttttggatgtgtgctttgccgcgatttccagccagagttcgaccttattgcgcgaagttggaacaaaggcagcaaaccggatgatctcaagctgcttttcggtactctcgattttcgaaatggcaaagcagcgtttcagaaagtattcaatagcgccgcttcgatgattctcggctaatgaagaatacagctaatgctccaaactgcgcctgtccttcttgtattccccccaacggtcggccctcacgccaaagttgacgacagcccatcgcgatttgactttagcgggtaatgcctctagaatccaggcacattagcgcaaatttggctgacagacattatccgctagtcccgtttccgccgaccaagtctatgcttggatcaaccgtcagcttcccgatggaccaaaaccaccactagtacgcccgataaattacatgagaattgtctcaggtatcacaattttaatgggggtcgttaccctgttcagcgttctgtcgccttatgttctcccagttgtcagaaaccgcaatctttgggctgcgtttagtctgattgctgtcctcttattcactagtgggcacatgttcaatcacatccgcaaagtcccctacgttgttgcagatggcaggggtggtatcaactattttgcgggaggtttctcaaaccaatttgggatggaaacacagattgtcgccgcaatctgtaagttacttagagacccccgtctgcatttacacctaaggcttcagatgctaatacgcagctccaaagatgctgtgctctccttttctgcaatagcattggctatgaaggtgcctcgcattgcggacaacaagtctcaacaggtggccgtggtcatctggggggctgtgctccttggaacatacagcttcctcttaagtgtttttagagcgaaaaatggtgggtatcctttcttcctcccc

SEQ ID NO: 19477 - DNA, 996 bp, Emericella nidulans
tcaggctcagacccgtcaggtctttttttcgtcatacctcgttactcctaaagagctctcagatgccctgaagaagaatccgtctacgaagatctcgacttctccccgcgtaatacccttatgcgcagcttggtttatgcccaatgaccctgagggtcgcacagggattgatgtttttcgtaaacaccgtgtaccacaagctcgcttctttgatctggatgctattaaggatactgagtcgccttacccgcatatgcttccaactgcagagacgttcgcccaagcaatgagtgagcttgggattcgacgtgatgatgaggtggttgtctatgatacggaggagctcggaatattcagtgcacctcgcgttgggtggacactcagagtgtttgggcatcccagagttcatatcttgaacaactacaggttatgggtgcgcgatggctacccgacagagaccggcgagcctcgtcaaccggagaggacgaactaccctgtgccttcatacgactcaaagctcgtgattccatttcgtgagctgaaggagatcgccaaggagcatcgcaaggagggtgcgaaagaagttgaaatcctggacgcccgatctcagggcgctgggcgggaactgaccctgagccgcgccccggtctatcctctggacatatccctggatcaatgagtctcccgtttcaggaattgctggatcctgagaccaagacataccttcctccagaccaattacgaaagattttcgagtcgcgcgatattgatgagaccaagtctatcatcagctcctgcggtaccggcgtgacagctactatagtcgagacggcgctggggctggccgaatacggtgaccctagtattcgaagagtatacgatggaagctggacgtaagtgatctttcctcaacgcggcttttcatttacttaacccatgcacagggaatgggctcagcgtgttagaccaacggatggattgattaagaaggcaacc

SEQ ID NO: 19478 - DNA, 996 bp, Emericella nidulans
cccgcgactatcccgcaagagaggatacgaggatgaagacgtactcgagtccggtcttaagcctgggtctgccatggacttcatgtcgaaaggtcttaattttgcctctaacgtcctttccagcgtcggcgtgacgtccaagagcagcgatcccaacgccgacattaatatcttctccgtcgcaagcggtcacctttatgaacggatgctcaacatcatgatggtctccgtaatgaagaacacaaagcataccgtcaaattttggttcatcgagcaattcctctccccctctttcaagtccttcctcccaaacctcgcttccgagtacggcttctcctacgagatggtcacctacaaatggcctcactggctgcgcgctcaaaaagaaaagcagcgcgaaatctgggggtacaagatcctcttcttagacgtcctcttccctctttctctcgacaaggtcatcttcgtcgacgccgaccaaattgtccgcacagatatgttcgaccttgtcagctaccctctcgatggagcaccctacggcttcacccctatgtgcgactctcgcgaggaaatggagggcttccgcttctggaaacaaggctactggaagaacttcctccgcggcgcgccctaccacatctccgccctttacgtcgtcgacttgaaccgcttccgcgctcttgctgccggtgaccgcctccgcggacagtaccagatgctctcggccgacaagaacagcctaagtaacctcgaccaagacctgccgaaccatatgcaacaccatattcctatcaaatccctcccgcaggaatggctgtggtgcgagacgtggtgttctgatgagagtctgagtcgagcgaggacgatcgatttgtgcaataacccgcaaacgaaagagccgaagttggatagggcccgaagacaggttccggagtggacggagtatgatgacgaaattgcagcgttggcgaggagggttgcggcgagtgaggttga

SEQ ID NO: 19479 - DNA, 997 bp, Emericella nidulans
gtctgcgatcttgttatttccatgctaacaagacctactagtaaacggccatgtcgaaagcgacttcaactaccagacaggaacctggtccgaacccgtcttcgtgcaagaccattacctcaaagtccacggtctagcacccgggctcaactacggacagcaggtgtttgaggggatgaaaggtatgtcacctccttgtccatactcatcatccccgtcttctaattgtgccatgccagcctatcgtgaccccaacggccagattcaaatcttccggcccactgatcacgccctccgcatgcaacgttcttgtgatgctgtttctattccctccattccggagtcactcttctgggcctccgtcaatctcgccgttgccaaaaacagcgagtttgtgcccccgcacgccagcgaggcagccatgtacatccgccctctcgctttcggctccggcggttggatgcccgttgccgctgggccgcagtataagttcgtcgtatacgctttgcccttttgcgcataccatggcaccttacccgttgacgcagtggtgctggaggagctggaccgcgcggccccgctgggcgtgggcaacgtcaaggtaggcgggaattatgctccagtgttaaagtggagtgataaggcgaggaaggaggggtttgggatcacgctgcacttggatagtaagaccaggggcgagattgacgaatttagtacgtcagggtttgtgggaatcaagtatactgaatccgggggtgaaaaagggtacacgctggttgtgccaaacagccagtgcattatcaagagtgtgacaagcactagtgttgtggaggtggcgaggtctctgggatggagggttgaggttaggccggtgagttgtttcctttacatggaatctttcccacatatcacaggctcaggggctgattggtatttgaatagatcccgtacgacgagctggaattttttgatgaggttcttgctgtcggcaccgctg

SEQ ID NO: 19480 - DNA, 997 bp, Emericella nidulans
gcccccgctggcttatctcctgcgacagacacgaggctgcgatccgcgtgctcgccgaatatcatggtgagggtgaccgaaactcgcccctcgtgcagcttgagtaccgcgagatgctcgaggatatctccaacgtcggtgctgacaagcggtggtgggactaccgggagctttttgatagtcgagagacgcggtaccggtctatgctcgttgtgttcatgggtacttctcccaatccttcgcttcagacatataccgaggaagtggtatgctaatgagtgatcttcagccttcttcggccaatggtctggcaatggcccggtctcctactactacccgcaaatgctcgcgggcgcaggcatatcctcaaaccacacacggctcctgctgcaaggtctgcagaatatcgtacaattcaccggcgcaatctttggcgccctgatcaccgaccgcgtcgggcgtcgtccacagctcctcgtatcaacatcgatcattgtcttcctcttcgtgatcatcaccgcgctgaacgcgacaaacgtccaagttgccggagacggcggcggagtcgtcgcaaagagcagcgtcacgcggcgcgcgcagatcgcgatgattttcatctttgggttcgtgtattcggccgggtggacgccgaatcaggcgatgtaccctgtggagtgtctgcggtatgagagccgggcaaagggtatgggaatgaataacgtacgcaccctttctctttatccggttctgttttcatccacgtcaagtatttgtgccatgatggccatggctaacaaaggaggtagtttttcatcaacatcgcctccttctataacacctttgtgacaggaatcgccttcacgcggattgggtggaagtattatttcctctttatattctggtgcacgtttgaagtgttgataatctatttcctatttgtggagacaagtaagcgtacactggaggagttgacggtgatctttcaacaaaaacgacc

SEQ ID NO: 19481 - DNA, 998 bp, Emericella nidulans
aaactgggcttttctggcgtatgccgccttttctttgtctatcttccattaataggccaggaatgaggaaggataagagtcggatatctataatatgctgtgttaatgcctccggatctgattgattactactctgggtaattggaaatgcacgtatgccacgagctcttcgcaatatcaatatctcagcaattgggattcggtggcaatggaacaaaaaagcctggatgaaccaaattatcatgcgagaatggctcctggacttctatcaacatattggccagcgatcagtccttcttgcaatggacaacctccctgcacatctttctggcctagagctggcaccaccacctcccaatgtacgcatctgctggctcccaaagaattcaacaagccggttccaacctcttgatcaggggattatccagaacctgaagatctattatcggaaacagtggttaagatatatgctttcttactatgaaaggaacctggatccgctgcaatctgtaacaattctagattgcatacgatggcttgtacgggcctggcatcatgatgtccaaagctcaactatcctagcctgcttttataagagcacgctagtccaggatcctatagagcttccagttgaagcacctgatctaaggccactttatacgcaggtacagcaatctggtaggctatcagactgcatggatatctccttctttctcaaccctgcagaagagtctccagagccaattagctctgggaatgagatatcctcagatgcattacttgagcaactaattgctgaggcttctggaaatgcagatatatatcctaatgatctggatgatgatttaggcgagccagcccctcttccaaagcctcaggatgctcttgatgctgtacgacttctaatctcttatatggagggtcaggatacgtccaaaacacctattcttagatctcttgagcggttagagcgagatatagagggtgaaattatcacg

SEQ ID NO: 19482 - DNA, 998 bp, Emericella nidulans
tcgcggctcctttctccgttcaactttgggaatgtcttgtccgtgtcttttcgcagtattggcgcagccctgtctacatctactccaaggccgcactgagcatcctgacttcgctctacattggtttctcgttcttccaggcacagaacactagacagggtctccaaaaccagatgttcagtatcttcatgctgatgaccatcttcggtaaccttgtccaacagatcatgccaaactttgttacccaacgcgcgttgtatgaggtccgcgagcgtccttccaaggcttactcctggaaggccttcatgacagccaacatccttgtggagctcccctggaacaccctaatggctgtcatcatgtatttctgttggtactaccctgtcggtctctaccgcaatgccgaacccaccgacagtgtccatgagcgtggggctctcatgttcctgcttatccttgccttcctcctcttcacctctaccttcgcgcacatgatcatcgccggtattgaaactgccgaaacaggcggtaatatcgcacaattgctcttctccctttgcctgattttttgcggtgtcctcgccggtccggacgtcctcccgggcttttggattttcatgtaccgcgtctccccgttcacttatcttgtttctgccatgttatcgacgggtgtttctggtacgaccgcctactgcgaacaggtcgaatacttgacgctctacccccctagcaacaccacctgctccgagtacatggacccctacatctctcaggttggcggttaccttcagaaccctgacgccacgtccgagtgcacattctgccaaatctctagcacggatacctttttgtccgccgtctacagtaactacgacgacgcgtggcgcaacttcggcctgatgtgggcgtacatcgccttcaacatcgctgccgccgtcttcatttactggcttgcgcgtgtgcctaaggggaagaagaattaaagtccggcttaaatc

SEQ ID NO: 19483 - DNA, 999 bp, Emericella nidulans
cgagagtgccggagtcgtcctgcaggtgggcgacgcggtcacccgatttaagcctggtaagagccacctcttgctgattttctgggaattgagaaggacccgcgctgaagcgcatgacgacaggcgatcgggtggccatggaatgtggcgtaccctgctccaagcctacctgtgacttttgccgtacaggcaagtaccacgcctgcccagacgtcgtcttcttttcgacgcctccccaccacggcactctgcgacggtaccacgcccacccagaggcctggctgcatcgtctccccgaccacgtctcctttgaagagggcgcccttctcgagccgctaacggttgccctggctggcattgaccggtccgggctgcgtctggccgacccgctggtcatctgtggtgccggccaatcggcctcgtcaccctcctggcggccaatgcagccggggcagcaccaattgtcatcaccgatatcgacagcaaccgtctcgccaaggccaaagagctcgtgccgcgcgtgcagccggtgctggtccagaaacaggagtctccacaagagctggctgggcgtatcgtccagcggctcggacaggaggcgcgactggttcttgaatgcactggggtggagagcagtgttcatgcagggatctatgtaggttttgggactgcgacggcgtttctgaagaaaatcctctgacgatctcaatgcaggcaacccggttcggaggcacggtgttcgtcatccgcgtcggcaaggacttccagaatatccccttcatgcacatgtcggccaaggagatcgacctgcggttccagtaccgctatcatgacatctaccccaaggcaatcagcctggtcaacgcggggctcgtcgacctgaagccgttagtgtctcaccgatacaagctggaggacggccttgaagcgtttgctaccgcaagcaatacagctgccaaggccatcaaggtacagatagtggacgggtagagtgttcgt

SEQ ID NO: 19484 - DNA, 1000 bp, Emericella nidulans
ccgcttcgagcgacggttacaaacactcgtcgtcttatgccataccttgacaattgctatatgtctcggagttttttttttcacctgtgctatacctctgtcctggcctctgctgctaccctatttgattcatatatcattattctcgaatgcggccacatcgggctcgttaaaatataggagtgattttttacgatcgctccctatctggtcactttacgcctcttattttccggcccgtctacaccgctctgcacctctcctgccaacaaggaaatatgtatttggatatcatcctcacggaatcatttctcttggcgcatttgcagcgttctgtaccgaggctctacgtttttcgaagcttttccctggtatcacaaacacgctactcacactggattccaattttcggataccattttaccgagagtacgcactttcaatgggtcttgctagtgtctcgcgcgaatcatgcgaaaacctcctcagtaaaggcggaatagacggcgaaggcatggggcgtgctataacgattgttataggtggtgcgcgggaatccctcaatgcatcaccaggctcattacgtcttgtcttgaagcgacgtatggggttcataaagctagccatccgcactggtgctgaccttgtaccagtcttggcttttggagaaaatgatctatacgaacaggtccgttcagatagccatccccttattcacaagttccaaatgttggtgaaacagacactgggattcaccattccgctgtttcatgcacgcggtgttttcaattacgatgttggcttgatgccgtaccgccgcccgctgaatattgttgtcggccggccaattcatgtggttcagcaacaggacagaaacaaaatcaatgacgactatattgatcaactccattcagagtacgtgagagaacttgagaggctgtgggaagagtggaaggacgtctacgccaaagaccgggtttctgaaattgaaatagtggcc

SEQ ID NO: 19485 - DNA, 1000 bp, Emericella nidulans
accgataaagcgcgcggtcaagaatgtcatgatcgttacaaaggcgcgtgataatagtctagtccacttgactcgtgaattggcggaatggctcctgtctacaccacgttacgggagcgacctcggcgtaaatgtgtacgtggatgctaagctacggcattcaaagcgatttgacgcccagggcctgattcagaagaacccagcttatgaacatatgatccgctactggactccagacctctgttgacatctccagagaagttcgaccttgtcgttacgctgggaggagatgggactgtcctgttcacgtcctggctgttccaacgtatcgtcccgcctgtcctttgtttttctctaggcagtctggggttccttacgaactttgagttcgaaaattacaagtctcacctgaacgcagtcatgggcgatgtcggtatgagagtcaaccttcgaatgcgattcacctgcacagttttccgaaaggaccggagtaagggcgcggaagccggtgcggtggaagaaggcgagcagtttgaggtgctcaacgagcttgtcatcgatcgagggccgtcgccatatgtgtcgaatcttgagctgtacgcggacaacgatctgcttaccgttgttcaagcagatggctgtatcttttccactccgactggtatgtatttcagattacgttgaaagccaggttacttactcccataggctccactgcctactcactgtccgctggcggctctctcatccacgcctctattcctggaattctcctcacacccatttgtcctcatactctatctttccgtcccatggtcctctccgattctcttctcctccgcattgctgtcccgtcaggtcctaggtcgacggcatactgttggtttgacggcaaaggccgtgtagaacttcgccaaggtgactatgtcaccgtcgaggcgagccaataccccttcccaaccgttgttgccaacaatggagagtggttccagagcgtcca

SEQ ID NO: 19486 - DNA, 1001 bp, Emericella nidulans
caccagcacccgctcaagcaactcttctgcaacatccgcaacacccacacccacacagacaagaccatcactcccgagaacctcttcgtcggagtcggatcagacgaagccattgacgcccttctccgcgccttctgcgttcccggtaaagacaaaattctcacctgccctcccacatacggcatgtactccgtcagcgcggacgtcaacgacgttgagattgtcaaggtcccgctagacacggacaacggattcgcgctacagcctgaaaagatcaacgccgcgctctctgccgaccccacaatcaaacttgtttatatctgctcgcccgggaatcccactgcaactcttgtctcaaagtccgacatccagaaagtgctagaacacccgacgtggaacggcgttgtcgtccttgacgaagcatacattgatttcgccccagagggatccagtcttgcagaatgggtggctgagtggccaaaccttgtcgttatgcagacactcagcaaggcattcggccttgctggaatccgattaggcgttgcattcacaagtcctgagattgctacccttttaaacagtctaaaagcaccttataacatttccagtcctactagcgcactggcaatggcggctcttgggaaccctaagaaccttgaggtcatgcgatcgtatcgctccaagattattgctcagcgcgaccgaatcctcaaggagcttccctctatccctggtattggacgttccgcggtggtactgagtcgaatttccttcttgtcgagatcctcgataagcccgcggatcaaggcgggaagcccagcaaccccgtcgcgctagcgacgtacgaggctatggctgagaaacgaggcgttgtagtgcggttccgcggaaaggagttgggttgcgagggctgtttgaggattacggttggaacagaagacgaggttacgaggttcttggaagagatcagacatgttctcggtggattgcttaacggtaat

SEQ ID NO: 19487 - DNA, 1001 bp, Emericella nidulans
  unsure (1)..(1001): unsure at all n locations
cacgaccggccagttcctcctccggctcgaagacgggcgcgtcattgatacaaagtcctgggccggatgggaatggacgcacggaatcggtctgtatggcatctggaaatactacgagatcacaggcgacccaaagctcctgtccattatcgaagaatggttcgccgcacggctggcggaggggacgacgaagaacatcaacaccatggccgtgttccttacgctcgcatacgtctacgagaagacggggaaccagagctacctgccctggctggattcctgggctgaatgggcgatgcacgagctcccgcgcacaccacacggcggtatggcgcacatcacctacctctcagagaaccaccaccaccagcaactgtgggacgacacactgatgatgacggtcatgccgctggcgaagatcggaaaggtactcaaccggccagaatacattgccgaagcgaaacgccagttcctcatccatatcaagtaccttttcgacaccaagacagggctcttcttccatgggtgggagttcaatgccaaccaggcgacgggacatggacataacttcgcgaatcgcgctgggcggnngaacagctgggtgacgatcgtgataccggagttcattgagctgctggatctgcaaccgtccgacccgatccgggtccacctcgtcgatacgctgattgcgcaggtagaggccctgaagcggttgcagacaaatgatgggtactggcgtacgctcctcgaccacgaagactcctacgtcgagtcctcggccacagccgggtttgcgtgggggatctcaaagccgtgcggaagaggtacatcggcgccgagtacagagaggtcgcagagaaggcgatccgggctgtggtggccaagatcgacgatgatggggagctgcaaaatacgagcttcgggacgggaatgggcgatacattggagttttataaacagattccgttaacgagcatgccgtatggacaggcgatggcgca

SEQ ID NO: 19488 - DNA, 1002 bp, Emericella nidulans
catcctcggctgtttcttcggttgtcttttcgtcggctacgtcttcttcatgccctacttccaccgccgcctcgtcaggcgtgacgcccgcgttcgcttctaccatatcccacttggacccctcctctggactgaaaacccgcctctctatttccctcgtgagggtgaatgggccattacaaaccactacgaggatgcatacggtgaggtccgcgcaggcgacatacagactatcaccgccgctgtggccggcagcgtccttcctcctgcggacggaaaagaagccagggacacagacattgagcgccagcccgactcgcttgcttcaagtcccgaaatcgcacccaaaaagcgtatcattgagcctgaagaacgcttcctcgaccccgtccgtgatctctcttggggtaacccccggaagtggcttggctacatcaaatacgccttcctgcagggtgtgacccgcgacgtgatcacgcacgattcccagctcctccgcgacattcatgcccgtgcccgtcgctacgacgaccgcgtcgaacacatgtggacatactgccaggttgtctccgccatgatgatgtccatcgcccacggatcgaacgatgttgccaacgccgtgggtccatgggctggaagctaccacaccttcaactccggctcagtggaaacagaagccagcacaccagtgtggttcctcgttattgctggtttgctccttggtggcggattctggttctacgggtaccatatcatgagggcgcttggcaacaagatcacccagatgtctccaacgcgcgggttcgcgacggagctgggtgcggccacgacggtattgcttgcgtcgcgtttgggattgcccgtctcgacaacacagtgcctcactggcgctgcgatcggtgttgccctaatgaactatgaccttgcggcggtcaattggcgtcagattgcatttatcttctcgggctgggtgcttaccctgccttgcgccggccttattgc

SEQ ID NO: 19489 - DNA, 1003 bp, Emericella nidulans
cgcttcctcgtgggcctcctggaatcctgcacctttctcgggtacgccgcgctttgggggagctggtacggaccgacccaactagcaaagcgtgttgcgctctttgagcagtcgagtgcaatagccagcatgttcagcgggtatctccaggcagcactgtacacagggatgaacggtaagtcgggactgaagggatggcagtggctgttcatctttgatgcgatcatctccattcccattgcagtgtggggatatttcgttataccagacagtcccagtaggacgagagcgtttgggtgacgaaaaaggtgagtgctccaagttcctctagtcatatgcgcaggaattgtgattgacaactgctacttaggaccgagaatatgctgtccaaagacaggcgagcatgggcctcgctccatcagacagattaccctggaagaaactgcggaagatatatacaggttggcagctgtgggcgtttatctttcctgacctgtacgtctcctatccttgatgtctcctctattctccgtcaagctaagcatggttgcccaagccggtcaaggcagcggatttttcaacctgtggttcaaagactaatgatacagtaccgcacaattaacaccattcccacattcgggaatgtcatcagcgtcatatcatccttggtatttgaaacaattgccgaccgcaccggcagacgcaaggagtgttgcgctatcgtgtgtgtcattggtatatccgcaaatatcatactctccatcggggatatttcgagagccgccctgttgttcgcgtttttcctcagctttgttagtgcggctgcgcagctgttgatcatcataggttcacttttccacttcctcatgcgatcagagccggtatataggcaacaggctgatgaaatacaggcatggggccaggaaggtacccaaaagaacgccgagttgcggcagatgctcgtggcgactggcaatatcttcacctataacttcatggcgtg

SEQ ID NO: 19490 - DNA, 1003 bp, Emericella nidulans
tgagagccgtacatacgaccagacagacccctatcttgtactgcaagtctgtcctcaacccaaggacgctcgcggctgatccaactccagatctcctatcctcgaatctcatatctaccgtctctcctcccgaggctgaaagccttcttctcttcatccctcattgaccccactgcttcacagccccacgacggctggttttcctttgaagcgtcccgctgaaatggcactaccccgttggcctgctctatgatctatatgcgggtgccgaaccagcgacgaaatcaagcgagactgaggcactagatgacgagcagctcccatggcgacttgtcgtgcatttcggcgactggcctgatgcagagcttgtccggcttgatgcccaaggaacggtcatgcacgatgcatttattaacagtgttaaagaggctgattttgtccgcaacggaacagcgaaagggataatgacactttcgaaagatgactcgtcgggactgtggaaggctgtccaggatggtacctccccaacccggtccggactataaatctcttatcaacgaagatcgctaatggctcttgttttgcgccgaaagtcgacctcccctctttccagcgcataatgaacattctccttccgccaaacccacaccagccgctccgcaaccttccggtccggctctttctccctcttccaccgaaaccggactcgaactcggactctccttttctcaaggtcgtgcaatcgcccatccccccaacaatatctacaaccccgtcacagctgcaacgacaaatggcgcagtcaactctttcgtcgtcgggagtttcaggatcatcaccgggcgcagcgcaaccgcaaccgcagacgcaaacaattggcactgcgctccactccatactcccgaatttattccccagtcgccggacgcctgtcattgcgaaaccggtgctgcatggagcgcaggtgccgatgtccgcgcctgtggaggaggtggtcagggcg

SEQ ID NO: 19491 - DNA, 1003 bp, Emericella nidulans
acggctacgcccgcgactttaagggctacggcgagtccggcctgaaaatcacctggcccaacaatgccaaaatcggcggctcgtttgtgatcaattatgaagaggtacgctcatcctctcttgtctatacgtcccaatactgattgtttgtgttcagggcggcgaacggtccgtcctggaaggcgacggcgtctccgaatcaaatctgcgtgagaacccaacaggaccccagagcataaatgagcggaattacaacgccgagtcagaatacgagtacggtagtcgcgcgggttggtggcggctcttccgactgttccaaaaacacggcatgaagttcacgctctatgccgttgcgcgcgcgctagagcataatccagatgtggcaaagcgctgtgtggaagaggggcacgatattgcgtcgcacgcttaccgctgggtcaattatcatgatttcagtatcgagaaggaaaaggactacatacgcaaggctgtcacgtctctaaaatctcttacaggatacgcacccaaggggtggtactacgggcgacctagcccgcattcgcggaccctagttccacaggtttacgaggagatgggcgaagagcttctctgggcgagcgatacctacgccgacgatgtcccttactggattgatttgcccactgagcgggatctccctgctgaccgcgcgaaagggtgcctgatgattccctacagctacgactgcaacgacttcaagttccatgttccgggttccggcttcagggatccagatggattcctgacgcacttgaaaaacgcatttgatgtgctttatgaggaaggagaggaaggcagtccgaagatgatgacgattggattgcactgtaggattattggacgcccagggcggttcaaggcgctgaaggagtttgttgagtatattgctgcgaaggagggagtttgggttgcaaccagaacagagattgcagaggtttttagggagacgtttccgtataagaag

SEQ ID NO: 19492 - DNA, 1004 bp, Emericella nidulans
tcccctgctcttcctgccatttcaccggattaagaccgcttacggcctgtggcttggccccatcatttcgtagctcgcttctctctggacatttcaatgaaccttctgtaccttcagctgatgattctaatatagtttgccgtgcaccgtgacgctgctgatttgtcttctcttctagtaccattgagaactcggagtgcactttccttatggacaatgaggctgtttacgatatctgtaagcgcaagcttgacatcccccgccctggttataataacctcaaccgtctcaacgcctgggtcggtagctctcttaccaccagcctgcatttcaatagtgaccttaacattgacttgaatgagttccagactaatcttgtgccattcccgtgtatttactaccctctaatcttgtatactcctgtcatctctagtagctgcagtacttacaagagcttcaaggtcaaggatctcaccttgcagtgtatgtatcctgtcttttcttccaaaatatcccttcagtctaaccatctggcaggctttgaacctaggaaccagatggttgtctataatcctcaaactggaaagtatatagcagtggctctcttgtaccagggtgacatgatgcctcacaattatgcccgggctgttactgatatcaaggccaaggcctcttttaacctggtcaagtggtgtccaactggttttaaacttggcattaacaaccagaagcctatatttgttcctaacagcaagcttacttctatcaactgttcagtcaccatactctccaattcaactgccattgccgaggcctggagttgccttggccacaaattcgacctcatgtactctaaacatgctttcatttattagtacatgggtgagggtatggaagagggcaaattctcagaggcccgcgagaacctagcagttctagagaaggactacgaggagattgccggcgatactatgggcttggatagctatatagaacacgagtat

SEQ ID NO: 19493 - DNA, 1004 bp, Emericella nidulans
cgtcggatgcagctctaagttctgtgacggtcaatgaccctattacttctccttctgtccttgccgacaccaacccagacctggatcggctcacgtcacagtcgccaacagaaggtcagtacgactttgctggcgatgagaacatcctcccttcccagcgacgacttgctgaaatcaccgaattgattcacactgcttcactcctccatgatgatgttattgataacgccctcacccgtcgctcctccaactccgcgaacatcgaattcgggaacaaaatggctgttttggcaggtgacttcctgctcggtcgtgcctccgttgctctggcccgcctacgagaccccgaggttacagaactcttggctacggtgatcgccaatctcgtggagggagagtttatgcagctcaaaaacactgccgaggacgaaaagaaccccgtttttacagacgacactatctcatactacctgcaaaaaacctacctgaagaccgcaagcctaatcagcaagtcgtgccgcgcagctgcactacttggccatagcactcctgacgtggtcgaggccgcgtattcctacggccgcaatttgggactagcgttccagcttgtggacgacatgcttgactacacagtcagcggtgttgaactaggaaagcctgccggggcggacctagaactcggccttgcaactgctcctcttcttttcgcctggaaacaacacccggaacttggccccttggtcggtcgtaaattttgccgggagggagacgttgaaaaagtatgcatagatcccttgtcattagcccatcagtcctactatcccttcccagccctccaaaagatgtgataattcactaattataaccttgtttatcctaggcccgagaacttgtctaccgcgccaatggtgttgaacaaacccgtgctctagctcaagaatatgcagacaaagcaattgctgccatcagcccgtttcctgatagcgaagcaaaggccggtctga

SEQ ID NO: 19494 - DNA, 1004 bp, Emericella nidulans
cgccttgtcgccaacgctctggcggtcctcgctctcagtggaatcggcgtgtatactgcctcgaattgctggatcaagaacgcgtccgcagagtcgcgcagtgcagaaccacagaaggtctttggtcgtggacctgcattcaagtcgctccgtcttcatagctcagagagcgttagcgacaacacaaagcggctgcggtttgagcttcctggtggagagagttcaataagtggactcagtctgacttgtgagtctgcctctgggctcaattgtttgcggtgctagacaaggaaagagaaagagggggagagggctaatttggatctcacccagctgctctccttacgttctcgaggccagaaggtagctggctacccgctgtgcgaccgtatactcccatcagcaaactgggtaagcaagacctcccagccggttctactcgcgctctccgaccggattgaccaaacatctgactggaaccatagatgaacccggctttgtcgatctgctagtcaaacggtatcccaacggaaaggcaagcacgcatttgcatagcttgaagccaggcgacaacctttttatcctcgcatccattcccggtttcaattggaccccaaataagttttcccatgtctacctcatcgccggcggcgctgggataacgccaatctaccagctcgcgcagggcatcctcgacaatccggcggacaagaccaagatcaccgtgatattcggcgtcaatacggagaaggatatgcttctgcgcgaggagtttgatgcgtatcaacgggcgtatcctgaccggatcgatgttctctataccgtcagtcggccgggcagcgagttcaggccggctccaaacgtgcgatcaggttatgtgacaaggcaggtccttgcggaggtcatggggggccctgacgaggccgatacgaagatatttgtttgcggaccgcccgcaatggagaaggcgctggttgggggcggatttggccagggccagccag

SEQ ID NO: 19495 - DNA, 1005 bp, Emericella nidulans
ggaacttctttgcagtatcgtcattcagtttgaagacttcaagaatccattccctgcgctcgaacggtatcaggatgtctacacatgcttcaacgatgacatccagggtactggtgccgtgatcctcggtggtgtcatcaatgctgtgaagcgctcaggggtcccttgcaaggaccagcgtgcagttttcttcggtgcgggaagtgccggagtgggtgttgcgaacagattgttgctttcttcatgcgcgagggcatgaccgaggatgaagctcggtcatgcttctggctcgtcgacaccaaaggtcttgtgacagcagaccgcggtgacaagcttgccgaacacaaggtctactttgctcgcacagacaatgcgggccagcagttcaagaccttggaggaagtcgtcgaccacgtcaagccctcgatcctgatgggtctttccacccaaggtggcgttttcacacccgagatcctgcgtaagatggctgagtggaacaccaacccgatgatcttccctctctccaacccttcgtctaaatctgagtgtgactttgagaccgccgtgacaaacaccgacggtcgtgtcctcttcgcctctggctcccccttccctacaatgtctttcaccaactcggcgggtgagacaaagatgtactaccccggccagggtaacaacatgtatgttttccctggtattggactgggcacaatcctgtccaaggccgtcaaggtcaccgacagcatgatctatgcctccggtgaggctctctccaaggccctcaccgcggaggagattgagcgtggtctcctctaccctgatctgacccgcattcgcaaggtcagcgttgtcgtggctcgcaacgttatccgggctgctcaagaagccaaagttgatcgtgagactactctccgaacgatggatgatgaaactcttgatgcgtggatcaagagtcgcatgtatgacccacacactgaggttcaatctctggagcgggaagttggc

SEQ ID NO: 19496 - DNA, 1006 bp, Emericella nidulans
  unsure (1)..(1006): unsure at all n locations
ttcagtcagttttacaccatggatcaattagtccgccaatacacccggtcgccgcaccagaacgagttctactcggagcaagagcagcatgacctaacagagagtctccctccgctctccctgaaattcgcccttcctccagttgcaaacgtaagctctatcgtcgttatttaactatttcggcctgaatcgtcgccgggatctgtgtttttgacgttcttcgcgagccccagctccgganttgacctctcaagccagctacccgtctactgagagtattaactaacgctttgcgtctttaccagcaatctgccttccttcgtgcgatgactgatgaccactcaaacccaaactgccccatcaaacttgcccacggaacaacaacactcgccttccgatttcagggtggaattgtacgtcgcaacatccctgtcaaacgctcatatatccggccccgctgatattcgaaacagattgtctgcacagattcccgagctacggctggaaactggattgccagtcagacggtgaagaaggtcattccggtctcccggttgagccgtggagaggataagccaggcagtgcgcctgttcctggtcttctggggaccatggctggtggtgcagcagtacgtgtctatctttatcgtgcctacagtcatgattgtgctgaagtttatgtctaggactgtcaatattggcttagatatctgagtcaacaatgcacactacatggtgtgttgcgtcgtttctgcagtctttgagtgatgctaacttggtacagagattcgtcacaaacgccgtatcacagtggctgccgcttcgaagattctggctaatcttacgtacgcctataaggggtacggtctgagcatgggaacgatgttggcaggcgtatgcggacccgcggagagtgaccctgttttgaagccccagctgactttctgcgataggtaacaccgcaagaaggacctgcgctgtactacattgactccgacggcacccg

SEQ ID NO: 19497 - DNA, 1008 bp, Emericella nidulans
tcgaaaacggcttgtcattgtccttgaggaccagatctacctctatgacattcaaactatgaagttactatatacgatcgagacttcaccgaaccccaatggtaaggtctctgtgcagttgaacgagcctagtctaacaccaacagcactatgcgcgctatccccatcctcggaaaactgctatcttgcctatcctctcccccaaaaggcggccccttcttctttcaatccgcccgctcatgctccgccgggcaacacgcatgtatccccgacaagtggcgaggttctcatctttgacaccttgaaattagaagccatcaacgtgatcgaggcacatcggtcgccgttggcatgtatcacgctcaacagtgacggcaccctgattgcaaccgcttcagacaagggaaccatcattcgagtcttctccgtgccagacggccataagctataccagttccgacgcggctcaataccatcgaggatcttcagcatgtccttcaacaccacatcgaccctcctctgcgtctcctcctccaccgagaccatccatctcttcaagctgtcgcagccatcccagcttcaagaaacctcttcagcgaacacctcatctaccggacgacgacggagcctgagctcgcttagccagtctccggaaagggaggccacggaggaagacaacggttcctcagatctagcgtcccgaaagcacaatggaacactaatgggtatgctccgccgcacatcgcaaaacgtcggcggtgcatttgcggcgaaggttggcggatacctacccaaaggcgtcagcgagatgtgggaaccagcgcgtgatttcgcttggatcaagattcccaagcccaaccagggccagggtccaaatgcgaacacgggtccgctacggagtgttgtcgcgatgagcagcaacacaccccaggtcatggtagtcactagtgacggcaacttctatgtcttcagcattgatctatccaagggtggcgaggggacgttgac

SEQ ID NO: 19498 - DNA, 1009 bp, Emericella nidulans
atgctcggacaagagacgagagctgtaactgatagattgtggcgcagtgatcgtcgagaaaccgtttacaacaaactacgctgaggcgatagagctcgccggtctcgctgagagaacaggtctccagcttgcggtttaccacagtggattctgctgataatcatgattcagtaccatccgcagctgacaagagcagacagaagatgggactcagacttcctgaccctgcgcgctctgctcgctagcccaaccaacttacttggctcgatagtccggcttcggtcccattttgactgcgcgccgaactcgcggacggcgatcgaatcgaagaagtggcgcttggctagcggtgtcccgggagcaggaatgctatttgatctaggaagccacttgatcgaccaggttcttgttctctttggaacgccaaagaccgtgacgtgattgctgtttgacgagggcaacggcaaggagattagagaaaagggatttgtagataatggttttttaatagtgttgggatatgagaaaggtctacaaggtaggttttaagctcagccccgggcggggtactgttgtgcttctctaactggtacaagtcgagctgcattcgacgcagtacgttgtcagcgatagacagaagagatttgaggtgcttgggactaaaggccgatgggtcaagtacgagctcgatatccaggaggaccagctgtagaaaggcatttatcctggccatgaaagctacgggctggaagatgggggcagtcagggtatgttgataaagagacatataaagagccccagttgacgttaatcgaaaggtacactccaggtgattgacggagggcagatagagacgcaggactggggatctataccgggaggatatcaacatttctacgagaatgtgcatgaggccatttccggaaagacggagcttgcagtcaagcctagagatgcggaactggtgatgaagttgatagaactgtgtcgacaaagcgcggttgaaaga

SEQ ID NO: 19499 - DNA, 1009 bp, Emericella nidulans
gcaagaccagcccgtcgagaaggacaaaatggcactaatcactcgcaaatacggcgagatccgccagatcacaggcctgagcgaccacgctgtgatcctccagtcgcataaagtccagtactgcccgccgctggatcgctactatgccatcaaggtctttcgccgcagtcccggtcagagcacggacgagtacacaaaacaagtcaatgcggagttcgccgtcgtcgccaatctgcaccaccagcacgtcgtctcgaccttcgaactcctccccatcggcggaggaaatctagccgcttgcatggagtactgtgcgggtggggatcttcactccctgatcacggctggtccctcgcacagattaccctcggaagaggcagactgtcttttcaagcagcttcttcgtggcatctcctaccttcacaaatcaggcatcgcccaccgcgacctgaagccggagaacctcctcctgacacacagggcttgcctcaagatctcagactttgcgaatgccgagcgcgtccgtttcgatggtgatgattctcagcatgccaatgacctggcggaaactgaacgccgcagcttagaaccgacaccgtatcttgccccggagcgataccttgacgagggcgacaggtacatgtccagatccgaccccagagccctcgatatctgggccgcggctgttatatacgtcgctatgaggacaggaaggaacctgtggaaagcggcaacggagaaggacgagggcttcagggcgtatgtcgaagagcgtaaggccgagaagacgaatactgttatccaggattcgtgccatgtatgcctcacctttcccatcttacttgcgtctggacaccggatcactaatagctgtccacaggaacggggccgcaaagtgatatacgccatgttaagcactgatcctgggaagcgacctatcgcgactgagattctttcctcagagtggcttcagaacattgactgctgtatctttgatcattcccaagca

SEQ ID NO: 19500 - DNA, 1010 bp, Emericella nidulans
cttcgccgagccgaagatggttctcttccaacttgcgaaacaggtaatgagtatgatgggcgcatgggcgtgcgcatctcctctattttcgtgatccttgtcggctccgcctttggcgccctatttcctgtctttgcgcgcagcttccagaactccaaggtccctagctgggcattctttattgccaaatactttggttctggagttatcattgcgaccgctttcatccacctgctgggtcctgcagaagaagcccttcgaaatgagtgtctcagcggcccaatcactgattattcctgggctgagggaatcatccttatgacaatcgtggttctattctttgtcgagatgatggttatacgattttcgcgtttcggtgaaggccacagtcacgacaatgactctcacagcgaccactcccatgctcatggccacgccggtgagctcaagggcactgagctatcgtcgaacgacgtaaaccatcacatgcctggcgaggaccaccttggccattctcgagaacaccgtgacctcgaactagctgagaagggcgttgatcttaatgagtacatggctcagctgacctccgtcttcatcctggagttcggtatcatcttccattcgatcttcatcggcttaaccctggcagtgtctgggcctgagttcaccactctttacatcgttctggtctttcaccaaacatttgagggtctgggtttgggttctcgactggccacaatcccatggccccgctcaaaacgctggaccccatactttctaggtatgggttacgcaatctccacaccaattgccatagctatcggcctgggcgttcgccagtcctatcctcccgaaggctacaccactctcctcgtcaatggtgtgttcgattcaatctcagctggtatcttgatctacaccgctcttgtcgagctgatggcccacgagttcatgttcagcacctcgatgcgcagagccccgcttaagaatgtgcttgccgcgttcggtct

SEQ ID NO: 19501 - DNA, 1010 bp, Emericella nidulans
tggctgcggctgacattggtaaccgtcacagctgcgggaattggtgcatacataaaatggatgcaggacatgaaaacagcctctacgaccttgaacccaggtcgattcacgtcataccaattagtatctcgcgaacctgtctcatccaccggcagcttgtttacgatcaagcctccaaaatcagatggaagcaatctcaaagtatatgaagatgcatggaatactggggtatggagtgttatgttcaagcaaccacagttgcaaatcggccgtgactatactcctctgccgccaacgtcagctaatgaggacgatgagtgcctgcgattcttcattcgcaaagacccctttggagaagtttcccggtacctgcacagcctgaagataggtgcacgcattgaagtacgtggacctcgaatcgagtgcgagattcctccagatacagacaggattctctttattgctggtgggactggaattgcgcctgctctgcaggcgggacataccctccttcgacgtacggaccatatcagaaaacccacaatacacattctttgggcaaatcggcagcggcaagattgcgctggtgggtacaatgagactacggacacaactgctgaaacacgaaatgtcatggctttacgggctctttggatcttcaaaatcagttaccaggccggctcctgctgaggtagcggatactgtggagccgtctcttattgttcgagagatagaggctctcaaagcgcagtatcctgagcaagttaccgtgcagtatttcgttgatgaggaaagcagtttcattgggaagaagaccatattggaatgcaccaaaaccgccgtgccgtcctcccccgacaagagcaaacgcaatttgatctttgtttcgggaccggagggcttcatcagctacatggctggacccaagctctgggcgcaaggcatggagctgcagggtcctctacaaggcatcataaaggagcttgatcttcaggattgggccgtttgga

SEQ ID NO: 19502 - DNA, 1011 bp, Emericella nidulans
tttaatccgttctactgccttttcgagtactctgcgcatgataattataccctacagattaatcctcattcaggggtcaacccagaacacctgaattacttcaagtttattgggcgtgttgttggattggccattttccaccgtcggttccttgactcattctttattggagccttctacaaaatgatgctacgcaagaaggtgtccttgcaggacatggagggtgtagacgaagatctgcaccgcaatttgacatggacactgtatgtctcatcattatttgctggagatgtcttctaaccatcagcagggaaaacgatattgagggcatcatcgacttgactttcacagttgacgacgaaaagtttggagagcgccgtacgattgagttgaagcctggcggggaagatatacccgtgactaatgagaacaagcacgaatatgttgagtaagttatttacagctctttctatgagccagtctaatcatttctaggcttgtgacggagtggaagattgtgaagcgagtagaagagcagttcaacgctttcatgtctggcttcaacgagcttattccggcggatctagtcaatgtgtttgatgaacgtgagctagagctgctgattggaggtattgccgatattgatgtcgatgactggaagaagcacaccgattatcgcggctaccaggaacaggatgaagtcatccagaacttctggaaaattgttcgcacttgggatgcggaacagaagtcccgtctgctccagttcaccacaggtacatcacgtattccagtcaacgggttcaaggatcttcagggctcggatggacctagacgattcaccattgagaagtctggagatccaatcgccttgcccaagtctcacacatggtaagtctcaacttctgttcgcttctacgttctttgctaattcttttcagtttcaaccgtcttgatcttccaccgtataagtcacatgaggtgctagagcacaagctgtcgatcgctgtg

SEQ ID NO: 19503 - DNA, 1011 bp, Emericella nidulans
atgagtgttttaagagtagttgaattgaccatgactggatgtcagccggctatgaccataccattcggtgagtctattctcaacaagcacgggacagtatcctgatacctgataggttctgggaggctctatcgggaatctgctcgcggactatccagcaccccgactcccaggtaaaccgtctctgcatcacaccagacaagcgatatctggcggctgccggtcacaacaatgtgaaattatacgacatcaagtccacgaatccaaatcctgttatgacattcgaaggtcacacaaacaacattactggcgtagcatttcactgcgaaggaaagtggatggtgactagctctgaagacggcacagtaaaggtctgggacaccaggacaggaagcctccagcgcaactacgcacacaaagccccggtgaatgacgtagtcatacatccaaaccagggcgagctcatcagcggtgaccgtgctggcattgttcgggtatgggatcttggagagagtgtctgcacacatcagttgattccggaggacgacgttgccgtgcatagcgtcagcgtcagccagcgacggatccttactttgtgctggtaataagaaggtattttgaccttgcaatgttttcctaactatgctgattgattagggaaatgtgtatatctggcgcatgatccaagaggccgaagtgactcgaattgtcccaatttgcacctttcaagcccacaaggactacctgactcgtgtcctcctttcgcctgacgtcaagcacctagcaacctgctccgctgaccatactgctaaagtatggaatctcgacctggacttccctccagcaaagacggcaattgcagctgccgcccgatcaaaggtcaagtcaccgtctgcagcagaagtaaaaccggcgtctccgtcttctgcaggctccgaaagtcaaagcaactcaatgcaacttgagcggggcaaagctgatagtattccgttccacctgctcaacgggacg

SEQ ID NO: 19504 - DNA, 1011 bp, Emericella nidulans
tcctgcttgagacccccttcaaaatcaatttcatcatattatcctacaaccaccacggcagctaacaacatgggctctcttggaccgtataagcaaaagcacaaggtgactgtggtgggatcgggtaactggtatgtaccggcctggcggcttgcctgcagaatttcaataattttggtactgatagcacaaaaggggcaccgctatagccaaaatcgtcgccgagaatactgccagcaaccctgcggtctttgagaaggatgttcagatgtgggttttcgaggaaaaggtcgagattccgaaatcgtcgaagcattatgatcctgcctcttctctttgccagggcccgcagaatctgacagatattatcaaccatacccatgagaatatcaagtacctccccggaattacccttccggaaaacttgattgccaatccatcgctagtcgacgcggttcaagacagcactatcctcgtcttcaacctaccccatcaattcatcatcaatatttgtgaacagatcaagggcaagattgtcccatacgcgcgtggaatttcttgcataaagggcgtggatgtgaatgaggaaggagtccacctgttttccgaaacaattggaaagattctcgggatctactgtggcgccctgtccggtgccaacatcgcgaatgaggtcgcccaggaaaagtggtccgagtctagcattggttatgatccaccgcattttgactctaaagccccttctcctcccaaccgatccccttccgcatcgtctgacaatatcctgcacttcgagcacaaagacgtttcgggtcaactttcgcgggtaaagttacaggctctaccttccgaatttcctcccatcggccatgcccttctcaagtcgctattccaccgtccttacttccatattggtgtggtaagtgacgtcgcaggtgtttcgttaggaggtgcccttaagaatgtcgttgctgtcgcggcagggtgggttgtgggcaaaggatggggaga

SEQ ID NO: 19505 - DNA, 1012 bp, Emericella nidulans
catggacgtggacggcgttctcgaaatcacaaacaccttccccttccctgtggtcgaagttcctccggagtcgcactttgacaatgccgctcccaacccggccgccgctgctccccgtgcgaaggccaacaccgtctaccaggctgagatgattcgtatgctccgggaagttaacgtcgatgccaacaatgtcggttggtacacgagcgccaacatgggcaacttcgtcaacatgaacgtcatcgagaaccagtttttctaccagaaggaaatgaacgagaggacagttgcgcttgtccacgaccccagccgcagcgctcaggggagcctgagcctgcgcgcgttccgtctttcccccaagttcatggccgccttcaaggacaacaaattcacttctgacgagtatgtttcacaactggcacggacgcgagtaaagctgactagcgtaggctgcaaaagtccaacctaaagtaccaggacatcttggtcgaactccccgtcgaaatccacaactcccacctgatcacctccttcatccaccagctccaaaaccagacccaggcgacccctgctgagattcccacctctctcgccaccctggagtcctctcccttcgccaagcagaccatcctggcgcctaacttcgacaacctctccctcagcatcgaccccttcctggagaagaactgcgatctcctccttgacagcattgagacccaccacacggagacgagcaacttccagtactaccagcgctctctcgctcgagagcaggccaagatcacagcctggcaggccaaacgcaaggccgagaacgctacacgcgcaacgcttaagcagccccctcttccggaggacgagtggcaacggctgttcaagctgccacaggagcccagccgccttgacagcatgctcaatagccgccaggtggagcagtacgcgcgccaaatcgacagcttcgtctcatccacgacgggtaagatgtttgccgtcaagggcaaccttctgccca

SEQ ID NO: 19506 - DNA, 1012 bp, Emericella nidulans
cccgctctggaaaaccgtccattgaagggcacaatttgtcttttcgatgttgacaataccttgacgcctgcaagaagggtaagtgctgcgtattggactctttattctgaatctccgaatgctgataaggcgcctgaattactagcacgccacagaggagatgctccaggtgctttcgcagttgcggcaaaagtgtgccattggctccgttagtcctctgaatatcctgcactgaggattggacatctcatatcaggtcttaggttggcggttccgatttctccaagcagcaagaacaactcggttcctcgagcgtcgacgttacttccctcttcgacttttgcttcgccgagaacgggttgacagcctatcgcttaggaaagcccctcaccggtaacagcttcattgagtggattggggaggagaagtaccagaagttggtgaacttcatcctcagatacatcgcggacctggacataccaaagaagcgcggtaccttcattgagttccgaaacggaatgatcaatgtcagccctattggcagaaatgcttctgttgaggagcgaaacgaatttcaggagtaggcttccctgggatttgtgccgtaacctgtttctgacggtggccacagatacgatcgggtgcacaacatcagaggtccattcgtggaagctctgaagaaggaattccctgattacggtctgaggtaaagttgcaatgagtggcctatgttgagaattctgacgctaactaccgtcccaacagctactctattggcggtcagatctccttcgatgttttccctaccggctgggacaagacatattgtctgagacatgtcgaggccgaaaaagatatctcgggtattgactacaagacgattcacttctttggtgacaaaactttccctggtggtaacgacttcgagatctacgacgacgccaggaccatcgggcattccgttaaggatccggaagactgtttgagacaacttagggaattattccaacta

SEQ ID NO: 19507 - DNA, 1013 bp, Emericella nidulans
ggtgtcagcgcatgatcttggatcagattaagaagttgagtccgcgtacatataaggaagctgctgaactcgtgcatttcgtatcgagcaatgctgtccctgttgcgccgcagattcctgttgcaggtcccggtggaggtggcggtggcggtggcgggggatccgatcccaatgggaatgattggccgagcggtgacgacgatgaggacaaacctgaggataagaagggtaaaggtaaagagaaagaaaaagagaagatacaagattttgagaaccttgagagttcattgcgccggtttgtgctcgagaaacggtcacgctcaaaactagctcctgcccggacctatcttcttaacttgctcgcagatattaatgctttggctgctgtcaatcgcgacgtcgcagacaaggaacttcagaatgtgatgaaagagttggcagatcttgagcctgcgtacgagaatggcaaaaagaagaagattcagctacaggaagaagtcgacaagtgcatcgacgactcgtgtgaagacgtttacaagcatacacgaacgactttgacttccgcaattgcgaatgtctccgaggccaacctaggtgttgagtaccctggtatcttctctgcattccaatacgctgaagacttgaaattcgccatgttagaacacatctccgcctcagtggctggatgtgaggattatgcacgtacgaagacggcacagggcgttggtttcatccagaaccttggcctgttacatattggagaagacaagtttactgcgccgactttccgcgccgatctaatgttccgtcgcggacgtcgccatgcacttgcgcgacaggtcgacacagaggtggagctcttggattttttcgatatcacaggcctctgggagcggcaagaaaagctcgcgggaacaggcatggctatgacagccgtgactgtccttggtggcagggcatttggtggtatcagctggctggacagcgccttcagtgccgcaaaattcctgggc

SEQ ID NO: 19508 - DNA, 1014 bp, Emericella nidulans
cgtcaagaactcatttgagccatacagtccatgatgtatctccgatacgctgctgcactagcctcagtgcttcctctcgccgtcgctcagacatttactgactgcaatcctctggaaggtaggtgcctcctaatctaaagctgtctttattgttgattgaggattaacattgtaccagagacatgcgatcctgatccaggcttgaacagcaagactttctcgtctgattttacgcagggtgaatctgccttggacggttgggtcaaagcttctggcgatgtcactttcggccctgatggtgctgaatttaccgtggcaaagaagggtgatgcacctaccatcgacaccgacttctacttttttttcggaaaggccgaagtggtgatgaaggctgcgcccggtgttggtatcgttagcagcattgtcattgagtcggatgttctcgatgaggttgactgggtatgtcccataattgcttttttcgccgttcgcatcgtctcaaaagcaaacatttgattgtcatccgcacatgcatacttccacgcgggaattgagctaatcgccttgttttgtgcaggaggttcttggaggcgacaccacccaggttcagactaactacttcggcaagggcgacacctccagctacgaccgcggcacttttgaagccgtcgctactccccaggagatcttccacacctacaccgtcacatggtcgcccgacgccatctcctggattattgacggtaacaccgtccgcactcttaactatgctgacgccaagggtggaagccgcttcccccagactcccgcacgcctgaggctcggaatttgggctggtggcgatcccgacaacgcacctggcaccatcgaatgggccggtggccagactgactacagcgctgggcccttcaccatgtacatcaagtctgttcacatcgagaacacctaccccggctccgagtacacttattccgacaactctggcgactggcagagcatcaaggtcgatgactc

SEQ ID NO: 19509 - DNA, 1014 bp, Emericella nidulans
ccaaagttctagatggctaagtcgcgatgattggattcgcattttgactctacaagatgctggttttacctatcaacagatctcttctcagcttggatttacctatcgtcaggtgcaatatacctgccagaatgagcaatctactcctcaaaagcctcctggccagcgcccgaagctatcagaagaggatatggacaatatcattacctttatctcttcatcacaacgtacgcgccgactatcttataaacgagttattgaagaactaaatcttccctgtggagaaactgcacttgctcgagcacttaaaaaacgaggctattcccgatgcaaagctcttcgaaagccacctttattggacaatacaaagcgtgtacgtcttgcctgggcccttgagcatgtgaattggataattgagcaatggaattaaatactttggtctgatgagacttgggttactccaggcttctataccagaatctgggttaccagaagagcaggagaagagctagataagacctgtatttgttcgtctacccccaaaaagcatggttggatgttttggggatcattttatggagatactaaaggcccttgccttttctgggagaaagaatggggctctatcaatgcagagagttactgtgagcaaattgtgcctattattgacggctatctttgcctgaaccgacagcaaggtaactatctttgtcttatgcatgatggagcacctggccatgccagcaaagatactatagcagagcttcatgagcatagtatctatcctattagttggcctgccttctcccctgatctgaaccctattgagatagtatggaactggatgaaagactggatccaagagagatatccagatgaccgccagctatcttatgatgccctatgagaaattatacaagcttcataggatgcagtccctacagactttttggaaggccttattgggtctatgcaagccagatgtcaggcagtaatcgaggcagagggtggcca

SEQ ID NO: 19510 - DNA, 1015 bp, Emericella nidulans
cgacctactacgtaagagatggaaggacaagagaacattaatgccacactacggcaagaactacaccagttgcgtacgcaacttattgaacagaatgcagagctccaacagttacgggctcagcagctgcccctgccgcaatacctgcccctaccataaccatgcgcccccgtccgatgcacccagacgtgagaacatttaatggagaaaacgcccacgactatcttgccttcaagataaacctccgtacgaagtttacaattgatgggaattgctaccctgacacgtccgcaaaagcctactacatctttagtggcctggaggggaaggctagccgacgaatgctgccatggatggaagccaacggaccaacaatctcgtacgaaggccttatggaggcaatggaaaaagcatacttggatgcagaccgacaacgaagagctctcgtacggattataccatgcgccagaacaacagggacctggacgagttcctggatgatttcaacgaagccctactgaatgtaggtggcatggattggcatgatgactagaagaagtccctcctggaaacggccattagcctgccactccttcaagctatagtcgggagagaacaagctgacttgtatgacgggtattgcaatcaattacgtcgagtcaaccatgacctacaacgcgtgaagcgaatgacccgggcacgtacgagccgcagctatcagcctccacccgcccgagctaccactgatggtcccatggactgggagcccactgttgctgctgtccagcagcgtcgccgagctactgacaaccaacaaaggacccagcgtacaatgaccggacggcgcgctcagtttgtctccaactctgagctccaaagacgacgtgaggagggaacatgcctccgttgtggaagtaaaggccacctcgtccgagaccttctgcctcctctacgccctcgtccgactgtggctgctacacaaatggttaacaacgtggaagaggaaccagaggag

SEQ ID NO: 19511 - DNA, 1015 bp, Emericella nidulans
tgctgctcctatacttcgttccacccgccctctccgacaaatctcggcgagggcttcgtgaagagcgtatacgaggctctccgggcgggtccgcagtggaacgagacgctctttatcctgacattcgacgaacacggcggattcgcggaccatgttcctcccccggagaaagttcctcctggcgatggaatcccgtatacggaggttgcaaaggatgggaagccaacaaccttccatttcgataggctggggatcagggttccgactctgctcatctcgccgtatgtgcagaagggcgcagtggtgcatggcccaaaggggaagggcaagaaagggcaagcgaagggggagtacacgcatacgtcgatcttgaagtatgtggatgagttgtggggattggatatccttacgccgagagttgagtggtctgccagttttggagatctgattgagaagaagtttagagaggatacgcctgaacttctgccggagcctgttattttctaacggagctggttccgcaaccttcattgtatttattggctttctttcttgtattgtcttttggattagacgagatgagatgatggatatatggcttaacgaactgagaacgctagagtatatgatagaatggtcgttatcattaacccaataagtgaatatatcactttgcactgccacttttgcgactccaggtctcggcctaccactcctccttgataaagtccgcgcaccgctctccaattccatacgcaggcatctgcgtgtgcccgccatggagggtcggcatgatactgcagtccgcaacgcgcagacccttgacaccacggacacgaagcttgttgtccagcacagcattcgggtcatcgggcttgcccattgcgcacgttccggctgcgtggtagcctacatacgacaattgatcattagcaatgaagacacgacggcaggaaaagaagggacggtttaggacgtacaagtcgtagcatgttcctttacataaggaacccac

SEQ ID NO: 19512 - DNA, 1015 bp, Emericella nidulans
gctttcgcacgctgcattggatcatcgtcctcgcaaacggctctccgagcgaactccccttctgacttcacataaatctacaccggcgggaatcggtcttccaggtacgggtcgtgagccaggcggcatcgtccgtacaggtcgcgaaccgtggcgtgtccgtctcggacgacgaatgtacaccttgattggaggtgcgaaggcatactgcgacgagaatggtccgtgctatggtttctcacaggcttgtggtgacgaatgcacgaagacccttatccgtcccgccgttagcgcggacgatgcctctgatacagacattcaggttcctgggctctcggcagatgctcccagctcctcctctgaaacagaaacggcggataatgctccctcgtcacctccaatgggagcggaagcggacgggcagtctaagcatccggtttccgttgcccaacaccaccatcacgtaccccaaaacgcttttctttcgatagggttacaaacatctgtcgccatagcgttacacaaactaccagagggctttatcacatacgccactaatcacgcaagcccaacactggggatgacagtctttttagccctcttcatccacaacatcagtgagggcttcgcaatggcattgccgctctatctcgccattcattctcgtggatgggcaatgttctggtccagtcttctaggcggcatcagccagcctgccggtgctggactggcagcgctctggatctggggtgctcggaaagccggtagtggtgccggcgatggccagaatgagacctcctgggctgtctacggctgcatgtttgccgttacagcgggagtaatgacctcggtgggcttgcagttattcaccgaaggtttagtcttaacacatcagcggaatatggcaattggctttgctattggaggcatgggcttgatgggtctgagttttgccttgacaacttgaaagtatattggcgttaggctttgcattttggatcagaagagttggact

SEQ ID NO: 19513 - DNA, 1016 bp, Emericella nidulans
cgccatcgcgcagtgtctgtcagccgcaatgcggaccgtccccgccgacttcgcagtccacagcatgcactgctactttgtcctcgccggcgattctgagatcccaattctctaccacgtcgaacgagtccgtgatgggagaagctttatcacacgaacagtccaggcaaggcagcgcggccggcccatctttacaaccaccctgagtttcagcaaagcaaacagtggtggaaaaaagaagctcgagcacgcttcgtcaatgccctctgctccccctccaagtctaccgaagtctgctgaatcacgattcaacccgcatggcggcgtggccgtttgaatcagtccgggatgaaatagttaatcgtgcgtccaaacccgaagacaagagggtcagacgctgggtgcgttgtaaagggaggatctctgatgccggtgcccaacatgcccacctatctgctctcgcatatatcacagacagcttctttatcggcaccgtctctcgggttcatgagatcccgcgattctcgtccgccgcagagctgcaaagggctctaaaggctctgaagaacccatccgatcttgatgacgacgacatcgtgcgggctctgaaagagctcaaggaggaagaagcagcggatctacagcgccggctagaaggtgctcttagtaagctcgagcaacggaagaagagggaagaccacaaggagattgggatgatggttagcctcgatcactcaatttatttccataacccgtggaaattccgcgcggatgagtggatgctcacagagatggagagtccttgggccggtgaggggaggggccttgtcctgcagaagatttgggctaaagacgggactttgatcgccacatgcacgcaggaggtatgttcccttctttcttacttagctttggatggatgcgcatccatgtacttccgcttctgcagtgttcagctggctgatattcaaacttacagggggttgtgaggctgaaacaggacgagctggttcgcg

SEQ ID NO: 19514 - DNA, 1018 bp, Emericella nidulans
gcgccgttcaacgacttccaccgcgcggatttacatgctgttctgctggagagggcagttgagttaggagcggccgttcataccaactcagaagtcgccaatatcgagttcaacgtcgagagcaataccgctagagtgttcatcacgggtcaggaatcgctggttgcagatctggttgttggcgccgatggtatcaattcacgttgtcgggagattctcctaggacgaccggagccgccgcatcgaacgggcgacatggcctatcggatactcctggatgcaaaggatatacgcgagaccggagatgttaaactgacaaagtacctagacgagaaagctgtgacttactggtacgggcctggggcgcatgcaggtaagttgtccacaagccgcgccctcacactggtgccgtttctgatagaaaggaagtgacatacccgcttcgcaatgcctctcagctcaatctcgtcctcctggtgccagataatatgccggaagagggcccatcgactctaaaaggctacgttgacgaaatgcagagtctatttgccgactgggatccaaagtatttacccgttctgcaattaaaacactgaaagacaaaacgtactaacggagtacagcattggaaaacttctcgccctttgtccatctgtccatactggcgcttatgcatccgcaatccgctggatacatgggtacacccaagccaaaccctagtccttcttggcgactccgtgcacgcaacgctcccgtaccttgccagcggggcaggaataacatttgaggatgccgctgtcctaggtgaatgcctagcccggacgacatcaaactcattagaagagagaaagaaagcactggcagtgtacgagctgtgccgaaagctgaggacagagacggtcgtgaagcgagggtcgatccagcaggatcttaaccatctcgacgacggggtggaacagcaagagcgagatgcgaagatgcgtgctttcgaggaagttgagcggagctggattgctgg

SEQ ID NO: 19515 - DNA, 1018 bp, Emericella nidulans
caaaacactatgtctccatctagtctcagccctgtcctcataactggtggtaatggcttcatcgcctatcacattattgctaaactcctggccgaagaccccaactgcaccatccactgtattgacatcaacaccacccgcaacattcacgcctccgactctgtcacctaccaccagggcgatctctcttcgcttgcagacgtctcacgcattatggagcttgctcgccccgtgacaatcttccataccgcatcccccgagttctcggaggcccccgaatccgcctaccacgacgttattgtcacaggaacccaccacctcctgaacagcgccgcgtcgatcggcaccgtcaaagcccttataaatacgtctacgtcgggcgtcatcaatgacaaccacaccgacctggtcaatggcacggaggacatgccgatcctgcgacccccggtgcagaaacgcctctattgcctcgccaaagcagacgcagaagaagccatccaagccgccaaccgccagcacggctttctcacctgcgcgcttcgcccgtgtcttgccttcggcgaacgggacacgaattccatgggaaaaatggttgctgttgcacgtgccggccgctcccggttccagatgggatatggcaagaacgcgtacgatttcgtgtacgtcggcaaccttgcagatgcgcatctccttgcggcgcatgcgttgattgacgctcatgccaatccgcctctccctgcggaccgtcgtgttgaaggggaagtgttcaacatcacgaacggtgagccgtggctgttttgggatttccagcgagagatctcgaaacagttaggttttcccattcaggaaaaagatattgtggtcattccgaagtgggtcgggttgttgattgggttcgtgagtgaatggttggtttggctgcttagtggggggtcaaaggtggcgaattcaacgcgcgagggcattcgatttagtacgttggagagaacgctgaattgcgagaaagcgcgaagggtgc

SEQ ID NO: 19516 - DNA, 1019 bp, Emericella nidulans
tcactgccattggaggtaatctcgctggagctcctgcactgatgggcaatgttgttgtctggaagccttccccttcggccatcgcatccaactggctcgttcatcagatcctgctcgaagccggcctccctaagaacgtcattcagttcgtccccggcgaagccgaagaagtgaccaagaccgttctcgaccaccccgacttcgcagcccttcatttcactggcagcaccaatgtcttccgtaatctgtacggtcagatctccactcgtgtcgcagccggcaaataccgcagctacccacgtattgtcggcgaaactggcggcaagaacttccacctcattcataaatctgccgacatccgcaacgctgctgtgcagaccgtccgcggtgcttttgagtaccagggccagaagtgcagcgcaacctctcgtgtctatgtcgcgtcctccatcgccgattccttcctcgaacaggtcgcctcggaagcgaagagcctaaaggtcggccccccttcggactttaccaacttctgcgggccggttatccatgaagcctccttcaccaagctcgccaaggtcattgacgaggcaaagaacgaccccgagctcgaactcctcgctggcggctcctacgactcctccaagggctggtacatccagcccaccgtttaccgcaccactaaccctgatcacccgctgctgacacgtgaactttttggtcctattctcgtggtgtatgcctaccctgacgcgacggaggccgactttgcccgtattgcgcagaagatcgacgcaacaggcgaatacggcctcacgggctcggtgttcgctcaggaccgcgaggcactggcggtagccaacgacgtcctccgcaatgcggccggtaacttctatatcaactgcaagagtaccggcgcagttgtgggtcagcagccgtttggcggggcgagggcgtccggtaccaatgataaggctggtagtgggaacctgctgagcaggtttgtgagcctgcggtcgaat

SEQ ID NO: 19517 - DNA, 1019 bp, Emericella nidulans
caccaccgcgaacagtactttattggaacgcagagaaagacatggaatatggcagacagcagatctgtacgtcgcaaaacacattataatctagtctctatcaaactaacaatttccagaggagacaccgtgactctgagccctacaaaaccacaatggacgaacccctcattgtcgcgcctgacaattctatcctctacgcctcagcagcgtcattctgcccaatgccaaacaatcccgtccgtgtgccggatgagtacttctacggcgccagcagtcagctcgacccaatgggctcctgctactcagcaccccaacctcaacctcaaacctacgtcaaccaaacccaatactatcccactacaactttgagccaaacccccagtagcagcaacacacaatggcttcacccctcacaagccgcctcacaccatcaacaccagtcttatcaggacgccatcccgtccccagaccttgatccagacttcgacttcgaccttgatctcgaccaaggttccttctcttccccttccccttcttaccatcacatccactaccaaactagtcgatccgacccttccaacaaccctgataaccagagccacgcccagtgcccgtcccgcaccccctccacaacctccgcttcatcaacacacaacaataccaacagcaaagacctttctctctatggcattccctccccaactcaccccggggcctggcgttgcgcttacccatcctgttcttcgccctcgttgttccgacggggttgcgatctccgtaagcactacaaccggcaccgcaaacatctcttctgccgacacgacggatgtccgcagtcgaatccacagacaccaggggccggattcagctctaagaaggaccgtgatcgtcatgaggctaaacacaacccggaaattgtgtgtgagtgggctgctgagggctgcacaagggtgttttccagagtggataatatgaaggatcatgttcggagaatccataaaggggtttgagttgta

SEQ ID NO: 19518 - DNA, 1020 bp, Emericella nidulans
tttttcaaccacatataccaggtattctcgcttctccaatacacaatggccccaaccaccctaagtgacctccagccatcagccacgattgatgccaagcctacaacggtctctatcccatcgagcaggcccgagaagcctcctccagtccaggttctaggcaagaccaagagcggcaagacgctgaagattcgcagctacccacagttcgacaacctagaagacgagcgcctctaccgcaagcagcatctcgccgctgcattccgcgtctttgcggacaggggcttcgatgagggcgttgcaggacatatctctgttcgcgaccctattttgactaaccacttttgtccgtctcctgtatctatgccgagattgtgtcgggctttcttgactgacatggcgcagggataaaccctctctccgcacatttctcactaatcaaagtctccgaccttgttcttgtcgacgaggatggaaacgtcgttgagggcgacgaacctgtcaatctcccagccttcgctatccactccgagatccacagggcgagacctgacgtgaacgccgcctgccatgcacacagcgtcgcaggaaaagccttctcatgcttcgggcgtgagctcgaaatgataacccaggactcgctgcgcttctacaagagtcacgctgtgtatcgcgagttccggggagtagttctggatggggaagaggggaagcggattgcgaaggcgcttggggacggcaaggctgcgatcttgcagaatcatggactgttgacagtggggcaaagtgtagatgaagcggcattctggtttattagtcttgataagacttgtcatgcgcagttgctggctgatgcagcggcggccgcgggatataagaagattatcattgacgacgaggaggccgcttattcggcaccacaggttggcggacccgagaaagggtggttggcgttccagccgtactatgatgagcaggttgcgaagacgaagggggaatttctgttgtagtgtagtttga

SEQ ID NO: 19519 - DNA, 1021 bp, Emericella nidulans
gatgcgcggcggaagatgacccctgagcagcgaaagtctactccttacattgactatatgcgaccgattattgcagacggtgacaccgggtaggttgatcatctagagcttagcttgtctctactaacgttccaagacacggtggcttgaccgcagtcctgaagctggccaagcttttcgctgagaacggtgccgcagctgttcactttgaggaccagatgcacggcggaaagaagtgcggccatctggcgggtaaagtcttggttccgatcggagagcacatcaaccgccttgttgcgacgcgattccagtgggatatgatgggtgttgagaaccttgttattgctcggactgactccgagagtggcaagctccttagcagcgccattgatgtgcgagaccacgaattcattctcggagtcaccgaagagtcggaacctctcgcagagaccctgcaagccatggagagggagggagccgctcttcggagattgatgcctttgaactggactgggttaaacggcacaagctagtgacatttgatgagggtacgtatatcaacctcagcacctcaaggtatatctaacctccgacagctgtcgatgcgcacctggaggccgaaggtgctcctcaagccgctcgtgacgcatacaaaaagcgtgtcaaggagaatccagacctgtccatcacccgtcgacgggagttggccaacgactacaccaagaccccggttgtttggtcatgcgacatcccccgcactagggaaggtttctatcactatcgagccggtttcccagctgcaaccaaacgcgcaaaggagtttggcccttacgctgacctcctctgggtcgtaactggtgaccccaacgttgaaaaatctgcgaagctcgcaggcgaagtacgggctgccctacctggcaagaaactcgtctacaacctcagcccttcattcaactggatgggtcaaggctttgatgaggcatctcttaagtccttcatctgggaccttgcacagcatggg

SEQ ID NO: 19520 - DNA, 1024 bp, Emericella nidulans
ccggacgtgaacgcccaaactaacagcaacaaggtcggccaacgcatctgccgaaaaattggtccccataaccggatattccttgccggagatgccattcatacacattctccgaaggcaggacaagggatgaacgtcagcatgcaagacacgttcaacctcggctggaagctggcctctgtcatcaagggcgttttgcaccaaagtgctctcgagacatatcagcaagaacggctacccgtcgccgagcaactgattgcattggatcaaagaatatgccgagggatgtgcaccaagcggaacggtggtgtagaggcccaaaacggccgcttcgacgaggaccataggcgggcactggagcaggagaattcctcaatgtcaggtctcgctgtgacctaccaacctaattccctggtcacaccaacagtttgggatacatctttgcccagcgacgtgccgccctgcaccagcagaccatccgtggcccgaaatctccgggtcggcgcgcgcgttcctagtgtgctgatccttaaccaaagcgactcgcaggcatgccatttgcatcagatccttcccagtacgggacaatggaatctgattgttttcggaggtgacattgtggcggcgaatcagaagcgccgcgtcgctgccctcacagatgcccttaatgcccctgattcagccttcgcgaagctgaataaccgggtctccatcgcgcagcgcgggtttccggttctcggcatgtatctcattcaccgtgctcataggcatagcatcgagctgaacgatctgccgttggtcttccgtccttggacaaatgacggtgtggactatggcagagcttgggtggatgctgaaacttatcatcacgctggcggagggaaactgtactcttcttttggaattgggccaaaggggtgtatggcattactgcggcctgaccagcatctggcttttctatcagatatagatgacgtggacggtttagagctgttcctgcggtcggtcatgcctggggcgacat

SEQ ID NO: 19521 - DNA, 1025 bp, Emericella nidulans
gacggtattcgggggcccatttattgcccctattgctggcgggttcatggcgtcaggtcatctcggctggagatggacactgtacatcccagccattctggccctagccattggcgcgctttccattctcttcttaaaggagacgtaccctccctgtatccttgctgtcaaggcatctggcattcgaaagaagagaccagaaaactgggccattcatgcagaacaggaaacggtcgagctggatatcgccgttctggtcgaaaagtacttcaatcgcccgctgcgcctgctcgtcaccgagcccatgttgcttcttatatcgttgtacatgtcctttatctacggtttggtctatgccttactccaggcctttccgtacgtattcgagcacatccatggtctacacccggggctggctgggctcatgttcgtcgggctaataatcggcgtcgtcctggccctctgctttatcctttcccagcaagcccagtatgcaaaagcactggcggagaatggaaatgtgcccgttcccgaatggcgactgcgtccagccatgctgggggctccgatatttgcccttggtctgttctggtaagcttttttgactgtccatctatgcctccacccacgcattcctatatccctaatcgactttggcattaaggttcggctggactggcttcacccctcgaatccactgggccgcaccagcagccgctgggatccctattggcttcggcattctttgcatatttttcccgtgcttcaactaccttgttgatgcctatttaccggtgtaggtcttcccccaacgctcaaaaaacaaacagccatctgatattactacagggccgcctctgccgtcgctgcgaacatcatcctccggtcagcctttgcatccggctttcctctctttactcggcagatgttcgagactatgggggtgcagtgggcagccaccctgcttggctgcttagctacagtactcgtcccaattccgttcgtctttaaggcccttgggccgc

SEQ ID NO: 19522 - DNA, 1025 bp, Emericella nidulans
ccctttgtcacattcgggctcttcggatggtgcgtggcacatggggcaggatctccagtatccacctcgcttctagcacggctccctcaggcgcgaatttagggtgggctgtcatggacgggatcaatgtgatcatgggctcgttgagtccgatgctcgtgaaccagccagatcttgcgcgctattgtcgcaagccgagagacgcggggtggccgcagggtgccgcggtgttcgtgtccaaggttgtcgtcttctttttggggctggcgagtacagccagtatccaggggaagtgggggactgcatactgtatttactctgcccgacatcccctccctttcctggctttgagatgctgatcgtgatttttgtgcagggaatatctgggatctcctctccgcgatccttgaccacgcgtggacgccgggctcccgctgcgcagtatggatagtcgcatttagtttcctcgtgagccaatttgggacgaactttggcgggaactcgattcctttcggcgcagatatgacgggtctcttcccgcggttcctgactattcgacgcggccaggtgctatgcgctatcctcggcgtctgcgtcgtgccgtggaagcttcttgccagtgcgggtgctttcttgagtttcttgggaagctataacatttttatggcgccgctttgtgctgtagggatttcaatctttgaacccctctagcctgaagatgtgaagacgctgactgacggtgtggcagataataatgacggactacgtctctcgcaacggcaacatccacgttgcctcattgtacaatggcacgaaatcaggtctgtactggttctggtctgggatcaattatctcgctgtgtttgcatggatggctggcgttgcgctcggcctacccggcctggtaggcgaataccagcctgaagccgtgaatgcagccgcaaagaatatgtttaagatgggctggattctcacctttgtggctgcggggttcgtgtatgcggttcttttcaggatcggtgggc

SEQ ID NO: 19523 - DNA, 1026 bp, Emericella nidulans
tttttctttccagctaccaggaaatgattacccacctggccatgaactcccaccccaaccccaagaaggtcctcgttatcggaggtggagatggcggtgtcctccgcgaggtagtcaagcacgagaccgtcgaggaggccatcttgtgcgacattgatgaggtaacaaaatctgctttttcctgccttaccttgccaattacctacatatgcaactgccgctgcatgcaatttagtcgccaaaaggctgacgggcttcatcattgcaggccgtcatccgtgtctccaagaagtaccttcccggcatgagcatcggctggcagcaccccaacgtcaaggtccacgtcggcgacggctttgagttcctcaagcagcgccagaacgaatttgatgtcatcattaccgatagctctgaccccgagggtcccgccgagagcctcttccagaagccctactttgagctcctcagagacgctctacgtgatggaggtgtcatcaccacccaaggttgttcgtcgcctttctttttatattctgcctccatctgctttttctctataccttgacttctcgtttttttcttgttgtcttgtactctcccagccttcccatagccctagcccgcactttttctccccttattctctctcttccatttttccttatacgatatttttgatataagggttcccgggctaaccaagtctcgacccaaaccacccgatcccgggatcggtttgggtttcacgttttctccgttacagccgaaaaccaatggcttcaccttcctctgattgccgacctcaagaaggcctgcaacgaggtcttccctgtcgccgaatacgcgtacaccacaatccctacgtacccatccggtcaaattggtttcatggtttgttgcaaggatgccaaccgcaatgttaaggagcccgtccgcacctggtctcgtgaagaggaggagcgtctctgccgctactacaaccaggatatccaccgcgccagcttcgtgctgcccaactttgctcgc

SEQ ID NO: 19524 - DNA, 1028 bp, Emericella nidulans
ggcggcattcaagcttctacaggtaatttcttactaggtctatgacctaaccgcgctctgtattctgattataccggtatcttccagatagatgaaaaataccgggtcttcaagagtggtcaaactgttgttgatctagtatggtaacactcgaagtcaacaatgtgacactctctgacaaaatattaaacaaatagggttacgccccaggatcatggtcccaggtacgcgcgacatcctctgtcatgagaattactcattggctgactcttcgcaaggtagcgttgacgcgaactcggcccgctggcagggtccttggtgtggatataatcccgagccaaccgccaaaaggtgtgtctactatccaaggcaatttcttggatcccgaggttcaggcgtacgtccgagactttgtacgcaatcctcgaaggggcagaccatactctcaaggagctctccagaaagtcgaggaccatgatcgtatggtagagtctgtcctcgaggcgagctgcaccggtggtgacttgggagaggattacaacggcgctgtggatgcccaaagaacggtagatgtagtactaagtgatatgtccgccccctggcttcaaacaaccggattctggaagagaagtctaagtaatccttaccgcaggatgatgaataccagcggtgtaccttttaaagatcatgctggtagtatggtacagctccccgctaatctattttgattacccccaaatactgatcctctaaaggacctttgccgtgctgctctggagttcagctttgaagttctcagggctggtgggcactttgtctgcaagttttatcagggcgcggaagataaaatcctggagaagcagctgaaagtattgtttggaaaggtgcataggctcaagccagaatcatcacgcagtgtatggatttgcttgctaaccagtgggcaatatgtggtggtttgactaattttttctagcaggaatctaaggaggcattcttcattgctctcgaccgcaaatccaacgtca

SEQ ID NO: 19525 - DNA, 1028 bp, Emericella nidulans
tcccccagctgccatcttcgagcctactgttgcccctactggcatcaagggaaaggttgtggtccccgagactgctactattccaggcgattcacagaccaaactgctcgaccactttggcggcaagtgggacaacttcaagtttgctcctatccgtgagagccaggtctctcgtgccatgacccgccgctacttccaggacttggaccggtacgccgagagcgatgtggtcatcgtcggtgctggttcgtgcggtcttagcactgcgtacgtcttggccaaggctcgtccggacttaaagattgctattattgaggcgtcggtttccccaggttagtctaaccatggcgtatcccgtaaactattgtactcatacaaccaggcggtggtgcttggctgggaggcagcttttctccgcaatggtcatgcgtcgtcctgcggagttgttcctgaacgagctcggcgtgccatatgaggaagaccctgacatgccgaactacgttgttgtcaagcacgcatctcttttcacatcgaccctcctctcgaaggtgctatccttccccaacgtcaagctgttcaacgcaacctgcgtagaggacttggtgacacgccccggcccgaacggcaatgcccaggaagtccaaatcgcgggtgtcgtcactaactggacgctcgtcactctccaccatgacgatcactcttgcatggaccccaacaccatcaacgcccccgtgattatcagcacaaccggccatgacggccccttcggcgctttctccgccaagcgtctcgtctccatgaccaccatcgacaagctcggcggcatgcgcggacttgacatgaactctgccgaagacgccatcgtcaagaacacccgtgaggttgccaagggtcttatcattggcggaatggagctgtctgagatcgatggctttaaccgcatgggaccaacctttggtgccatggtgctcagcggtgttaaggctgctgaggaggccttgagggtctttgatgaccgcaagcgcgag

SEQ ID NO: 19526 - DNA, 1029 bp, Emericella nidulans
ccgcaggatcaatcacattctcaggaaatgaagcttgcacccatttcagttaaccggaaacgaacacagttagaaatggaactaccgtcgccgccagtgactccgtacgttgggaacaataagaaaagcaagtcgaccgaccctgagcagcccgatggggatgtattggtctcatcacgagatcctcttctcttctcaacgcatgagcccgttcccgaaattgccagttatgagccgctaattgcccccctgctgccgccgtctcccgaagcggtgatggaacagcacattgattctcatatggctatgttcgacaataaactcaataaaccaacgcgcgatgagtattttctggccctttcttgtgttccgattgtatcagctcagtacaatcggaatccggcggcgtgggccaaagaggagagacgtacccttgagcgtcaattaatcatgatgaaccggcatcgcccagaagtttcaaatggcagattgaaaagaatcgcgccagcgccaacaaaaagggtggttcctgctcaatcccgtgtgcagcggacgcccagagtaaagcgcacaccaaagtccaccccgaaacaaaaggttttggattcgtttgacgtacacacgccgaactccaagccttctcgtgccatcggcacgagcagggatgacacagattttagctccatcaaagactattcgccctctttagagaccctcggtggcaatgcaaaagcattgaaggcagattggaaaggtcagatgctggacctaagtaatgaccccgaccggcacctcttgagcccagctgagttaaacctggctgccactctgaggctctcttgtgctacctatctctgcagcaagcggcgcatctttgaggctcgcgtcaaagctttgagggttggcaaagaattccgcaagacagacgctcaacaggcctgcaagattgatgtgaataaagcaagcaagctttggactgcttatgaaagggttggtttattcaacccaagtcattttcaagagtatctt

SEQ ID NO: 19527 - DNA, 1030 bp, Emericella nidulans
gcgctcaaggccgctgatgtcggtttctcgatgggattaagtggaacagatgtggcaagagaggccagctcgatcatccttctagatgacaatttccggtctatcgtcacggccatttcctggggccgggctgtcaacgacgcagtggccaagttcctccaggtatgctctttcctgcccgtactagttggcccagacactgacctgacagttccaaatcacggtcaatatcactgccgttctcctaacggttgtcacggccatatacaacagccgaaacgagagcgtgtttcgagcggtgcagctgctgtggctgaatctgatcatggacacctttgctgctttagccctgtatgctatgccttccatgccatgcccattctgacagcgagcgagatactgacaaaccagtgcaaccgacccacccacagccgacattctcaagcggcctccaaccccccgtcatgcgccgttgttcaccgtcactatgtggaagatgatcctcggtcagtctatctacaaactagccctctgctttgtcctgtatttctgcggccacagcatcctagacctagacagggattcctaccaggagaagctcgagctggataccattattttcaacacgtttgtgtggatgcagatcttcaatgagttcaattgccggcgtctcgacaacagattcaatatttttgaaggcatacaccgcaacgtgtggttctttgtcatcaatctcatcatggtcgggggacagatactgatcatctttgtcggaggagctgcgtttggagtcaccagactgaccgggcggcagtgggggatatgtctgggatttgcagtggtttgcattccatgggcggcgttgctcaagctcgtgcctgaccagtacgttgctaatctaatttacggctttgccaggatgtacaagatcctgtggagccctttcgccaaaggatataagaagatgcggggatccgtacggccatcgaggctgcataatgggaaggagagggtgggtgacgaggaggca

SEQ ID NO: 19528 - DNA, 1031 bp, Emericella nidulans
cgctccgtcggtttctgtaacctagtgagtcaggcttgctttaactgtagtagtgaaaacagaagctaagacaccagtgttacagtgacaacgccggcgtgttgggtatcactgtcaaatccaacaaaagcctcgtgggtgaaggatccagtggtgtgatcaaaggcaagggtcttcgaattgtcagcggcgcaagcaatgtcatcatccagtaataccgtcttttgggtctttattatgcaaaagattgctaatacaattacagaaacatcgctatcacggacctgaaccctaagtatgtctggggcggtgatgcaatcaccctcgacaatgcggatatggtttggatcgaccatgtcacggtcagtctttaggagagtacctagaaggaatggaggaggctaacttccgtatacgcagactgcacgcattgggcgacaacatcttgtcctggggacatctgcctctaacagagtaaccgtttccaattcgtacttcaacggcgtgacctcctactccgccacctgcgatggctaccactactggggcatttacttgactggttcgaacgacatggtcactctgaaggggaactatatctaccacatgagcggtcgcagccctaaagtcggcgggaacactcttctgcatgcggtaagacctcagcgctctgaatagtccctcccactaacattttcaggtcaacaactactggtatgactcgtccggccatgcctttgaaattgactctggtggctatgtgcttgcagaaggcaacgtcttccagaatatccctactgttattgaagggaccgtcggcggccagctgttcacctccccagattccagcactaatgcaatctgctcgacatacctgggccacacctgccaggtcaatggcttcgggagctctggaacgttcaagcaggcagacacggcgttcttagtgaatttccagggcaagaacattgcgtctgcatctgcgtataccgttgcgcagagtagtgttccgtccaatgctgggcagggga

SEQ ID NO: 19529 - DNA, 1033 bp, Emericella nidulans
gctcggcgtcgtcgtcctgataacgccctacaaccacccgctgcttatcgcaatgaagaagatcgctgccgcgctcgcgaggcaacgtagtaattgtcaagccgtctgagctcgcaccgctctccgtcttgaagcttggtgctctattcaaggaggctggcttacccgacggcgtgctgcagattgtatccgggtacggacgagaaaccggaaagtacctctgcgagcaccctaagatctcgaaaattgaccttaccggcggaatcgcacatacagagccattgcccccgtcgcagcaatgaacatgatccccatcaccgccgagctgggcggcaaggccccagtgtgtatattcccgagtacggacgtcgaaacagcagtcaaggccgctttattcgcggggttcatcgccagtggccagacctgcgtcactggaagccggatcctcgtgcacaaagacatctacgactctttcaggtcactacttgagaagcgggttcgcgccctccgagtcggtgaccccaccgacgagaagacccagatcggctccgtcatttccgcagccgccatcgagcgctgcgaggccttcgtctcgcgcgccacagctgaaggggggactatactctgtggcgggacaagacttacgccaacgccagagaagaaaggctatttcttcgccccaacagtcatcgaaacggcctccacctccgacctagccaacaatgaggtctttgggcccgtcctcgcgctcataaaatgctcagatgaggatgagatcgtccgaatcgcaaacgggacatcgtatgcgcttggggcgtcggtgtggagcaacgactttacgcaagcgcatagtgtcgcggataagatcgaggctggaattgtctggatcaatgggcatcatctgaatgacccttcttcgccgtggggtgggtttaaggagagtggtgttggcaaggagaatggcgtcgaggcatacgagagctatacgaaggtcaagagcacggttatgaactacggagtcaagccggtttgg

SEQ ID NO: 19530 - DNA, 1033 bp, Emericella nidulans
cgggcgagcatggcgattactttccgcttatgccgaccaatataaacctctctacacctccagtgcaccaaccggctgcgaataactctgctggtgcccattcagccccgtctatttccattcttactaccggccatgctccgcaagtaccgtctcctggcggccggacacgtacccgccgacctcccctcgcacggaatattacacactcaccgacaatacgtgggatgtcgcaatcaaaaggttagctaccttacctaataccgcttacatgcatgctgacttgatagaatctgtgagttcgcaaactgccgccccgagccagcccacgccaccagttcccacacctcctggtccacctgcagagtcgcctaaaacgaaagcacataccccgccggcgcgagtttcatctcctcgccctggccccgtgaaaccgaagaagtctaaccgggcgtcattattaaacggcgcatttggcggcctcattgagggcacggtaccaccgattaacgtcctcattgttgaggataacgttatcaaccaaaggctccttgaggcgttcatgaagcgtcttagtgtgcgttggaagtgtgcagctaatggacaggaggctgcaacgaagtggcgagagggagggttccatctcgtgctgatggacattcagctgcccgtcatgaacggcctggacgctacaaaggagattcgccggcttgagcggctgaatggtatcggcgtgttcccgaagaagagctcgggcgtgtcgacggctgcagctgcaacctcgccggatccggtaactgaggaggacacattacatgatttatccctcttcaaaagtccagtcattattgtggctttgacagctagcagtctacagagtgaccgtcatgaagctctagccgccggctgtaatgactttctaacgaaggtattttcgtctagtccttagcttcatacacaagctaacaaaagcagcccgtccggtttgaatggctcgagcagaaagtcaccgaatggggctgtatgcaggccc

SEQ ID NO: 19531 - DNA, 1033 bp, Emericella nidulans
tgacatttggtcagcggaggagcgcggtgctgcgatcgtcggctatgccatggctgttgtgggcggtcccgttctaggtcctattgttggaggtgcgattagccagagctatttggggtggcggtggacgcaatacgtacgtaccgttacctatcatgaattttgaatagtgcaggctgactgacgatgtttcaagataaccggcataatgatgatgctcttcctgacgctcgatgtcctctacatcgacgagtcttatccaaacacgctcctagtctataaagctcgccgtctccgcttcgaaacaggcaattgggctctccacgcccgccacgaggaatgggacgtgactcttagggaactcggaaacaagtacctcattcgccctttcgctctcctcgcaacacccatctgcttcctcgttgccctgtacgcatccttcgtctacggcatcctctacctttccctcgcttccttcccggtcgtatttcaggagctacgtggctgggatcaggttgttggtgctttgccgttccttgcgtacttggtgggcatactcttcggcgcgggaattaaccttgcgaatcagaagttttatatctcgcgtttcaaggcgaatcataatcgtccggttcctgaagctcgcctgcccccgatgatgctgggttctgtagtcttcgccgcggggttgttcatttttggttggacgtcccaggtagatatttactggtttccgtctatggtgggtggagcatgcatggggttagggtttttcactatttttcaagcggcgctcaactacctcattgatacattccagactgttgctgcgagcgcagtggcagcgaatacatttctccggagtgtttttgcaggctgttttccactgttcgcgacagccatgttccgaaatttgggcgtgccttgggcgtctagtgtgcttgggtttgtggcgattgcgctcattccgatcccgtatatgttttatgtgttcggtcccaagattagggcgaagggaaagtggtctcgtgca

SEQ ID NO: 19532 - DNA, 1034 bp, Emericella nidulans
cgcgccctatccattcccaacccctccaaagctacactcagcacagccggcctaggctccggcttcaccagcacaggcgtagtcagagcgaccgtcccaggcacagacggccagaatgaagagcgcaagtacttcgtcaagacttctgccgacggcgaagccgcgaaggagatgtttctaggcgaatacgaatccctgaacgctatctcgtccgccgtgccgggtttctgtccccgcgccatagcttggggccctcttgaagagggcggcaagcctggaaagagctacttcctcgcgactgagttcctcgatctccgagctgctggtcatggtggtccatctcttgcacagaggctgggaaagctccattcgacgcccgccccgattgacccgaagacgggaaagcggctgtttggattccccgtgccgacgttttgcggggacacaaaacagccgaatcgatcgtgtgagtcgtgggcggaattttatgcaaatgagcggctcttgacaatcttggcgacgtccgaaaagcgaaatgggaaagattatggattgaggagtttagttgagaagacagcagacattgttgtcccggcgcttttgggggatggacatctcgggtacgatacgtctggaaaagggcagggaattactcctgttgttgtccatggggatctctggagtgggaatgccagccgcggccgcattgtagggagtgggcggaaagaggacgaggtggttggtgatgtggtctacgacccgtcggcttgttatgcgcacagtgagtatgagttggggatcatgaagatgtttgggggattcgggtcggctttcttcaatgagtatcataagatcgtgccgaagacagagccggttgaggagtatgaggatcgggtcaggctgtatgaactgtaagttgccttgacctcccacttgcttccagcctaacatccataggtatcaccatcttaatcaccatgcgatctttgggtctggatatcgatctggtgctgtatcaatcatggagaggctgc

SEQ ID NO: 19533 - DNA, 1034 bp, Emericella nidulans
gaaggcgcagatagagcaggcaaaagtgctgcaatttgctcacggcgctggccgacaattttcttcgagctctaacccccaggtttctgcggctggggaatctcacggagagtatcagataactctcaacgacattccattccgtgtttctcgcggtggtggcaagctgatcagagtttctagtgcgacccctgttctttccgcgctaatagagagagctggcttacagatagtagatgatccgaacactgcaaacaacacgcccaagagggtgaaagttgctggggtgacgttcgtccggagcaagaatggcaaccttcatcggctgggtgcagtaacctctaaaaggtgatcgttttgattcgcttcgagtaggacaatactaatttgactgtagagtccctcggcggtcaagaaaaaggacgagctttgccaaagattcactacgacgggtaccaattcttccctcaagccctccggattccatttgtcaactgttcgccatcgcaggtccaaagagtcatgctaaccgacatttcatctaggtacctgctacaagggaccttcgtgtccttatatccacgatccgaacaaagtcgctatctgcaaggacttccttcagactggcaaatgtagcgcaggtaacagttgtgatctctcccatgaaccatcacctcataggtctcctgcttgtgtgcatttccttcgaggtcgttgttctaacccagagtgtcgctatgctcatgtccgagtcacacctggtgcgccagtgtgccgggctttcgcgacgctgggatactgtgataagggcgagacatgtgaggagagacatgtgcacgagtgccctgactacgccaacacgggtgtatgcaagaagaagcactgccggctgccacatgttgaccgtgcaggacagattcggaagaatgctggtcctaaagaaggtgaaggtgacgatgaatcagacgcttccagtgaggaagaagagtttgacgaaattggctccgatgatgtcgactctgattatctctcgg

SEQ ID NO: 19534 - DNA, 1034 bp, Emericella nidulans
catctatagattatttggtgacgccagaaagttgatgatttgcacaggcgctcttagctacagccatggacctgcttgatcagcctcctgacagcctcctacgacttggctgtttaagaccgcagttatgagtgcggtaaacgcagccttggggcatttgggacattttggggcattgcggagcgttgttgatcgccgccaagtctcccggcaaccaaaggaaaaaatcaggtcatttttgacgggttccgcggacaaacgccggcacttgcataaaaatataactttgacatctttccatctttcatcagcaatccaaccgcgtcctctgtgattgtgcatctcaattccccgttaatcctacgcaatgcgctgtcttagtatcgcagtcgcctttctggcgttgtttacagggctctacaggttcttcgacgcccgcctggagcagttctacatcttcgaccaccaccatctgcacgacctgtcccagcgcgcaatcgctgcccatggaaacgacactcgcgccattgtccagtacatcgtttctgagttagacgagaaggtcggctccacgcacctgaacaaggacgaggaatgggttttcaacaacgccgggcgaatgggcgctatgtacattatccacgctagtatgtgcccttttctctcccgaacctgcttgcactcgcaacggcctatgctaatgatctctttcctacaggtatcactgagtatcttatcatcttcggtacgctcgcgctctccgtccactcgtccacccatcgtctcccaaagtacgcacaaaacatgtgtgaaaccaactaacagaactcaggcaccgccattggaactgaaggacacactggccgccacaccgcagatgactacttcaacatcctccagggcactcagctcgcctacgtccccggttcgtacgagcccgaagtctacccggccggttccgtccaccacctccgccgcggcgaggttaagcagtacaagatggactcgtcttgctttgcgctcgagtacgcccg

SEQ ID NO: 19535 - DNA, 1035 bp, Emericella nidulans
cggtgcagggtttgtcccctcggatccccttatggtatttacttggcttacactatcatctctaccccaactgtgccccagatatcggacgctagttgaatatccgaccccattcttcttcgggaaaaatccgatgtggacaggtattagtactctcgcacgggcaggacactgccggtttccatgagcagcaaggacagaccaagagcataatgaacttctatcccccaccccccgtcatccaagcacaagtcctcttccgtattccggactcactgcgctgctccgggcagccaaccgagtggcgtggcggcttcgcgggccctccgtcggacattttcctggagggcccggtcagtggcccagacggagctttgtacttggttgacattccatacggccggattctgcgggctgatatgaacaagcccgatgatgagagaatggtgacggagtgcgtgaggtgcgatggggagccgaacggactcgctctgctgaataatgggcggttagtggtggccgattacaagcaggtagctataccatacgtgctcaatccagccactcatcgctatagaagagctgaagctgatagctaacctacagggcatcctcaagtttgacccagtcaccaatgaaatcacaccgctgctcacccggcgcaacctcgagcgtttcaagggccccaacgatctgatagtggcctcgaatggcgacatctacttcaccgaccaggggcagactggtctgacagatccaactgggcgcgtttaccgtttttcaccgagcggcaaactcgacagcctcgtctcgaacggcatctcgcctaacgggcttgctttgtctccaaacgagcggttcctctatgttgccatgacccgcgcgaatgctgtctggcgactaccgctacatgcagacgggacaacgaccaaggttggtctcttctttcaatcgtttgggaatgcaggtccggatggactggctgtcgacgaggaggggaacgtactaatctgccatccaagtctggggagcgtc

SEQ ID NO: 19536 - DNA, 1035 bp, Emericella nidulans
tgcggatacaggactaaccactgcaaataggagctccgtgacattgtgcaaaatctctcgcgaaaaggttcagctcatccaaatatctcaggactcaacctatatttttcgaatgttagcgagcaaatagtagactaacgcgacaattcaattgctaggccgatctactcaagctgtgctctctcgcgctcattctacacccgaggcgcagtgtatgttatctctgacccaaggcaagagctatactaattggttgaaacagtacagcctgtcctcgacgatgcaaccaaggaaatcctcgcccagaaggaagaaatcacccgcttgaaggccgtggccgacaggcaccccttctacaagtacaacggggtttggtcgcgcgatctgcagaatctcgttagtacccgctcatatttacctttagtcgtctcttgtttatagaaactagcgctagccagcatgcttacagtctgttaggttgcatccattgagctatgcgcgtggctcggcgggctccaggagttcaaaggctctgaatcggcttcattcttgaccatggaggaggtggggaagtttcttgagagtatggctctactttgtcacttcgattgcgtctcggcttggtatctaactcgcattcgcgcagttcccgttaacctcaaggaggaagacgcgttccatctcacattggaggagtatcttcttgcgctgatttccatgattgaagagctggttcgtgtaacgccttgaggcttgatacttaagctttatctgacagaatatgccaggcccgtcttgctgttaacgcggttacccttggcgattacggccgtcctacggtgattggtaatttcatcaaggaactgttcaatggatttcagttgttaaatctgaagaacgatgtgctacggaaaaggagtgatgcgatcaagtatagtgtatgtctgatctgtctccctggttgagaaactcgctgatagctttctaggtcaagaaagtagaggatgtggtgtatgatctctcattgcgaaactt

SEQ ID NO: 19537 - DNA, 1035 bp, Emericella nidulans
ggggcattgacgatggtagtgggctttgtctcgtggttctatcttcccccaggaccgacgcagacggcgagctggttccgagggcgcaatgggtggttcagtgagagagaggaggtgattatggtcaaccgggtgctgagggatgacccaagcaaagtatgctcatcaagcacctctacttgactccgatactaatgtgtacagggcgggatgcacaaccgtcaaggtctgactttaaagctcctctgggccccgttgacagactacgatctttggccgctgtacgtcatcagtttgacgatgctgatccccacgagcccggtcacggcgtatctgacgctcaatctcaagtcgctgggcttcgacacctttgagacgaatctgctgaccatccctgcgtatgtgctcttcttgatccagcttgtcctttggtcgtgggtctcagaaagaatcaacaatcggatggcagtggtgggattctattctttctggtgtctgcccctgcttctggctctggagctgatgccgtcttcggcgagtccctggagctggtatgctgttacagtgctattgatcgggtttccgtatatccattctatcaatggtatgtcgcctcgctttgacgggatatctgtcactactcctaacaaatcgatacagtcagcctcacatctcgcaacgcaggcagtgtccgcacaaggacggttggtagtgccctgtataacatgatctgtcaggcaagttcgatcatctcttcgaacgtaagtccatcttctccttccactcaaaaaagtccactaaccttcctgtagatttaccgcgaagacgataagccgtactaccgtcgaggaaacaaggtcctccttgcactggttgcctggaacgtggtcatgaccattttcatcaagtgttattatatctggcggaacaagtcgcgtgacagaatctggaatgccatgagctctgaggagaaggataattacctgaggacgacgaaggacgaagggaataaaaggctggattttcggtctgcgc

SEQ ID NO: 19538 - DNA, 1036 bp, Emericella nidulans
ccccaccaccgcactggcaccaagtacaaggcttatcctacgtacgacttctgctgcccaatcatcgactctctggagggcgttacgcacgctcttagaactattgagtaccgcgaccgcaaccctcagtaccaatggttcttggacacactcaagctgcgtaatgttcagatctgggactttgcccgaatgaactttgtccgcaccctactttccaagagaaagctcacaaagcttgtcgagcagggcgttgtcgacggctggtcggaccctcgcttccccacaatccgtggtatcaggcgccgcggaatgaccatccctgctctgcgtgagtttatcctcaagcaaggtcccagccgaaacattgtcaaccttgactggacctcgttctgggccaccaacaagaagtacattgacccggtcgccccccgccacactgctgtcctcaagaaggatgccgtgaaggcgactatcaagggaggtcccgattcgccatacactcaggacaagcctaagcacaacaagaatcctgatgtgggtactaagaaggtgacctacagcagctcgatcctctttgaccaggaggatgccaagagcttcaagcaggacgaggaaatcacgcttatgaactggggtaacgccttcgtccgcaagatagtgacagatgcctctggtgttgttaccgagctggagctggacctgaacgagaagggtgacttcaagaagaccgagaagaaggttacttggttgtctaccgaccaagacctggttcccgttgaccttgtcgattttgactaccttctcaacaaggattccatgcaggaggaggacagtctcgaggacgtcttgaaccccaagaccgagttccacgaggatgccgtcgccgacagcaatgtcgctctcctggctgaaggtgatatcattcagttcgagcgcaaggggtactatcgcctggacaaggttgcctcacctggcaagcctgctgtcttctttaacatcccctccggtaagactggtaaatagattaacagttcag

SEQ ID NO: 19539 - DNA, 1036 bp, Emericella nidulans
ctggtgttcttcgtcacctatatcgtctgtcagcccattgccaccgctatgatccgcaagattgggccccggatattcatctcggtcattgtaatgagctggggagcctgcttgatcgtatgtttcggatattccctggtctaaagatctgcgcttaccgtcgcttactcagggatttgcgtattcccccaactggcagaccctgactggcttgcgcgcggtcttggggatcctggaggcgggcttcttccctggggcagtgtatctgctgtcttgctggtactcgcgatgttcgtctactgaccctgactattgtatgaatgcgcgagctgccactaaccatttatgctgtagatgaggtccagaagcggtactcattcttctatctgatcggctgttttgatccgcgctatcaggtatcctcgcatatggtttcagccagatggcacctctcgaaagcctcagtgggtggcagtggattttcatcatgcagggagtggtaaacagacccttccgagggaccaaagttcaatagcaatgctgacattcccagttgacgttcattgtcgggatcctctgcatgatcttcgtggtcgacttccccgataagggttacaacacttggggcttccttacgcagcgagaatgcgcattcatcctccgtcgactcgatcgagatcgatcagacgccaaccccgagccgttcaacctcgtcaaatttcttcgccccgcattggacctcaagatctggggatttgcgtttatcttcttgtgtgtcacccccagacgactatctctcctcggactaacagtttaatctagctccatcacaacggtcacgtacggaatcgcatacttccttcctattatcctccgcgacaatatgggcttcaacgtggccgaagcgcagtgtctaaccgcgccgccgtacgcactcgccggtatccttatggtgagcacatcgtgggtcgcagacagataccgcatgcgagccccgatccttgtcttcaacagcgttctcgccctgatcgggctg

SEQ ID NO: 19540 - DNA, 1036 bp, Emericella nidulans
cacgcatccaaccgtcagcatgcagtcgaaatggtggaacgcggagcctctttggatgacggccgagaaccagaacgtcaagagtgctatccacatgtggccagggtcggaagcgcatatcggaggcgtggagccaacgtatcttgataagtataacggctcagaggccctgtcgcgaaaaactgagcgaattttacagctgctggacctgcctggactcgagcaggagtcgacgtccagccctcagcgaccgcaatttattgccgcgtatgtccccaatgtcgatgctgatggtcacaaatatggacccaacagtacccaaattcggaaaacgatctcacaggcagacaatatgctggcggatcttttttcaggtcttcgagagcgcaatctcacggatgtggtgaatattgtgatcgtatcggatcatggtatggcttctacctctactgagcggctcgtccagctcgatgatctgatcgaccttaacctgaccagccatatcgacggttggccattgcgcggaatccgtcctaagcgccctgaatatctcaagacccttcaagatcagctggagcgtgttgcgtctcagtactcagacgcgatcgagatctacacccgcgaaaacatgccagaacggtatcacttcaagaacaacgatcgcatcgcccctctatgggtaatacccaagaccggctgggccatcgttgagcggcccgagttcgacgctcaggcagcactccagaacggtcagttttaccatccgaaaggaattcacgggtacgaccatgaacatccgttgatgcgggcaatttttatcgcccgtggccctgcgttcccgcatccacccaacagtcgggttgatgcttttcgtaagtggccccaatccgactaaatttcccttgctgacatgacagaaaacatcaatgtttataatatcctgtgcgactctcttggtatcaagcctcatccaaacaacgggacactgcgcctgccattgaagcctaatggccttcactcggatgaggatgcgcca

SEQ ID NO: 19541 - DNA, 1037 bp, Emericella nidulans
gctaatatgcttttgtgtcaccggcagacgagaataccacattgtcgtgttaggcgctggtaggctggacttctaccctaatatgaggataccgaaggaatagcactgattctgtttgtctgcacaataggaggagtgggtaaaagctgtcttaccggtatggagatccgtcgctctgactctttaccgctgccttcgtggtatggtctcacgatcgacgcggctcacttttggtagcgcaattcgttcagaatgtttggatcgaaagttatgacccgacaattgaggattcttatcgcaaacatatcgaagtcgacgtgagtcaatcatgtcctgcgcctgcattcgtcgatgctgacattaaatagggccgacaatgtatattagaaatgtatgttagatgattgagtacaggaccgcgggggctcggtgaatgctgacctttgatggcaacagtcttgacacagcgggtacagaacagttcagtaagttcagctcgtcccttagcagccgtttctctccgtgtaacgccttcttagctgccatgaggtaaccagacaccttattctggctcgcttgatagtatcggcgacatgttgattttgggctaacccaattcagagaattatatatgaagcaaggccaagggttcttgctagtcttctccatcacgagcatgtcttctcttaacgagctagctgaattacgagaacagatcgtccgtatcaaggatgatgagaacgtccccattgttatcgttgggaacaaatcggacttggaagaggaccgcgcggtaccccgtgctcgcgcattttctctatcccagagctggggcagcgctccgtattacgagacttcggctcgtcgacgagccaacgtcaacgaggtctttatcgacctctgtcggcagatcattcgaaaggatgcacagggaagatcagaggactacgaacttgcgccgcgcaagcgtgagaatacaagccgacaggaaagaaagcgaggaaaacggcgagaacccaaacgaaaggggccttgcg

SEQ ID NO: 19542 - DNA, 1038 bp, Emericella nidulans
tgtgctgcaggagcatggcaccaccatcaccaaggtcttctacgacaacatgctcactgcgcaccccgagctcaaaaccgtgttcaatgtctccaacaaggtccacgggcaccagccgcaggcgctcgcgggcgcgctcttcgcgtacgcgagctatatcgacaacctgggggtcctctcgccggccgttgagcgcatctgccacaagcacgcctcgcttgctatccagcccgacgggtaccagatcgtcggcaagttcctcctcgaagcgatgggccaggtgctcggtgacgcgctcacgcctccgctgctcgaagcctgggcggccgcgtactggcagctcgccaacatcatgattggcaaggaggccgagttgtacaagtccgccgacgggtggactgatttccgtgacttccgtgtcgctcgtaaagagcccgagtcggacgtcatcacctcgttctacctcgagcccgtggacggcaagcctctgccgtctttcctgccgggccagtacgtctctatccaggtgcaggtgccgcaactcaaccacgcgcaatgccgccagtactcgctcagcgaccagccaaagccaacctactaccgtatcagtgtacgcaaggaccttggtctggatgcctctgacccgtccgcgcccgcgcatcccggctacgtctctaacatcctccatgacaatatcaatgttggcgacatcgtcaagctcacccatccctatggcgacttccacctcaccgatgccgccgcctcaagcccgcttgtcctgatctccgctggcgtcggtctcaccccgatgacatcaatggtgaacacgctgcgcaccgccgagtccaacacccgccctgtacatttcatccacggcgcacacacgtccgcatcgcgtgccttccaagcacacctgcagtccctccccaacctcaaaacaacgtacttcctgacggctccaaccgagtcggacaagcaaggcgagaactacacatacaagggtcgcgttgatctatccaagatcgccgacgaggatct

SEQ ID NO: 19543 - DNA, 1038 bp, Emericella nidulans
gatatcaagactcatgttcgccgtgataacatatacaaagtcgtcctagccgataaacccacgtcgcaaaatacagtcgctctgcatcaagatgggctcgactactcgtacttttcgacagtgaacattgggaccccggggcagccggtatggatgatgttggatacgggaggtgcgaatacctgggtgtttggggcagactgcacgtctgaaccctgtcagatgcataatacctttggcgataattcctcatcgactgtgaaaacgacgagtgatactttcatggtgggatacgggtcgggtaaagtcagcgggaatcttgttacggatcgcctcaagattgctgatatcgatgtacaaatgacctttgggttggcgactaatgcgacggacgactttcgggattaccccatagacggaattctagggcttggtcggtccaatgatacttccatgggcggcaggcgtgcgttcatggacctggtcacgcaagagggggatcttgattccaacattgttggtttccacatgtcccgcaactcggacggagaaagaaatgggactgtcacgtttggtggtgttgataagaccaagttcgagggtgacatctcgtacactaacgttgttgagtcaagcatccattggagtattcctttggatgacgcgagcgtgaatggcgaatcctgcgggttcatgggcaagacagccatcatcgacacagggacctcgtactcactgtttccaccggacgatgcaaagaccatacattcactcattccaggctcgaagcaactttcggacgagaactaccttgtcccatgcgactcgacagctaaagtgcaattcaccttttccggtgtgagctacaccatgtctccaaaggattatattggagcaaacctggaatccggtgacggctgtgtctctaccattattgcccaggccatatttggtgacgatgtcatgatactcggcgacacctttctcaaaaacgtatacagtgtttttgactttgataatgaccgcatcggctttgcg

SEQ ID NO: 19544 - DNA, 1039 bp, Emericella nidulans
tctacaatgccatcctcctcattagccgaatatcttgcgaagaactaccttactgcggacccttcgcctcccacggatcgccccaaaaagaagcgcaagaagaccaaagctgccgaagtagaatcacaagggctcataattgcggacgatgacccacccgatctccggagcacggctacgctgagttcaaaagaaaatgatgagtacggacctgttgtgacaggcgcgcgaagcgcagagtttcgcaaaactaataagagtaattggaagactattgggtcgtctacgaacacgggtacggatacagctacagctacggggccaaatgctggacgggatgaggcagacgctatattagcggatgcgatggctgaggaggatgcgaggcgggcagcgggtgatgaagacccgatggttgtggatcaggatgataatgaagacgatggagggctgcgaatggaatcgggcgctcgcgcgggtctacagacggcggaacaaacagcagccatggtagcagcgcagcagaagaagcgaaaggcagaagaagcgcaatataaagggaaacaaggacacgcacaagagaccatataccgagacgcctcaggacggattataaacgttgcgatgaagcgggccgaagcgcgacggctggaggaggagaagctgatcaaggaagcggaggcgaaagaggcgctcatgggtgatgtgcagcgggctgagagggagtccaggagagcggcgctcgaggaggcaaaggtcatgccgttggcgcggactgcggacgatgaggagctgaacgaggagttgaaagcgcaaactcggtggaacgaccccgcggcgcagttcctgaccaagagtacagggggtggcaggagcaaaacggggaagccgctatataagggggcatttcagccaaatcgatatggaatccggcccgggcatcggtgggatggtgtggatcggtcgaatgggttcgaaaaggagtggtttgcggcgcgcaataagaaggagaggatgcaggctctggaatatgagtggc

SEQ ID NO: 19545 - DNA, 1039 bp, Emericella nidulans
gagggccatccgggctcagtgctgccagcggtctagctcgtgttctaagaaaaatagcgctcttcgactccggggaataccgcaacaagccaactaggcacatgcacgatgttattgggagtgatcgtatgttccgagttacctacctttccttctatgcacagtcttcagcgagcccccacgctgatataattaaccagatgttgaccctgcggaattccgcgccgctgcccgtgcccaaatatctttctacaatgttaccacattcattgacaccaaggtcgtctctatcaacgccactggaactgccaatcggaccacttccttcaccgcaacccttgctaacggaaccacctacaccggccgcaaggtaattcttggcagcggcgtcaaagacgctctaccagaccaagttcccggactccgcgaggccttcggcaagggcctctactggtgtccgtggtgcgacggctttgagcatcgcgaccagcccgttggggttattgggaatttctccgactcgtacgacagcgtgcgtgagctatacccgacgctaaatcgccagattagggtcctttcaaacggcactgcaaatgatacagcgcagctcgagcggattgacaagaaggattcgaactggagggctgtttttgaggcatacaatgttacaatcaacgataggactatccagaacatcacgagagtacaagacggtggtgaggttcaggaggaagtgattcgaaaggaactcgatatcttcagggtgtacatggacgatggcactttcgaagagtgtggagcaattatggcaaattatggtacttatcaggcgtctacactccccgctcagatgggtttgaggatactgggtggtaagatcgatacaacagcgcctggactgagaaccagcatgaaaggcgtttggggggttggcgacgcgaatagcgacaacagtactaatgtgcctcatgctatggcgagcgggaagagggcggctgtttactgtcatggtgagttttggttctctttcaaggacggg

SEQ ID NO: 19546 - DNA, 1040 bp, Emericella nidulans
tctatttacgatactatgaggtttaatttgagatggacagccgttgcggcggcagcagcgattcagtcgtgccttgcgcagacatatactgattgtgacccaacagagggtatgggccccctcaacaccagcactggactgtacttacaaatgattgtcgatacgtagagacctgtccagcagataccggcctcgcgcaatggagcttcacgaccgacttcacgtccggcgactcggcctttgacggctggaacgtgacgtctggcactgtaccgagcacctcgctcggcgctgcatttacgataaacgagcagggagatgccccgaccatcgagacagaattctacatctttttcggctatgtcgaggtcaagatgcgcgctgctaatgggacaggaatcatcagtactgcgatcttggaaagtgatgacctggatgagattgactgggtatttctccccttctcgagttcgagtacaagtcaccatgaggtacatggaccggcgatgagatgatgctaatttggtgtgcctaggagcaaatcagcacatttgacaaccaaatcaccacaaactactttggcaagggcaatacgacctcctacgaccgtgccaccaccgtctcggtcagcaatccgagcaccgagtttcatacctacggtgtctcctggacagcctccaagacagaatggtacgtcgatggtactcttgtccgcactctcaactacgcagatgccgttgacggcaccaattatccgcagacgcccatgcgcgtgccgatcggcatatgggccggcggggaccccaacaactcagagggcacaattgagtgggctggaggcgagactgactatacggctgggccgttcacgatgtatgtcgacagtgtcagtatcatcaactataacccggccgagagttatacctggacggatatgacgggagactatacgagcatccaagctagcaatggcacagacggcacgtcttcaggtacggcatccactctcatctccactcctactccctccacgcgtccgg

SEQ ID NO: 19547 - DNA, 1040 bp, Emericella nidulans
gcaaaagtccaagcgcccacatcaacatgacaccgtggttcaactacactactttcgacatctttggggatctcggttttggcgagtcctttgactgtcttcagcactcaagataccatccatggattgccttactattcgacagtgtcaaggccgccggcttcgttattgccacgcggtattatccgctgattgaagccgttctactcaagtgtgttccaccttcaatgcgaaaaatccaacgagatcactatcagcagatcgtcgacaaagtccagcgccgactgggctgggaactgcagcgccccgatttcatgtcttacgttattgacgagaggggttggtcttcgacttgatgcaggtgagctttacgctacctttatgattttgaccacagcaggcagtgagacaacagcaacagcattaactgggaccctaaactacttggtaaatcatagccccgaaagtcttcaacgactcgagaatgagattagaggtgctttttccggcctggacgcgatcacgcttgatgcagtgcgcaatttgcccttcctcaatgcagtcatacaggagggactccgactatgtccaccaattccatgggtattgccccgcctcgtccctcaaggaggcagtatgatatgcggtacatggctgccaggtggggtaagcgaatgatcctcggcgccaagcagtgatgctatttagcaagcacctgggtaaaccacctgctaaccggagagtccacccagaccccagtgtcaatccaagcatacaccctcaatcgtgacccaaccctctttaaccgagccacctcatttcttccagagcgatggctggcgtcttccacgtccgactccagttcttgctttttcaatgatcagcgccaggtcgtccagcctttcagcaccgggccccgtgcatgtctcggccagcacctggcgtgggccgaaatgcggctgatacttgccaaattggtctgggtgtttgactttggggcgattgatggccagggtgtcaattgggaggacctgcggacg

SEQ ID NO: 19548 - DNA, 1041 bp, Emericella nidulans
gcagtagcccaccatgaggctctctactttctttctcctgatggctccggccgcagctcgctcatacctgtcatggatggctgactcctggatcctcaacaaccgggaacacgaaggcgcctactggtatggccgcgccacaatttacgaaggctacgaagccgcgtactcgctctacggaaacgagaccttgcttgaatggtaccggtcgcagattgacgacgtggtggttgcccctgatggcagtatcgtcgacttcaacgagacgtactattcgctcgacgactaccgcatcgggaataacatcctgtactggtacgagcgcactggcgaagagaagtaccgtctggccgcagacagcattcgcgcaatgctcgaccggcacccccgcacggaaacgggggggttctggcaccggcagccgaattatccgcatcagatgtggctggacggcatttttatggcggatgtgttttacgccaagtggacaaagctctttgacgcgaagaatataactgcgtgggaggatatcgtcttgcagtgggataagattgaagccgtgacacgggatcccggtggcactgggctactcgttcatgggtttgatgagagcaaggccgccgtctgggcggacccggttacaggagcttcgcctcttgtctggaaccgtgctgttgggtggtattttgtctccctgatcgaggtcctggatatctaccccaaggacctacccggatacaaacgacttttaggatactacaagaggctcgccaaggcgatacttcgcgcccaggacagggagacagacggttggtatctaatcctgagcaagcagtatgttggtgccgaagggaactacttcgaaagctctgcggccgctatgttcacctatggctggctcgccggcctgcggaagggttatcttgacaagaagacgttttcgaaaccagcggcaagggcgtacagacatttaattgacgattttgtcacgaaacatcgcaatggaaccctgacttatgaagggactgttcaggttggatc

SEQ ID NO: 19549 - DNA, 1041 bp, Emericella nidulans
cacgcaaagaccagggctaatcaaatcctttgcactggctactgtttgcgtcagcggtgcagcggtttccctgtatcttggcaaaagcatgtatgcttcctggtcgggactctcagggcttcacggcctcaaaaaatcgctccacctgccaagctcgcttttcaatgcagggctcggggggttctatacaggctttgccgtagcaactggaatatccagcatcgtcggctcggtggtcgcatcgaagctgtctgctatgacacagatccagtccggcttcacgaagtacccaccgcacatcaagagccgcaagcctcctcgagtcaaccctcatctcttgaaaggattcctcgatcccaaggaatacaagagtttgccacttgttcagaaaaagacgcttgcgccaaacgtttacaagtttgtcttccagctgcccggtcgacaagacgttataggccttcccatcgggcagcatgtagccatcaaggcgaacatcgaaggcaaaacagtatcgagatcctacaccccgacgtcgaataatatagaccgcggtgttttggaactggttatcaagtgctatcccgacggtctcctaacgggaaaataccttgcaaacctgcaagttggagacaaggtcgagttccgcggtcccaagggcgcaatgaagtacaccaagggcctttgcaagaagattgggatgattgcaggtggcactggaataacgcccatgtaccaacttattcgggcaatctgtgaggatcccactgatactacggagatcagtctgatctatgccaaccgcaggggagaggacattctgatgcgaagtgagctggaggagtttgcgagaaatttccccaaaaaccttaagatttggtacatgttagatacaccgccagagaagtggtcttttgggacagggtacatcacagctgagatcatgagggagcatctgcccatggccgacaaggataccaaaatcatgctctgcggtccaccgggaatgctgatgcgtgtaagaagggtttggtggcattgggg

SEQ ID NO: 19550 - DNA, 1042 bp, Emericella nidulans
gtagacatgactatacgaagcgtgaatagggatttttggtgtacaacagatattgtaagccttaaggcatcaaatttctccgcttccgctctccaccgtgtgcgtcgcatatcgttttctcacaacacactataggaacaccagcctgattctttgaatctcgttattcgccatggaaatcgacgacattctcgcatccgtcgaccacaccgacatctccagcccggagtctacagccctcgaccaccaactcctcacccgtttctgggtcgccgagcgcagcgtcccagagcttctgccctggcccgcgcgattgatggagcgcatgatggaacgcgtacggcagcaggtactgaaaccgatctctaccccttacatctctgcatatcgggtcaatcgctaaagattctgcagatcgaaacgatcgaagacctcgccgccgcttcctcagaaccaacaagcagcacagtaaatccaaacgcaacgctcaccctctccattctgcaaaccgacctctcccgcagtcaatatctcctccgctcattactgcgcaatcgcctctcgaaactcacaaagcacagcatgcattacctacttctctcttctcacaatccaccaaatcccccaccagcctcgggaagctccgaagcaaagtaccaaacgcctgaagactcagtacccctcccggacccagacaacctcccaagatcgtcaccactcagtccctccgaaacaacgttcctctatacacaccagcaactgctcgcgaaacatttcgggtcgagctttctgaatagttttccgccgcagcttcgacggttggatgataatgcgggcgggacgagtatggtgcaggggccggatacgcgggaggctgtttttgtaaggtgtttggcagatgaggtgctgcttcttgcgccgccaggccccggcgagggtgatgatggggaggaggtgtatgggggtacgatgaggatgggagacgtttgggttgttaggtgggaggctgttaaggaggcttgggagaggggagatgtggagg

SEQ ID NO: 19551 - DNA, 1043 bp, Emericella nidulans
cgacgatacgcctggcaccccccgagtgcagcttctcaccgaagcgctccctgttctctcccccacctccgtgctcatccaagtctacgctgtcgccctcaattaccgtgacgccaatattgctaacggccggaacccgtggcctgtcacaccgcatggcatcccctgcaatgacgcagcgggcggaattattgccagaggcaagaatgtcaagtccatctccgtgggcggcagagtcgcgccgatcatcgatacggagaacatcacgggtcgagagcccacaagatcctggctggctgctgacgaacacaatgtcctagctgattatatcgtctttgacgagtgcaaggtttgcaagttgccggctcatctagactgggtccctgcctgtatcattccctgcgctggagtcacggcctggtcgtcattgctgggattcggcatggggacgacagtgctcatccagggttgaccctaccctacactgtgaaacggttagcgagcgctggcctgatttaggaactggtggcgtgagcatgttcacgctgaaacttgcccaataagccggcatgaaggtgatcatgacctcatctagcgacaaaaaactattcaagatctcagcacagttcccagattccgccactactgactgtcaactatgcgacgcatcccgagtggcatgaagaagtcctcaaactcactgacgggcgtcgacctggtcgtcgaagatggtgggagcaattcgctcgtcaagagtatgaaatgaacccgtcgcggcaggacaatcagccaagtggggtatctgagtaagagggacccagcgcatatggatgagttcttcgatgtgctgattggccggaggatcattctgcggtgattcaaatctcctcctcaatcgtcagtggtcgtttaatgctttttcatgttatagaggcatcaatggcgggtcgaagcatgacatggatgatctttgtgcggctctagctgcggtgcagatgccgctggacgatataatctactcggttgagccgtcgaaaaggcgg

SEQ ID NO: 19552 - DNA, 1043 bp, Emericella nidulans
cgtcctctgatgtcgacgtgcagtattattgcaccactgcccttagtaacatcgccgtcgatgcatcaaaccggaaaaggcttgcccagaccgagtcccgattagttcagtcccttgtgcatttgatggactcgtctactccaaaagtgcaatgccaggctgccctggcgcttcgaaaccttgcctccgacgagaagtaccagctcgagattgttcgtgcaaaggggctaccgccgctcctccgccttttgcagtcatcttatcttcctcttattctctctgcagttgcctgcattcgcaatatctcaattcaccctctcaacgaatcgcccatcattgatgccgggttcctcaaaccgctggtcgaccttctgggatcaacagataatgaagagatccaatgccacgcaatttctactctccggaaccttgccgctagctctgaccgcaacaaagagctcgtcctccaagctggtgctgtccagaagtgtaaagatctcgttctacgcgtacctgtcaccgtgcagtccgagatgacggctgctatagcagtcttggcacttagcgatgagttgaagcctcatcttcttagcctcggtgtctttgatgtattaattccattgactgagtctgatagcattgaagttcaaggaaacagtgctgctgcccttggcaacctctcctccaaaggtatgttcttactcgcgttttccacgtgcccacactggcgtgaagtatctgacgttttgtagttggagattactccatctttgtccgagattgggcggatcctaatggaggtatccatgggtatttgaaacgattccttgctagtggagacccgaccttccagcatatcgccatttggactcttcttcaattgctcgagtcggaagacaagcgcctagtgggctacatcggaaaatctgatgacatagtccaaatggtaaggtcaatatcggacaagaatatcgagtccgatgaagaagataccgaggatggtggcgaagcagaggtcatcgcgttggcacggcgatgtctcg

SEQ ID NO: 19553 - DNA, 1043 bp, Emericella nidulans
ccccgaatggctcggtttcgtcaagggtgttgtcgactctgaggatcttcctctcaacctgtctcgtgagaccctgcagcagaacaagattatgaaggtcatcaagaagaacatcgtcaagaagactcttgagctcttcaacgaaattgctgaagaccgcgagcagtttgacaagttctacagcgccttctccaagaacattaagctcggtatccacgaggatgctcagaaccgcaacacccttgccaagctcctccgctaccagtccaccaagtctggtgacgagaccacctctctgacagactacgtcacccgtatgaaggagcaccagaagcagatctattacattactggcgagtccatcaaggctgttgctaagtcgcccttccttgacaccctcaagcagaaggactttgaggttctgttcctggttgaccccattgatgagtacgctttcactcagcttaaggaatttgacggcaagaagctcgttgatattaccaaggacttcgagcttgaggagaccgacgaggagaaggctgagcgtgagaaggaggagaaggagttcgagaatctcgctaagagcctcaagaacatccttggcgacaaagtcgagaaggttgttgtctctcacaaacttatcggttccccttgcgccatccgtactggtcagttcggttggtccgctaacatggagcgtatcatgaaggctcaagccctccgtgacacctccatgagctcctacatgtcttccaagaagaccttcgagatctcccccaagtctcccatcatcaaggagcttaagaagaaggttgaggctgatggcgagagcgaccgcaccgtcaagtccatcactcagctcctctatgagacctccctgctcgtttctggcttcaccattgaagagcccgccagcttcgctgagcgcatccacaagctcgtgtctctcggtctgaacattgacgaggaggccgaggctgagcccgccagcaccgaggaggcacccgctgccgctacgaccggcgagagcgccatggaggagg

SEQ ID NO: 19554 - DNA, 1043 bp, Emericella nidulans
catctttgcaggcgtcggagtatatcgctgattatattatcagtatgtacactctacggcatattcagtaattaggctatactaatgttctctctactggactcaaggtcgtatcaaggcatacaaacctagcgagagcaatcccttcgttcttggcctaccaactggaagcagcccagagatcatctacaagacccttgtccggcgttacaaagctggagatatctcattcagacatgtcgtgactttcaacatggtgaccacctttcctcagatttggtcagttcgattactaacgatataggacgaatatgtcggtcttccgcgcgatcaccccgaatcgtaccatagctttatgtacaagcatttcttctcccatgtggatattcctccgcagaacatcaacattcttgatgggaatgctacggacctggccgctgagtgcgcctccttcgaagcgcgaatcgctcgctatggtggcattgagctctttttgggcggagtgggttctgatggacatattgcgtttaatgagcctggctcatccttgaacagccgtacccgggtgaaaaccctggcttacgacacgattctggcgaactcccgtttcttcaataatgacatggcccaagtgcctcgtatggccttgacagtgggcattcgaacaattatggaagcccgcgaggttgtgatcgtggcaactggcgcccataaagcattagcggtcaaggagggcctagagggtggtgtgaaccacatgtggaccatctagacgcttcaactgcaccagcaccctctgatcgtctgcgatcgtgacgcaacgctcgagctcaaggtcaaaactgttcgctattttgagtctatcgagcaagctgggacggatgcgcgcactcagggtcctcctcttgtctacaggccccgaacctacgtccctgctccgatgacagtgaacaaatccaacggggagcttactccaattgccacaccggaaaaaacatcgaaagacttgagaatcaacactgacctcacgcggtcattcgagg

SEQ ID NO: 19555 - DNA, 1044 bp, Emericella nidulans
tgcgggcctcgattactacggacgccgattgggacatgctcatccgacaagacgataaagatattcgagattgagggtgacacgcacaaacttgtcgagactttgaaagggtgagcgtacccaacccatatagtcgaaaccagtcaattgctgatgctattccagccacgaaggtcctgtatggtgtgtcgaatgggtacgtacaacggggcaaccgtcgcaatggagcatcaaacatacctacaaacaatggtggactaactcgtgcctttcgacatgacaggcacatcccaaatttggtacaattctcgcgtcctcatcatatgacggcaaagtgctcatctggcgcgaacaacatcaaagctccactgcccctattggcagcggtgcctggacgaaagtctttgatttctcccttcacaccgcctctgtgaacatgatttcctgggcccctcatgaaactggatgtcttctcgcctgtgcttcatctgatggtcatgtctccgtcctcgaattccgcgataatagctggacccaccagattttccacgctcacggtatgggcgtcaactccatcagctgggcccctgctgcctctcccggtagtctggtcagctcaaaccctggtattggacagcagcggagatttgtaaccggcggtagtgacaatctacttaagatttgggattacaagtgcgcactatgcctcctacataggaaagtcgaagttgctaatatatattctcattagccccgagacaaaaacctacaatgccacgcagacgctggaaggtcattctgattgggttcgagatgttgcttggtcgcctagcattctctccaagtcatacattgcgtctgcgtcgcaagataagaccgttcgggtttggactgctgatgcatcaaaccctggccaatggacgagccaagtacttgaatttgataatgttctgtggcgtgttagctggagccctagcgggaacattcttgctgtaagtggaggggacaacaaggtcagcctgtggaaggaaaacctacgggggc

SEQ ID NO: 19556 - DNA, 1044 bp, Emericella nidulans
gccttggccaagtcgcaggactcggacacaggtgcggcatttgactcgctgctagaagacacgcaacaaacaaaagaaggattgacagggcagccgttgacagactccggtaatagggtgaatctgtctcagcaacctcggcaatgggactcacgtatcgattcgaatgggcggccgagcgccgtaatgctagaccaaaagatccctgagattgttgaaacccctgcgcctgagattcatacaccgccacaaaactcacagcgcagagcacttcagtccgtgtatccagccatgatactccactccagtctaagcctgacaaacggccggtcgcgtctcggacgcactctacccatccgacagagcccgcgtcgaccttgagtgaatttgccagtaatcctcaggtgttaccaggcaataccactagaacggacaatctgtcgttcattccaactttcccagaagaccgcaagtccgaatcgaagaaaagccaggataaaaaagattcagatggtgggcgcaaatcgagttggcattggtttctgggctctgaggataaagaaaaggagaagaagaaagatagcgaatcgaaaaagaccaaagcaaagattgcggacaaagttcatgatgctgcgaatattctccccgcttccaacgaatccgctcaacggcgtgagagcacggtttttgaccgacatgacgcgagactcgaagaggagcgcaagaaggacaatgctcggagatcgtcagcggaaaccaaaaaagagaaagagtctggtttattctcttctatattcggtggcagcaggaaaaagaataacgaacatcaccataaaaaaagtctgtccagaacactatcaccggagcccccggtccgcatactacagccggatgtcgactatccctggaccagattctcaatactagaagaacgagccatctacagaatggctcatatcaagctggcaaatcctcggcgtgctctgtactctcaggtgcttctgagcaactttatgtattcgtatctcgccaaagttcagcaaa

SEQ ID NO: 19557 - DNA, 1044 bp, Emericella nidulans
tcctcgcagcattcagcacccttcccgccgctgccaaggccacttacccttttgctcctgacacgtttgacggctcctataaagtacgtgcagaatggaaaactagaagaagcactgacatcccaggacatcggactccccaccatctacgatctctccgcgacgcagtcgaccaactacaacgggtcctgggcgacgggttcatggataaccagcgtaacgggagggcaatattttgtcgtctcgcattacgtgaatgacggaattcacgatgtctaccggtcctcgattcttgatttaagcagcctgaagtaccgctacttcttccaagccggcaatggctcgtatactgcctcgcccccttctcatctcaaggccggcgtggggaagggcaatggtttcgaaggcatttcgaacgacaactataccactatgcgtgttcagagctcgcaccctaatgtcacgttcgatctcacctaccatgcaacgacaaaaccgctcattaatggcggcgcgggtgttgtgatgctgggcgccagcgaaagcaagcaatggagcctcccggcctgttggaccaatggttttctgatcgttggcgacgagcagattccaattgatccaaagcgctcactaacctggtatgaccggcagtgggggaccggtggcctcacaaactggacctggtatggccttcatattcccaaaactggccatgtccttagtatctggacaggtgatacagatgccgaccgggctgcgccaattacacctgtgcgatttgctactgttcgcaatgcctacggggcccagacagtctgtaatattacttggataccagatctcagtcacatattccactcagattccaccaacaaaagttatcctcttgcctggactgttgagatccccagttatgatgcgatcatcaaagtcaagagccgcacggagaatcagttgaatactggttcacatgggtccgaacccgaagcttataatggatttgtgacattcgcaggccagttccaggggacagagactgaggga

SEQ ID NO: 19558 - DNA, 1048 bp, Emericella nidulans
ggtggacttgctgaaggtagaccaattggccttattacgcattcttgttacttgtgcggcgtgcggatggctaatcattgacttctccgacaacagactcgcatgcaagtcttgcatcccaccaccggaggtctctatacagggttgacgcatgcggtttccacaatttaccgaattgaagggtggcggacactgtggaagggcgtatcgagcgtgattgtcggtgctggtaagcagacgaggccaaggtcgatacgattggcgcatcctacgggctaacttttgggctctactttttaggccccgcgcatgctgtctatttcggtacatatgaggttgttaaggagatggctggtggtaatgtggatgatggacaccatccattggcggccggtaagactgtaacttacaactttacggagaaaatgctgactatttcaagcaatgagtggtgcggcggcgacaattgctagcgatgccctgatgaaccctttcgatggtgagttttgacaacgcgtgcgactattaaaaagagagctttttctcacataagcagtaatcaaacaacgaatgcaggtacacggctccatacacaaaaccatcttccagtgcgccaagtctgtctacaagactgaaggtttccatgctttctacgtctcctatcccacgaccctctgcatgacggttccctttacagctactcagtttgtcgcctacgaatccatctccaaggttatgaacccgtctggggattacgatcccttcacgcattgcattgctggtggtcttgctggtgctgttgcggctggtatcactacgccgcttgacgtggtgaagactctactgcagacccgtggcctcgcgcagaatgaggagattcgcgcggtcaagggactattcggcgccgcgaccgtcatcaagcgccaattcggttggagaggattcttgcgcggtgctcgcccccggatcatctccacgatgcccagcactgccatttgctggacttcgtacgaaatggccaaggcttatttcaagcgccagtggacaa

SEQ ID NO: 19559 - DNA, 1048 bp, Emericella nidulans
tgtcgctcacaaattgtcggttctacgaggagaagtacccggaggttgacagttatgttatggtcaacgttaagcaggtatgagatcggattgcaaatatagccatttggaacagcaaattaatataccgactcctcatatctagattgccgaaatgggtgcctacgtgaagcttctcgaatatgacaacattgacggcatgattctgctctctgagctttcgcggagacgtattcgtagtatccagaagctcatccgcattggccgcaacgaggtcgttattgtgctccgtgtggacaaggagaagggtgagtgcaacgtgagcagctagcgagagaatttctaaccctttgtcttcgacgttaggttacattgatctgtcgaagcgacgagtttctccagaagatgttatcaaatgcgaagagaggtacaacaagagcaaggctgtccactcgattctgcgacatgttgcagaggcaactcagacccctcttgagacgctataccagcagatcgcctggccgttgaaccgaaaatacggccactcgcacgatgctttcaagatctcaatcacgtaaggctcttccagctagacgtcagaacttcgcgtaactcatattattcttataggaaccccgatgtttgggccgatgtcgaattccccaatgaagccgtgaaaaaggagctgactcagtacattggcaagcgacttacaccccacccgacgaaagtgcgcgcggatattgaagtcacctgctttggttatgatggtatcgatgcggtcaagaacgctctgcggaccgctgaggcagagaacactcctgagaaccaaataaaggtcaaactggttgctcctccgctctatgtcttgactagccaatgtctggacaagacacacggtatcaagatgcttgaagaagccattgaacggattgagaccacgatcaaagcgtctggcggtggctgcactgttaagatggctcccaaggctgttacggagcacgatgacgctgctcttcaggagctcatggagaagcgcgagcgtgag

SEQ ID NO: 19560 - DNA, 1050 bp, Emericella nidulans
  unsure (1)..(1050): unsure at all n locations
acggcgaggacggctacacgatcaaaggcgataagtccaagaaggacactattcccaccatcaacccagccctgaaccacaccaccatcggccgtctcgccagcaccgtagatgactacgaattcgtcatccaccctggcgatttcgcctatgcagatgactggttcctctcactagacaatctactggacggcgagaacgcttatcaggccattcttgagaacttctacgagcagctggccccgatctccggtcgaaagccgtacatggccagtcccggcaaccacgaggcggcatgccaggagatacccttcacgacgggtctctgccccgacgggcagaagaacttcaccgatttcatgcaccggtttggccgaaccatgccgtccagtttcacctcggtctccaccaacgactcagcgaaagtgttcgccaaccaagcgcgcgaactggcgcagccgccattctggtactcttttgagtacggcatggcgcacatcgtcatgataaacaccgaaactgatttcgaagacgcgcccagcggaaaaggcggttcggctcatctaaacggcgggcctttcggcgcaaagaaccagcaactcgagttccttgaagccgacctggcgagtgtcgaccgcgatgttacaccgtgggtcatcgtcgnngccantcgccgtggtacacggccggcagcgcatcacaccgtgccaagaggcattcgaggatctgctgtatacctacggcgtcgacctaggtgtcttcgggcacgtacacaacgcgcaacgcttcttgccggtctacaacagcgtcgcggaccctaacggaatgcaggaccccaaggcgcccatgtatattgtcgctggaggcgcggggaatatcgagggcttgagctctataaccaagcagttggatttcaccgagttcgcaaatgatgaggattatacctattcaacaatcaggtttttggatcggaatcacctccaagtggactttatcaactcggtctctggggaggtgttggatacgagcacgctgtataagagtcatgag

SEQ ID NO: 19561 - DNA, 1051 bp, Emericella nidulans
gaatccaatttactcagcttcatggacagaatagcgctcctgacagcgcagtactttcaacaagtcgatcctccctctctctctcttcccgatggccccgccctcgtttcttccaccatacaaaccgccatctatgagaaaatgttcaatgaggacacagcatggcctctccctccagcttcctaccaaacacgcgtcttgaagacgattatcgcacaaattgaaaaatcaatttccaacactgaggaggatgtatgagtatgcctaagctttcacagctattgcaagatcaaagattataccaagtcctcgcgcttcgatatctgacctaagtggataggaaattatcgacagtctcatggagaaatggacctctttactctcaacaccaaaaccttctgctctccaacaagcgcagaagctcacctacatcaaatacagcgctcccgtctccttaatacctgtttcagagagctcatccgaatgtgatggaaccatagacccaagaacaattataacctctgaaaaccgctcccttattctctccggcgggaccactggtttccgcacctgggaagcggctctacacctaggcacattcctctcaacgactagggctggcaaatccctggtagcaaacaaacgcgttctcgaacttggtgccggcaccgggtttctatcctttctttgcgcgaaacatcttggtgcggagagcgtcattgttacggatcgggagcccgcccttatcgaacaaatcgatgattgtattgacaaaaatgggttggagagaacgcaaatccaggcgggaatctgggaatggggaatgccacttcaggtcccttcactcttagagaaaaatgatcgtgcagggtttgatattgccctcggagcggacctggtatgactcttcagcacaacgatgcgacacctactgattcagcgtagatctacgactcggatatcgtgacccttctcgtctttacaatcaaagatctcttcgacaactactccctgaaggagtttatcattgctgccacagtccgtaacgagg

SEQ ID NO: 19562 - DNA, 1051 bp, Emericella nidulans
tgccgcgtcggtattcgtcacccgattcttcaccggcttctttggatctgcgccaatcagcaatgtcaccgcagccctcggcgacatctggagtcgcgagagacgaggaatagctgttagtctctacgcagtcgcagtgaacggtgggccctccttaggccccgtcatcggcgcagccctcgtcacaaacccgcatctcaactggcgctggcccggctacattctcgcgatttgggtcatggtcaccttcgtcatggccttcttcttcctaccggaagtctaccctttggtactgttgaaaagaaaagcgcagcgctgcgcaaggaaaccaacgacaaccgctattaccacccgcacgagcacctcaagctcgatgtccactctatcgtcacgaaacagctttctcgccctatgatcatgctgttcaccgagcccgtagtcacctgcattgccatctacgcctccttcgtctacggcgtgatgtatctgacgctggaagtcttccccatagtcttcgaggagatccgcgcctggcatccggtcgtcgcagcgctgcctttccttgccctactgataggagtcatctcctccgtcggcctcaatatctggaaccaataccgctacaacatcatcgccaagaacgcaggtgggaaggccgttccagaagggcgccttccaccgatggcattcggggcggtgttcttcgttattggcgcgttttggttcgcatggactgcgaacgcgcctcatcactggattctgccttgtttcgcggccttgttcatagggattggcttcaactgcatcttccagcagtgtctcaactatcttgtcgacatgtatggtatatatgcggcgagttcgacggctgcagtgaccttcttgaggagtatcatggctgcgggattgccgcttgctgcaaggccaatgatcgatgcgatggatgttggtcctgcggtgtcaatcatcggcgctgttgcagcggtgttactccccattccgttcctgtttatgaagtatgggtcgagactcagggggctgtcgaagctga

SEQ ID NO: 19563 - DNA, 1052 bp, Emericella nidulans
atggttcactccaaagtagttagtatgtgtctctttgttttcaatcaatgatctacattgtgcaacatgtccaaagaagatgaagacgagactaaccctttgaaaagtcatcggctccggccccgccgctcacaccgtcgtcatctacctttcgcgggcggaactcaagcctgtcctttacgagggtatgctggccaatggcaccgcagccggtggccagcttaccacgaccactgatgtcgagaactttcccggttttccggacggaattggtggctccgagctgatggacgccatgcgcaagcaatccatccgcttcgggactgaggtcatcaccgagactatctcccgtgtcgacctttcacagaggcccttcaagctgtggactgagtggaacgacggtcccgacaacgagcctgcccgcaccgctgatgctgtcatcattgccactggtgccaatgcccgccgtctcaaccttcctggtgaggatgtatactggcagaacggtatcagcgcctgcgctgtctgcgatggtgccgtgcccatcttccgcaacaagcccctcttcgtcatcggcggtggtgattccgccgctgaggaggccatcttcctcaccaagtacggtagcagcgttaccgtgcttgtccgccgcgacaagctccgcgcttccaaggccatggccagccgcctcttggctaaccccaaggttaccgtccgcttcaacaccgttgctaccgaggttcttggtgagaagaagctcaacggcctgatgacccacctccgcgtgaagaatgtccttactggcgaggaagagaccctagaggctaacggtcttttctacgccgtcggccatgaccccgccactgctcttgtcaagggccaggtcgaactcgatgaggacggatacatcgctaccaagcccggtaccagctttaccagcgttgagggtgtttttgcttgcggtgacgtccaggacaagcgctaccgccaggccatcaccagtgcgggatctggttgcattgctgctctcgaggctgagcgattcatcggcg

SEQ ID NO: 19564 - DNA, 1052 bp, Emericella nidulans
tcttccgatgagattgtctggcaggttataaaccagcaattttgctcatacaaactcaagtatgtgccaaccgttgagctaatctttcatcatcagaaactccctttcaattagttcagctttctgaaacccatagactaatgattttcttaccatcaggacaacaaaaggtcaaaatttctgccgcaatgaatacaacgtgactggtctatgcaaccggcagtcttgcccgctggcaaactctcgctacgccacaatccggtcagaccccgagacaggcgctatgtacctttatatgaagactatcgaacgcgcacacatgcccagcaaattatgggagcggattcgactgtcatcgaactacgcaaaggctctcgaacaggtcgactcgcgactgatttactggccgaaattcttgattcacaagtgcaagcagcgtcttacgcgactgacccaggtggcaatccgtatgaagaagcttgcgcgggaggaagaacggttgggagaaagggttgtgccgaagttggcgcccaagatccgacgcagggaggagacgagggagcgcaaagctgagagcgcggcgaaggttgagcgggcgattgagcgtgagcttattgaacggttgcgcagtggagcctatggtgatcagccattaaatgtggatgagtcgatctggaaaaaggtgcttcgtggtctggaaaggtccggtgagggcgagagagatgaggacatggatgatggggagcttgaggaggaagaggatgaagagggtgtcggggaggttgagtacgttagtgatctagaggaggatgaagatttggaagacctggaagactggcttggcaatgattcgggcgcctctagcgatgattattccgacgaggatgaggaggatagtgatgaggcgagtgggtctgaggatgatggggaggaggagcaaaagaagacgaagcctggctccaagaggaagtttgctgctccgccgccaaagcctaggaagaagggtcccagagtagagatcgagtacgagactgagggcgctgggaaggaga

SEQ ID NO: 19565 - DNA, 1054 bp, Emericella nidulans
tcaccatggcgcgcgtctacgctgatgtcaataagcacatgccacggtcctactgggactatgacagcgtgaacatttcatggggcgtcctggagaactacgaggtggtccgcaaaatcggtctgttcccattcagtatcgtcgagatttgaggattttgtactaatcgctgctcatgcaggccgcggaaagtactcggaagtgtttgaaggaatcaacattgtcaactaccagaagtgtgtcatcaaggttctaaagcccgtcaagaagaagaagatcaagcgagagatcaagattctccaaaatctggcaggtggacctaatgtggtcgcgttgcttgatgttgttcgcgacaatcagagcacgaccccgagtttagtttttgaatatgtcaataataccgacttccgtacgctatacccgcgcttttctgactatgatgtccgcttctacatctacgaacttgtgaaagcgttggatttctgccacagcaagggcatcatgcatcgcgatgtcaagccgcacaatgtcatgatcgatcatgagaagcgaaaggtttgatgcgttcctgttttgaatgaatatgctctgattttcttctagcttcgcctgattgattggggtctagctgaattctaccacaaaggcacggaatataacgtgcgagtcgcctcacgctacttcaagggccctgaattgctcgtggatttccaagaatatgactactccctggacatgtggtcgctcggtgctatgtttgcttcgatgatcttccgcaaggagcctttcttccatggcaacagcaactccgatcagttggtcaagatcgccaaagtgcttggaactgaggaactattcgagtatcttgacaaatatgagatcgagcttgatcctcagtacgacgagatcctttcccgcttccctcgcaagccttggcaatcctttgtcaacgcggagaaccagcgattcatcagtgatgaagcgatagacttcttggacaagctacttcgttatgaccatgcagtaagcctactcaatgcatctccgcaaagga

SEQ ID NO: 19566 - DNA, 1054 bp, Emericella nidulans
ccaccaacaagctctaattgaggtcaaccttcttcagaagctcaaagagtgggatccgcatcgccgtcataacgtggtcaatttcacgcagagtttctactttcggggacatctgtgcatctcaactgaactgctgggtatcaacctgtacgagtttatcaaggcgcacgatttcagggggtttggtatcaagctgatccgtcgattcacgaggcaaatacttaataccctcacgcttttgcaggcgaagaaggttattcattgtgaccttaaacctgagaacattctccttgtccatcctctcagttcggagatccgggtcatcgactttgggtccagctgtttcgagaacgaaaaggtatacacgtacatccagagtcgcttctaccggtctcctgaggttatccttggtatgtcttacggcatgccaatcgacatgtggagtttgggatgcatattggcggagctttacaccggctatcccatcttccccggcgaaaacgaacaagagcagcttgcctgcatcatggaggtctttgggccgccggagaagcacttgattgagaagagcactcggaggaagctcttctttgattctctcggcaagccgagaattacagtatcgtccaaggggcggaggcgacgccctagctcaaaagagctccggcaggttttgaagtgtgacgatgaggcatttttggacttcatctcccgttgccttcgatgggatcctcaacgccgtttaactcccagcgaagctctacgacatgaattcatgacgggtcacagaatggcgcccaggccgagaccctttggaagccagtccccaggaaagcgggcgaatactttgtccacgccgacaacgggtcgacctctcccagaaccgcccggcacaagtctcaaaaatggcgccgttgtccgcagccgcgacccttcgaatccgtcgccaataaaagcgacagctggcaagcgtcactcgactgtcagcggattgcctccgtcaacgcccgccaagcgagggataaatctaacgactacaccagggtccgcattg

SEQ ID NO: 19567 - DNA, 1055 bp, Emericella nidulans
tgcggacgtggatcttgtcctggatcatatcgcctcatcagggcataaaatcctgcgcatctggggcttcaatgatgtgaatactgagccatcgactggccaggtatggttccagaagcaccaagggggcgtttcgaccatcaatacagggcaatacgggttgcagcgcttggatgcagtagtcagctcggctgagaagcgaggcatcaagcttattatcaatttcgtcaacaactgggatgattacggcggaatgagtgcttacctgaatgcctacggtggcagtactaagaccgactggtataccagcgccaccatccaggctgcctatcgtacatacatcaaggcagtcatagacagattcatcgactcgccagctatctttgcctgggaattggcgaatgagccccgctgcaatggctgtgatacgtccattctatacgactggatcgctgacaccagtgcctacattaaatcacttgatccgctgcacatggtctgcattggcgacggtgagtaagacaagtctactgcgaataaagcaacaactgaccgaaccttgcagagggctttggactagacgagggctccgatggtagttacccgttcagctataatgaagggctcgatttcgccgcgaacctcgccattgataccatagactttggcacctttcatctctacccgggcagctgttcgtatcctgaattttccttcctgaaataccgtttggcaaactgaaagctaacatcgacgatagggggcgtatcgtatgattggggtaatctctgggccatcacgcatggcgcagcatgtgcaacagcgggaaagccatgcctatttgaagaatacggagcaccgtccgaccactgtgcaattgaggtcccctggcaaacgactgctgtaagctcgactgggatagctggcgaccttttctggcagtggggagataccttgagcactgggcagacccataatgacggaaacacgatctactatggctctgatgagtatacatgcatggtgacagagcatatggagcggattgcggcaag

SEQ ID NO: 19568 - DNA, 1055 bp, Emericella nidulans
ctagtgatattttattccctctccatgtattggttgacagggtccgtttgactcgtgcttgctccctgttccaagacgctatcgagcggcatctcggctccccgcctcggcttcagcaataccgagaggaccaggattagcacatgaagacagtccccatgaccaagtataataccactctagcattatactctaagcagatcagacttctttcataagctgcctggcccaacatgtcaaacgaaccaggaacagaagcgcaaccatccactgagacagcggcagcgatagtcgacgcagcctcgcctcccagcagggccgaatctaagtcggacgcgatccccataacaaccgacaaaatctacactgaagacgatctcctcatccacaacaaagacggcgatctgtggctcgctattgacgggacggtctacgacctgacgaaattctctgaagagcatccgggtggaaagaagagtacgcctaccctgttattatggttctttataagggaagaaactgatgaacgtatagttctactcggagtggccggcgcagatgcaagcaagaagtaccgcaagtatcacggtgataatattctgcagaggtatgcgctggagtataagatcgggacgttgagagttgaagcgaagaaggagccgggcagattattttcgatatttaagcggaggaaatgagttatcacctcgatctgtatatccaatcactattcgaagctataaagttccaagattcttaagagaccccagcgcttccagtattgcttcaagaacatcctggacaagcaatcgtccacacacagaaacccaccatttggcattgtcttcacaagcgtggcagtgcaccagaacgggttgaaggcaacggccttgataattcgcaaatgcgtcaacggttttctgactttagttttgctcagaaactctaaatattcttcaaattcgtccttcaattttggaagcttatgctattagtatatcgactcagcctgctgaatttgtccaagaatgacacgttaatcagagagataatgt

SEQ ID NO: 19569 - DNA, 1060 bp, Emericella nidulans
tcatccaccaaaatgtccctcgcagatactacctacaaactcaacaccggcgccgagatccccgcgcttggtctgggtaagtcccgtatacactcgacccattataacagctaatatttgcaggaacgtggcaatccgcgcccggtgaagtcagtgcagccgtctaccacgccctcaaagtaggctatcgtcatatcgacgcagcccaatgttacggcaacgagaccgaggtcggcgagggcatcaaacgcgccctctctgaaggcatcgtgaagcgctccgagattttcgtgaccacgaaactctggtgcacataccacacgcgtatacagcaagcactagatctctctctatcaaagctcggtctcgattacgtagacttgtacctagtccactggcctcttgccatgaaccccaacggcaaccacgacctcttccctaagcttccagacggcagccgcgatctggttcgcgaacacagccacgtaacgacgtggaagggaatggaagagctaatcacgaacaaccccgataaggtaaaggcgatcggagtctccaactactcgaagcggtatctcgagcagttgctcccgcaagccaagatcgtgccggccgtcaaccagatcgagaaccaccctgcactaccgcagcaggagatcgtggatctgtgtaaggagaaggggatcttgattacggcgtatagtcctcttggaagcacaggaagtccgctgttcaaggccgaagccattgtggccgttgcagagaggaggggcgttacgcccgcgtcggttctgttgagctggcattgtacgtatccctatcccataccgtactaacttcggacctgaacatatttgatgcgagtgagaaatgctaatgtgtgcttgtacagtggcccgcggctcctccgtcctcgccaaatcggttacaccttcgcgcattgaggagaacaggaagttggtgaagctggagcccgaggatgtcgagttaattggcaagtactcggcggaactggctgcgacaaacgggttccagcgatatgtgtacccgccgtttgggg

SEQ ID NO: 19570 - DNA, 1061 bp, Emericella nidulans
tccagcaccgcatcggaatggcacccttaacccgcctgcgcgcaaatcccgaccgtaccccaacatcgctgatgaaggagtactacactcaacgagcctcagtccccggaaccctgataatcacggagggcacgctgatctcaacagcctctgcaggagctttcccaggcgcccctggcatctggcgcgccgaccaagtcgccgcgtggaaagagatcactgatgcagtccacaaaagaggcagcttcatctatgtgcagctgtttagtatgggtcgcgctgcggagaaaaagttggcagagagcgagggaatagaggtcgtggcacctagcgcgattcccatcccgtatgatgagaaacctgatgcgcctattccgcgggcaatgagcgttgccgagattcagcagacgattgtggatttcgtgaaggcgtcaaaggacgcactgactgctggtttcgatggggtggagatccatggtgcgaatgggtatctccttgatcagttcctccaagacacgagtaaccagcgcgacgacgagtacgggggcagcgtggcgaatcggtcacgactcctccatcaagtcctgcagaaagtcgcaaaggctatcggtgccgacaaggtcggactgcgccttagtccctggtcgcggttccagggaatgcgaatggacgatccgattccgcagtttgcagatatcatcgacaaggcaagcgaccttaatctcgcgtacctgtcgctcatcgaggcccgagtctttggtgctcgtgattatgaggggagtctagatggggataaagaaacattggacttcgtgtacgagcgttggcatggaccggttcttgttgcgggtggatatgagctcgaaaaggcgcggaggctagttgatgagcagtacccgaagaaggatattgttgttctgtttggacggcatttcatctcgaatccggatcttgtgtatcggttcaaggaaggggtagaattgaccaagtaccagcgtgagacgttctatgaaatccgctcggcggtgggctatgtggactatccattcagtaaggagtac

SEQ ID NO: 19571 - DNA, 1061 bp, Emericella nidulans
gccggacgtcttgcgtcaaattgtcgccggtgtccggtacctacactctctcaaaatcgtacaccgtgacttgaagcctcaaaatatcctggtcgccgctcctcgaggccgtatcggttctcgggccatccggcttctgatttcggactttggcttgtgcaagaaacttgaggataaccagagttcattcagggcaaccacggcccatgctgctggtacgtccgggtggagggctcccgaactgcttgtggatgacgacaagagcccggtaatccagggttcagagtctcaacatacggagtcatctgagccggcggtcgtcgatccccagacgaatcgacgagccacccgagccattgatatcttctccctgggatgtgtcttctactacgtcctaactcgaggatgtcatccttttgacaagaatggcaagttcatgcgcgaagcaaatatcgtcaaggggaatttcaatctcgatgagttacagcgtctaggagagtatgcgtttgaagcagacgatcttatccgatcaatgttggcacttgatccacgtcaacggtatgtcccaacaacatcttcctttgccttgtggcgtagcgtactaatctccacagccccgacgcaagcgctgtgttaacccatcctttcttctggaatccgtccgaccgccttagcttcctctgtgacgtttcggaccacttcgagttcgaaccgagagatcctccatctgacgctcttctgtgtctagagtctgtagcctctgatgtcattggccctgagatggacttcctcaaactcctgccaaaggacttcaaagacagtctcgggaagcagcgaaaatacaccggctccaaaatgctggacttgatgcgagccctgcggaacaagcgcaaccactacaatgatatgccggagcatttgaaagctcatattggtgggctgccggagggttacttgaatttctggaccgtgcgtttcccgagtttgctgatgagttgtcattgggtgattgttgaactgggattgacgaagacggatcggttcaagagatattttacgcc

SEQ ID NO: 19572 - DNA, 1062 bp, Emericella nidulans
tggcttgcactttgcatactaatttgctgactggtcagtcctctggctctgtggtttcccgacacgctgctcgcccgcacagccagtagagagatgaaccgatatatggacatgcagattgacaaaaccctttcatcgccccggcaggagctgctagagcgggcgagcacgctaactctgatggagactcttgcacttaaaactcgatatggaaaggtatacgcgtcgctgtaatggtgtggtccaaagctcacgcaatatgcgcagtatataaaaaaccagtgatagcggtcttgcttgccggaaaggttcttactggctcactcgttttgggtccccaaaatctcagctaaccaaagcaatgcaggacccagtggccataacgatcacttcggcccttttcgagctggtgcgacacccagaaatcgcgcaaaggttgagggaagaagtcgtccgtgtgtacgcaactccgtacaaggacttttaccatcgttcttgcgtactgaagctcaataggtgcggtacaaggagtcctccttcggccaaagcactaaaagacttggtatttctaaaatatgtaatccgcgaaacgctccggttatatcattcccgtacgtaataaacgcagcgggcccctgcaggccgtgtacatctttggctcacggggattctgtagttggcttcaatatccgcgaagccagcgcgacaccactatccccattggcggagggcctaatggggatttgctcatcacgattttaaaaggacagcatgtcgcctactccgtaatcggtctccagcgaagaccagacatcgtgggccccgacgcagataactggagaccagatgggtacttttcactgggcaccgcagacgtgggagtttattccgtttaatcatggcccacgaatttgccttggtcgtgtgtttgggtatttccagatggagtatacgctatgccgcatcttccagcattttgagcgtgtcgagctccacgaaccacgcgtgcaaaggatcaaggtggaattgaatacaaaaatggcctatcccgtaaactgtagc

SEQ ID NO: 19573 - DNA, 1063 bp, Emericella nidulans
gcggaaccccaagaacggctacgctaccgtcgatgctctgaactggttcaactttgtcgccttcgacatcatcggtgatctcgctttcggtgctccgtttggtatgctcgacaagggccaggatattgccgagatgcgcaagtctcccgactcccctccccagtacgtccaagctgtggaggttctgaaccgccgcggcgaggtctctgctactcttggatgctaccctgccctgaagccgtttgccaagtacttgcccgaccgtttcttccgtgatggtctcgaggctgttgagaacctagctggaattgccatcgcctgtgtcaacgagcgtctcaagcccgaggtcatggccaacaacacccgtgtcgatcttcttgctcgcctgatggagggaaaggatgccaacggcaacaaactcggccgtgctgaacttaccgctgaagctttaacccagttgattgccggctctgatactacctccaacacgtcctgcgccatcctttactactgcctccgtacccctggtgttattgacaaactccacaaggttctcgacgaagccatcccccaagacgttgaagttccaacccacgccatggtcaaggaaatcccttacctccaatgggtcatctgggaaaccatgcgcatccacagcacctcggccatgggtcttccccgcgagatccctgaaggcaacccgcccgtggaaatcagcggccacatcttcaagcccggtgacattctttccgtccccacttacacgatccaccactccaaggaaatctggggcgctgatgccgacgagttcattcccgagcgctgggctcccgagcgcctcactgcccgccagaaggccgccttcatccccttcagcactggtccccgtgcttgcgttggccgcaacgtcgccgaaatggaactccttgtcatttgctccactgtcttccgcatgtttgactgggagctgcagcagaaggggccgatggagacccgtgaaggtttcctgaggaagcctctgggcttgacagttggtgttaaaaggaggacgattgtttaagcg

SEQ ID NO: 19574 - DNA, 1064 bp, Emericella nidulans
ctccccggatggcaactccacgcactggatcttctcggcatgggccgcagcacccgcccaccctttcgcatcaaagctaaagagcgcgaggctgcaattcgagaggctgaagattggtttgtggatgcactggaagaatggcgcgtcaaacgtaagattgaacgcttcactctgctgggacacagtctaggcggctacatagccgtgaactacgccctcaaatacccgggacgactgaataagctcattttagcttcacctgttggtataccagaggatccatacgctatgtcttcggatcttcccgagaaacaagaccaacccagcatcgccgccgaggccgcaacggtgccactcggagatgcgcccaagggcgacaacaacattcttctaaagggccctccggcagatgcctcgagagaccggcctccccgtcgcacagtcccgaaatggtttgcatacttgtgggaggccaacatttcacctttcaccctcgtccgatgggctgaccacttggtccccgcctcgtctcgggctggacatcccgccgattctcgcacctccctgccgatgaagccaaagccctccacgactactcatactcaatttttagccagcgtggtagcggcgagtactctcgcgtatatccttgcaccaggcggttcgcacgcagtcccctcatccgccgaattcaggacgtcggccgacagatgattcccgcctccgtaccttcttctccatcctcctcttcctccacgacaacttccacggaggtggccaagccgcgtcgcgagaccggtatccctatcgtcttcatgtacggcgatcacgactggatggactaccgcggcggccaggccgccgcagccaaaatccgggaggagaagcgccgtatcctggaaaatgctacgcccgaagaacgcgcagcagatagtggctcagccaaggtcgtcatgataaaaaattcagggcatcatgtctatctcgatggatgggagcagtttaatgacactgttcttgcggagatggaagatgtcgcgaagagagagagggcaaggcggtga

SEQ ID NO: 19575 - DNA, 1067 bp, Emericella nidulans
cggctcaatccgcaacccaagtcaggtgaacggatgttttggaaacagaccatcattcgaccttgtctctctcgacaacgtcatgcccatgtctcctctcctcgataccgctggctttttgaccagggatgcaaaactctggaaaacagcctcggaagttctctatgctccctccggcctgaagtcatacaccaaataccccaagtctattaagacaatcgactttccaacagagccatccactgaagccaacaaaatcctcctctccttcttgcataaactctcaaggtttctcggaaacgctacagcttctccactggattacgatcgcctctgggagcagacacaaccatcgacggtctcgtcggacacgacccttacctctctcctgaacctaacctacgccatcctaattacaaagcaccaatttcctctccttggtgcaaaactctatgaagaccatgcagccgccaatgacgggcgccgtccattgatcgaccccgtcccgttaagccgctggaactggggtctcggttacgcggatgagcagctcgaggccgagattcataataaggaaacctttaagtcctggtggaacagcaccgtccaggtatttgacgaggagacctgtgcagatagtctggtgctatatgtgggcactgctgcaacgcctacatataggaatgtatatcgcgagtacgtgcacccctacctaatattccactttcccaaggaaaccaactggctacggtgccaatgctaacgtgaacagcatccccggaattccactaggcttctctgtatcccggatttctaacatggctggtgttccggatatggtagtcccaggtacgtcccttgtctcttcgccttccaccaagacactggcaacaattaactgtgtcatatagtcggccaagcccggtacaactctactatcactatgcgagaggagtacctccccgtcgccgtggacattattgccccgcatggctgcgatctcatggtgtttaatcttgtcaatgagctggtggaaaaggggatcgtgaaggagccagtggcggggt

SEQ ID NO: 19576 - DNA, 1068 bp, Emericella nidulans
gactgttaactatggatatagagccaagaccactacgcagtcctcggcctgagcaagtaccgctggcgcgcaactcccgaccagattaagcgtgctcaccgcaagaaggtcctccgtcaccatcccgacaagaaggctgctctcggcgaccgtgatgagaacgatagcttcttcaagtgtatccagaaggctaccgagatcctgtcagaccccgtcaagcgccggcagttcgactccgtggacgaggctgccgatgttgaaccccccagcaagaaggagactcagaagggtaacttctacaagctgtggcgccctgtatttgagagcgaggcccgcttctctaagatccagcctgttcctcaactaggtgacgagaacagcaccttcgaggaagttaacgagttctacaacttctggtacaacttcgacagctggcgtactttcgagtacctcgacgaggatgttcccgacgacaacgagaaccgtgaccagaagcgtcatgtcgaaaagaagaacgccaacgcccgccgcaagcgcaagaccgaggacactgcccgtctccgccgccttgtcgacgactgcgctgctctagacgagcgtatcaagaaattccgcaaggccgctcgtgccgataaggacaagaagcgtctcgagaaggaggccgaggcaagcgcattgccgaggagaaggagaaggcccgtctcgaagaagagcagcgcaagaaggaggccgaggaggcgccaaggcgcttcgtgagaaggcgaagaaggccaaggaggcgctaagaacgccgctaagaagaacaagcgtgtgctcaagggctccgtcaaggatgttaactacttcgccgaatccgggcagccctctgccgcccaggtcgactccgtcctgactgatgttgacctcatcaacagcaagatcgacaacgaggagcttgcttccctcgctgaacgtctcactgctgcaggcaaggatgctgcagctgtcaagaacgtctacactgaagagattaagcgtcttgttgccgctggcaaagctaaggagggtgaggtcaagttctttgtttag

SEQ ID NO: 19577 - DNA, 1069 bp, Emericella nidulans
tcatcggcggcggtatcatcggcataatcacagcgctgggtctgatccaccgcggcatcaacgtaaccgtctacgagcgcgcccccaagtacaccgagacgagtgcgggcttctcattcagcaagggcgcccgcaaagcaatggaaatagtatcgccacgggtgctggaagcgctgctccgcgtcgcggcgccaaacaagcacccgtttatccggtactttgacggttttacgcccggcgcagacgaagcgcagtggcagattcctgccgaacggccggattactatggttgtctgcgcgcggcgtttctggagagcttggggcaggaagtgccggaggggatcgtgaagtttgggaaggttctggagagctatgaggacaatgaggaggggaaggtgcttttgcggtttagagatggcagcacagctgaagttgatgctggtaggtcttttccccctctctacacattacagattatcaaaggataaacgaaccggttccgctgacatgagcggctggcgatacagtcatcggctgcgacggcatcaagtcacgcacgcgccgcatcatgctaggcgacactcaccctgctgcagcccccggctacacagagatcgtcgcctaccgggccgtcctccccctcgaaggcgttgtggcggcactcggcgaagacaggggacacagccattgtctcgccgttgggccggacgcatacaccgtgagctacccgatcgccaacaagcctctcgccaacatgatcctctttcgcaagcagcgcggttcgtgggcgaactctgacaaactgctcgagacgtgccaccgctcgaccgcgcaagacgctgtcaaagactggaagcctgaaatccagcgcctggtcgacctcctaccagagaatcccaacaaatgggccatcttcgatacgtcagacaacccggtgccgagctatgtgtctgcctcaggacgcgtatgtattgcaggcgacgccgcgcacgcgagcaccccgttccttgcgtcgggggcggcaatgggggtggaagatgcggcggtcctagctacggttctaaatact

SEQ ID NO: 19578 - DNA, 1069 bp, Emericella nidulans
ttgcatgctaatatgtcctacttagagcgaccacaaagctctccacaaaaagagtaatttcctcaccaaccttttccctccaaaagtagtttctgaaccagacccagcaaccggactattcaaccctttcccttccttcgggttcaccggatccctccggcctgtctaccctctatcgcccatgaggaccgtgcccaaatccatcccccacccggactacgcgaaggatggcataccccgctcggagcagaagtttgttggccgacacaacatcactattctgaacaaggcggagcaggagggtatgcgcaaagtatgtcgactagcacgagaggtgcttgacattgctgcgcgggaattgaggcccggcgtcaccaccgattatatcgatgaggttgtccacaaagcgtgcattgagcgcaacgtaagtactacctgcgggggatgcttcgaatggctgagtggacctcaaactaatgtgcgatcagtcttatccttcaccccttaactacgttcactttcccaagtcggtctgcacgtccatcaacgaaacgatttgccacggtattcctgaccaacggccgcttgaggatggcgatatcatcaacattgacgttaccttgtatcatgaaggtttccatggagatatcaacgagacatactatgtgggagagaaggcgcgatcgaatccagatgccgtgcgggtcgtggagacggcacgggagtgcttggacaagtccattgagattgtcaagccgggaatgctgttccgggaccctggaaatgtgattgaaaagcatgccaagagccggaactgcagtgtagtcaagagctactgcggtcacggtatcaaccaacttttccactgcgcgccgaatgttccccattatgccaaaaacaaggcggtaggaacggcgaagcccggcatgtgcttcacgatcgagcctatgatcaatattggtacgcaccgcgaccgcctatggccggatgactggactagcacgacggcggacggttcgttgtccgctcaatttgaacacacgcttttggtgacagaagacggtgtcga

SEQ ID NO: 19579 - DNA, 1069 bp, Emericella nidulans; identical to SEQ ID NO: 19577

SEQ ID NO: 19580 - DNA, 1071 bp, Emericella nidulans
atctggctcgctgccgttggtggtggtgccgtcgaaggttctatccgctggtgggctcgtgaccaccgcgctcaccaccgctacaccgataccgacaaagacccgtactccgttcgcaagggtctgctctactctcaccttggctggatggtgatgaagcagaaccctaagcgtattggccgtaccgatatttccgacctgaacgaggaccccgtcgttgtctggcagcaccgcaactacctcaaggtcgttttcacgatgggattggctgtgctatgcttgttgctggtcttggatggggtgactggttgggcggcttcgtgtatgccggcattctgcgtatcttcttcgtccagcaggcgactttctgcgtcaactctttggcccactggctcggtgaccagcccttcgatgaccgcaactcacctcgtgaccacgttatcaccgctctcgtcacccttggagagggctaccacaacttccaccacgagttcccctcggactaccgtaacgccatcgaatggcaccagtatgatcccaccaagtggtccatctgggcctggaaggcagcttggtcttgcctacgacctgaagaagttccgtgccaacgagattgagaagggtcgtgtccagcagctccagaagaagcttgaccgtaagcgtgccactctcgattggggtactcctcttgaccagctccccgtcatggagtgggacgactacgtcgagcaggctaagaacggccgcggtctcgtggctattgccggtgttgtccacgatgtcacggacttcatcaaagaccaccccggtggcaaggccatgatcagctccggtattgggaaggacgccaccgccatgttcaacggtggtgtctactaccactccaacgccgcacacaacctcctctctaccatgcgtgttggtgttatccgcggcggctgtgaagtcgaaatctggaagcgtgcccagaaggagaacgtggagtacgtgcgtgatggctctggccagcgcgtcatccgtgccggcgagcagccaaccaagatcccagaacccattcccacagcggatgcg

SEQ ID NO: 19581 - DNA, 1071 bp, Emericella nidulans
cgccgcaaattctctgcttccaaattctggaaggacgtccacgactcaagagctactcggattctttatattggagagctgtgcagataccttatggctacgcctgcttctccctatgatcagaaccatgcctgcattgtcgcttctggcaatggcctgcgaggggatatttgggaacgcttccgcgagcggttcaatgttcctgagattcgcgagttctaccgctcaaccgagggtgttgcgaaatacgacaacttcgggtttggatcgtggggagccggcaaggtcgggttctcaggcccaattaagcggtttttcgaggatgataccgtcatcgtgaaatatgatccggatacagagatgccctatcgggatcctaaaacggggttctgcgttagggtgagagtcggcgaggaaggagaggcgattggccgtgtcagaaaccgcggcttactcacagagtacttgaagaatgaagaagcgactgagaagaagctcctccgggacgtatttgagaagggggacctctttcaacgtacgggtgatttgtttgtacaagactcggatgggtggattaaattccaagaccgggtgggagacacattccgctggaagggcgagaacgtcagtgcgggtgaaattcgagaccacatttctgccattcctggagtttacgacgccgttgtgtacggcgtcagactcggagcttatgatggacaggctggcgccgcgggtatcacgctcgaggagcacaccgaggctgctgccaatgagtttatgggtaagctccgtgcggagctgaagaagaagggtgttccatcctacgctattccacggcttgttcgactgacagagaagtatgtccctgtctgaataagaacatagcaagagtgtctaactaattcgcactagggttgccacgggagtcacattcaaacaggctaaaggcgagttgacgaagaaaggctggagccctctcgtcgactggaatggcgataaactatactggttgaatgggaccagatatgaaaagcttacgcaatcgagttggtcgtcaattgagagtgggca

SEQ ID NO: 19582 - DNA, 1071 bp, Emericella nidulans
ggagcgtgtcggacatggtgtcgcatggacttcacaggggccgcaccaccaatgctcatcctcgtgacatctcggaggatgctccagatgccgtttctcaaaagcggtccaagaagggtcatgttggctttatcgaaaacgagcccgaagatgaggagttagagcaggagaagcaggagttgccctacggatcggacccggtgtctctggtgcagagccaaagccaagtggcagacccgtctgtggagccttctgatccggaatcaacggagaagccgagtcttccgccgctaaccaacggcggtgcgactcgctcttctgatctagaagctggacgatttgcgtcgccgtcacctgcgcgaagcgagtcagcggatccggctgcagggttaagcttgcccgttcagtatactaatcgacttcgtgacaagacaaaaatcccgtacacctactacctgcgaccatggaacggaaggatttcgcaggatcgttggttacgggttgctatccgtccgttcatattgttcgcgtatccggcagtattgtggtcgaccgccgtgtacgcgctgtcggtgggatggctcatcgtcttgtcagaggtcgtttcccacatctaccaagatagggagacctataacttcaccgctcttcagactggcctggtctatatctctccgttcgtgggcggcttactaggcacggcggtggcaggtaagatttcagatatcattgtccggtatatgacacgacgcaacggtggagtttacgagccggagttccgccttataatggctatccccatcgccctatcgacgaccatagggcttatgggattcggctggagcgcccaagaaaaagacgcttggattgtcccgaccatctttttcggcctggtgtcgtttggatgctgcttagggagtacgacgtccatcacattctgtgtcgatagctaccggcagtatgctggagaagccttggtaaccctgaactggagcaagagtgagtctccttcccaaccattactcattctcgatcagcttaactcaactttggtgcagatgttttccacgg

SEQ ID NO: 19583 - DNA, 1072 bp, Emericella nidulans
atgatgccggcagcgacgttgaggaacccttagggctgagtgtcgatgtcgagcggataaagagactgaagcaagaggaagatgaagaactcaatcgcccgttggattcgggctcagaggatcgccacagtgaggataatggtagtgacgaggaagatgacgaggacgatctcgacagcatgttagctagtagcgacgaagaagacgaaggcgacgagggtaaagagagcaaaaaggacagccgcggccgcaaaccttccgctattccctcagcaacggaacgtgcaacaagcccatcccaatcaacaaaaagcacgaatttgaatttagctccggaagcgctcgctgcgaaattcccatctctcttctctccagactcgcaacgacctccgaaaatccttattacaacatccctcaactcaacccttcaccacgaagccgaaatccttactcaactcttccccaacagcgtctacattcggcgtacggcgcacgccacgcccacaaattttccatccgcgagatcgccaaattcgcctccaaccgcgaatacaccacgttaatcatcctacaggaggactcgaaaaagccggccggcctggacatcgtccaccttccgaagggccccatgttccacttcagcatcagcaactgggtcgaaggcaagaagatacccggccacggaaagccaaccgaacattggccagagcttatcctgaataatttccgcacaccgctcggtcttctcaccgcacatctctttcgcacgttattcccgccacagccggatatcgagggccgacaggtcgtcactctccacaaccaacgtgactacatatttgtgcgtcggcaccgctacgtgttccgcgagaagcgggaaactgaaaaggccgttgtgggtgcggacgggaaggagattaagggggcggaggggatccggacgggtctccaggagctgggccctcggttcacattgaagctgcgccgtgttgacaaaggtatccagagggcgagtggacaggagtgggaatggaaagggaagatggagaagaagaggactttgttccagttg

SEQ ID NO: 19584 - DNA, 1073 bp, Emericella nidulans
atgaagcacggccgctacgccgagggcttccggtcaatgtgccgcctgcgagcccatcccattatcggcgccagagattactactactcgtacgtgatctaccaggaggagatcaaggaggcccgcggcgctggctacttccgccgtatgtgggattgcttctcgatcccgcgaatccgacgcgccaactacggtgcttccaccgtcatgatcgcccagcagatgtgcggaattaacagtgagttgtttcgtcccagccatataaccacagttctaccatcagaatctctaactgggttgtagttatctccttttacagctccagtatcttcaaagatgccggatacactgattcggaggcgctgtacgcgtctctcggttacggtgcggtccaggttctcgctaccatcccgacgctgttccttatcgacaccaaaggtcgacggaccctatgtttgattgtgagcagtcctgcctggcaagtgatacccgtagctaattggatcctagaccttccccggcatgtgcatattcctgctcgctgccggcctttctttgctcgtccctgacagcgctagcacctcggcgcagctggggccagtcgtgctgtacgtttgcctcatcgctcggagtcgagaacaacctcctctaacttaccttctttctaggttcgtctatctgttcaccattatgtactcgttaggcgagggacccgtcgcgttccagtactccgctgaggtcttcccgaccgtccagcgtgagcagggcatggcctgggccgtctgcatcaacaacaccttcggtaagcaccaatcacttgatcattgagacacgtattctttctaaccctgtccagccggtattcttagtctgaccttcccacgtatgagaaccgttatgacaccaaccggcgcctgtaagtgaccatctgtacccgcccaccatacttgtctgtggctaaccggccttcaccgtctagttgggttctacgcgggcctcaacctgatagcctgggtcatgatattctgtttcgttcgtgaaactaaacagctcacgctggaagaactggaccg

SEQ ID NO: 19585 - DNA, 1073 bp, Emericella nidulans
cgcgcctcgtgagcacttcaagcgcactgccagaacgtctgctccggccggctgtctcaccgttggaggaagcgggacctactcgacgatcggcgctgcgtttgcagctttgggctcatcctcgtctgaggcctgcatctacatatcagccgggacctacaaggagcaattgaccttccaatacgctgggccgttgaccctctatggcgaaaccacggacacgagcagttacaagaagaacaccgtcacgataacccatacgatttcctcacctgaagcagggtcccttgttgcgagtgcgactgtcaatgcggccatggataactttaccatgtacaacatcaatgttgtgaatgggtacgggaagggggctcaggctgtcgcgtaaggattttttcatttgcacttcattttcatctccaacttccaatttcatacgattttacttattttatttttattctaacgaatgtatcacactgctgctgacgcctacttttgcagactggctgccagcggagaacgccagggttactatggctgccaattccttgggtatcaagatacgctgtacgcacgcgtgggcgtgcagtactactccaactgctatattgagggtaccggcctcttaattctttttctactctccgggaacagcactgaacatctacaggggccgtagactacatattcggcgacgcaagcgcctggttcggcgaatgcgacatcgtctccaacggtgcaggctacatcaccgccatgtcgcgcgagacagcctccgatccggcctggtattgcttcgaccactgcaatatctacggaaaatcggggctggacttgaccggcgatgtatacctcggacggccgtggcgcgtcctcgccggggtcatctatcagaactcggagctgagtgatatcatcaacgcggctggatggacgactatggcagaaggagccacgccactgtactacgagatcgggaatacgggtgacggggcagacacgtccaaaaggctgtatcttagcgagatcagtgcggctgtcaccaaggctacggtgctggggagcgactg

SEQ ID NO: 19586 - DNA, 1073 bp, Emericella nidulans
cacgcgaagtgatgcagtacagggcatatacaaggcgaagcaaaggccatcggataatccgctcattgtacatatcgactctttacagatgcttaatcggctgctgaaccctgcctcggatacttcctgccccacgaaagtcgttcagagcacaattcctcccatctacaaagccctgatcgaacggttctggccgggcccacttacaattctcctcccgaacccgtcgggctcgcgtcttgcgccggaggttacgtctaatcttacgacgttcggagtgcgcatgcctttgtcgccgttagcaaggctgttgatacacgttgccgatagacccttgctgcgccttcagcgaatgcgtcgacgaagccgtcgcccacagcagcagagcatgtgttccatgatttgcagggtcgaattgagctgatccttgacggcggaccgcgcggtgctggcgtggaaagtacagtccgtagatgggctctcaaatccgccgtgcattttacggcctgctggcgtgagtattgaagaactgcgaacttgtcctgggtgggaaaatgtacagcttgcataccacgatgggacgtacgacgtgaagagatccctcgtgctcccggcatgaaatacagacactactcgccgaaagcccgcgtcgttcttttcgaagctggctcaaagtctcaggcgatcgtggatcatgtcaagcgagatctacaagatactgccgtcggcgcacattccattggtcttgtgcggacgcggacctggaagcgcgggcttcagctcttacctgaggaggatattgagaagatggcgaaggcaaccgcgtcacttgtcggcagcctggtccaattctccatccctgttggcgggaagacaaaggaagtctttgactgtcatctgggcacagacgtcaaggatatcgcacgcgggctattcgcggctttgcgggcgatggatgagaagcaagttgatgttatttatgtcgagggagtttctgataccgagtacctggctgcggctgtgatgaatcgacttagaaaggcagctgggtcaacctttaaagtgtagacaaa

SEQ ID NO: 19587 - DNA, 1076 bp, Emericella nidulans
gagcgcgccccaacggttaccgttattcaagacctttgtcctaacgttcgcagacaagatcaaccagttgaactttgtctcgttggggttgatggcatctacagaatgcgcgggtatgttcatctctctctataagaacatcgagggtgtaactaacgttttgagtgtgctagatgaccaagaacggctttccttcctcacatcactcgccgacaaagtgaacaagccagactcacaagacgcttacatctacgcccttgcggaggttgccaatgtcaaacaacggcttcataacctggacggagcgcagaaggatctagagacatgccagaaagtgttggactcatttgacgcggttgagaacgtcgtacatgcttcattttacaaggtcaacgccgactattatcacgtatgttcatcccctcacacaaacaagcaaacagaactaagaacccagtaggccaaacaagaattcgcctccttctacaaaaacgccctcctctacctcgcttgcatcgacctagaggacctctcggagtccgagcgtgtatcgcgtgcctacaacctcagtgttgctgccctcgtctcagactcaatctacaacttcggtgaactactcttgcatccgatcttggattcgctcaccgagacgccacacagctggcttcgagacctgctttttgccttcaaccgcggcgatttgactgcatatgacgtcctcgcagggaacatctctaagaaccagctcctccaggcgcaccgcttctttctataccagaagatctccctttctgcactcacggagatggtctttcgccgtcctccgcacgatcgcaacttgacttttgcgtctatctccgcggagacaaaggtgaagcctgaggagatcgaacatctagttatgaaggcgctttcgctgggtttgctgaagggcgccattgaccaggtcggccagattgctcagatcaactgggtacagcctaaagtgctggatatgaaacagatcgagggtatgcggaatagactgaaggactgggacgccggtgttaaccagctgggtcactggatcgagggcg

SEQ ID NO: 19588 - DNA, 1077 bp, Emericella nidulans
cgctcgaggggtactaccgtgctttccttgatctcggcagtgggagtcccgcctgagccactgacgccagaattgcacactcttagactaaatgaaattccattggcggtttgtgcacaaatccaggtacagcatccactaccaccaatcatagtttcagcgacaatcccggtgggccagttttcaatgctgatatggccaatgggactgcttctcaaaaatccacgacctatcaagccatcaattgtgtccttaaccgatagcatctgttcatagctgccccagccgagccatcaacgagggatctcacgcatgcgtgccatcacttacgcaacttgtcccacaaaagcctcgaccaaggtggctcccactcggacgccatggtccagttttgaaggccactgtggtggagccgtgggggatgcccagtgctccctctacctataaagagtggacattcgttcgttcaattgcaaaccctttgatcttctcatagttagcaatccaactcagacactctttttttttttcgattcttggatgttaccgagtgtaacactttgctacaacttgaaacttcgcttgaagcacacgctcattcaaaatgcaactcaccaaatcccttctgctgctggcagccttgaccaccaccacattcgctcgccatgaaggccaccagaggcgtcacgcctcaatcgctcatgaagaacttcacaggcgtcaagccccgaccactacgacaacaaccgctgccaccggctcttcttccgacgcttcgtccagctcgtccagctccggctccttctctaccgccggcttcggtaagaaaacagtcaacaaaggcgcaggtattacataccaaggcaatgtcggcgacccctggggcagcaacatcatcgaaatctccgagtctgacgccgagcaatacaaatatgtcgccaagatctccggtcagaatagcgatccctgggatatcatcttcttcaacaagtacggccctgctggcctgatggatgggtggttcggccattccgctttgaagctcactctaaactccggcgagaccaaatatgttgc

SEQ ID NO: 19589 - DNA, 1077 bp, Emericella nidulans
ccgaggcctctgttgctgcacccttcaccagccgtcagttcgatgtctcctgcgtaccgacactgattaggttcgtatgaccagcaaattttggatggccagctaattctagtatagagagggtcggggctcgttggtcaccagtttctgctgtttcaagtatatgagcttgtattcggcaattcagtttgcaacagtcagctttctgtacaccaatgcttctaacctgggagacttccaggtgcgttcattctcaatgtattacgagcgtcgctgatttttcctacagtttctgttcattgaccttacgcttatactgccgatcgctatttttagtgagttatacctcatactactcatgagacaaggtactaataattgttctccaagtgggatggaccggcccctgtgatattctctcgcggaacgaccaactgcagatcttgtctctcgaaaggtcttaactccgttactcggtcagatcgtgatagttgtgttcgttcaatttcttgcatataagtcggtccagtcgcaaccttggtaactgcacactccacacaatgatgtatttaaatctgacagtttgcaggttcagggctcccaatatagagcttggagaagataacattgagaactccgaaaacactgttcttttcttgacatccagcttccagtatatactagccagtatcgttttgagcgtgggacggccgttccggaagtcaatgagaacaaacggtaatctacttatactgctaccctataatctactaacatttgacagtgccttttcttaccgtcatagtcgccgacttgacgttttcaggctacatgctcttcaggccatcgacatggataaagcaggtcatgcaattgacctatttgtctgacgcctttgctacctggctacttggtctcgttcttgggagtttcttgttcgcatggctagcagaacggaagctattccctcaacttgctcgtattatcggacgcttacaggtacttatgcggccaggccatcaaaaacagcgccgtcaatataaaacgctgcttgaggatatgagtagatagaccctg

SEQ ID NO: 19590 - DNA, 1078 bp, Emericella nidulans
tgctggcagcgctaaagattggaacaagcttcaattgttggacagctactagctagggctctgtaggctttaaaaagtctttatatctttgaactgctagccgcactgttgtccagtatcaactactaaccttggatggtcatggctcccaacttatagctgcctttgacaaaataagcagcggaaacaattctatagctattgccgcctcatttttcatcattctacagcctatagaagttggttgctttggctctctgaagcatgcgaaaaggctttgttaaaatattctcctgggaccggctatatcgacaactcgttttgggggaagcaggcaggctacattatacttagacctaccaacgactcgtcaacatagccatgcccgaaggtaatcccaaccgtccctgccaggagaggtccagcctcaatacttaacataaacatgttaatgcactgctagccatcgcaggtttgcgttgagcagtgaatcagctctgcacgtggagcatatatactcgctttattatcttctttgctatctacttttgccacccttcttttgaaatcttgtacaaggagcggcgaaatctgcgtctccctccgacccacgcaatgtgatttttacccaagtcactggaaatcggtattgtatattgcgtctcgcagcttccagtagaaaccgaagacgaggaactggatttgaaatttggatacgggtatctggagctggaagtgctttcgggaatgtagacggtatgggggtcaagagtttctgacgtggtaggcgtgtcctgtttacgtccccctttttatcgagctgggaaatggcatcgcagcgccttgttctttggtgccaatgttttctgatgtttaaagaggtggaatctaggaggttagatgtgatctgtaggagttgatgactaggggattgacgggtctaattggcaagaggaggccccggggttaactctgtttgatggtagactaggcagtctctacatgacagcttcggtccttactttcgctcttacccaggcaagatcaactaacctagggctatctaaatgcgacaata

SEQ ID NO: 19591 - DNA, 1080 bp, Emericella nidulans
ggcctgtccgccgaatcctttccaaaaatgaccatgaaacattcctctcctcgtctacttatacactcgttctcgccttcattttcggcctctccgattcagttcgaggtcgcgcagcaccagatgcaaacgcagaacccggctactcgccaaagatttcgaaaatcctctcagtggtagacaacatccgcacgcttgttgagagccacccatctattgatcagggtggctctcggtttggcaaccctgccttccgcgatttgttcgacgacgtcgccgcccaaagcccagcatggctcagagacatcctagggattgaggacgcagccgctgttaacgagatatccacatacctgattcactcgctagggtcgcgtgacagactagactatggatctggacatgaactgaacttcatgatgtggctgctatgtctgcggcagctaggtctcttctcagagccggattttgaggcgatcgttttccacgtttatgtgcggtacatgcggcttatgcgggaggtgcaatcgacgtattaccttgagcctgctggttcgcatggtgtctggggcctagatgattaccacttcttgccgtttttgttcggtgccgctcagcttgttgggcacccgtatatcacaccgttggcgattcataatactgctatactcgacgaggaaggagaccgatatctgtaccttgatcaagtccggtgggtggatagtgttaagacagtgaaagggctacggtggcacagtcccatgctggacgatatttccggcgcaaagaactggactaagattgaaagcggaatgaaaaagatgtttgtcaaggaggtattggggaaactccccattatgcagcactttttgtttggaagcttgctgcccgctgaaccgggaatgggtgaaggtgaagccgaagaggagggtgagcatacgcatgcacatggacatagccatgtgcacgaccacagtcagcaactagactggtttggcgattgctgtggcatcaaggtgccgagcactgtagctgcaggacaagaaatgcggaaacgaatgggtggtggttcgagcctgc

SEQ ID NO: 19592 - DNA, 1080 bp, Emericella nidulans
cccctttcctttcacacgcaccttttactttgttcagacagtctttattgactgcagcccaggaaactctcaatgctcggtcagaatatactctcagccaagatgatggcactgcggacgatagaatcaaccaatatgtgattaagcaggagattggccgcggctcgtttggtgcggtgcatgttgctgttgaccagtatggaaatgaatatgtgagggctttgtttacttcgagtacatattcagactaaccaaactttaggctgtcaaagagttttccaaggcgcgtctaagaaaacgcgcaaaatcgcaacttctgagacagtctcgaggtccaaaacgtccagcagatggcctaaactccccttttcatcgccagggaccgggacttggagacgaagagatgaaaaatgctctctattttatcaaagaagaaattgccattatgaagaagttacaccacaacaatctagtatccttgatagaggtactggacgacccgacccaagattctctatatatggtcatggagatgtgcaagaagggcgtggtcatgaaggtcactctcgaagagagggcggatccctacgatgacgagcgttgtcgctgctggtttcgtgacctcattttgggcattgagtatttacatgcccagggtatcgtccaccgtgatatcaagcccgacaactgcctgataacgaacgatgatgttctcaaagttgtcgattttggcgtatcagaaatgttcgaaaagaattcggacatgtttacggccaaatctgctggatctcctgcctttctgccaccggaactctgcgttgttaagcacggcgatgtatctggaaaggcggcggatatatggtccatgggcgtgaccttgtattgtttgcgctacggcaagcttcctttcgaggagcacagcattatcgaactctacgatgccataaaaaaccgcccgattgtttgcgacggcgaaactgacgaagtttttaaagatttgatgttgcgaattttggaaaaagaccctgcgaaaagaatacagatggacgagctgagggtacgtggtatcgcttggattgc

SEQ ID NO: 19593 - DNA, 1080 bp, Emericella nidulans
ccccaagcgcggtaccatcaagaacttggtctctgcgcacgagatcgaccccgagcttagcggtctcggccccgaggatatcagcgatatctggtttgctggaaactggaccgatgtaggtagcttattccatttaggtgatcgcgagctgacaattccctctagatccacgcctgggtcatctaccccgaaggcttcgacaagagcaagacctacccattggctttccttattcacggcggaccccagggcgcatggtacaactcctggagctcccgctggaaccccaaggtcttcgccgaccagggctacgtcgttgtcgcgcccaacccaaccggtagtaccggctacggcgatgaactaaccgacgccatccagaacaactggggtgcgcctccctacccaatcgccagtcaagccaaacacgctaacgtaacatctaggcggtgctccctatgaagacctcgtcaaggcctgggaatatgtccgcgacaacctcgactacgtcgacaccgaccgcggcgtcgccgccggtgccagctacggcgggttcatggtgaactggatccagggcagcgatttgggccgcgaattcaaggcgctcgtcacgcacgacggtacattcgttgctgacgccaagatctccaccgaagagctctggttcatggagcgcgagttcaacgggacgttctgggatgtgcgtgataactaccgccgctttgaccccagtgcgcctgagcgtatcctgcgattcgccaccccccatttgattatccacaacgatcttgactaccgtctccccgtcgcggaaggactgagtctgtttaacgttcttcaagagcgtggtgttcccagccggttccttaacttccccgacgagaaccactggtatgttcctgccccgcctctgagccttctacattgcagcatgctaactggtgcagggtaacgagtcctgagaacagccttgtgtggcaccagcaggtgctcgggtggttgaacaagtactctggcattgcagaggataacgaggatgcggtcactttggaggatactgttgttcctgtggtgaatatcaat

SEQ ID NO: 19594 - DNA, 1080 bp, Emericella nidulans
cgtagtcagtcccgcccctgtttaattgctttgagtacacaaccaaccattatgccccgcgtcgctgtcattcagtggtcaattaaggtatatacctaaatctctgtatactgatcttggcgctaactgcggtagaacctcgctgtggaacacaaccacgcgacggcatgcgaatacattcgctctgccgctgcacagggcgctgagctggcagtgttacctgagtatgccgtcaacccatttccaatctagccaaataaagaagcatgttctaacatggaggaagataccacctctttggctgggcaccagaagacccgctcttcgctacgtatgcctcccaaacatcaaagtacctgcaggcttaccagtccctcgccaaagagctgaacatctccattgtcccgggcacattagtggagaagcatcctcacccggagcaaaactcctctgaacctgtagagggtagggacggagatcaagacgcctatgtcctctataacacagcatacttgatctccaacactggcgccatcctcggccggttccggaagaaaaacatctggcatcccgagcgggagtatttgacttcgtctgcgatggaacggcatgaggtctttgatacgccgatagggaaggttggattgctgatttgctgggacttggccttccctgaggcgttccgcgaactaatatctgccggggcggaaattgtggttgtgcccacttattgtatgacccctttcacgatttactcactgtaccttttatgtacttgcatcgcttgtgacagaagaaactaacgagtcatagggggtcgctacgatgccaaccccgcagcactcaaacacaacccaaactcggaagcgctcttcctcgactccgtgcttacagcgcggtgcttcgagaatacttgcgccgttatcttcgccaatgttgccggcgaagaacagttcctgggtatgtcgcgggttgttctccccgtcgttgggccggtcgcgaagatgggaaatgaggagggggtgttggttgcagaactggatatggaccttgtcaagattgctgaggagaattataggg

SEQ ID NO: 19595 - DNA, 1080 bp, Emericella nidulans
tggttcttcacaatcctaacaattggcactgggtcaacaaggatgtctccgcctgggccaagacttatctgaaggagaagcttcgtgccgtttcggcggaggaagatggcgtcaccgctaaggtgtccgacgtactgacaatggatggcgacgtagatgtcagccagcgaaagggcaaggtcattactttgttcgacgtcaagctgcagttggagtatgaaggtacgcatttagttgtaattgaatttcattttccgagtaatcactaagatccatcataggtaagactaaggacgaagaggctgtgagtggtactatcaccatccccgaggtggcccatgacacggaggaagatgagtatgtcgtatgtcccctatatgtcccaagctattctgcttctggacacacactgatagatacccgggtgcagtttgacatcgatatctactcggattctccttccaagcagcccgtgaaggatcttgtgcggtcaaagattgttccacagatcagaaaagaactggtccagctcgctcctgccttggtagctgaacacggaaaagatatccagcatgcccctggtgaaaatccgtccaagggctttacgccggccgtatcgtaccctcagaccaagaagcaagaagcccctgcttccaaacccgccactacaactactaccaacaaggtttccgtcaacaccactacggtgaccgcttcggacgaattccgcaccacggctgaagagctgttcaagactttcacagaacccgagcgtctcgcagccttcacccgcgggcagcctcgccagtgggacggtgctaaggtcggcggcaagtattcaattttcgacggcaatgtcaccggagaatttgtgaagcttgagtctccaacactgctggtccagaagtggcgcttggctcagtggcctgaagggcatttcagtaccctcgagatcaacttcgaccagaacgatgttgacggcgtcacccaaatgcgtgtatcatgggccggcgtccctgttggccaggaagacgtcacgaagcagaattgggaactctattacgtgcgcagcatcaagca

SEQ ID NO: 19596 - DNA, 1080 bp, Emericella nidulans
acgggctgcaggtgtctcccacgtcttcaacatcaacgccaacatggcaccacttcgagcgcaaagtcgacgaagttaagccgtccaagacgtacgttcccttccctccaatattcgtcccttacatgatgcgtttatattcaagttgggaatctctctgaaaaaaatatacttgaggagaacatataacttgtgtttctgatacatttctgcccatgcttcgttcagctggagttggttctttgtccatctgctgacgttttcaagtgatatgaacagattggttatggactacctagtcacaaatggctacccagctgcagcgcagaaatttgcgctcgaagccaatattgagccagtggacgtcgaatcaatccgggagcgggttgaaattcggacggccatctactccgggaacatccaggctgcaattgaaaaaatcaacgaactcaatcctcaggtaagaaatacattcactctgcaccctcatcacacctttcctgttatgattagaccaagtttcatgcaccactcagaacaccctcctgggttttgttgataaacaaacatcttcagtcctcagtatgactacaacctcaacatgatcatagctcattgtcattacttcgtctgcgacatgtgctaactacttaatgcagattctagatgaaaacccgtcgctgcatttttcgctacttcgtttgcagcttgtggagttgatacgctcctgctcggttaaccctgatggagacatcaccccagctcttgagtttgctacttcccagctcgcacccagggcaccaacaaacccccagttccttgaagaccttgagaagacgcttgcgcttctcatataccccaaggagaacctaacaccatctctagctccacttctccattccgatttacgtagggacatttatgctaaggtcaacgcagctatcctgcaagaccaaggtgctcgtacagaagctcttttgtgcgacttcgccaggttgtacgcttgggcggagcaaaaggcccgagaggctaagaaggatatccctgacaagctggatcttgggcttggggaatccaaca

SEQ ID NO: 19597 - DNA, 1084 bp, Emericella nidulans
gcctgatttggcgcccttccttacgatgactgtcccccaagtccaagtccgcaagtggctttatgctttctacgtttacttggccgtcttagccgtcattctcgggccggtgcgaaagtacgttggtgagcgagcattacaaggggaggatccctttggctgggcactgggatacttacttgggaatgtatcttggttcaggttttgggtcataaccttgagcctggagcgatggatcccgatacctcctcgggttgatgctagtttatcgaatgctttctgccatctcggtcgggtagagcatatccgccaaagcgcccttggggaggctagtatgcgtctcataatcattgcgtactgcctagctgtacttgtgaccggtattgcaacagtcatccggttgggcacctttgtagaagtcgacacaaggcgcaaagtctttcatggtacgatggtgctaatgttcctcccaacaatttacatcgacccagcattctgcgccctggctatggccctggtcttagcgatcttcctactactggaccttttccgcgcttcccagctcccgccgatctctcggccattgacctatttcctcgaaccctacgttgatggccgcgactaccgtggccctgtcatcgtctcgcacatattccttctcatagggagtgccattccactctggctcacccttgccgatatctcccgtacaggtgactacccctggaaatcatggaacgtccagactcgcgatgcaagcatgctcagcggcatcatttgcgttggacttggagacgcagccgcttccctcatgggcaggcgcttcggccgccgcaagtggttttggggcggtggcaagtccgttgagggcagtgtcgcctttgcgattgcagtgacgttcggattgctgtttgctcagggctggcttgtgctaggacagtggcctattggtggattcgatggaccaaagccgttttcctggtctggggcattggtaaaggccatccttgcggctggtggagctagtgcaacggaggcggtcttgacggggtgcaatgataatgtcgttgtgccggttgtgctg

SEQ ID NO: 19598 - DNA, 1086 bp, Emericella nidulans
actcaccttttcttaactctcgaaacattggacacataatgtccacatccctcagcaaacttgctgctcaattcccctgggccgctgttccgctaatagtcagcgccccgatgcgggtcatggcaggccccaagctcgctgttgcagcctccacggccggagggctaggcttcatcggcccgggcgtcaaaacagcaaacatgctaagcgaccttgaagaagcctcgacgctgatcaagaattcaaggctcgcctcgctaggaccaaccctaaagactttgcccgttggtgttggtttccaggtttggagcgacgatctggacaccgcgacgcatgcagtcagagagttcaagccctgcgttgtgtggctgttcgctccgaaggaattcacagacttaaccatctggtcgaacacgctgcgggatgtatcgcccaactcgcagatctggatccaggttgggacattgagcgaggtcaaacgtctccttaccatggggacaagcacaagcacacgcgatgggccagacgccattgtcgtgcaaggcagcgaggccggcgggcatggccgggcaagtgacggcctcggtctggtttcgttgctccctgaggcagccgatgcagtggccgcaagccagacaccagaaatcccgctcctggcggccgggggcattgcagatacccggggcgcatctgccgcgctctgtctgggtgcatctgggatcgtgctggggacaagatttctcgctgctaccgaagcgcgcatcagttctggctaccaacatgagattctgcgcgctgacgatggcgctgtcagcaccacgcggacgctgctgtataatcatctgcgtgggatcaccacgtggccggaggaatatagtccgcggacgatcatcaatcaatcgtttgttgagtatcgggctggcacggcctttgaggaattgaagaagcgccacgacgagcatttgcagttgggggatgccggatgggggcccaatgggaggctggcgacgtatgctggggcatcagttgggttgattcatgaagttaaggatgcaggagacattgtgagagatcagggagggcgtg

SEQ ID NO: 19599 - DNA, 1087 bp, Emericella nidulans
ggtctcctcgctccccaaacgatacaccatatacgagcccatgctcctgcttccgctgaacgcctttacccaccctccggcctgggccaagctttatgaaggtttagatgacaaccagcgccagactctgtacgcctccatcgcgagcgccttctcgcgatatggggtaacacacgttgccatgaacgcaccaatcgtgcttacagacactcaaggacatgagaacaggatgcgcagcccaatcgggctcatcacgctgcatggagatttcggaccagccacgtcgcgggatggcgaggatatccagccctcggaagatgattacaagcgcgcattctgggtccgtactgtccagaatcacgggatcgtacagatctgggctccgctgcataccatgttctctcggggaaatgtcactgagaaggcccggatactggggcatgggtctacgtttgaggggttagatgaggtatcgcttcatgggaagacagctggcgatgtcgccgtcatcgatatgtacgccgggatcgggtactttgttttctcgtatctgaaacgcggggtccagagggtttgggggtgggagatcaatgggtggtctgtggagggattgcgtaggggatgtgtggagaatggatggggttgtaaagttatcagggtgggaaatgatggccagctgagtgtgcctgttgacgagctggtcgggggcctttgtgatactgatcgggtggtgatttttcacggagataatgggtttgcagcggggattatgcgtcaggttagagatgctatggagggtcggcaagggtggaccaacatcagacatgtcaatttggggcttttgccatcttccagcgacgcttgggatggtgcctgcaggatcattgacggggacaaaggtggctggctccacgtgcacgagaatgtcgatgtgcaacagatcgaggtgaagagaggcgagattaccgccaccgtgcaaggtctctggactgagtctgcgtcccagattgcgaatacggagccccgtgctgaatgtcggcacgtcgaaaaagtcaagacttatgctccaggggtaatgcattgtgtt

SEQ ID NO: 19600 - DNA, 1087 bp, Emericella nidulans
tactcttcttcttccttagcgaaacacgcggtagtgtacttttgagctgcaaagccaaaacattgaataagtactacgatttgctcgaggaagcgggctactacggcgtggtctttgatgccaatgagacaacggaaaaggcgcaagttcagcggatcagatggaaggttaagagtgacgaagagcgtgactctctggctaagatggtttcaatttcttgctacagaccatttcgtgagtgccctttgacgtccactgaacaaaaggagcgggctggaaccgactgacacgtataccaaaagatcttctttccaccgagccagttgtctttttcttctcgctctgggttgcgttcagttgggcaattctttaccttaaattcagcgcagtacccctagtcttttcgacaaaccatcagttcaatattgagcagaacggggcggttttttctggtatgacttaccctagcacttactgccagtgctaacaacagtccatagcggtttctattgctgcaattgtaggcacagtgctgagtgtaaaccaagaaagattagctgcgcgattcggcaagatatcaaatagcccagaaggacggttatacttcgcctgcgtcgaatcaatattgatgccagttggcttattctggtttggatggacgtcatactcctcgatcccttggatcgttccaaccgttgccatcggttgctcaaccattggcattctgtccatatacctggctacgttcaactaccttgccgatacgtaccaccgatacgccagctctgctattgccgctcaatctttttgtacgcttatttctctccagcctgagtttcggacgcggtggtgatcataggtgctaacgacttctaggccgtaacgtccttggcggtatttttccattggtcacaaatgccatgttcaccaacttaggatatccagccgcctgcagccttttgggagggattgtaaggaagcgttcctaatgctagtgtttgccgagctgacatggatcagggtatcctattgacgatcgtaccgtgggtattggtcttctacggccccaagatccgcgcacgaagca

SEQ ID NO: 19601 - DNA, 1087 bp, Emericella nidulans
gctcgttgccttgatcgtgagcatagctgacatttgattgtttttagctagccttgaggtcaagtccaaggcccccaatggcgtcaccttcaacgtgaagggcaagtccgctcatgagggtcctatcgctggcagtgtaagtacatatcgccaatacatgtcatctaggctgtcactaacagcaccctccttgtgtagctcgaggccaaatacgtcgacgcccctactggtaaacgcccccacaatcgcatacgaaaaactcccaagaagccagacaaagcgctcgttgttgatataacacgttcgcattgcttgtcaccgtccactagaatcactttaacgtcaagggtcgccgaacatagattgatgctaataatctgtccttgctcaggcctcaccctcacccaggcgtggactactgccaacgccctcgacaccaagctcgagctcgacaacaacatcgccaagggcctcaaggctgagatcattacccagtaccttcctgccaagcagtccaagggtgctaagctcaaccttcacttcaagcagcccaacctgcacgctcgtgctttcttcgatctcctcaacggcccctctgcaaacttcgatgccgttcttggccacgaaggcttcctcgtcggtgccgagggtggctacgatgtccagaaggccgccatcaccaagtactccgctgccgtcggctacagcgttcctcagtactccgctgccatccaggctgctaacaacctgactgtcttctctgccagctactaccaccgcgtcaacgctcaggttgaggctggtgctaaggccacttgggactccaagaccggcaactccgtcggccttgaggttgctagcaagtacagactggatccttcttcctttgccaaggtaaatagtcctagcccaaaaaaattggaatcacgcagatctgataaacccctctcaatttaggtcaagatcaacgaccggggtattgccgccctggcttacaacgttcttctccgccctggtgttaccctcggccttggtgcttctttcgatacccagaacctcaaccaggctgctcacaaggttggcgcca

SEQ ID NO: 19602 - DNA, 1088 bp, Emericella nidulans
agagacaattgtagtcattgggtaaaaagtccccaccaaacaccatataaccagggactgaccttcccagcgccggtgttatcgggctctctacagccctccaccttcaacaattcatctccccctcacaacaaatcctcattgtcgcccgcgactggcccagcaccacgtccgtcaactatgcctcgccttgggccggcgcccattaccgccccgtccctggctcctcgccgcaagccctccgcgaggagaagcaggcccgccgcacatatgaccatttcaaacacgaagcgaaagtgccaggctccggcgtcgagtggacagaaggcattgagcacctggaatctccgccaccggaataccttaccgagaatgctctcgagaactacacacacctcgacgggtttcggcagttacaaccaagcgaacttccagagggcgtcaagtggggcgtgcgctacaatacattcacgatcaactcgcctgtttactgtgcttacatgctgagaaggtttgtgctgaagggtgggctcgtgaaggagtattcgcttgccaacgtacaggaggcgttctatcttgccgaaaatgtacggaccgtggtgaactgctctgggcttgggtttggagacccaaagtcgtttattatccggggtaaatcatcccacggcttgaatgacggttattcctgcgctaacctggcataccaggccaaacttgcctcgtccgcaactcctgctctgtgacgctcacccgtcagaactctgacggctcctggtccttttgcgttccccgccctctggagggtggtaccatcatcggcggaacgaaacaaccgcacgactgggacccaaacccgtcgctggagacgcgagagactctgctccgcaatgcgagcaaatggttcccgttcacaccagcgagcggcggcaagttcgatgtcatccgtgatattgttggacgtcgtccagcgcgccagggaggaatgcgaatcgaggttgagaaagttggtgatgggaagactatcgtccatggatacggtgctgctggacgaggttatgaaatatcttggggagttgcggaggacgtcg

SEQ ID NO: 19603 - DNA, 1089 bp, Emericella nidulans
ttgcgcaatgctgggaatcggaactgcatgaggggctgattccatgaggatgggactaatgagtttgtagccagctggatggtgcggtctatacgggctaaagcctacatttggactgatgccgtataccggatgtggatcgaatgagccgagtatgtcctacacctggctctggagcaattgcagcacgaggctttactgacgggatattgtgtgatacagcgaacgaccatctgggccccatgacgcgcaccctcctcgataatgcgctgctcctccaagcaacagccggcaacgacaatatcgacgaccggtccttcgcggcgcctctgccgtcccaaattcctgagtactacagcattctaacctccctccccaaccccaaattcctctccggcgtcaaaatcggcgttatctcagaagggatgaacatgcctggcatagacccgcgcgtgcacaaaacggtctcaaaagccatctcgcttttcaccgagctcggggcgacagtgtccgacgtctcagttccgtttcactccagaggcgcggcaatctggacgcccatctccaaatccgggaacttccacagccgcatgaaccgcgcctttggacggcgcggccacgctctcacagacctgaataccctcttccaccccctcacgcaagagaaatgggaccgcgcctacacctccacgaaaaacatctaccttaacggtgcatacgccgagactcagttccccggaatactaagcaaagctatgaatctctcgcgccggctgcgtgatgaatatgacgccgcactgcgcgagtatgatgtgctggtcttgccaaacctgccttatatcgcgaacagccatgttgacccggctactgcgacgccgcttgagatgatcgcgaaacaggtcgggcttacggccaacacggcgccatttaaccagtctggacatccggtgttagcgatgccggttggtatgttggagatactagaggggcccctggcggagaagggggtcaagttgccagtgagtatgcaggttgtaggaaggtggtggggagaagtggatgtttatagggtggcgtatgcatggagtc

SEQ ID NO: 19604 - DNA, 1090 bp, Emericella nidulans
gccacggcgggtcagaatgtagtacattcctaaaagaaacgctacatgaatatattcaagatactgccgctgaattcgagctgcagtcgagtttgagaaaggctggtgagaactccgcgtctccggacgctgagagcgagttgcccattcggcaaggcagcaacgttgcgcgggttcaaaggttagaaaagtctctagtccagagctggagaaatcttgttggagggtactttagaagatttgtacctccgaacttctcgcacctcgccaaacatactgcagaggaatcatcatcagtgccagagaataacaagggggtcacaattgaggagattctggagtatgctttcttgcgtgcagacttggactttgtctccgcccaagcatcaagggaggatgacgagctgagcaatgtctgccgtccgctttaccaagacgatattctttatggaccgagccgctcacagtccctaaacattgctggcttgagacggttcaaaggtggaagcacggctagtactgtactcatttccacgcccacgcccgcacccttctggcacccagcaagcccatctagcttgctggtgtcgcatgtcggtgataccaggatactgttatgctcaacagtcaccggcgaggcaattccgcttacatctaatcaccacccatcttctccgattgaagccaaccggctacggcgatatgccgctacgtttgttactgattcatttggtgaagagcgcattagtggcctagctaacactcgtgcatttggcgacgtacaatcaaaacgaattggagtgtcggctgaacctgagctccgtcgattcgagatagcccccgcggagtactcgttcctggtgctaatgtcagatggtatcagcgaggctcttactgaccaggaagtggtggatatcattaaagaagcgaagactccagatgaaggggctcgacatgttgtcaacttcgccactgaagtaactaggaccggcgacaatgctacttgcctcgttgtgcgactcggcggctgggagcgacgattggaggggggtttaggaagtttgggaacaaaagaatctcgcgaattccg

SEQ ID NO: 19605 - DNA, 1091 bp, Emericella nidulans
ggcttcagcagcagaccgacaaaatgcagagaagatgctccgcttcatcaaccaggcgaaggagacgttggccgaaaaccgtggtgcgtcgatggcggtgttctgcattgatcaggcgcggcaactccttggaccaggcgtgaaagagcctcgtgcctggactcttttgacggcggaggcgcaactgaagatggctaccggtaactcctttggaaaggcccaagacattgccatcaacatgcttcgagacaacaaccaggaccctgatgcccttttgatccgtgcgaaagcttactacggcttgggcgagacggaccaagcgctcaagtcgctcaaaatgtgtattggactggatcccgatcacagagaagccatcaaacttctccgcatgctacagaagcttacccgaacgaaggaagaaggcaacaatgctttcaaggctaaggactaccgcaaggcaattgaactgtatacagaagccctcagcgtggatgagacgaacaaggacgtgaacgccaagatcctccagaaccgtgcccaggcatatatcaaccttaaagaatatgatgaggcgatcaaggactgcactgaggctttacggctcgaccccacatacattaaggcgcagaagatgcgcgccaaggctcatggtggtgcggggaactggcaggaggctgtttcagactacaaggctgttgctgaggctaaccccggcgagaagggaatccgggaggacattcgccgtgctgaattcgagctaaagaaggcgcaacgaaaagactactacaagatcctgggtgtctccaaagatgcgacggaaacggacctcaagaaggcctaccgcaaactagccatcaagtaccatccggataagaaccgtgaaggcgaagctggtgatgagaagttcaaggagattggcgaagcttatgaaactctcatcgatcctcagtatgtttcttttacctagtgttctaaaattgcaggatactaatgattgcaggaaacgcgctgcctacgataacggcgatgacttactggaccccgcagacatgttcggcggcggcggattcggcatgggaggcatgggagga

SEQ ID NO: 19606 - DNA, 1091 bp, Emericella nidulans
cgttgcagctccgcagaccacgggaggccgatcatgctcaggagtggaaggtagtaggtctcggggtctccgaaaggaagagtatacctctgccgacagccgaaaacaacagtagagtcagtacggcacatattcaactaggacttcatagagacggataggtaattgcaaaggtgtgcgggtgggcggttgtgttggtggatgtgagagcgatgcctgacacggggatttaatgccttaggctacgaacaatttcctccgcgttaccagctcggcccatccttgcggagactcaacctctatccatcatcagttttcttcctctcaaccacaactactgcctggaaacacatataatgtctcgcagatcattatgggggagcttaaggctcgtctctaaacgccaattcgctgtttccgaagctcaataccgctgcttttcctgctccttgcggacccagaaccagtccaagtctgacaaggaccgaatgacacactttggctttacgaatataccggagcacgagaaagagtcaatgggtatgtttcttcgcgaactgcgaatcagtctttgaattattcggctaaccagagtaacgtccagtcggtaaggtcttcagctcggttgcctcatcgtacgatactatgaacgatctcatgtcaatgggtattcaccgtctatggaaagaccactttgtgcgctcattaaatcccgggtccgcgcttccttcgcgcgacaacgactcagctgagaagggctggaatatcctcgacatcgccggcggaaccggcgatatcgcctttcgcatgctagcccatgcaacgaacatcaaccacgactaccacactcgagtcaagattgccgatatcaaccctgatatgctagcggagggcaagaaacgcagtatccagaccccctactacaattcggagcggctgtcgttcatgcagggcaatgcggagcatatgccctcgattccggataactcggtcgacctgtatactgtggttttcgcaatccgcaacttaacccccaagcaggcggcacttgtggaggcataacaagtattgaagccgggtggtgtgtttgc

SEQ ID NO: 19607 - DNA, 1095 bp, Emericella nidulans
ggctcgcgctcaaaatgaccctttttcgaaacctggcccttctagcggcctctatcgcccctgttgttgcccagacatggacgcactgcaatcccactaaagaggactgtgaacccaacccggcgctgggaaccaactacacctggggctttaatgagaccctcaatgacaagatctggaacgtgactaatggcgagatcaactacaccgatgacggcgccgaattcacgattgcgaagaaactcgagtcgcctacgatccagtccaccttctacatcttcttcggtatccttgaattccaggccaagatggccaagggcggtggtattgtcagtagtgtggtcttgcagtcggacgatctggatgaaatcgactgggaatgggttgggtacaatacgacggaaatccagaccaactactacagcaagggagtcacagactataaaaacggcaaattctactatgttgaaaatgccgatacggaatggcataactacaccacttattggacctcggagaaattggagtggtgggtcgatggtcagttgctgcggacccttacctatgacgaggcgaagaacggcaccgagagcactttcccgcaaacaccctgcaatgtccgtatcggtatctggccggcaggtgaccccaacaatgcccagggtacgattgaatgggctggaggtgaagttgactacgacaaaggcccgtacaccatgaccgtcaaggatgtgcgcgtgcacgacttcaacaccggaaaggcgtatgagtatggagacagctctggctcgtgggagagcattaatatcatcaagtgagtcttttctgaaccattaccttaagacagctactgaccttataggggtaactccactgccgcggaggaaatcaacaagcccccgccaaagtctctgtctgaaaaatgggacgatctgccttcgggtgccaaagccggcgtctatgttggagccgccgctgccggagccatcctgcttgccctgttcatcttcttctttattcgccagcgcaagaagggtcgtctcgagcacgcccttgacgatgccaagttcaacaacgagcgcaacgagatgaaca

SEQ ID NO: 19608 - DNA, 1096 bp, Emericella nidulans
aacgccacgcttcccagacgcgggcgaaacaatcacctcttcttcatatttcacaagtgcaggcgggaaaggcgcaaaccaagccgttgcgtgtgggcgactctcgcgttcgcagccgcaatcctcctctttctcgacaagcataaacactggcgacgtgaacgtcgaaatggttggcgcagtgggaggactagacggccacttttccgcacttctcaagcccaccctggagaaatccggtgtcgatacgtcacgcgtgaaggttgtggaagacgcatatacaggtgtggccgttataattgtggactcatccgccggcggcgagaacaggatcttgttttcgccgggcgcaaattactcggggatgcaggccgacccgtcagttgttggcatggcgcttgcggagccagctccggatgtcattgtcatgcagggcgagattcccaccgagacgacggtcgcgattctccgcgagatcgcgcggtggaaggaacagcagcgcgcggatgggaagagggggattgatgctggcccggacgtgatgtttaaccctgcgcctgcgccgcctggaggcttaccggaggatgtgtacaagggcgttgaccaccttatcatgaacgagacggaggctgagctcatgacaccggacgaggacgtgctgctgcgcgttccgggcattgaaagcgcgcaggacgggaaggagaaggttgcgcggtacttccatagcctcggcgtaagatatgtgattgttacgctgggggcgaagggggtgtggtatagtgctgcggatccggatactctaggggaccgggtcgtgaatgaggtccctgctgcgaaagtgagcagggtgcttgatacgacggcggcgggcgatactttcgtgggagcctatgcagttcaggctgcaagatggcgtgagggaaggcgccgggaaggaaaggctgggaaggaccttgacgctgaggagaagaagcataggtacaaaaatgtcatggatgaggcgatgggtgtggccacgagggcttcggcaagaggcgtagaaaggcagggtgcgatggatagtattccgtgggaaaatgagatctagcaactctac

SEQ ID NO: 19609 - DNA, 1097 bp, Emericella nidulans
  unsure (1)..(1097): unsure at all n locations
cgtcctctcgcggtcccagaaattccattcgaagaccaccaccaattcgaagaagcccagcaccctcagatacaccgaacacaggcgcgcctgtcgaaaactacgatcccgctaagaacaccctgctctcccctgtctatctccctgaagacccgcatggggtactcaaggagtctcatcccgccaccgggattctcgcgaattccgggcttgtcgtgcagcggcagctcgagttgatgaatgtgatgatgtgagtcggaaatgtctgtttatggagatatacggctgacttgaccagaggcttcgagcaagccaataagtacgtaatactagatgccgcagggaatcatgtcgggtatatggcagagcaagagaagggcatagctagtatgatggcgcgacaatggttccgtacacatcggagcttcgtgacacatgtgtttgacagacacgaaaatgaagtactccgtgtaagttattgtgctagtaatactttggcgaacccactgacgtgcgcagttccatcgaccattctcatggatcaattcacggattcgagtctacgatcccgtcgaagccacccatagtccttacctacccttgaacaacctacaacctcaaagnnncggtgctcttgctcaggccgcacatccgaccaacgcccggatatcccagcttggacttgaccaaatgcgagtcattggagaagcgcaacaacaatgggcaccactgcgaagaaaatacaatcttttcacatatcatcactcgccaaattctgcaaccgacatgggaactcagcagatacctttagcacaaaccgggctatcaaatgctcagcaaacgcaactaactcatgcgttgggagcgaaccaagatttcggcgaatacaaccaattcgcgtacgtcgacgagcccttcttatcctgggatttttctttacgttccgctaacagccgattgatcggctctgttaaccgtgactttgtgggatttgctcgggagatcttcacggatacgggtgtctacgctctacggatggactcagcagccagcaagtccccccaagaactggaccagagtgcctcggtcaccggcat

SEQ ID NO: 19610 - DNA, 1099 bp, Emericella nidulans
ctcgtaggcgtggcgcatggctatgcgtcgcccggggcgtgctcgggtgcgtgcaacattcacgacccggctttgatccgccgtgagtctgatggcaagtatttccgcttctcaaccggtaacaagatctcttatgcgtctgcttcctccattgagggcccatggacagcgattgggtccgtcttgccgggcggttcgtcgatcgatctggatggaaatgacgatctctgggtaagtaccggaggatcggcagttcggcctatttgggcgaaataagtgctaatgcatactctcgcaggctcccgatgtccagctcgtcaatggcgtatactatgttctctattcagtttcgacctttgggtcccagaattccgcgattgggctcgcgacttctgacacgatggacctcaacacctggacggaccacggctcgacgggcatccggtctgactcctccaagccatacaatgccattgatggcaaccttttccaggatgatagcgggacctggtacatgaactttgggtcgttctggaatgacatctaccaagcacagatgaaatctcctcccacagccgtcgcatcgtcctcgtaccagatcgcataccagccggctggcgagcacgcggttgagggcgcgtacttgtacaagtacggcaactactactacctcttcttctccgagggcaaatgctgcggctatgactcttctaggccggctactggggaagaatacaagatcaaagtgtgccgttcgaccacggccactggtaactttgtaagctctccgcctcgataatggatcgtgttttggacccgcctaattagcccaggttgatgcaaatggtgtttcctgcacttccggcggtggaacaatcgtcttggaaagccacgacaatgtctacggacctggaggacagtatgcctccccaatcccacgaactttggcagaaatgactaatgtaaaacaggggtgtcttcaccgacccgacgctcggccctgtgctgtactaccactatgttgataccactattggctacgctgatagccagaagctctttggatggaacgttcttgacttctccagcgggtggcctg

SEQ ID NO: 19611 - DNA, 1099 bp, Emericella nidulans
tgggtccgcaaacgcagaaactcacgtgctatataacccgaatatgtcaaccaagggcgctgccttggtcatgtccaaggcgcctaaacgccgccacattgatgatgacccaaccttaactatgaacctttcgcaaggtatctccggagactcggtggtggtcggatcgaacggcgtgccgcactacacgtccgctacgtggtccgcacggcaccctaccatcggcttgacggcttcgggccgttcaagagatccccgtcggcctcacttacccgcacaaacaccgtttgcgaagtcgcaaccggacgagagacacatcagggagaatatcccgcttagttctatgcgtgatgaggaccctcgtgaagcgttgctgaaatacgctgaaaaagccgagaaggacccgatctttacaaaggcgtggaaggaaacgcagccgaagccaatttatcgggatatcagtgatgatgaagaaccggaaccggataggaagaaggcgcggcgctgataaaccattaacttttcagcgcagtcattgagaaatatgaaagtggctgactcgaaacgtggattggacacagaggattcgaatatcctgttagtttcaaagaacggaggacaccaacttgccgaacgagtcgaccatcagtccactcccggctgtgatgcatcagaagtccaagttactgcaaaataacgactggtgcaacgtgagtgggccgcagtgcttcaaaccctacttttaggttagtccaagaagaagaaaataccattctgactccctaactaattccaatactgaattgtaagcagccgatttcggtcagaaatctgggctacaaagcccttctaagagtgatctcaaattctgatcgtctctcactgtatacaaattcttgcgtatccccagacaaggcagtccagtccgtacaagattcatggattgtgtccataatccccaaggccaggcatatgccaatccctctatgcatccgtaccaagcccattctatcatcacctcacagtgaccactgaagaagcccgcctctccattccttaaaccactcattctaactcaaatactccctcgccgcagccg

SEQ ID NO: 19612 - DNA, 1099 bp, Emericella nidulans
tgggccagccggccttacttctgtgaagtacaccaccaagctccagccaaaacggttccacttacttatcagtcgctagatacctactggcagaaaaatgctttgatacggtagatgtctttgagcgaagaagtcacatggggggcgtgtggaactatagtcctggaacgctgaaggaggctgtttccacgccagtacctcaactcagtccggacgaagacatacaggaaccagtctggcttcctcgggatgcatccaggccgaaccaagagcctacttttatctccccaatatatgatactctggacacgaatctgccgaaggagttgatggcgttcggcgagaagcaatttccatccgatgtgcaggatttcccaaggcatttcacggtcaaagaatacgtgagggagtatggggaggatatcaagaaacatattcagtttgaaacccaggttctggatgttcaaaaggatagcagcacagagacttggtcagtgacaacacaaagcctccgcagcgggactacgacaactagttcctacgatgctgttgtggctgcaagtggccatttcgacgtcccatatctaccagaaatccggggcatcgtgagctggaataacgcctaccctggtgttattacacactccaagttctatgacgtgccagatcccttcaggaacaagaaggttgtggttgttggaagttccgcatccgggcttgatatcggcaaccagatcagtaaagtctgtaaaggaaaggtcctcgcatcacagcggacggatctttatgtgtcaccttccacagccatggacaaagcctattaccccgaaattgtggagttccttcctcctgctacacacgagagggctgttcgatttgcggacggaagggttgaagacaatattgacgctatcatcttctgcactggttttctttattctttcccttatctctcctctctcactcctcccatcattacacatggccgcagagtagagaacacctaccagcatcttttctacatccatgaccctacccttgttttcccagtcctgccccaaagaatcattcctttcccactctctgagaaccaggctgc

SEQ ID NO: 19613 - DNA, 1099 bp, Emericella nidulans
cagaccggtgcccacgatcctgaacagcaccgatgtggttgtgcgcttgaatgcccccgccatatgcggcacgacctgcacagctacccacacatctgctggatccccagaacacccctttctgtatggacatgaagggatcggacatgttgtcgagggagactcagcccagtccctgtccgtcggagactacgttgttatcccggataacgtcaacaatggccattttactttggatccggatacctatattccgtctctggggttgggtggtgtggagggtactgcgctgcctgggttgcagggtgagcaatgccctcgttccatcaacagatccatacccatagatattgatgaagtgattgctaacgggtgggtgtgacgccgaatatgcccgtatcccctgccgacaactctctgatccccgttcccattaccgacaccaccaacacctcgacattgatcgactacctcttcgcctcggacatcttcgccactacctggagcagcgtcacctggtcgggctttgaagccggcccagtcggtctgttagcagcatactctgcgctcttgcgcggcgcgtcaaagggtttacagcgtcgaccgcgtgcaggaccgtgtcgacctcgctgcatcagtcggtgcgatccccatcagtttcgctgagtcggatcccgtagagcagattctcgcccttgagccaaatgacgtccgtcgtggtgtcgagacagtgggctacgaggccgtggacgcctctggtgccgtacaatcaggcatcacgttgcgccaatcgatagacgtcaccgctcggcatggtggaatcggagttgtaggactcttctcctcgggtcaggcagatatcgactatggagctgcgtatgctaagaaggtctctgtgaatgggggcattatgcttccgttgcaggttgccgacgagattgttcccctgattacctcgggccaggcgcacccaagctttattgtcagcagcgtcattgggattgaggaggcgccggagtattatgggcggttcaaccagacggaggagagtaaggttgttatcacgttttgagccactcagcgtgcaccgtagtcaggc

SEQ ID NO: 19614 - DNA, 1099 bp, Emericella nidulans
ggctacaagtgcaagtccagaaacaacaaaggcatatttcagataatgacgccaaggctgatccagatggcaacaatggtgccctatacaacaacgcgctggacgcaatctttcagattgtccaagaggagggcatcgccggtttatacagtggactcgggagctctattacaagcacggcattcatgaactttacatatttctactggacagcaaccgcgcgcaacgtgcatcagtccaccctccagtcgttcgggctttccgactcaagtagcatcgtcaaggaattgggccttaatgcggtaggtggagctatggctcaactatgcacgaatccgattgctgttatttgtacgcgccaacagactcgcaattattactctgagaagctccccctgtgggagacaatgaaggatatagtgcagagcgaggatggatggactgggttgtggagggggttcaaagttaacctcatcctggtcgtcaatcccatgattacatatggcttctatcagtggctgaggggaaggttgaagaaggcgagggaacttggagcgcttgacacattttgtaagttcttttcagctaatgttgatatttatactgacttacatccaccagtactcggggcctgctccaagttgttggccacggtcgtcacccaccctctcatagtcgccaaaactatgctccagtccgaggcacctgagagtcgaaagggaaagtctttcaccggattcaccgagattctagcttatattataaggaatgaaggactgttacggctctataagggccttgcgccgcaaatcatcaaggggttgctggttcagggattaatgatgctactgaaagaacggtacttatcagcagtataggaaacactaatatacgctaaccacacgcaacagaactgaacttctcatgatggccctttctctacacggaaaatgcttatccaccagtcatcctaaaggaactattggataagcaggcacccggtacccattgattactataccatatagttagtctatctggcaattatatatgtctactctagttagccttctgctcttctcatataaatgaaagcagg

SEQ ID NO: 19615 - DNA, 1100 bp, Emericella nidulans
tgggggtgtcgaacacgcaatcttgcatctgctctactctcgcttcatctacaaattcctcgtccagtcggaccttttcccagaaattgctcgcacgggagatctagccgcgccaccagagcctttcaaggttctccttacccagggcatggttcatggcaaaacgtacacggagccatctacgggccggtttctgcttccctccgaactcgacttttctaatccagagaaacctgttatcaaaaaaacaggcgaaacgcgtcgtgtatcgtttgagaagatgtcgaaaagcaaacacaatggtgttgacccaacgacgtgcgtatcaaagtatggtgccgatgcaacgcgtgcccatgtgctcttctcggcgcctgtgagcgagatcctcgagtgggacgatacgaagatcgttggtatcgaacgctggtttagccgactgtggaagcttgttgtggacgcagagcaaactctggcttcatccacgtacaaggtggaccgtgccgatttagtaaaagcatccgtcaacgctgcgagcctggaaccgttgcaaagcctgagtgataaagatgccgacgctattctcaccactcaccggaccgtttgttccgtcacgagctgtctcgagaaaaatccctatgctctcaacacggtcatctctgacttgacgaaactcaccaactctctcatatcatctacccccacttcaccatatatcctccatctcactatttcttcccttctccggctcttgggccctgtggctccggcattggcgtcggagtgctgggaaatcctccattcttccattgtcacagagcagccggaatctggacccaaagctttgacagtcttcgattgcccgtggccagccgctcccctaaccacagaacaagccgatattctagctgcgcgtggaggacaggttgtggcggtccagattaatggcaagctgcgattcaccgtcactattccaaatatgctctcaccgacaactccggaaggtgccacagcagagcaggactatatcatcagtcgaattttggaaaccgaggaaggacgtctctggttacgggaaaggaacgactgggagaagcgga

SEQ ID NO: 19616 - DNA, 1101 bp, Emericella nidulans
gccctactttgatcgtttggattatgtgtctatgatgacaaacgagcaatgttactcgctggctgtcgagaagctgctgaacattgagattcccgagcgggccaagtacatccgaactatgtttggagagattacccgaatcctgaatcacctcatgtctgtcctttcacacgctatggacgttggtgctttgacgccattcctgtgggggtttgaagaacgtgaaaagcttatggtattgatatcttccgatgacgggtcattgttgcagcttgctgatgaattgtttgactaggaattttacgagcgagtatctggtgcccgtctccacgccgcctacgtccgacccggtggtgtctcccaggatctccctcttggcctcctggatgatatctaccagtgggctactcagtttggtgaccgcatcgacgaaaccgaagaactgctcacggacaaccgtatctggaaggctagaacccagggcgttggtgttgtcagcgccgccgatgcgcttaacatgagcttcactggtgttatgctccgcggctctggtgttccctgggatatccgtaagtcccagccctacgatgcctacgacaaggtcgagttcgatgtccctgtcggtgtcaacggcgactgctatgaccgctacctctgccgcatggaggagtttcgccagtccctccgcatcattcaccagtgcttgaatcagatgcctgccggccccgtccgcgtcgaggactacaagatcatgccccctcctcgtgctgctatgaaggaaaacatggaggcccttatccaccacttccttctctacaccaagggttacgccgttcctcctggtgagacttactccgccatcgaggctcctaagggtgagatgggagttttcttggtcagtgacggtagcgagcggccataccggtgcaagatccgcgctcctggtttcgctcacttgggtggttttgaccagattgctcgtggccatcttcttgcggacgctgtcgctatcattggtgagtctctaatacccctctacctagccttctattaatgatttgtcaaggtaccatggatctcgttttcggagaagtcgaccgg

SEQ ID NO: 19617 - DNA, 1101 bp, Emericella nidulans
cttgaaggggatgagctatgtgcacgttatgttaatatggcgaataaaacatggtctcaaacagctggaaaagtaacagagactttgaggatgtgagtaagatgatttttattcttccataccagggttcagtcttgagctcataacatgctgagagcaagaggtgcatggagcgagaagctgtggtggacacatgacacctgccaaggccccgggaaaggtttggatcttcgcataatttctttatgtcaagctgacaaattattccacgaaactccacccgtccgccggtttttgtcagggaaaagtttatgggctcttgtctgctcttgtgccgtcgcgagcttctagggacccaagtcgcctcaaggcaaaaaacgccagtgctcccaatacatgtattgctaggctcataggtctttcttttccacgtttctgtgctcgtatcttttgtgttacattctactgactgcattctcaaggtggttgctttgcttggactcgatagcttatattccctgttccccgtcatcccgcaaggcgaagctattgtgatggcgacattcgtttcagtttccagaaggcccatcatgggattgcctttttttttatctccatgcgagcctgtctcactggagttgcggcggaatcagtcttcttacaggcgcactaaacaacgcctacgagtcaaaccggatgcctccttcggttttccttcggatcaaacccaaagtcatatcatctacaacccgccatcgagttcaccctctgtgtatcataccccgacaaaattccttcccgccaacgacgcccgaagacccttcgcgccgaaacccctgccaatacctctaccgttgaggaactgccctctgtgttcaaattcgaagccgaaaaaaagtatcatttgaccccatcagatattactgaaatccgcaaactccgattaaacgacccaatgacttggagtcgaggcaaattagcgaaacgctttgactgttctccgctatttatcgcccaagtatgtcaggcgagcccacagaagaaggagatccaaaaacaggttttacaagccgtacagtcaagatggggtgcgaagcgtcg

SEQ ID NO: 19618 - DNA, 1102 bp, Emericella nidulans
  unsure (1)..(1102): unsure at all n locations
aacccggccgaatcgcaagccaaatacgacgaatgtcttcgcgctggtgaagccatcaagcgcctcctcgtcgaagacatccgcccctccgacatcatgactcggcaagccttcgagaacgccatggtcgttgtcaacatcaccggcggctccaccaatgctgtccttcacctcatcgcacncactcggtccgtcggcatcaagctcacaattgacgacttccaagccgtctctgaccgcacccccttcctcgcagacctcaagccatccggcaaatacgttatggccgacctccacaacatcggcggcaccccctccctcctcaaattcctcctcaaggaaggcgtcattgatggctccggcatcacagttaccggtgaaactctcgccaagaacctcgagaaagtccccgatttccccgaggaccagaaaatcattcgccccttctccaaccccatcaaggaaacaggccacatccagatcctgcgcggttcgtcgcgccgggcggttgcgttggtaagattaccggtaaggagggaaccgttttacacggcaaggcccgcgtctttaaccacgaagacgacttcattgccgccctggagcgcaaggaaatcaccaaggatgagcaaactgtcgttgtgattcgctacaccggtcccaagggtggtcccggtatgcctggtatgcactctctagcaacctgacccttcaattctcatccaacctgctaattcacctttctagaaatgctcaagccttcaagcgccctcatgggtgctggcctcggccaaacctgcgccctgatcacagacggacgcttctccggtggttcgcacggcttccttattggacacatcgtcccagaggctgccgtcggtgggccgattggtcttgtacacgacggcgacgtgatcaccattgatgccgagaagcgcgttttggaccttgacgttgacgaggcggaactcgctaagcgacggaagcagtgggaggctgataaggcggcgggcaagttgccccagaccgggttgaacttgcgcgggacgcttggaaagtatgcccggaatgtcaaggatgctagttccgggtgtattacggacgc

SEQ ID NO: 19619 - DNA, 1103 bp, Emericella nidulans
cgtgcccagctcaaggctcctggtatccttcctcgtcgctccgtcaaccagcccgtccagactggtctgaagtgtgttgactccatggtgcccattggtcgtggtcagcgtgagttgatcatcggtgaccgtcagactggtaagaccgctgtcgctctcgatgccatgctcaaccagaagcgctggaacaacaccagcgacgagtctaagaagctctactgtatctacgttgccgtcggtcagaagcgttccaccgtggctcagctcgtcaagaccctcgaggagaacgacgccatgaagtactctattgtcgttgctgctaccgcttccgaggctgctcccctccagtacctcgctcccttcactggctgtgctatgggtgaatggttccgtgacaacggccgccacgctgtcattgtctacgatgacctttccaagcaggccgtcgcctaccgtcagatgtctctgctgctccgtcgtccccctggtcgtgaggcttaccccggtgatgtcttctacctccactctcgtctcctcgagcgtgctgccaagatgaacgacaagcacggtggtggctctctcactgcccttcccgtcattgagacccagggtggtgatgtctccgcttacattcccaccaacgtcatttccatcaccgacggtcagatcttcttggaggctgagctcttctacaagggtatccgccccgccattaacgtcggtctttccgtgtcccgtgtcggttccgctgcccaggtcaaggccatgaagcaggttgctggttccctgaagctcttcttggctcagtaccgtgaggttgctgccttcgcccagttcggttccgatctcgatgcctccaccaagcagaccctcaaccgtggtcagcgtctgaccgagctcctcaagcagaagcagtactcccccatggccgtctctgacatggttccccttatcttcgctggtgtcaacggttacctcgacaacattcctgtcgctaagatcctccagtgggagtctgacttccttgcttacctcaagagcaaccaccccgaggtccaggagaccattgagaaggagggccaggtcagcaaggagcttgaggc

SEQ ID NO: 19620 - DNA, 1103 bp, Emericella nidulans
ccagtcattgcacggcggaaactctaatgtcaacgtcacagaagaagaacgagaggagcgccggcgtctgtggtggctactgtacgctaccgatcgccatctggctttatgctataataggccgcttactctgttggataaagagtgttcgcagctactgcagcccatgaatgatgatttatggcaggcaggagattttccagctgcgacctaccgcgctgtcggcccgcccattgaatgcacaggccacagcatgttcggctacttcctgccattgatgacgatacttgggggaattatcgatctccaacaagcgcgagaacatccacggtacggacttaccttccgcagcggccccgatctagatcagtacatcatggccataacccagcaacttgacgcctacgggcagagcctaaaagacttcgaagcacgatatataaatagcctcgccctagcagagaatgaaccgcccgagaacccgcacattgatcacctcagcccatccggccggtccagcagtacggttggctcgcgcgtcaacgagtcaatcgtccatactaagatggtagtcgcctacggcacccacatcatgcacgtcttgtatgttctcctagcgggtaaatgggaccccatcaacctccttgaggaccatgatatgtggatctcttccgagtcattcctcgcggccatgagccacgctgtcggcgccgcagaggcagcagccgatattctcgagtacgatccggatttgagcttcatgccgttctttttcggcatttacctgctccagggaagttttctactcttgcttgctgcagataagctacagggggatgcgaatccgagcgtcgtccgcgcttgtgagactatcgtgcgcgcacatgaggcttgtgtcgttacgctgaatacagagtatcaggtatgtcccctgccggttcctaaatttagctatgatatagctgactgaagaaaacagcgaacattccgcaaagtgatgcgctccgctcttgcccaggttcggggacgcgttccagatgattttggtgagcagcagcagcgccggcgggaagtgctgtctctttaccgctggaccggtgatg

SEQ ID NO: 19621 - DNA, 1108 bp, Emericella nidulans
gcatcgatgggcatgggattggcacgctcgacggcaacggtgactactggtacgaatggatctcgcagcaggagaacacgtcaaattatccgggaaggccgattgccttgacgctgagcgagttaacgaattctgtggttaaaggggtcaatttccttcggagtcagatgtggtatgtgtgtaagaccccggtcatcgaagctcaggctaatgattgtggcggacaggacgctggcaatcatatactcccaccatgtcgagttcgacagtatccttgtgaacaatacagggaatcgagttgacagctgtaagttggacttcttgtggatagcagagtagaactaaccctctagctaacaccgatggtgcggacacgatccgctcctcgcatatcagcttcaataacctgaccgtttacaatggggacgacagcatctcgtttaaggcgaacagcaccgacatcacattgacgaactcgcacttctacaatggtctcggcgtggcgatcggcagtattggccagctgaaggaccagtttgaaactgttgagagggtcaaggtcgagaatatcgtttacgagaacacacttcatgctgtaggctacctactcaccgctgcatttttctggatctccctgacaaaacacaggtttacttcaaaacttggactgacgaccagaacggatacccgcctaacggcggcggcggcggcctcggctgtaagacttctccctgatgaatatacaccacccctcaatcccgctaaccaacacctcagatgcgtcgaacatgcttttcaaagacctggatacaacctcccttcgcggctctgcagtcgcaatctcgcaatgcacacggttcagcggacgcccggcgaaggcaactgtacgaactcgcagttccagattcgggacatcgcggttgcaaacctgcatgggacaacaaagtccgagcgggtcacgagcttccagtgcagtgccgtggcgccctgtacgaatattggggtgttcggggttgatcttgagtttgcgaatggcacgaaggcagagaagtatctttgtggaaatgtgaagaatccgagagggtttgtgtgtaccggggcggtttgc

SEQ ID NO: 19622 - DNA, 1111 bp, Emericella nidulans
tcctgcgctctcctcgttgcgcgtctggccacctacctcatccatgtcttggggacgcgtgcggtcctgaatattggtgtctttttcgaaacactcagtctgatagcatcttcattcgtttctcagcgttggcagatatttctcagtcaaggcgtctgtttcggtatcggtatgggatttctattcgttggcagcgtgggaatcagccccaatggttccatcgtcgacgaagtcttgctatgggcatcaatgctgctggatctggcctaggaggactaacctactctcttgccgtgggagcaatcatccctcggctagggcttagttgggcatttcgaatattagggattgtttcctgcgttgtgaacctagtgtgtgcgaacttgctgagagatcgcaatacagctgttggaagccgcttcaaagcattccactttccacttttcaaacgcccagagtttcttctctttcttggttggggtatattttccatgcttggctatgtcgcgatcctatttagcatgtcaaatttcgccgtctcagttggtctctccgcccaccaggcgagtattattagcgccctgctcaacctcggccaaggactgggacgaccctttgttggtatgttcagtgataaacttggccggatcaacatcgcaactttcctttccttcctctgcggagtcttctgtctgctgatttggacatttgcccgcagtatgggccttgtgtccttttttgctgtgcttgttggcactgttgctggcacttactgggccactgtggccccagtgttggctgagattatcgatttgaaagacctacccggtggtcttagcatcacctggattgtcctggtggcaccgacaaccgtggcagagcccatcgcactgttattacgtgataacgactctcccagccgcatttatctacatgtgcaacttttcaccggcctgatgtatattgcggccgcggtatgcctctggacagttcgaggctggaaagtgggagaaaaccttcgcgtcaagcaagaaaagtcagcggttgccgtagagacagataaaaaagacgaaagtgttgttctgcagcagcaaagcggcggaactggtgc

SEQ ID NO: 19623 - DNA, 1111 bp, Emericella nidulans
gttcgtacctacgcatggggagttgatggagtatattctgactttgttaggactacatgtggaacaagatcatcctgcacatcttcgctgccttgttctcgggatttactttctggaagatgggcaatggaaagtttgatctgcagctgcggctgttcgctatctgtacgttttccttaaccattctcaacccattcaaagcatcgaactgacgtgtcagtcaacttcatctttgttgcgcccggctgcataaaccagatgcagccattcttcctgcaaaaccgggatatatttgagacccgcgagaagaagtccaagacataccactggctggctttcatcgctgcccagacagcctccgagatcccctatctgatcatatgtgccaccctttactttgcgtgttggtactttgtcgctggattccctgtcgacgcttctatctccggacacttttatttgcaaatgatctgtgagctgcctccgctctatctgcatcagaggctgtagggctaacagcacagtctacgaattcctctatacatccatcggtcaggccatcgctgcctacgccccaaatgagtacttcgcagcgatcatgaatcccataatcattggagcagggatgatttccttctgcggcgttgttgtcccttactcgcagatgcagcctttctggcgatactggatgtactacctcgacccgttcacctacctagtgggaggcctcttgaccgaagctctctgggacgttcctgtcaagtgtctagactcggaatacactaccttcagcgcaccggacggtcagacctgcggcgagtatatggcagactttctgtcgagcaatgctgggtatctacgtgatgagaatgcgacctcgatctgtgagttctgccagtatgcgaccggggcagactatgcgaggacattcaatctgcaggagagatattatgggtggagagatgtaggtcgctcgtcccctgctttagcttctgggtggtatgctgatcgatatccctagacggggatcacggcgctgttctgcattacgtcgtacatggctgtttttgtgatgatgaagttaaggtcgaagaagacgaaggaggctcga

SEQ ID NO: 19624 - DNA, 1112 bp, Emericella nidulans
gcgtattactgcctccaaagtcctcaatgagacaagagttacggcagagaatgcgatcaactttgcaaaagaagcaagggacaccagagacatgcgaatcaaagcaagccccgcgggcgcactgataaattttggtgcaatccccaagaaacccggtaacctcattaagggagtgatggagagcatcaagacggaagagagcgccgagcttcagcagcgttctgcgaccgccgtcgcggttctggtggagcactacactagtgcggccaagagaggcccggtcgataaggtcattggtaacctggtcaagtactgttgcgttgacacatctgagaccccagagttcgagcgtaacaaggaacatgagggattgattctatctctccggaaggaggaggatcggcgcgaacacgcggatgctgccacctttgagaaggaagccagagaagcaagaatcatgcgccgcggtgccaaagacgcgcttgaacaactagctgtgaaattcggagcgcagcttacagaaaaggttccgaacctcgcgtctttagtcgagcgacctctcaaggaagccctgtccggcgaccttccggcaaacatcgtcgactctgacaacgtccttggccaggaggttgttgacggactatcgacattgagagctctgctccccaagttcgaccccggcctgtatccgtgggtcgtcagtcttatgcctcttgtcgtcaaagctcttcaatgccgattgtctgttattcggtatgcagcagccaagtgtttcgccacaatttgtagtgttgtaaccgttgagggtatgacgatgcttgtggagaaagtgctgccaaccattaacaatgcgctggacgtccaccatcgtcaaggagcggttgaatgcatctatcatctaattcatgtcatggaagacaacatcttaccttacgttatcttccttgtcgtgccggttctcggaagaatgagtgactcggacaacgatgttagactgcttgccacgacatcttttgcaactttggtcaaactggtgcccttggaggcgggtattccagaccctcccggactatcggagaaactgctcgaaggacgtgatcgggaaagaaagt

SEQ ID NO: 19625 - DNA, 1112 bp, Emericella nidulans
aaagaaaacctcaaaactaacatgtgctcctttacatcagatttattagaggatgaggataaggacgtcgaagtatgctgcgctccccaaaacaataatacgaacctcagaagctgatgggcccctaggacatcgatctggtacattgtcgaatacactctatcctggctttgcggttggagcgattcacgaagcttcaggtgcgacctacaacataccttgcttgggcgatatatgttactgattattccttggggattagcgattatgcctgcggcaaaatcaaatatcacggattgaattaccctctagcctcggcgaaacactacaagagttggatctttacgacaatctcatatcacaccttaaagggcttgatgatttccataacttaactagcttggatttgagcttcaataagctcaagcacatcaagaatatctcgcacctagtcaagctgaaggacctctattttgtgcagaataagatctcgaagattgaagggcttgaggggttgacggaaataaagaacttggaattaggggctaataagattcgagtgagctaccttagtacgttcatgatatcggctttttttaacatcactataggaaatcgagaaccttgagacattgagcgccctagaggagctttggcttgggaagaacaaaatcacagaaatgaagaacctcgacgctctaacgaaccttcgcatactttcaatccaatctaatagactcaccagcctaaaaggtctctcatcgctcaagaacctggaagaactgtacgtgtcgcataacgctattacggatcttgcgggcttagaatcgaacaatgcccttcgcgtgctagacttctcgaacaaccaagtttcaaaattggagcacttgtcccatttgaaagaactggaagagctctgggcatccaataaccagctctcaagctttaacgaggtggagcgcgagctaaaagataaggaaaacttaaaaacagtgtattttgaagggaatccgctgcagacaaatgggccggtcgtgtaccggaacaaggtgcgcttagccataccgcaaattatgcagattgatgctagtaagtgttctaccactgttttt

SEQ ID NO: 19626 - DNA, 1113 bp, Emericella nidulans
ccgtctcaagcggctctggtgacacaggtctgagcatggagagtttattcttcaagttcacggaagaacaccgcaagatcttgaacgagttggtccgtcaaaatcctcgcctgatgagtggtaccttctctctattggtcaaaaatccaaaggtgctagagttcgacaataaacgcaattacttcacccgcagagtacattcacgcggagctgaacctcgtcacccccacccgcctcttcagctggctgtgcggagagaccaggttttcctggactcatttagagccttatacttcaaatctgcggaagagctcaagcacggcaaattgaacgtgcgtttccacggagaagaaggcgttgatgcgggcggcgttactagggaatggttccaggtcctcgctcggggcatgttcaacccagattacgcgctcttcattcccgttgccgctgatagaacaaccttccatcctaaccgcctgagtggcgtaaaccctgagcatctgatgttcttcaagttcattgggcggatcattggaaaggctctatacgagggacgtgtgcttgattgccattttagtcgagcagtctacaagtgcattctcggccgcaacgtgtcaatcaaagatatggaaacattggatctagactactacaagtcgcttctctggatgctcgaaaatgatattacagatatcatcactgagactttcgctgtggagacggatgactttggagagaagcagaccattgacctgattgaaaacgggcgaaatattcctgtgacacaagaaaacaaggaggagtacgtgcaaaaggtggttgattaccgtctggtcgcgtcggttcgagagcagctggacaacttcctgaaaggattccacgagattatccctcctgaactgatttcgatattcaacgaacaagagctggagctactgatttctggacttcctgaaatcgacgtggatgactggaaggccaacacggaataccacaactactctgcttcttcccctcagattcaatggttctggcgtgccgtgcgctcatttgacaaggaagaacgggcgaagttgctgcaattcgttactggtacgagcaaagtgcccctca

SEQ ID NO: 19627 - DNA, 1113 bp, Emericella nidulans
tttgagctgctcaaggtatgtacaatgctagtatactctacgtgaaaggacactcacgcgcgcagtatggagaaatcccgcttgagcagacgatcaagaagcgggtgatgaacatcatcctgcacaacaagacttcgccctcagagctatctgaggtcaatgtcatcctaggagagacattcgccgccgcggtcaagcagttctgtgcagactacaaggtggatatctcctccatcgatgtcattgggtctcatggacagaccatctggcttctgtcgatgcccgaggcgaatgaagtgcgaagcgccttgactatggccgaaggctcgttcctcgcctcgcgcactggtatcacttccgtgacagacttccgagtcagcgaccaggccgccggtcgtcaaggtgcaccgctcatcgctttctttgatgcgctggttctgcaccacccgaccaagcttcgggcgtgccagaacatcggcggcattgccaacgtctgcttcatccctcctgactcgcacggcggcgtcgatgcctgctacgactttgacaccggtcccggcaacgtgttcatcgatgccgtggtccgccactacaccaacggcgagcgcgagtacgacaaggacggcgagatgggcgctcgcggcaccgtcgaccaggagctcgtcgacgagttcatccagaaccacccctacttcaagctcgacccgcccaagactaccggccgcgaggtcttccgggataccttggccttggacctgatccgcaaggctgaaagcaagggcctgacccctgacgatgtcgtcgcgacaatcacccgagtcaccgcacaggcaatcgtcgaccactaccgccgctacgcccctgaaggcctagagatcgaggagatcttcatgtgcggaggaggcgcctacaaccccaacatcaccaagtacatccagcagcactaccccaacgctaagatcatgatgctcgacgaggccggtatccctgctggcgccaaggaggccatcaccttcgcctggcagggcatggaggctatcgttggccgttctattccagtgccgacgcgtgtagagacgcgtcaagaatacgtcctgggcaaagtgtctccgg

SEQ ID NO: 19628 - DNA, 1113 bp, Emericella nidulans
agcgaagtgccggcgatctggcgaacccagcagttgagtcaaagagacccaagaccaatggcagcatcacatcattctttggcgctcctaagccaaaagaaaacggggcagcaacgaccaagtcagcggttccttcatcggtctcgagtttcaataaacagaaatgggtggctacattgactccagagcagaaggagctactccggctagagatcgataccatggacgagagttggctagcccatttgaaagaagagctcatcaaacctgagttcctggccctgaaacgttttcttcaaaaggagaagcagatgggggtgaaagtcttcccgcccgaagaagatatttactcatggttcgagagagattccaacccagtagctgtgtatgagctgacccttggatgcctaggtctcgtcatacgcctctacacaaagttaaagtggttgtcattggtcaggtaaagttgcaaaaaggaatatgctttgttgcttcactaacatggtatatgttatcgcacaggatccgtaccataattacaaccaagcacacggcctcgcattctcagtccgccctccaaccgcggctcctccatctcttgttaacatttatgcttcgatcaaaaatgattacccgtcattcgtaccgcctccgaacaaaggtggcctgcttataccatgggcagagcgtggtgtcttgcttttgaacacctgtctgactgttcgtgcacatcaggctgcgagtcattcaaacaaaggctgggagcggttgacacagaaggctattgacgtcgtcacccgtgtccggactcggggagtggtcttccttgcatggggcacccctgcagggaagcgtattactggcatcaaccgcgatagacattgcattttacagtctgttcatccgagccctctgagtgcccacaggggatttgtgagtttcagctttcctcccggatattttgccttgaagttagtaggattaacctgttatacagttaaacaatcaacattttaaaaaatgcaacgactggcttgccgaacgatacgggcccgatgaaatcattgattggagtctggtatcgaaacaagaagcttcccctgcctctgccgt

SEQ ID NO: 19629 - DNA, 1114 bp, Emericella nidulans
tccagtttcctttgacgctgaaaacactgctaaaggcctatgtcttttacagatctggttgcgcaacgcctcgtcctctttccccctggaggaagcgaccttcccaacgtcgtgcgcgtgctgaagatctgtctctctcgcgggggcatcttccgcatcggccgccacggcttctgggatgccgcgaaaccgtcagtgattgcggcgaaagggcagaacattcgcacacagtggaacgaccagttcgtcgaggacgtgcgacgcacctttcaagcgaccgggatcttctgcttcttcccgatccagtacatcaacgacaatggcctcggcagcgccgccagtttcctctccactatgctcaagacggatggagtgccaaacgacctgatctcgaacttcaacccgctcagcatcatcttcttcgcgccgatcctgaactacgggctttacccgttgctgcgccggtggaagatccactatggccctgtggcacgcatggcaactggtctcttcatctcttccattgggggcattggatacactgtgctcaactactacgcgtacaaacttggtccctgcgggaaatgggggtcctcggatacttgcgttgatgagaacgggaatacgcgcgtggcaccgatcaccatctgggtaggtcctgcacaaaccaccaaccgctgctcttgttacctattatactaatagagaataccagtggatcgccattccctacgccatcggtggcatctctgagctcttcatcaacgtccccgcctacggcatcgcctactcccgcgcccccaagaatatgcgcggcctcgtctccgccatcaacctcctcaacacggcagtcgcctatgccattggactggcctgctcggccgtgatcaaggacccttatctgacttgggactttggcggcccgtccattgtaggctttgtcctcactgtcatcttctactttatgttccgccacatcgacaaggaggagtacttcctcacggagatggcggagaacgagaacgagacgactgcccagcctaaggagagcgcgctgagtgagaatggggataagacattaagccccgtagagaaggttgctgataatgagccg

SEQ ID NO: 19630 - DNA, 1115 bp, Emericella nidulans
ccgcgtaaccgccagctcactgccggcggatcgacgggcggcgaaggtgctcttctcgcccttcgcggcagcatgatcggctttggaaccgatattggcggctccatccgtgttccggccatgtgcaacggcttgtacgggtttaaaccaagtcaaggtcgtgtgccatatggcgggcaaacagacggccagcccgtagccaaagggcggatctcgattcaagccgtcgcaggaccaatcgctcattccgtcgtagacattaacgccgtcatgactcacctcattcccagggcccaatggttcggcgaggattgtatcccgggtgcttggccgtcaccactttcgtctttcggcaggaagtctagaccgattactattggcgtccttccgtcagatgggatagtcgaacccctaccaccgatttcaaaggttcttaacgaagtcgccgccgctctccgtcggacaccgggagtcaacgtcgtccagctacccgtcccgaaagccctgcccaaatgccaagccctagctgggcgtctcatgggcgtcgatggcggcattaaaatgctagaccttgtcgaaagcactggcgagacactaatcccttggcttaaaggccgcacaaaacggggacggccgcttcttctttcgcagctggcagagctacaggcaacccgaggagatgttgagcttgaactccgcagggaactgtggatgtatggtagtaccggacatgagcaaacggtcgacgcgatcatccaccctgttgcgccacatcctgtgccagagttggatcggtacaacgcggtcggctatacgtcttcgtttgtgcttttggactacccggctgggactgttccggtccgaaactttggcagagacgatctggaaaacggaaaggagatggaggcacgtgttattggaagctgggataaggcgaaccgggaactttgtaagccttcccttttctagatcactcagaagaatggtgaattgctgactttacctagggaatgagaaaacggtcgatcggacagtatacctggactccccgctgagtgttcaggtcataacgcctaaacaacacgactacgagctttaccaggccatggagctga

SEQ ID NO: 19631 - DNA, 1115 bp, Emericella nidulans
cgaccacgaaatcggcgtcaaagaggaattttcctcggatacacctctcctcgtgtctgagaaggaagccctagcccttgcccgcagcaggccgggcgaggcgctgcctcttctcatcacgtttggacctagtgacagcgacaatccgaggtgctggggcttctggcgcaagtggtacatcacctgctttgtgagcatgctcaacgtggtcaccacttggtgtgccggcgggttctcgtctggcgctcccgagattgctgaccttttcggcgtctcaaccgaggtgacgaccctctgtctgtctatgtacgtgcttggatacgcagtcgggccggtcctgctggctcccttgtccgagtacttcggccggtaacccgtctatgtggtctcgtggctgctcctttgcctattccagctgccgatagcactggccccgaatatcgggacgatgatcgtctgtcgactcctcgccggcttggccgggggcgcgcccttgaccaacaccggcggcacggtgagcgacctgtggagcgcaacgcgagcggcggcccatggccgtctacgggctgagcagtacctttggcccgcctatggctctcgtggtgagcgggtatatcggcctcaatctcggcttccgctggattttctggattctcatggctatcacagggggcttctgggcccttctcaccctcacggtgcctgagacccggcacagcatcattctgcagcgcaaggcccgtcgcgtccgcaagcagatggagcaggaagggttgcgctcggcctcgacgacccacgatctgcatgcccctgagcgcaagaacctgcgccagctgttcgccatcacgctctcccgccctttcttttcctcttcgccgagcccatcaccagcttctctgctatctacaacggcttcctctacggcctggtctatctcttcaacgaggcgttcccgctcgtctttggcggaccgcatggccacggcttcaacatagggcagcagggcctctgcttcctcggcatggcggtcggtcccctcgttgcgtttgccctatcccctctgcaggaacgctactatctgcgccgcgttgccgagaacaagggcagggccgtgc

SEQ ID NO: 19632 - DNA, 1115 bp, Emericella nidulans
tccggcttcttcttggtgttggagaatcgggctttacgccgacagcgtactactacatgtccctcttctatcctaaattctcgctcggcttccgcatgggcctgttctcgggaatgtactctgttgctggagcatttgcggggcttcttgcgtatggactgctgcaccttgagacatcagtacagcatggctggcagacggtcttcttgtttgagggagctctgacggtcttcgtcgccattcttgggtttatcgtcctcccagtaagccctggcaaagcttggttccttactcccaaggaacgtgctcatgccataaagcggatggaacgcgattatgcgcaagccgaagaagccgccgaaggtgagtctaagatcacagttcgcgacgtcctagacgtcctgaaagactggaagaagctcttgattgtcgtttttaacatcctgtccgtcctggtgcgtcccctcaaacttttggttcattgatcaacagcagatatgctgatgttgcccagcccgtaaccgccttcacaaccttcctccccctaattgtggaaggtatgggttatgccggtgtaaaagcaacactaatggccgttcccccgtttattgtcggcacagccggccttatagccattgtttactcctctgaccacctcaaagaacgctccttgcacaccgtcttcggcatgtgcctcggactgatcggctgcgtcgtcatggccaccagctacaacgagaaactccgctacggctttgcgcacgtctgtcttgccggtgtgtttgcgggcggtcctttagttgccgtttggctcgcaagtaatacgcctaataaagcatgccgctctgtgatccttggtatcaatggctggagtaatctggctggtgttattgcgggacaactgttcaagagtaaatatgcgcctggctataagtatccccttgttgttacgatggtgcttattgcagtcggggtgggtgggtttcttgcaatgaggggcgtctatatgtgggagaatcggaggagaagagcaatcgtgcagacttgggagggtgaggactttgttgaggagcagaatagaacggatcggagaggagatcggaaggtcacctggg

SEQ ID NO: 19633 - DNA, 1117 bp, Emericella nidulans
gtcgattcatcatgtatttccttctctccgtcatcttccactttcctgtcttctgtgccggctttccacctgccgtatccagaggtacgtgattcaatgtgctcagtaatccggcttgaaccaaccgcaatagaaatatccacaactctcctcaccaaactcaccctcatgtctcaatactctgctgcttcaggttgcagcgaaaacaataactcttctgtagggagttctgtttattgcggggctgaaatgtgtccgcttatcgacagtgccaatacagaactcctttatgcattctcagagtattcccctttcgatatctcattggattaccatactcaatagacgctaactctttactttctcattacacaggatttaccccggcgatacggctggctacattgccgccgaccacacaaacgcccttctgatcatctcgtttcgcaatagcgtgacccccacaaacttcatcaccgattgggcattccttcaagtcagcgcgcctaccgcgtgctccggatgccgagcacataaagggttctggtcggcgcccgtggccgccgacaaggctttagatggttccatcagggaggcaaaggccagatacccagagtacgaactgacgttgactgggcatagtttgggaggtgcacttgcaacgcttcatgcaattttcctgaggaatagaggagttgctgttgattctgtaagttgaggctttgccgcaatgacgacccgagcaacttgatggctgctgatgctgactggactgctagtataccttcggcgcgccatcggttggtgactacgcaatggccgattacatcacgaacgggcccggtagcgacaatgggaggaactatcgcgttacgcacctgaatgacgtctttccaaaaatgctctaccgtgcgtctaggatgccggttgcagatcggctggtacaagagtacagccagtccgggccagagtactggattacgtctggcttcggcgagcctgttacaactgcggatgtgcacatccttgagggcgtggataatgagcagggcaatctgggaagagaacctggcagtctgagggaccatatgtggtatttgggggcgacagatgcttg

SEQ ID NO: 19634 - DNA, 1118 bp, Emericella nidulans
aatgggcgctgcgctggtcgctgccgcccctgctgctgatcttgatgctcgaagctcgtgcaccttcacctctgcctctgcggccaagtctggcgcatccaagtgctccactgtcaccctcaagagcatccaagttcctgccggtgagacccttgacctgaccggtctcaaatcgggtgctactgtacgtagttccccttccccctcgccgcctcattgatctcggctttctaacggaggagcaggttatctttgaaggcgagacaacctttggctacaaagaatggaaaggaccgctgatctccatgtccggtgacaaaatcacggttaagcaagcctctggcgcaaagatcaactgcgacggggcccgctggtgggacaccaagggcagcaacggcggcaagaccaagcccaagttcttcagcgcgcataagctgaacaactccaagattcaggggctgaagatctacaacacccctgtccagggattcagtatccagtccgaccacctgaccatttcgtacgtgaccatcgacaactccgccggcaccagcaagggccacaacaccgatgcctttgacatcggctcctcgacgtacattaccatcgacggtgcgactgtctacaaccaggatgactgtattgccattaactccggcgagcacatcaccttcaccaacggatactgttccggcggccatggcttgtctattggctccgtcggcggccgcagcgacaacaccgtcaagagcgtcaccatctccaacagcaaggtcgtcgactcccaaaacggcgtccgcatcaagaccgtctacaaggctaccggctccgtcaccgatgtcaccttccaggacatcgaactctctggaatcaccaagtacggcctcattgttgagcaggactatgagaatggtagcccaacaggtacccctaccaacggtgtcgaggttgaagatatcaccttcaagaagattaccggctctgtggatagcagtgccacacgtgtcaatatcctctgcgggtcagggagctgcaaagactggacttggtctggggttgatattaccggcggaaagaagagctctaagtgcaagaatgttccgtctggtgcttcgtgc

SEQ ID NO: 19635 - DNA, 1118 bp, Emericella nidulans
gatcacgcattacaacatcattgccaatatcattcaggcgaccacgtttgaagctggcccgaagaaggggcgcaccgaggtcgccctcgggtttctgcctctcagtcacagctacgggctgatcctggcacacttgacggcctggcggggggatacctatatcctgcatgcacgcttcgatatgcaagccgctctggcgtcgatcgaaaagtaccgaatcgagcgcctatatctagttcctccgattatctctgctctcgtcaacaatccctttctcctcgatctctgcgacacttcctcggtcacttccgtcgtgaccggctcagggcccttcgggccccggttggcagaggcgctgagccgcgtgcggccatcgcggcaagtgctcccaggatacggtaagcttatgataataggtaacgaatgtgcgatatctgaccgttgtgaaaggactcactgaaactgccgtaattatctccatcaccgaccctaacatcacctatcctggtgcagacggctgtctcgttccaggcgtcgaagcgcgactcatcaactcaaacggcaacgaggtggaggcgtacaatgaacccggcgagctgctcctgaaatcgcccagcatcatgaaggggtacctcggacaggagacagccacccgagaagtctttgacgagcagggctggctccgcactggcgatatcgctgtcttccggctgacaggccaagacggcaaggttactcctcacttggatattgttgaccgcaagaaggatatcatgaaggtcaagggactccaggtagcaccggtagagatcgaatcacatctggcggcgcatccggccgtggctgaagtagctgttgttggagtccgcgacgaggacgctggcgagcgaccgtatgctttcatcgtgcgctctcccagaactatggccgatctggacgaggaggcgctgaaggccgatctcaaccgccatgtagaggccaccctcagtgagccgcactggctgcgcaagaacatccggtttgtagaggagttccccaaaagcagtaatgggaagccgctcaagtacaagttgaaggaaagtctggtgatttagtcttcaaaaattgatctcaatgcc

SEQ ID NO: 19636 - DNA, 1118 bp, Emericella nidulans
cgacatcagcgcctggcttgatccgtcttcagcggaggaggaccgccagaatgtcgtcaacgcgatgcgccacgcatgtactacttacggattcctgagcctcgtaggccatggagtctcgctagaagagcaaaagcaggcgatggactgcgcgaagctcttcttcaccctgtccgaggaggagaagatggacgtatggatcggtaagagtaaggggaggtcgttccgcggatatgagcctcccggcatccaggtccaccaggaaggtctccttccagataccaaggaggtaagttcttttgctctagagaggtgatgtgctgatgttgagatattgggaagtgcttcattatcggccatgaggtgcccgaggaccatcctgacagcggtacgttctccacgggtcccaatctgtggccgaagtcactcccggaggaccagttccggatccccattatgaaataccaagctcgcatggtccagctggtgaaagtgctgctcaaaatccttgcaaggggtttaccctcagagtggaattgcccgccggacgcgctggacgcgctggctgagaacgagccctcgattcctatgcgacttctgcattacgctcctcagccagtcagagacgagagacagtttggtggtgagtcctcttctatccctagacccctcatagacaaagggaaaaccaatcctaactgtcagcagtcggcgatcacactgattttggatgcatcaccatcctcctacaagaaatgggcaccgagggtctagaggtctggtatccacccacggaaacctggattccagtccctccacaggaaaatgcctatgtgatcaacatcggcgacatgatccaaaagttcacgggtggatactaccgcagcgcccgtcatcgggtgatcaccttcaccgagaagcataggtacagcgtcccttttttcctcaatggccagctgaagttgaaggcactgcacttgacgggtcgggggtggaaacgattgtcggggagcatattcggggacgacttattgagaccatggggaagactggtgaaaagctcaaataaagggctcgtgtttctcgagatttttcttccacaaagtcggttgaagact

SEQ ID NO: 19637 - DNA, 1119 bp, Emericella nidulans
  unsure (1)..(1119): unsure at all n locations
caacgtctggcaatagactgggtgtatgaaaacatccangcctttgcgggtgacccgcggaatataacactatctggacgaagcgcggttgcatacgcggttcaggcgcagatactatatgacttccgaggaaatctgcccgagtcttcaaggaaccgcttccgacgcctagtcatgtactccaatgccattcccgcgcagcccaagacaccggacgagtgccagccacaattcgacgagctgtgcgaatactttaagatcccctcggcaagctcagggcgcgagaaacttcggcgtctgcgtgaaatcaacgcaaacgatctctgcggagccatcatgaagcttaaacaccataccttccggcctgtaactgactgcgtcttcattcacccagacttattcaagtactatcgcgatggctcgtttgcgcgcgagttcaagcgccgtgggctacgcatcctcatcggcgaggtcctcaatgaagagaccttatatgctgtgaccaatggcccagaagccaattttgaatctcttgaagcccaagtatcgaactactactctcccgccactactagacgcctcttacagtattatacattacctacctccaccgaaaagaaggactgggaagccgtctttggacgaattatctcagacggtcaagtccgtgcgccgtcacgattcctcgtcaacaacttgatcgagaatggcgtcaatatcagtgacgtctggcggtacatgattgcctaccgtttctcctttataacggaaaaagtggcccccacttcatttggggttagccatgctatggatcggccgttccataagtcagttactacccactagaccatgtcttatactttgactatttattaacacgagtctattatagttactccctcatgcacggtccgacacctgcagagcgccaattcatgcatgcgtggattcgtgacctcgtggcgtttgtgaatcacgagtcggattatgtttatggcaccgagcaggtggacgaggtcaaggttgccacgcctcagggccgtatagagattcagaaagattcccgatgggctgagctgctgtctctgatggctgtttttgcagggtattcctaatgga

SEQ ID NO: 19638 - DNA, 1120 bp, Emericella nidulans
tctgcgttcgcgagcagtcgcagccgcaaagatggcgctcagaatcaacattcctccagcgacccgtgtctgtctcatcagtctcatcactctctcgttcctgtacaacattgctcgatggcgccagctcgacacaaccccgggcactcctgccgtctctccggcggtcccctacctgaccctcgtcccttcacagttcattttctacccgtggacgctccttacggcaacatttgtcgagcagaatattttcaccgttctgctgaacctggcgacgcttttctatggcgggaagtacctggagcgcgcatggggttcgcgggagttcaccaagttcattgtcaccatcgcgcttgtaccgaacgttgtgatcgtgccatgctatcttttttgggctgcaatcagtggtggttcgggctcaggttcgggtgcgggttcgactccgcatagcgggtacgccttgttctcgtcttcgtcctcgtcctctgatgaggcatgtacaactgcatgcacatttcctgctgactcggctctgtccagtgtgacacaaatctgcggcggcatctcgattcaagcttccttcctcgtcgctttcaagcagctcgttccagaacacacggtgactattttcaaaggcctggtcaaaatgcgagtgaaacacttcccggctgtctttctgctcctgaataccctcagcggaattatcgtaggaacccgtgtggcggctacactggcatggttcggtctaataacaagctggacttatctccgcttttacaaacggcagcccgacctcactggcacgtctaccgacggcgtcggaatcaagggcgacgcaagcgagacatttgcgttcaagtgcctcttccccgacaaaatccagccaccaatcggcttggtctctgacactatctactcgttccttgtctcgctgaaaatatgcacccccttctcagcggaagaaatagcctcggggaatcagcaggctctcgcacgaggagaagccggtctccccagcctcctcagtaaccgcagtggccgaagcatggccaagcgcgaggaagccgagcggcgccagagcgtcgccctcaaggctttggaccaaagactccaggctgcc

SEQ ID NO: 19639 - DNA, 1121 bp, Emericella nidulans
atgcttcattttcgtaccgaaggctatcaaggctatgcggtcaaatactcgccgttcttcgacaaccgattagcggttgcttcatccgccaacttcggcctcgtcggtaatggccgtctatatatcctcgagttgactccaaacggcattgtgccggcgaaatggtacataatccttcccaatgtacgatcatctttatttggctcggctgatgaagcgtcaggttcacaacccaagacgccctttacgatctcgcctggtccgaagccaacgagcaccaagtcctaaccgctaccggcgacggcagcattaagctcttcgacagcacactcaacgacttccccattcagaattggaaagagcataatcgcgaagtattcagtgtatcctggaatctagtagcaaaggataccttttgctcgagcagctgggatggcaccgtgcgcatctggtccccgcaacggccgcactcgctcgtcactctgccgacacacagttgcacatacagcgcctccttttccccgcactcgcctgatattctttcctgcgtctcctcagattcatacctgcgggtatacgatctacggactccagcctccgcgtcaaaccaccttactctccagatacccatccatgcggcacctgcctcgccgattccgggaaaccccggggcgccacccgccgcatgtccgccatctgaagcgctgacccatgactggaacaagtatcggccgtctgttgttgcagtggccggcgtggacaggacgatcaggacgttcgacataagggctccacagcaggggccgcaggctattatgatcggacatgactacgcggttcgacgggtggcttggtcaccgcatctgtcgaatgtactgctgagcgcgagctatgatatgacctgccgggcttggagcgatcagtcgccgcccggagtagtcggggacacggatctcatgcggtctgggccgtcgcccgttatgggcgcggagctgggaaggatgaaccgacatacagaatttgtgacgggcgtggattggtgtctttttgggagcgaggggtggtgcgcaagcgttgggtgggatgagagcgtttatgtatgggatgtgcgtgcggtgatg

SEQ ID NO: 19640 - DNA, 1122 bp, Emericella nidulans
cgacaagcgctcctccgcaatttgctagcgaccctcgacttcatttctctgacgcaaccaataatacatctggcggagagccatctttagtatttgagaacttcgggtcgctgatcgattttgcaacaaagagatggcaggaacgctgggtgactacgaatattggggacgcctccacggtagatcgctttctacaacgcccattttttcttttggtgagcgttgatgccccagtcagtctacgatggcaacgttttgcgaacaggtaagtcctagctctgactctgttcgtagtttaatctaagtctgtcctagatgccgaagaaggcgacttgatcctcctagcctagaagaatttgttctctggaatgataagcagttgtacgaaaaggacatcggccgcgcctttctaactgaccgagcacaagttcgcctcttcaattcatcatcttcactggaaaaactgcatgctgctctcaaggcgcttaatttggccgatgaacaacgactgcggcctaactgggaccagtatttcatggaactcgcttccctcgccgcacagaggagcaactgcatgaaaagacgagtaggctgtgtccttgtccgagaacgtcgcgtcatcagcactggctacaatggaactccacggcatctgaaaaactgcaacgaaggcggatgtatggtaccatgacacgataggaactagagttgcttacaatctattaggtccaaggtgcaatcgcggcgaaggcggaggcgtcggcctgtcaacatgcctctgtctccacgctgaagaaaatgctttgttagaagccggaagagagcgcatacgggagggtgcaatattatattgtgacacgtaagctcgtttatccattccctctttccaccctggtccttcccacgatagtctataaactaatctccgtctgccaaagatgtccgtgtttgacctgcacagttaagattgcgcaggtgggaatttcggaggtagtatactcacagggttataacatggacagtgaggtgcgatgaccctcatagctcctgatgaacctgagctaaccacgaacaatcagagcgcagctattctcgcggcagctggaatccgcctccggcagt

SEQ ID NO: 19641 - DNA, 1123 bp, Emericella nidulans
tcatgtctccatcgccggaccggagacccatgcgatgcagaccgatcagtccagcgccggcataccttcgccttagatcccaccgacccgtcgtcccgcgcattgatcgacgcgctgtcagcaaagcaacgagcccttgctctccttcgacaagccctcgaagacgtttccactatcgacgtcgatctctctatcgcggtcgtgcacctcttcatcatcttcgaactcctgagtcccggtggcgatgagtggcgcgcccatgtccagggggcactgcgactcatcagctacctccagaccctgacgccccgtcgcgcctcgccagcagccctgatacgtgacaccgtcacctcggactgtttaacgtaagtctcggccgccccagctcgagctcggcggtaacccatcatctgcgtctgccgtgaactgacagtcctctgtatgtagatggtacatcctcggctcgaccctcacgaagaccacgacactttccgacccttttttgctttcaggcgacattttcgcatcccttacgcgagctgaaacaaccagctatatctcccttccgactacactgttgcacattctcttcagagcctgcgagctatcaaacctcgtctcagtgagcacgatgctcaacgacccaaacatagactatagcggcatcctctcgcaggcgcacactcttctccagatgaccaagtcctttgacgcgcacgcctgggccttctcactcgaacggtccttcgactcttcgcggacgctgagccggatccatacggctctggctcaccagaacgctctgtcaacgtatatctgccgcagcgttgacgtgatcgcttcgccggtcgcgctcggtgagaacaccgaaacgctcgtgacgaatatcattacccatctgagctttgtaggtagcacggatccgatctttgtggcgacgacatggccgacgttcattgcgggcgcggaaacagataacccaatctatcggcgatgggccgtcgatcgtttatcggagttttggagcctcatgccgtgggggtacgtgcgcactgcgattgaggtaatggagacaacctggaggctgagggacgaagctggggcgaggggtagggctggcggg

SEQ ID NO: 19642 - DNA, 1124 bp, Emericella nidulans
cgccagcaggactgtcgaaggcgcagacctcgccaatccagtcctcagctccccagaagccgattgaaactgcaaaacccacctcgcggccagcccctccggtgacaatgaaatcattcgtcaagaagtccgctggcccaagtgtggtagtgcgagcgctcaatatcctagcatcagaagtaggactctcagaatccgacatgtctgacgatctggtgtttgcagactatggtgtcgattcccttctttccttgacagtaactggcaagtatcgagaggagctgaacctagacatggattcttcagttttcattgagcatccaacggtcggcgacttcaagcgctttgtgactcaactcagtccgtcagtagctagtgattcgtcgtcgactgaccgtgagtctgagtattcattcaatggtgacagctgttccgggctatcaagtccagcatcgcctggcaccgtatcgccaccaaatgagaaggttatccaaattcatgagaacggcactatgaaagagattcgcgccattatagccgacgaaattggtgtctcggcagacgaaatcaagagcgatgaaaacctaaatgaattgggaatggactcgcttctctcacttacagtcctaggcaaaatccgcgagtcactggacatggacctgccgggagagttcttcatcgagaaccagaccctggaccagattgagactgcgctggacctgaagcccaaagctgtcccgaccgctgtcccacaatcgcagcccataaccctaccacaatcacaatcaacgaaacagctttccacgcgacctaccagcagcagcgacaaccatcccccggcaacctccattctcctccaaggaaacccgcgcacagcgtcaaagaccctctttctcttccccgacggttctggctccgcaacctcctacgccacaatacccggagtctccccaaacgttgccgtttatggcctcaactgcccctacatgaaagcccccgaaaagctcacctgcagcctcgattcgctgacaacgccgtatctcgccgagattcgccgccgccaaccaaccggcccgtacaaccttggcggctggtccgcaggcgggatctgcgcatacgacgcg

SEQ ID NO: 19643 - DNA, 1124 bp, Emericella nidulans
acgacatcttctctagactcctcaaggtacataacttccccatgtgccataatgtatatctaacaggaaaaggaacgaatcatatgcttaaatggcgaagttgacgaaacaatgtccgcctccatcgtcgcccaactcctctttctcgaagccgacaatcctcagaaaccaatccacctctatatcaactcccctggtggttctgtcacggctggttcgctctcctcacgacaattacccatagtggaaccaggttggaaaactgacatacgttgatatcctaggcctagcaatttatgacacaatgacctatattgcctcccccgtctctacaatctgcgtcggtcaagccgcttccatgggctccttactcctctgcggcggacaagccggccagcggtactgcctcccgcactcctcgattatgatccaccagccatccggcggatactttggacaagccaccgacatcgcaatccacgcgaaggagatcctgcgcgttcggcaccagctgaaccagatctacaagcggcacttgacaggcaagaaggaattatcactggatgagattgagaagttgatggagcgggattacttcatgggcgcgagggaggcgcttgagttgggcatcgtggatgagattttggatcgtagggttaagactggacctgatggggaagggaaaaaggagcagtaggtagggctctggctcatcaagcaggggagttattatacccaggacattcttttccgatggttctgttcaatatgtaatgttagaacaatggtatgtacgacatgacaaatctcaatgctcacgaagctatgctcgcactatctatagaatacccaatgcgagataaaaaaaaaaaaaagcccgaaacgcctctaatgtagtgaaaattgcatcccatattagatccagtagtaggaccaagtttagccacctatatgcattccacgcacgcaacggaataaagtcaagtgtgccccgaagaagccagctaacattagcagctagtagcacgttcgatgatgaaataacgcaatgcgaatatcagccgctcatggttagcattaagaccaaaagaaaagagactcgtccagaaacaattaagtagacc

SEQ ID NO: 19644 - DNA, 1125 bp, Emericella nidulans
atgtctactgacaagatcacgttcttgactaactggtacagcttgctttatatttttgtttccctgcgagaatagtgctaaggtgtcgttttgcttaggcacgcgaccccgtaccacgcccccctgtacctcgcccaaagcaagggattcttcaaggaggaaggtctcaaggttgctctactcgagcccaacgacccatccgatgtcaccgagatcatcggcagtggcaaggttgacatgggcttcaaggccatgattcacactcttgctgtatgacaatcgccatggttcaatgaacatgactaacctgctgcaggccaaagcccgcaacttccccgtgacatctattggctccctcctcgacgagccgttcactggagttgtctacctgaaggacagcggaatcaccgaagacttccgctccctgaagggcaagaggattggctacgtcggcgaattcggcaagatccaaattgacgaactcaccaagtactacggcatgactgccgatgactacaccgccgttcgctgcggtatgaacgtgacaaaggctatcatcaacggcaccatcgacgccggtatcggcctcgagaatgtgcaaatggtcgagctcgccgagtggctcgcgtcgcagaaccgtccccgtacagacgtgcagatgctccgcattgaccagctcgctgagctaggatgctgctgcttctgctcgatcctgtacattgccaatgatgcttttattgccgcgaaccctgaaaaggttaagaagttcatgaacgccgttaagcgtgccactgactatgtccttgctgagccggcgaaggcgtacgaggagtacgttgacatgaagcccatcatgggaactcctgtcaacagaaagatctttgagcgctcgtttgcgtactttagccgcgacttgaagaacgttcagcgcgactggaacaaggttacgaactacggcaagcggttgggaatcttggatgccgagttcgtgccgaactacacgaacgagtacctttcttggactctggacaaggattcgactgatccgctcggtgatcagaagcggatggccaaattgcaggagcaggttgctgctgaaggcggttttcaccggctggaggtggc

SEQ ID NO: 19645 - DNA, 1127 bp, Emericella nidulans
cgcgccttcttgcgctcttccctcagaccagctgtccgcagctcccggtttgctcttcctactcaaggcctccgcgttgcttctcgccgtggatactcttccgaggcgagctccgggaagtcttctaacaccctcctgtgggccggtgttgctctcgcaggtggtgccggtgcatacttctacctccagggcggcgatgttggcgctagcaccaaggtcttcactcctacaaaggaagactaccagaaggtgtataatgccattgccgagcgtctcgccaacgaaaccgactacgatgatggcagctatggacctgtaagcttctcggtctcgtgcttgtgtctgctctccaactaatgtcccgactctctaggtccttgtccgtctagcctggcacgcaagcggcacctacgacgcagaaaccggtactggtggcagcaacggcgcgaccatgcgtttcgcccccgagtctgaccacggcgccaacgccggtctcaagtacgcccgtgacttcctcgagcccatcaaggccaaattcccctggatcacctactccgacttgtggacacttgcgggagcctgcgcgatccaggaactcggcggcccagacatcccctggcgccctggccgccaggacaaggacgtttctggctgcacacctgacggcccgtcttcctgacgcgaccaagaaccaagaccacatccgtgccattttcggacgcatgggtttcgatgaccgcgagatggttgctttgatcggtgcacacgctcttggtcgtgctcacacggaccgctctggtttcgatggaccctggaacttcagccctaccgtcttcacaaacgagtttttccgcctgttggttgaggagaagtggcagccgcgtaagtggaacggccccaagcagttcactgataacacaaccaagacactgatgatgttcccgactgacctggcacttgtccaggacaaggggttcaggaagcatgttgagcggtatgctaaggacagcgacgccttcttcaaggagttctctgaggtctttgtcaagctgcttgagcttggtgtgcctttcaacagcaaggttgaggaccgatatgtcttcaagaggtctgagtaaggtgcttct

SEQ ID NO: 19646 - DNA, 1128 bp, Emericella nidulans
cgccttccgtaccgccgattatctcaaaaacacactctcgtataattctaagccttgacgaacaacaaatctccgaaatgccccaaaaggcaaagacccgcctcctcctcctttccgatactcacacaacaaccccctcccccgcactctccagctcttcttcgggcttcccatcaacaccctaccggcacccgctcccctcggcccaagtcctcctgcatgccggtgacatcacgaaagtcggccttgcctccgaacacaaggccatactcgagatacttaagtcccatccagccgaactgaagatcgtgattgccgggaacacgatatcactcttgacgaggaatactataatcgtgtggggtggttgcggcataggtatagagatgcaaaggggagggatcatctggctgcgctacccagagtccctgaattgggaactacaactgaaggatcacagggtcctagatcatccctgaactccccctcagccataaaagccctatacacagactccaccgccataaatgccggtatccggtacatggaagaagaggtcaggacattcactgtgccctccacaggcgcaaagttcaccatttacgcgagtccctatacgcccgagttttgcgactgggcgttcgcatacccacgaagtgaggaccggtataacccgccccttgtggcgcggaaggttcaaagcctaagttgccggtccctaattacccaggcgtcgatatccttttaactcacgggccaccaaaggggattctagaccaagtagtcgggagcggcgagaatgtgggatgtgagcacctctatcgtgctgtgaggagggcgcggccggcgctgcacgtctttgggcatattcacgaggggtatggagcgcgacgattagagtgggagcgttctgggtcagactcagatactgcgactgggtccgggaccccagctggagtgaggaggattcaagatatatcatgggaccgtgaggatgtgatggataatcggagtgcttatatagatctcacgtccggctctgaaaagccgctacaacggggagaggagaccgtgtttgtgaatgcgagtgttgttacggtggagtataaggggctaaatgcgccatgg

SEQ ID NO: 19647 - DNA, 1128 bp, Emericella nidulans
gaggctgacctgggtgcagattacctgtctctatgatatggatattccccgaccggacaacttcaatgagacatatctatacgaaggttagagcattggtcgcctataggtcgctcactggttactgatactcttattcgaccagaactcatggagtgtgatttagctgctattattcgatccggccagccactgaccgatgcgcactaccaatccttcatctaccaaatcctatgtggactcaagtatattcactccgccaatgtccttcacagagatctaaagcccggaaacttgctggtcaatgcggactgtgagctcaagatttgtgattttggtctggctcgtggtttctcaattgaccctgaggagaacgccggttacatgactgaatatgttgcgacaagatggtatcgcgctccggaaatcatgttgagtttccagagctacacaaaagctagtatgtgccttcgcgctgtttcgaactttgaccaagctgacgtgatgcagtcgatgtgtggtccgtaggttgcattctggcggagttgttaggtggccgccccttcttcaagggtcgcgactatgtcgaccagctcaaccagatcttgcactacctgggcactccgaacgaagaaactctgagccgcattggctcaccacgtgcccaggagtatgtgcgtaacttgccctttatgcccaaggtgcccttccagcgcctgttcccgaacgccaatcccgatgctctcgatctactcgaccgcatgcttgctttcgacccttcgtcacgtatctcggtggaagaggctctggaacacccttaccttgcaatttggcacgacgcatccgatgagcctagctgccccaccacctttgacttccactttgaggtggttgacgatgtgcaggagatgcgccgcatgatctacgaggaagtcgtccgttttcgccaatcggtgcgcatgcccccgcaggcgcaatctctcgcccaacaacagcaaataggcaacatccccattcccgagcatcagcagggagtgtggaggcaagaagagcctaggcctcaagaagcaggcgccgtaggcggcaaccacaacgatctggaatcgtccttgcagcgggggatggatg

SEQ ID NO: 19648 - DNA, 1132 bp, Emericella nidulans
accggtgcccagatcccgtacgtatcctcgaatcctcgatatggcggttttggtaatggctaacatgacacagtcagctgggattcggtacctggcagtccgcccccggccaggtcggcgaagcggtctaccaggccctcaaggtcggctaccgccaccttgacctggctactatctaccagaaccagcgcgaggtcgccgagggcatcaagcgcgcctacaaggacatccctggcctcaagcgtgaggatattttcatcgtacgtcaatttttgtacccagagcagctcgttgggccattagactaacagttcgcttgcagacatccaagctctggaacacccagcacgaccccgccgttgttgagaaggctctggacgactgccttgcggagctcgagctcgactacctcgacttgtacctcgtccactggcccgtcgccttcaagaccggtgacaactacttccccttggacgagagcagtgaccaccccgacggtgacgtcctgatcgatgacagcatctctattgttgacacctggaaggccatgaccaagctccccaaggagaaagcccgcgccattggtgtctccaaccacactgtcgagcacctcgaggcgatcatcaacgccaccggtgtcgtccctgccgccaaccagatcgagcgtcaccccgttctccagagcaacgacctgatcgagtacgccgctaagaagaacatccacatcactgcttactcagtacgtccctgaagcgttgtacgccgcttgcagcctaaactaatgaaaaaactaggccttcggtaacaacatgttcaacatccctctcctcgtcgcccaccccgaagtcaaggccgtcgccgaagaggcctccaagcgcctcggcaagaccgtcacccccgcccaggtcatcctcaactggtcccaggagggaggccactcggtcattcccaagtccgtcactgcctcgcgcattgccgagaacttccaagaggtcgagctcaccaaggaggagctcgccaaggtctccaagcttggcgaggagcgccgccgctacaacacaccttacgtggctaacaagcctcgctggaacattaacatcttcggcgaggaggacgagaagcctgccaagca

SEQ ID NO: 19649 - DNA, 1132 bp, Emericella nidulans
tggtagtgtcttcctagccatgatttagccttgttgcttaaggagcctgctctgacgagaaattgtgttcaggcagcgcagacaccacgatcaatatctgtgacacgcgttcgaatgctcacaaacccatccagactctcaccgaggccagcgacactgtctcatcactacacgtacatatgccgagttactctatcgcgagtgggagctatgacggccgcgtgcgcgtctatgacatccgcatgggccggacgacggtggatgtcctcgggaacccggattacgagcgtgcggtgttctgcggacggaaatgcgcttctaacgtctacactcgacagtcgaatccggatgcttgatcgcgacgatgggaagttattgagagctttcgggtcaggagacaccgcgaaacaatcccatatgtcgccagcaaagccagctgcatatcacaacattgactgcgcattcggtccgtgttcgcaaaaggcgactcagtggttctgagcggcagcgagtcggtaaaagatgatcattctgctcaggcgcacatcttcgcctgggatgtactgagtggtgatgtaatcgcatcaattccagccggagaacgagtcaaggctgttagttgcgtggcatggaatgagaaaggaaaatgctgggcgggcggattctctaacggtatgcattacctgcgcactagttgctttgtgcttaggcttacgaactgggacattacaggaactgtcaaagtgtaccggtagggatagccgccgatgagggtcgcaacctgtatgcgggatttgctctgcgcttcatacctacagggtgcagtgatacgtatccctgcacgaagtttactggacttttccaacctcagaagtcatcggctacgcccatgccatggctcggagggcttccaggaggcattgggctgggaacgacattaatgctgggctattgcggcaattttctcaccattgcttggctggaaaccgatcttcagctaacaacgcactcgtgcctggtggcctgaatattgacttgccaatcacatcaatcgcagtgtcgaatatgagcgattcaaacatgccgccggaatcatatatcgtcaagccatcatgccctgttatagggcgcg

SEQ ID NO: 19650 - DNA, 1133 bp, Emericella nidulans
agccacgggcagtggtcgagatcatctcccaggatgagatgcgatctttggctggcatcttctttgagagggtggatccctgctacccttttatcgatcaggatactctactgcgccaaataagtaggcgatggctgccggccacgtccgagcctccgggctttgatccttacgacgccgtactctgcggcgttgctgcctttggctatcttttttcccgccgacgagctacaacgacggaactgcaacttgtcgagtctgctcggtcaatccttgagcagagtctgcagtccgaaccggtttctccccttgaaacggtgacgggttgggtgttgagggtcgcgtaccttaggatgacggccaccgcgcacgcagcctggatggccagctgctctctgatgcacctcattgaagcgacaggcatgcacattgagccgtcatcaaatacagcactggatctggcgtcaacaagcgaatcctgcgaccctgaaacccgacggcgccttttcgccatggcccgccatctgaatgtctggatatccttcgaactcggacgctcccgcgtcgtccttcaaggcgcaacctctctccccccaagcccacgaccaacaaacccaaatccaagatccacagcaagcttctcagcaggagtagaaacagcaacagacatcttcaacctcctccccatttccgaaagcctagatccaaacgaagcacaggacatctcaaacctcgaaattgccctgacggacgtttgcaacatagtctacagccaaccccatcttatcctcgtccaatgtaacctaatgctctgcatctaccgccggctacgtgccctcaactccatcatctcaggagacctcctcgaccgcgtcctagcgctctcggggaaaggtcttaaagccgtctccgaactcgtcgcagtcaattccccgtggcaccaaatcgcgaatgtccccttccaggttgtatgcactctgctggctatcgataaccgtgcgtcactagcgatgctgcgtgattcgatgcatacgctgcacgaggttgcctcggcgtatgatacagaggttatgcgcgaggcctatacgacagcctatctgatgattgtgatgcatcagcggcggaaggaggaa

SEQ ID NO: 19651 - DNA, 1134 bp, Emericella nidulans
cgtcgtcagttcggccgcttcagatatttactgttcgtcccgctcgctctatggtctagccaaagacggacaggcgccgaagcttttggcaaaaacattgaaaaatggcgttccagcatggagtgtgtgttttgctgcgcttttctgtgttctggggtacatgaacgccgctaaatctgcatcaacgatctttgaatacttcgtcagcctggcgacgatctttgcgctgcttaactggctcagtatcctgctttcgtatctcaacttcagacgtggtataaagagacaggaaatcagcttgaaagagaggtcttattgcgctgtcctgcagccttatggagcttactactcaatgttcattactgttctctgtatcgtcttctctggtaggcaaacaattgcaaatcccagcctccaaatcctctttactcataaaaaacaggttatgacgcattcatcccacaattcaaagcagaccagtttgtgcttcggtatgtcgggatcgtcgtctacgtgggcaacttcctcttctggcggttctataagggagcccggtacgtgaggccctgccagatggatctgacgacgggattctatgattctgtccttgaaggttcttcagaccagattaatgttgaagtccctgagaagggcgaggttgaggttcgggctagtgaggtagagattacgacaattggggaggatgggaaagtcgctgggcgatgataccgtaccccttctgggcaacaaagggttataccaaacgctgagattagtgctttgagattaacagtgccgtcttcttgcttgacaagccttagtagctgggttgcagtctgcgttccagttaaatcccaaatatctcccggatcctaagtcctacggtacgcttttgactcacaatgactgaattaccgaacagtgaagactgtactgaaagatgaggcagaactcatgttacggctattgaatgaagacacaagaggaagcagatttacgtattgtacctgagaatcagcaaggacctgctgctctggaggcccatagggcatctcttgtgcattgtccgatgtccaccagagtaagtcaaagacatcttataggaattgtggagtcccggttcgttgttagagt

SEQ ID NO: 19652 - DNA, 1134 bp, Emericella nidulans
tatttgattctctacttccacgccaacaatggcttcacaatcgcccctcttccagcccctccgcatcggcaatgtaaccctcaaccaccgcgtcgtcatggctccgctcacccggcttcgcgcagacgcaaagcacgttcaactccccatggcaacaacatactacgagcaacgagcctctgtgccaggtacactcctaataagtgaagcaaccatcatctctccacaacacggcggttacccgcacgcgccagggatctggaactcggagcaagtcgccgcatggaagaaagtcaccgacgccgtccacaccaagggcagctacatcttctgccagtttgtcgccgtgggccgggtagcagacccagccaccctaagagccgacgcgggtatgaagtcacagcgcccagcgctatccccctcgatgctgagaacggggttgttccaaaagagctcaccgaggaggacatccaggctcttatccagacatttgtgaccgcggctaagaatgccatcgcggctggatttgatggggttgaggtccacggtgccaacgggtacctggtggatcagttcttgcaggacgtcacgaacaaacgcactgatgcctggggagggagcgtccccaaccgtgcgcggtttggtctcgaagtcgcccgggcgcttgttgaagccgttggtgcagaccgtgtgggcttcagactcagtccatggaatacatggcagggcatgaagatggcggacccagtgccgcagttcagctatttcgccgagaagctcaaggagctcaagttggcatacctgcacgttatcgaatcccgggttatcaacaacgtcgattgcgacaagacagaggggatcgagttcctacttgagatctggggcaagacgagtcccgttcttgttgcgggtggttataacccggcgaatgcggaggctgcttttacagaatataaggataacgacattgccgttgtctttgggagacatttcattgcgaaccctgatctgccgttcaggattagagaggggctgccgctgaacaaatacgaccgggacagcttctatgcgttcatgcaggaggcgggttatattgattatccgttcagcaaggagtttttggaagctaaaaat

SEQ ID NO: 19653 - DNA, 1136 bp, Emericella nidulans
ccgaagtcggtgccatgggtagcacgcccggcgatttgacacctggtgtgcctgcttcgcttctttctccttcattcacacccccagccacaccgggcggcacattgaacacagaacggttacttcaacaaatctcgccacaacctgtctcccatgcaaaacctccaaagctcctccctcgcctccccaacgtggagtgcattgtccgcgcccgcattcccacaacgaccggcgctgagatgtttctacacctgtaccataatgacatagacaacaaagaacatcttgctattgtgtttgggaacaccattcggagccgaagtcttgacagggtgaaaccaggagaaacggaaatggatcgaatgattcgtggagcttatattggcaaactgcatcctggacgcgtgagcagttggcatgattcgactcaggggagtgctacagataggtcaattgaaggatctgaggggggtgctgtgcacaatacagaatctatgcaggaacgactgaacgaagccccactagtacggatccattccgagtgctatacgggggagacagcttggtcggctcggtgtgattgtggagagcagctcgacgaggcagctaggctaatgtcgctgcccatggaaacactgaacgagatagcttcccagcagtctcgatctgtgccgtcaaatgtatctggtggtgtcattatctaccttcgtcaagaaggccgaggtataggtttggggagaaactgaaagcgtacaaccttcaagatttgggctctgatactgttgaagccaaccttttgctgcgacatcccgccgatgctcgaagctatggactcgctacagcgatgcttgttgatctgggtttgggcaaagatgcgaatccgcacgggattcgcctacttacaaacaatcccgataaagttagagcaattgaaggacctgggcgtgaggtaattgttaaggatcgtgttccgatggtgcctttggcgtggcagactggcggtaagatgggcattaagagctcggaagtcgaaggctatttacgaacaaaggcaagtttacatatatcttgaacggctagctacctgttgaaacattgaagactgagctgactctgacttcttggacacagatttc

SEQ ID NO: 19654 - DNA, 1136 bp, Emericella nidulans
tcgcaaatttttcgttggcggtaacttcaagatgtatgcataagctaccccgcaatgccctctactctcatgccacagcgtatactgttcgagtcattcctagaaccaacgcagattgcatcgctaccatgtttttcttctttcaactgataggaacggtaatgccgagagcactacctccatcatcaagaacctcaactctgccaacctggataagtccgtcgaagttgtcgtctctcctcctgcgctctacctactccaggcccgcgaggtcgccaacaaggagattggagttgctgcccagaacgtcttcgacaagcccaatggtgctttcaccggtgagatcagcgtccagcagcttcgcgaggccaacatcgactggaccatccttggacacagtgagcgccgcgttatcctcaaggagactgatgaggtatgcccactgaaacacttcgtggtgatacgagcttgagtgcttaaagatctagttcattgctcgcaagactaaggctgccattgagggtggcctgcaagtgattttctgcatcggtgagacgcttgaggtatgactctttttttgtttcggcttatcccgattacccactttgactgggcattcccctatgttgagctttctaccgtattaacaatgcgtaccaggagcgtgaggccaacaagaccatcgatgtagtcactcgtcagctcaacgcggcggctaaggagctctccaaggagcagtgggccaaggttgtcatcgcctacgagcccgtttggtaagacacccatctgtctgcgcctcgtctcactgagagcaaacgggctaattgtgttacagggccattggaaccggtaaggtcgctacaaccgagcaggcccaggaagtccactctgccatccgcaagtggctgaaggacgccatctccgctgaggccgctgagaacacccggatcatttatggcggctcagtgagtgagaagaactgcaaagatctcgcgaaggaggccgatatcgatggcttcctcgtcggcggcgccagccttaagcctgcctgtacgtctttccctccccttgtcgtttcttcggagtgcattgttgcttactagtacttagtcgtcgatattgtcaatgcccgcctg

SEQ ID NO: 19655 - DNA, 1136 bp, Emericella nidulans
cgcccgactccaacctcacgcctacctcctcgctcacctctcgccccccgcatcaagtcaacagccatcaattcgagccaatggtcgctcccctcagcagtttcgcgtcacttccgcgaataccggctccctaacgcacacaaatggcagtgctgtcgtgcgagtcggtgacactacagccgtatgcggcatcaaagcggagatcctacacacggaagacattgcctcatggagcgtctcacattcatcctcatccccttctacctccaacaaacgacggaaagtgacaaatccaaccggagattccggcgacaaccgtgaaaacagctcgaaagaagacgaaggcaaagatgacttctatattgaagacttcagcttactcgtaccaaatctctcgttgagcaccgggtgcgctcctggattcatccccggcgcgtcgccttctacattggcgcagtctctatcacatcagattctatccttattgcatagctcgcggctagtccgggctgaggacctggaaatatggtaccaacaaccgaacttcggagcggaaaagctggagcgtcataacgaaggtgaacagatggatgtggataccaggcaggattctgatgagactaccctggagacgcgcgagatcaaggccttctgggtcctctacatagatatcatgatcatctcgctggcaggaaatccgttcgacgccgcttggactgccgttctggcagctctccgcgacacaaaactgccacgcgcatggtgggatgctgataatgagacggtggtatgttcggatcttgtctctgaggctcgcaggctatcgctgcgaggactgcccgttgccagttcttttggcgtcttcgaagccgatgcagcggcgggttggagagcggttattattccagacgcaaaaggagacaggaaatcagcagaaggcgataggaagaataatcaacgacgatggattttggcagaccctgatggttatgaggaaggattaactcaggagagagtctgtctcgtcgtgaataaaaccgcaaatggcgaggtcaacattctgaagatggagaagaacggcgggttcgcagtggacagaggagaattaaaggagttagtggagatctcggcccgga

SEQ ID NO: 19656 - DNA, 1136 bp, Emericella nidulans
acgaacccgccgcgaaaaaacgcaagcttgaaaatggaatcggtcaggggactgggggcgctcaatcgctggctgatttgaaaacacacaaagctctacagttctacatgcaagacgtatcgtttgccatgccgcaaagaaagaagttgacactggagatcacggcgggaaataaatatcttcgggctaggaatcagacgtcgaaggaggtagagtttggcgtgccgctggacagagttcgtatgttgcttcaactctttgagctctcttgctctgtttcggcctgctgataccatacagaacaggtcttgtgcctccccgttccggagaagactcaacgacagttcaatttttgcattatcccccagtatgccgatgggatcaattcgcctccgaatggcgttcctgtcccggaggcagttatgtggacgatcaacgacgggcctgcgaaagctgcgttttcggggcacgggcaacaaattggaaaccaagatggcgaaacggccgaggacctagtgcgccaagtgttaaatgagaatctgtcacatacacaggttatacgcccatgtgcgcaggaatttgctagcgccatgccagagggccatcggaagggtgagatggcataccatgtcaaggccttccgtggaagtaaagaaggtatgtccctagaagtcgcgaagaggcgttggttaacgtgtctcacgtccaggctacctcttttttctgtccacgggaatcttctttgggtataagaagcctttgcttttctttgcctttgagaatatagactccatttcttacacctctgttctccagcggacgttcaatctgaacattgtggcgcgcgctacaggcagtgacgaaacacaagagtttgaattctccatgatcgaccaggcagactactccggcatcgacacctacatcaaaacgcacggcctgcaagatgccagcctcgcggaagcccgacgcgcaaagcgtacaatatcaacggggcaaagacagaagaaaatggcgaggctgccagtcaagaggcggaagagagtgagctgcagaaggcacaacgcgagctagaagaccaagaagatgaagaagaagaagactacgacccaggaagtgagggcgagacggagggc

SEQ ID NO: 19657 - DNA, 1136 bp, Emericella nidulans
ctgcaggtggaacggggctccagagcgcagcgaatttgggtgcgacggaaaatgcggcagtaaccagttcaagctgaatcaggatacggcgctcgacgccatgggcgaagggcaatgctttaccggagcgcgctacatctgctgtgattctgccgccatgttctccgactgcatgtggaccggatgccagggcccgctcatgccatacactcccgccgaatgcccagcggactattactaccaaacgttccgctgggacaagcccgacggcacgccgtggtgttcagatacatacgtctcgcccgtggacggcgcggtgggcagccccctccacgaccggttcaagagcggcctctgctgtccgacggaccagagctttagcaactgcgcgtggacaaacagcctgcaacagagtgacatgacaggaggcgactgggcagaccacatccaggatctcgtctgcaagccgaggccttgttctgctggaaaggtcaaggttgccggcgccctcgatccaccaccggcccccggggccgggtccaagagcgagatcaactgtgacggggtcacggtccctccgggtacagatccagaatggtcgtattgctgtgatccgccgaccagatacaacaagaactggcccgtggatcccaagtatctgtgggaaaagtactacaacgaccccaagaaatcggacgtggtctggaaatacagcgatgagtatcaaaacaacgacgccgacgctgaccactccagcgaagaagacggcagcgacgcatacggcttcgtcatgctcgacgggcccgaggggtccattgacaacgactttgcaacgacgcagacggtagttcggcggtcccgggatgttcccagagtgaagcgctccgtcctgaccacgaaccagaccgcgctcgacacggtctttgaccactcggaggaaaccttccatgtctactgcaactaccctgcccggtcgcgggagtgtgggcgtatctttattgacggcgccgaagacacgatcatttcgctccctgaccatatcggagaaggcccgtttgcccgcattgtatacatgaaaccggcagacgaagacttccagctgcctgatcatcacctggagcaccggtctgtcgagc

SEQ ID NO: 19658 - DNA, 1138 bp, Emericella nidulans
ggaccagccgtcaacgaaacgtcggaagctttatgctttgccgaagctgaagatttctgccattaccaacgacgcggtagccactctcgcatcacttgcatatgcggtgaaatctctacccaacagccgcgttgccatgggtctcattgtaggcacggggtgcaatgccacaataccaatgaagctcagcgccttacatgaagacaaggtaaagcatgtgaggcggagcgatcctgaaacctcgggtataatagtcaacaccgaatggacgatatatggtgtcttgcctccacttaaggagctgaacataatcaccaaatgggatgctgagttggatgcaagcagtgcacgcccgggcttccaaccgttcgagtatatgacgggcggtagatatattggggaactcatccggcttatttttactgactacttgatcaacgttgctggagtgtccacggctgcattacctgcaacacttactcagggatacgccttgacgacatcttacatatcggacaaggttgcgcgtgcccgctcagacgaggaactcacagatgagctggctcactcattacctccaccaagtgatacgtggcagtgggatgctacatctgcaggagtcttacgaacagttgcccgaactgtacaaaggcgatctgcagggttggtagctgctgcagtcgtcggtctattagcatgcgcaggagagatagaattaaggttggacagccctcaaggctcaccgcaagactcgcatgctgcttcgcctgagcgcgacagcatcacgaccctttccgctcagctcaaatctgaggggtcggcttcaaatggattccgggggccgatagttcctataatttcgcctacacctgcggattggcagtctggtccagaggagcttgtcgtcgcctgcactggtggcataatccagcactaccccaacttcaaagagatgtgccagcagactatcgaccggcttattatgcgtactgggcctcagaagagcgggaagtcggtctttttgcgtgaagcatcagatggcggtgttattggcgccggtgttctcgcagggatggtcggaaatcgttgatcttcaccgctcgcattgaacttaccgatcagcaagaagtcgctaaag

SEQ ID NO: 19659 - DNA, 1139 bp, Emericella nidulans
ccggctctccaggaggctgttgcagccactgccccgcgcaccaattggactcgcgatgaagtccagcagatttacgagaccccgttgaatcaattaacctacgctgctgtatgtttccgatttgaccgctgcttataaattattctgtaacgcggatatttgaatgaattgttcgttggaccgaatgttgactcatgctgaataggccgctgtccaccgccgctttcatgacccgtccgcaatccaaatgtgcacgttgatgaacatcaagaccggtggatgcagtgaagattgctcctactgtgcacagtcttctcggtacagcactggcctcaaggccaccaaaatgagccccgtcgacgacgtcctcgagaaggcgaggattgccaaagcgaacgggagcacgcgtttctgtatgggagcggcgtggcgtgatatgcggggtcgtaagacgagtttgaagaatgtcaagcagatggtatctggcgttcgggaaatgggaatggaagtctgcgtcacactaggcatgattgatgctgatcaggctaaggagctgaaagatgccggcctgacagcctacaaccacaacctcgatacttcgcgcgaattctaccccacaatcatcacaacccgatcgtacgacgaacgactaaagaccttgtctcatgtccgtgatgcgggcattaacgtctgctctggtggtattctaggtcttggtgaggctgactctgaccgcatcggcctcatccacacggtttcgtcacttccctcgcacccggagtcttttcccgtcaacgccttggttccaatcaagggtaccccgttgggtgacaggaaaatgatctctttcgataagctcctccgcactgtcgcgactgcacggatcgtccttcccgcaaccatcgtccgcctcgccgccggccgcatttctctcacagaggagcagcaggttgcctgcttcatggctggtgcaaacgctgtcttcactggagagaagatgttgactactgactgcaacggctgggacgaggaccgcgccatgtttgaccgatggggcttctaccccatgcgcagctttgagaaagagactaacgctgccaccccccagcagcatgttgactctgttgctcacgagtccg

SEQ ID NO: 19660 - DNA, 1139 bp, Emericella nidulans
ggcttgtcggcggcctgtatgcgcaagacaatgtgctgaggtacgagccatgtgtagatcgcctgatccatctgttccagcagcgcatgcaggagcatagtgagtcagggaaagtctttgacatgagcgtctggctggagcgatacacatttgatgtggttggggagattttccacggccggagggagggtttcggcatgctccgggacggagccgactacaatgggtggtgttatctgatgggagttatgccagacattggcgctgcaactacatatctcccttgggggtttcgaagtctctacctgctctctcaacttgtatttcaaagctcccgtgatggagtgagggggatgctcgacgtcaccaaacaggccgaaagggcaacccttgaacgatgggaggagatgaagaaagggaaggttctttccgaaagtgatatcttgactggccttctggatatggtccaagaaaggggaaagaatgacagtgtcatggcctcatggacggtggctgacgttgtgaccgaggtttgggctgtgatctgggctgggagcgacaccactgccaccgcgctgaccagcatattttaccacctgcaccggaatccgtgcaagctggcagggctgagagaggaaattgatgccgcattcgaagacggccgactacggttcccgatccgcttcaacgatgcaagaaaactcccatatcttcatgcagtcatcctggaaagcatgagggtgcatccttctctgggaatcggactcccacttgaatcaccagcggatggtgcgaatattggaggaacctacattcctggtggtgttgaggtcatcgtcaatcccgcggctgttcatttcgatgaacgctcttttggagccgatgcgaaagagtggattccagaacggtggctggtagacgcggaggccacgaggcggatggagcggtcgatgctgcaatttgggtacggaccgcgcatgtgcattggcaggcatattagcaatatcgagatgtataaactgcttcccgccctcattcgtaattttgaatttgagatgttggttgacagttgggaggtgaaaggatcatggttccaccgcgctcacaatgtaaaatgcaaagtgaaaagaagaggttga

SEQ ID NO: 19661 - DNA, 1140 bp, Emericella nidulans
ggactacaaattcgaaggatggatgggtctagacaagaatgccgccgatggcaacatggtctggcaggagtttgagcccaaggaatgggaggaaacagatgtcgatatcaagatcacgcactgcggtatctgcgggtctgatttacatactctccgaagtggctgggtgagtggactcaagtttgattaccaaggaggcatctctaaaggggggtatcggaggatgcagacaggggagcaatatataaaagagtccattactaacttgttcacacagaggcccgctctttatccgtgctgtgtaggtcacgagattgttggtactgccgtccgtgttggatccaaggccgtcgggggcatcaaattaggagaccgcgttggtgtcggtgcgcagagcgacgcttgtgtgggccgattcggcgactgccccgagtgtgcaatgggctgggagaactactgctcgcacaaatttgtctctacctacaacagcgtccatttcaatgggggaaagtcctatggtggatatgccctgtacaaccgctgtccttcccactttgtggtcaagatcccggatgccgtaccctctgctgaggccgctccaatgctttgtggtggtgtcacgctctatagcccattgaagcataacaactgtgggcctggaaagcgtgttggtattatcggcgtcggaggtcttgggcacttcggcgtgctctttgccaaggctctgggcgctgataaggttgttgctatctcacgtaagaacggtaagagtgaggatgcactgaagatgggcgctgatcagtatattgctaccgatgatgagccggactgggctacaaaatacgctcgttctttggacttgattgtatgcaccgtgtcctcgactaaggtatgcacctatcaaattgatgctagttcctgtgcagagacattgactttaaacaagatgcccttggccgaatacgtgggcctgcttgcaacgaacggcagcttcgttcaagttggactaccggaagacggagtgctcaatgcacctgtggcaaacttaaggcgccgccttaagatggaaagctctctcgttggaagtcccaatgaaatcagggaaatgtttgccttagttgcggagaaaggcatcaagcc

SEQ ID NO: 19662 - DNA, 1142 bp, Emericella nidulans
tgtcagcgacggtaccaatgacattatcaacgtcatccctaacatcaattacgatttccaccggaagtaccagcacttgtactgactatagccagataacgtctgctgttgcatcgtgtacgagggcaccgtgctgtctaacgtcgctgtacccaatgaatccgcaatcgacctgtctaacctgcaaatgggaactacagtcacgtttggtggactgacaacatttggcttcacgaattcctcatcattcgatccaataaacattggaggaaaggatatcaccatcaccacaacagaaggcagtgtgattgacgggaatggccaggcttattgggacggcttgggttctaatgggggtgtgccaaagccctaccatttcatcgtagtcagtaaatgacgggaaacccagtagtttgagaggctatatgttcaaaactggccggttcatctcttctcaatcagcagttgctcgaatctcatctcccaaaatatggttctgaacagcacggctggaaatgaaccgaatgctcgaaacagtggtttagttgcagtgcacgactccgacggcttcgatgtcagcagttcttacaatatcaccatgcggcgcaattcggtatacaatcaggataattgcgtggccatcaccagcgggacaacatgactgtttcggaaatgcagtgcagcggaggacacgggttgtccattggttcagttggggggaaatccaacgtcactaatatcctggtatgattcatagctctcagcactaatgatatcatgtactaacaaaatgctagttcacaaactcagctgttattttcaaccagcgctaccggttggctgacttctgtgcttcaacttggtggtctcgtcggttccctatctgcgggtatccttggagaggtcttgaatggcgcccggatcaagaccagctacaacacaaccggattcgtatcgaatgtgaattactctaacatcgcagtaaataacatcactatttctggtattgatcttccaacagttttatctgaatggagggcctacaggaattccatcgtccggtgtgattgtggagaatattttgtcgcagaatgtaacagggtggatagctttatcggggcaagactactacattctgtgcg

SEQ ID NO: 19663 - DNA, 1146 bp, Emericella nidulans
atggtccgcgccagcactctcctgctgagcggcttggtgactctcgccaccgctcgctctgcagtcctcgacctgattcccaagaactttgacaaggtcgtcttgaactccggcaagccggccctcgtcgaatttttcgccccctggtgtggtcactgcaagaatctcgccccgagtttatgaggaactgggccaagccattcgcgcacgccgaagacaaggtcagcattgcgaaggttgatgctgatgcgaaccgcgatctcggcaagaggttcgggatccagggattcccgactatcaagtggtttgatggaaagagtgaaacaccggaagattataagggtggacgggatctggagagtctgacggccttcgttaccgagaaaacgggcatcaaggcgaagggagcgaagaaggagccgagtaatgtggagatgttaacggatacgaccttcaagagtgtcgttggtggtgataaggatgtgtttgttgcgtttacggcgccttggtgtggacgtatggtccccttcattctatttactttcaagcttgctaatgtattccatgtagactgcaagaaactcgcaccgacttgggaaaccctcgccacagacttcgctctcgaacccaacgtcatcatcgccaaagtcgacgccgaagccgagagttccaaggctaccgcgaggtcccagggcgtcaccggctaccccacgattaagttcttccccaagggctcaaccgagggcattgtctaccagggtgcacgcactgaggaagcctttgtcgacttcgtcaacaataatgctggaacgcaccgtgctcctggaggcacgttgaacgaaaaagccggcaccatccttgcccttgatgagattgttgcgaagtatatcacttccaagaactttggcgagctggttgatgaggcgaagaaggttgcgaagactgtcggtggaaagtacgcggagtactatgttaaggttgcggagaagctggcacagaatgaggagtacgcggctaaggagcttgagcggttgaagaaggtgctttctaagggtggctctgccccggagaagctggacgatatggtctcgcgcagcaatgtattgcgtaaattcttggaagtggaggagaaggtggaggacgtcg

SEQ ID NO: 19664 - DNA, 1147 bp, Emericella nidulans
cacaaatcgggcgggtggaagctgaagaatgtcgcactacgtccgctgcgcgaaaaggaactcctcgtcgagatggtcgcgtccggaatctgccagacggatctccatttcgcggggatggagaccgggtatggagtgcattacccaagggtaatgggtcatgaaggtactggactgccccgctggtcattggccgttctgctcacctatctacaggcgccggatacgtgcgggctgttggaccagatacaacagtcgccagagtcggcgatccagtcatcctgtctttctcggcctgcaaggactgtgagccttgcaagggcggccatccggcccattgctccaacttcaacgctatcaactttgaagctgtcgcggaagattacgtctttcgcgacgcctcttcgccagagcctgcttctggcggtgatatctacggcagattcttcgggcaatccagcttcgctagtctgtcaatcgtccagcaagactcgattgtcaatgttgctggggtggttaagagccgacaggatctggcattgctgtcaccgttgggctgcgggatccaaacgggcagcggcgctattatcaatgcggctggtgcacgtcctgcagaccgcgttgctatcatgggcctggggggtgtcgggttgagcgcggtcatgggcgcgaagattgccggatgtacgcagattatcggcattgaccggcacggatcgagactcgagctggcaaaggagctgggtgctacccacgtcgttcaggtcgccgagggaatgcccctagacgaggtgaccgcggctgtgaaagctattaccggtggcctgggctcgaatatcaccctcgacaccaccggcgtgcctgccttgatcgcagagggggtcaagatgacggcattcaagggcaagatcctgcaggttgggacagcacccgagacagccacactgtcgattcctattcacgagttcatggtgtctgggaaacagtttattggagtcgtagagggcgatgtcgtaccgcaagagtatcttccaaagttgctcaactgggttaatgagggtaaactgcctctggatcggatcgtcaaattctaccaggccgaggcctttgagacggctatccgtgatatgcagtccggggtgacggt

SEQ ID NO: 19665 - DNA, 1147 bp, Emericella nidulans
ggcgcaagcttggctctggtgcttatggacaggttcatatggcgtacaataagagtaccggacagcagttcgcttgcaaaattgttaacctcctcgcagtcaagcatcagctggccaaggtaggagaggcacgacacgagctggcatttgggaagaatattagtgcgaagatgaaggacagttatgtcaggttccagctacaggagactcttgagaaataccaccgcgaggcgaagatacttgaaaccctgcaacatgtaagtttggcttctatgtacctttcctagctaacctatgaagccgaatatcattggcttggagaaggtgtatattagtgacaataccatgtgagtttgatgtcgagaaatcaatattctgttctgatatgagtagatatatgttccaggatcttttgaccgctggagacctattctcctacatccagtacaaaggtgggagactgcctgacatcgaagcggccgttattgtgcgtcagattgtcatcgcccttgattatctccatgacagaaacatagtccatagggacttgaagcccgataatatcttgatgacggccctggccgacggatgtagagttgtgctcactgatttcggatgtgccacctttgtcgacccgatgacaaatcgaatgctgagtacggttggaacctttgagttcagcgctccgtcagtactattcgatccttggggatatcacgcactgatcttgtatagtgaggtagtgaggcagaatcgtgaaggatataccaaggccgcggatctatggtctctaggctgcttggcggccgtccttctcaccggggaacctgtgtttgataacatgcgcaatggccatgatgaaaactgccggctgaaagctatcgaagagctaaaggtgaagatgcatcgacttaatgtgggcgaccgagctcaagacttcgttttccggctacttcagcaagatgtacgcaagcgcatggatgtcaaacaagcactgcagcatatgtggttcaccaacccgtcgcacaaggccgatttcgaggcactctacaagcgttgtatcagagactggaagccgcgcacggctgaacaaccattaattgttaagctgaatacttacgtcaacggtcagacccagaaccagacc

SEQ ID NO: 19666 - DNA, 1147 bp, Emericella nidulans
gctgcagtcaacgcccaggttgtgggcactcccttcggtttcggtgctggcaccactggtggtggtgatgcgacccccgctgcacccgccgacacggccgaactcaccgagtggctggcagacgacgaacctcgagttattctcatcgacaaggagttcaacttcctcggcgacgaatgcaccgactgcgagtgctgcattcccgactccaacacctgcggcgatgccggccagaacgctattgaggttggcatcggctggtgtggtgattacccgaccacgacctgtacctatgacaacgccggtttggacgggttggacgtaggcccgaacaagtctattgtcggtgttggtgatgctggtgtcattcgtggtaagggtttgcgtatccacggcacggagaacgttatcgtccagaacatccacatcaccgagctcaacccacagtacatctggggtggtgatgcgatctcccttgacggcgccgataaggtgtggatcgaccatgtcaagatctctctcgtcggtcgtcaaatgttcgttactggatacgagtcaagtacgttgatcccattctcccgttcagagccacctcttaacgactacaggcggaagcgtcaccttctccaacaacgagctcgacggaaccaccgactggtctgcctcctgcgatggccaccactactggactatgtaagttcgcctccagtacctgtacctaagcaatcctaataccagtcagcctcgccctcggcgaaaacgacaaggtcactttcgcgaacaactacattcacaccacctctggccgcgccccaaggtcggtgctcccagcttctggcacgtctacaacaactactggtccgacaacaccggccacgccttcgacgttgaggagtccggtacaaacgtcttcatcgagggcaacgtcttcgaggacatcaactccgctacaacgatgacggtaccggtgctatcttcgccgttgactccggctctgaggcgacttgctcttccgtcctcggccgcacttgtgtcgccaacagccttaccaactctgaatacactgctgtcgcggatgagagcgtactgtccgccttcccggctgatgaggagggtgacattaccatcttgcccgtcgaccaggtcg

SEQ ID NO: 19667 - DNA, 1149 bp, Emericella nidulans
ccctcagatcctctgctacatgcagaatttctggacaggctcatatattaatgccaataccggtggtggccgatctggcaaggacgccaacaccgtcctggccagcattcacaccttcgaccccgacgctgcttgcgatgatatcactttccaaccctgctcctctcgtgccctcgccaaccacaaggtatacactgactcgttccgctccgtgtactcgctcaatacaggcatcgcacagggcgttgctgttgcagccggtcgctatcctgaagattcatactacaatggtaacccctggtttttgacaaccctcgccgcagccgagcagctctacgatgccatctaccagtggcagaaggctaggtccatctcgatcacgagcacctctctcgctttttttaaggacatctacagctcggccgccgtaggcacttacgcctcggggagctccgcgttcacggccatcatcgacgcagtcaagacgtacgccgatggctacgtgagcatcgtcaaggcccacgccatggctaacggctccctttctgaacaattcgacaagacatacggcacctgcgtatccgcgcgcgatctgacctggtcgtacgctgctctcctgacggccagcatgcgccgtaacggcgtcgtccctccctcatgggacgccgcctctgcaaacaccctcccctcatcttgttccacgggctctgcaactggaacttacagtaccgcgaccgtcacaacctggcctagcaccctgaccagcgggtcggctagcgcgaccacgaccatcatggctacgtcgactgccaccagcagcagcactaccaccagcaccaccaccgcctgtacaacaccaagcaccgttgccgtgactttcaatgtgatcgccacaactacctacggtgaaaatgtgtacatagtaggctccatctcccagctgggaaactgggataccggcagtgccgttgccctcagcgcctctaagaacacctcctccaacaacctctggtatgtggacatcaatctcccgggcgggacggcgtttgagtacaagtacatccgcaaggagacggacggctcgatcgtttgggaaagtgaccctaatcgctcgtacactgtgccttcaagctgtggagtgtcaacggc

SEQ ID NO: 19668 - DNA, 1151 bp, Emericella nidulans
cgtcgagattttggagcagaatacaaccggactgtgcgtgctacaagacgtcgacggagactgttcaacattcgaatacggggaactgccaaaggtatttgttctttcatcgagcagcgagaggtatgaactaacgtggtttagttcgacgctgccactctccaagatatcgcccggatccgcgatatggtcgaagcagactgccactctcgatccagttcgtcctcgaaacacagagtgggatcccgatgacttttgaggcctatctttggtcccgcagtgctggcaaggagactctcgcgacgtccgctgtctggatccgtgccatgctggggcaggatctacgcgacatctctgctctctggttcattgcatactgcaaagctggcggtggtttactccagatgcgatctgacagaaagggtggaggacaacaccttcgaatccggcagggaatgcagatgatttccaaagtaattgctgagactcttcctcaggatgtcgtttgtctcgcccgtggtcagcgtcactcaagggcgcaatcccggggttgaggtcgtgcggcagacaaaaagacactgcaagcgtgcaaagctattatcaccgttcccagtcctgtcctcaagatgatggacttctcccccaagctccccgcgctgaagcagctgtgggccgagtcctccaattacggctactacacaaagccatgatgattttccgcactccattctgggtagagaagggctactgcggtcttatccagtccttcgccagcccggcgtctgtgatacgccacaccagcagtctcccagacaagaaatatatcctcacgtgcttcatggcctctgatttgggccgtgcctgggctgcactgcctacggatggtcgcaaagcagcactcattaaacaaatcgggaaactgtttgacgccaaaaccgaagccgctggtcatttggtagacctggtgatttacgaatgggtgaatgacccgtactctggatggggatgtccctgtattgcgctgacccctggggtgatggatgctgtcggagagaccattcgagagccagcagggaatttgcatttcgctgggaccgaggcggcggttaggtggaggggatatatggaaggagctatagagagtggtgagc

SEQ ID NO: 19669 - DNA, 1153 bp, Emericella nidulans
aagcaacaagttccccgaactagttctcgcttcatacaccaagaatccttcagcaccccatgaaccagacggccttgtacagatctggaatcagcacttgcactcccggccggagtatgtgttccactcaacctcggacatcctaaccgcaaagttctcgccttttcaccctaatataattgtcggcggctcatactcaggtcaagtgcttctctgggacacccgctcgtcgcgtgctggcggcggcgcacccgtccagaaaacgcctttgacaggcgcaggacacactcacccagtctacagcatctcgattgtcggaacacagaacgcacataacataatcaccgcctctacggacggcgttgtctgcggctggaccgttgacatgctctcccagccccaggagtacctcgaactctccacccctcctccgtcaaagacagaagacctcgctcccacaaccatctctttcccacaatccgatccaaccttctttatagtcggcacggaagaaggtggcatctacccttgccaccgctacgaccgcgccggagccaaagcaggcaccgaccatcgccttgcttaccgcggccacgccgcccccatcatgtcaacagccttccacccagcgcgcggccccgtcgatcttggagaccttatgctaagctctagcctcgactggagcgtcaaactctggcgcatccgtcctccagccgctaccgccccggccgccacgtccggcatcacggacacccaagtcgtcacccccatccttgatatcaaccgcgaagatgtcgtatatgacgcgcgttggtctccacaccgaccaggcgttttctctctcgtcgatggtgcaggaaacctcgaggtttgggatctctacacagacactgaagtccccgctgtgcgaacaacaccctctaagggccgggcgggggtcctctctcgcagcctaaacaaggtcgcctgggaggagcgcgagggccggcgcctggcaactggagggcttgatggcgtcgtcaccgtttttgaagtagggcggggtctcagcggtacaccagacgatgttccctctgaagaatggaccggcatgaagcgccttgttggtaaactagaacaaaaggataaggaccgaatgagctaattgattgga

SEQ ID NO: 19670 - DNA, 1154 bp, Emericella nidulans
tttggccgtgtcccgattgccggtagcgaagcatgccccgatatttaaccgaacattcctgaaaaacctattcaagacctggtattggtgggcgtttgtcattctttgggtgattgcaggcgagacggagtcattctcgtccaattctttgttggcactttacatgaagtcgcaccccacaaaccattactccattgcccagcttaacaactaccctactggcgtgcccgctgttggaattgtctctacactgttctgggcgacgcttactgatttttgggggggtaagcggtatattgtgggttattttatcggcattactggcatcatcacgccgatacttattctgactcggtttgactcaaccgctacagtctttggtgcatactattgggccggagccgtttatgcttgccaagcaacctttttcgcatggtgtaatgatgcgatgaggatgcaggaggaacggcatcgttctgttgtgattgctagcatgaatctgggcaacaatgctgtcaatgcttggtggagcattctgttctactcggcagatctggcgccgcgattcacccgcgggatgtatgcaatgatcggttgttcagtagcattgattatttgggttacagctatcctcttgaagactttacaggaggacaaggcctcttcaaggctccaatctccagcagtgccgacagaaacgggcagggatgtcgagaagtccacctgaatctgcctctgctactcctagctcctcctgataacggcttggtattctctagattgaggaggcacgttttcagctctgtaagcgtggaaacgatcacaacatcatagtgcaggtaggacaattctgttcaattcagctcaaatcggctgattctggtccttgcatcgagtcagagacgataacgtcttctccactagttgcacgggactctaatagccatttaagaatggctcgcatgagttcccatacctgaccagcgcttagaaggaatcaggtattttccgtgtcccctcacgtgggaagccaaggcctgcctccctcgaccctctcacttcggcgcttgtaacgattgaatgagagctcaggtcctcgaatgtcctccaggttatcacgaattgcttttgcattgacaatgtgccgggctgca

SEQ ID NO: 19671 - DNA, 1154 bp, Emericella nidulans
caaggggtccgtgacctgcctaggacagcagaccattgatgagtacacctccgttgcgcaaaggggtgttttgggaaaccagagcttgactgacatagggtatggtcaacgtgcgaaagaatatatgatagctagcttcagtcgcggctgatactttcgcagatgtcttccgccagacaaccttttggcgcagggtccatggtcacacaacctcagcgccattcctccaacggtattttctgattgtatcccaagccatggtctaacagaacggttctacccggacgctaccaatcgatacgccagcttcgacttggttagtgcggcgttagtttcgacgatcaccttttcaattgatgagcatcccatgtatgtctatgctatcgacggaagttacatcaaccccatcgaagccgacggaatcaccataacgaacggagctaggtattcagtgctagtgaagctcgacaaaccaagaggggactacacaattcgcgtggtaaacacgggtctcaaccaaatattgcacggcaatgcgctgatgacttaccataacggaattggtccaattcaacaacacccatcaactccatctatagacctcgttggtacacctacatcaaatcacaccctgttgaacgaatctatgattatcccgttcgctgcccaggacgtgagtcgagtagatgtcgctcaaacacttaccttgacgctcgagcgctacaatgcttcgtacacctggactatgggagactcaagctttcctctacagctagaagaagaatcaccgctcctgttctacccccaaacagcatccaaaaacttcactgctaccagtaagaatggcacatgggtcgacgtggtttttgacgttgcgaacgccatccagccccctcatcctatccacaaacactctaacaaattctacgttctcggcggaggcaatggaaaatggaactacacctccgtggccgaagcagcaaagcatatgcctgagagcttcaacttcgaaacaccccagattcgagataccttcgccactcttcctgctgctactggtccgacatggttggcccttaggtaccatgtcgtcaaccctgggccgttcctgttgcattgccacattcaaattcaccaaagcggaggcatggcat

SEQ ID NO: 19672 - DNA, 1154 bp, Emericella nidulans
ggcgcattcatattctcggagtcggaaacattggcacttttgtcgctcactcgctcgcaagtcggccatctccaccgcctatcacgcttcttatgcacaatccagaagtctaccaaacgttccagaaacggaagcagactttggccatcaatagccttggactagacgataacaaaactgggtttgacgtcaatgtcttctctgatggaacctggcgctcagtaccatatgtgaacacgaaggaagaagtctccgcggatgaacaacctatctctaggaatataacagatagtgaggccaagttgtcaaatgtcgaagaggaagccgagcaaattgagtgcttagtagtctccgtcaaagcacctgcgactgtatctgctttggagagtgtccgtcaccgattgacgcccaagtccactgtgttgttcatccagaacggcatggggatcattgacgcggtcaacgaacgagtttttccggatcctggacagcgtcgcattacatgcttggtatcatcagtcacggtcttgctcaacggagtggcaggtttcacgtcacacacaccggtgtgggcacaacgattctgggtcctgtcccttcacaaaactctggcaggtcatcgtcactcgacaaggcttcggattgggctcctagcaccaaatatctactgcgcacattgaccctcacgccgcctctggttgctgttgcagaacccccctcctccattatgctgtaccagctggagaagctggcgatgaactccgtaatcaatccattgactgctctgatggactgtcgaaatggagagcttttgtataattatagcttcacacgtgtgatgagattactcctacttgaaatctcaaacgtgatctgcagtctaccggaactacaaggtatacctggagtcgagagccgtttctctccggagcgtttgcgctggatggtaacgcaacttgccagcaaaacagcgaaaaaccatagttccatgttacaggatatacgagctaacagaacgaccgagatcgagtttctgaacggatacattgtgcgaaagggcgaggaacttggcatcaaatgcgtggtgaattacaccatgaaacacctggttcttgcaaaacagcgagaatctcgacgacaggaatccagcatga

SEQ ID NO: 19673 - DNA, 1154 bp, Emericella nidulans; identical to SEQ ID NO: 19672

SEQ ID NO: 19674 - DNA, 1154 bp, Emericella nidulans
gcaccaaaggagcgatacattgaggagggggaaagagataatggagagacggtagtcgcgcaaggccgagagcgatataccgacaacccagagcaagtggatccggacgaacccttgataaggacaagggactcctccgatggctctactgagcaagcaactggctcgaatgatgactccgatgtattccactccggggaagcaactcctgtgaacacgcgcagttattcctacacgaaattgccgcattctggacatgaagaccaagctcacgaccagtcgcccatccttgggccacctccaagtgggccgtttctcccccgtcaggactctcgtggcgacatcttgtatttcccgaacgtggaagtcaaccctcaagataacaccctcgagcaagggccactgtcccgattcaaaacttcgatgggtcgtctcagggttcgaatcgccagcggttgggctcggtggactagcgcattatacagtcggctgccaccaagtctccagaaggtgttatcgaagtgctcagactctactagcagatttgttcgaggtgtatgggactttatgaacccgccactttgggcaatgctggttgctatcatcgttgcttcagtgccttctctccagcgcctattctttgacgacggcacatttattccaaactcggtgactcgcgcaatcaatcagaacggtcaggtcgccgttcccttgattcttgtggttcttggcgcaaatctggaacgtaacacgatccctcaggaagcgcttgaagatacagaagatgctgaaacggagaaaaagcttattatcgcgtcgttattggcccgaatgcttctgccaactataattatggcaccgtttctggctttgatcgcgaaatatgccccggtcagcattgtggacgatcccatcttcatcatcgtctgcttcctgctcactggagctccgtcggctctacagttggcacagatttgccaaatcaacaatacttatgttggcgcaatgtcgaaattgttgttccaaagctacgtggtttggtaagtcctcagaacctaaaacaggaacaagaacaagcaactgacgtatgtaggattctcccatcaaccttaatcctcgtgatgtgtgctctagaagttgtcgaatgggcggcg

SEQ ID NO: 19675 - DNA, 1157 bp, Emericella nidulans
gcattcaaatgtctccatgtctccataaacgtcaaagcttgattacaagcctgaggggaagtggatctttccaggatacgaggcagcttgttttgctgacactgtgccattccccggagtcctgtccgttaacgctatcgtcggtacggacgaggaccgcagtgaccttgacaactgccatgtcaggggtcagtctccagtcgtgctgaacctgcgatgaccgcgcttcggatcgtgccagctataattcaggattgatgatggagcctcccccacacccgccggcgcattagtcgccccgtccaatgtgccttatccaagtgctttgccgaccggtgaggagaaaaaagggaagttacggatgatatatgaaacggcatatttaaggctactgtaccgcccatgagtcttcgcgcgttgcgagaccgtctttctaatctacatgttcttacttcgactgcctcaactacaattatttatggcgatgacttgggtttgcgccctctaccttctgttatacatgggagttgaagttgctttgggcggctggaccgtgattttcatgatgcaagtgcgccacggtagcccattcgctagtgatatggccgtcatggggttctggttggatgtaacctgtggtcgaatctttctcggattcgttacgccgatggttggagaagaactctcagttacggtatgatatatttcactcctctatacgtcttttctacaatcttgtttaatatttagttcaccatggttattgtatcactcaaggatggttaaaggccaatgctgacttcttgcagctgtattgttcttcattggcgattatctttagcggctttttttggctcgtgccaaacttctatatttcagcagtcgcggtgtccctgcaaggcttctttttaggcccactgttccctgtcattgttgtagtggtcacccagatgcttccagaatcgctacacgtgagctcaattgaattcgccacggcggtcggaggggctggagctgctttactgctattagcagttggtgcaatcgcacaacctagggagtgcagattctacagccattcatcattggcctctcaggtgggatgctagcattgtggctatgtgtttggcggatttcaaaagctgagggctgaggcg

SEQ ID NO: 19676 - DNA, 1157 bp, Emericella nidulans
acccgcctgcggcctctagtgagcacaacccctcctcgacgttcttgacgcagcaaaccagtcatttcatgaataaaaaagctaactattattttcataatagactctcactcttcccaagccgctcgtggagtttggtaatcgtcctatgattctgcaccaggttgagagcttagctgctgccggtgtcacggatattgtcctcgctgtcaactaccgcccagatgtcatggtttctgcgctcaagaaggtatccaaccctctttcagagcgggaattgttgcaaatgcttacaaattttgcggcgaatagtacgaagagcagtacaacgtaaagatcgagttctccgttgagaccgaacccctcggcaccgctggtccccttaaactggcagagagtattctcgctaaagacgactctccattcttcgtcctgaactcagatgtcatctgtgactatcctttccaacaattggccgagtttcacaagcgccacggcgatgaagggaccatcgtcgtcacaaaagtggatgagccatcaaaatatggtgtcgttgtgcacaagcccaaccacccctctcgcattgaccggttcgtcgagaagcccgtcgagttcgtcggtaaccgcatcaacgccggtatgtatatcctgaatccgagcgtgctgaagcgcattgagttgcgccccacctccattgagcaagagaccttccccgccatcgtgcgggacggccagcttcactcatttgacctcgagggattctggatggatgttggtcagcccaaggatttccttaccggaacctgtctttacctcacttccctcacaaagcgcaactcgaagctactcgccccaaactcggagccttatgtatatggtggaaacgtcatggtcgaccctactgcgaagattggaaagaactgccgcatcggccctaatgttgtcatcggaccgaacgtcgtgataggtgacggtgtccgtctgcagcggtgcgtactcatggagaacagcaaggtcaaggaccatgcctggatcaaatcaaccatcgtgggatggaacagctccgtcggccggtgggcccgtctggaaaatgtgacggttcttggtgacgatgtgacgattgccgacgaagtctacgtcaacggcggctcgatcct

SEQ ID NO: 19677 - DNA, 1158 bp, Emericella nidulans
cgctctcttggtcgggggaaaactaattgtcatagaaatccaccgttcaaaactggaggtacccaaagccatttgtttacacccctttgcatggcgtcggaggactggtgcttcccgccctgtgccgctcattaggcatcacggatttcacgacagtaaaggagcaggcggaaccagaccctgacttcccaacgttacccttcccaaatccggaggaaaacggagcgctagatcttgcagttgagacggctgaccgggaaggtaaatctcttatcattgctaacgatccagatgccgatcgatttgctgcagccgagaaagtcgagtacgtatatcttcgctatgccatggttgaggacgaactaacataagcagcggcaaatggtttttcttcactggtaatcatatgggagctcttttggcgtctcatctattcgattcgctcgagaatattgatactgacacgcgagttgctgttctgaattccgccgtttcctccacaatgcttgagaaaatggcaagggctaagaatatctactttgaagaatccctcacaggcttcaagtggatgggaaatacatctcgcaaactggaggagtcaggatactacgttacctttgcatttgaggaggctctcggttatatgttcccggaggtttgctacgacaaggacgggattacggcggctatgatcttcctctccgcccaagccagatgggccacgcaaggtctcaccccttacactaaactgcaacaattattcgccgaattcggacaccatgagacgcttaacaattacttccgctcgccgaatccagagacaagcatggcgctattcgacgcgattagagctggtcagttcagatcagaaatgaagctggggccgttcaaaatccttcgatggcgagatatgacagagggttatgattccggcacggaagacaagacaccccggcttcccgctgataagagcagtcagatgctgaccctgtggcttgatcgggacgtacggttcacaattcgcgcatcaggcaccgaagccaaggttaaatgtaagtttctcacggtggagcacacccaggggccagttctaacaacgcatctgcagtctacattgagagctgtggctcgtctaagcaacaagccatcgacgctgtc

SEQ ID NO: 19678 - DNA, 1159 bp, Emericella nidulans
cgaccttgcgttccctcaccacgataacgaattggcgcagagcgaggcgtactggcactctcatggtgaccagtgggtcaactacttcctgcacatgggtcacttgtcaatccaagggtctaaaatgtccaagtccctgaagaattttacaactatccgtgaggcacttgagaggaaggagtggactccgcgcagtctgagaatcgtatttcttcttggtggatggaaagatggtattgagattaccgacgagcttgtcagcgccggtaactcgtgggaagataagttgaacaacttcttcattagggtgaaagatcctgcagcccgtcaggggcccgcttcgagtacagacaccacccttgccgaagccttagaggcagccaagtcagccgtgcacgagcaactctgcgattcattcaacactcctggcatgatgaactcgatctctgagcttatcaccaaatacaacatcgctgataaatcgacgctgaacccgaaggacgtcgaggcagttgctcgctgggtaacttacatggtcaacgtgcttggtctcaacggccagacgcctgccgactcgcgtgagatcggatggagcggcattgacgttcctgaagaagccaagccgttcctgtatccgctttcggccatgcgtgatgctttgcgacagtctgcgcgacgcaaaacgcttaacgcgggtgagatctcgaagattgtcgaacaggaagccatcccagaggcaacaacagaaaagaccaagccctacgccaccgtagtgtctaatttccgcaccaaggtatcgtcactacaagactccggagacctcggaaaggaggttcttgcgctctgcgaccgcctccgagatgttgatctgttcgatcttggtgtctacctcgaggacagagagaaccttccagccatcgtccgccccgtaagccgcgatcttatccaagcgcgtgaggagaaggctgctcaggcactgcagaaacagcgtgagcgagaggcaaaagagaaggaggcactaaagaagctggagaaggggaagctgagccatctggaaatgttccggacgaacgagtatagcgcgtgggacgaggaaggtatcccgactcgcgatgcggcgggcgaggagattgctaagagtcgctcgaagaagctgcgc

SEQ ID NO: 19679 - DNA, 1161 bp, Emericella nidulans
tcctggtcactggcgggctcgggtttatcggaagtcacacaacattagagctgctgaaggccagctataacgtggttgtgatcgacaatctcagcaattctttccaaagtgtcttcgaccgcatcaagcacttggcgcagaagcaccatgacgagcgaggaactgaaatgccagctctgcatctggctgctcacgactaccgagacactgccgctctcaggcagcttctcgaccagtatcaggtcgattctagatggggcactcccaagtccaaaatttccggcgtgatccactttgctgcgtataaagcagtcgaggagagcataaaaaatccgttgaagtactatgcaaacaacgttagtggtctcattgactttgcctcgacactcggaaagtacggcatcaaaacattcatattttcctcatcggcaaccgtttatggcactttagccacttctggtcttccactcaaggaagagctctgcgcccacaaggatgaaatttaccacgacgcagatggagtcgctcaaaccatcagagcagggtctacgggaattaccaatccctatgggcgcaccaagtggatgtgcgaagccatactggcggatcttgcagcttctgatccggagtggacgattgttgcgctccggtatttcaacccaatcggctgcgacgagtcgggattgctcggtgaggatccgaaacagacccctacgaatcttttgccggtggtcgtaaaggtcatgaccggagagtacaatgaactctcaatgttcggcactgactgggagacggaagatggcaccgccgtacgtgacttcatccacgtaaccgacttagcccgagggcatatagctgctcttgacgctgccaacgaaagaaagttagctgagaacttccgcgccttcaacttgggaactgggcgcggacactcagtcaaggaggtagtggacgctatggaaagcgtgtcgcgcaaacaaatccctgttagagcagcccctcgtcgccctggggatgttggatcctgcgttgccgttgctaccagatcgcagcaggagctccgatggaagactgaaaaatcacttacggacgcatgtggaagtctgtgcaagttcttggaagttagcggtgttactttatgatgctgttaaaaactgagcc

SEQ ID NO: 19680 - DNA, 1163 bp, Emericella nidulans
tcgaccttctcccctccatccaaacttgcaacatcacaaaccttccggagaactactttctgaaatactacctttaccacgcccttacttggccgcagctcagttttgtggccgtcgtccgcccccgcaatgggtaccccgacggcaagatcgcaggcaattaccccaaagtcgtagggtatgtgcttgccaagatggaggaggagcctacggatggtgtgcagcatgggcatatcaccagtttgagcgttatgaggacacaccggcgactgggaattgcggagaggctgatgaggatgtcccgtacgtttactccttaccgcaggggggtggtgggtttgtaacgtttgttgctgacggtttggtttttagagagggcatggctgagtcgcaccgcgcgcaattcgtttctctgcatgtgcgtgtctccaataccgtgcgctgcacctctaccgcgatacactgggcttccaggtcgatagcgttgagagcaagtattatgctgatggggaggatcttacgcgatgcgcatggatctttcaaacatgtggcttgattgggcggagatcgagcggaaggaccgggagcccatgcggctgacgagaaggacgcggacgagggcgatgaggtgggggagctgggcaagaaagaggacgagaaggagaaggagaagatggtgagggtcaaggttggacggagtctaggggtcggtgacctggtggagaagaacgaagcgcagacagcgtcagtttaggatgtcgagtcgtagaggggcagatgattgcggctttatttagagctacgcagcgagagactacatgtaacgaagatcttcaagaggagatataacacgttgagacagtatataaagtaaccaaaataaatcgaacaccaaaacaccatattacactcgtgtcgatcattttactcattcggttcccttgctaggcttttgttccttccccttctccttggcaggttcaggttcttcctcagagttggcgctgggtgtcttgatcgaactaatcgcactactctcggagccggcatcggcatcggcgcgctgcgtaatatgtgctgagacagcgcgactttgcgaattactgcccagctcaagattctgcaaccgctgctccagattcgactcagaaagcggcgcaggc

SEQ ID NO: 19681 - DNA, 1164 bp, Emericella nidulans
gccacctacagcgccaaaatggttctggaggccatcagatataaagatggtaaactttccatcattgatcaactgcaactaccatttacggagcgttacattgagatcagaacgagcgaggaaggttggcaagccatcaagaatatgcaagtccgaggggcacctgctatagccattgtggctgccctttcgctcgcgtccgagcttcacgaacgtctcatacgaaataagatctcaaccacggcagaggacgtaacagctttcattagggaacggcttggacacttggtgagcagtcgaccgactgctgtcaatcttagcgatgcagcccggaagcttgaagttattgtctctgagagatcgcaaactccgggctcaacagcacaagacatcgtgaatgtattcattcaagctgctgagggtatgctggcaaaagacgtagaggacaatacaaggatcggcgaaaacggtgccaaatggatatcgatgaatgccttgcccacggaccatgaaaagccgttgttcttacgcactgtaacaccgggtagtttaaaccccaagaatgctgctggatgttgaatgctgatgtatatctagctctcttgcaacagctggctacggtactgtgctcggtgtgatacgttctctcatggccaacaatactttgcaacatgcatactgcactgaaacaagaccatacaaccagggctctagactgaccgcgttcgaacttgttcatgataaaatcccggcaacattaatcacagactccatggcggagctttattgtaaggccagagactcgtgtcaacgccatcgttgttggggcggacagggtggcagctaatggagatacagcaaataagatcggcacctacggtcttgcagtgcttgctagataccacggagtcaagtttctagttgctgccccactcacgacgattgatttggctacgaagtctggcggcgatattgtcatagaagaacgaccaccttcggaagtaacgagagttaaagggtcgcgggaagacgataccaccggcgatgtgagattggaaacaatcagcatcgcggctgaggggatcaatgtctggaaccctgctttcgatgttactccctctgaactcatcgacggaataatcacggagaagggcgtcgcagaaa

SEQ ID NO: 19682 - DNA, 1165 bp, Emericella nidulans
gcctcagggcctggctccaagtcttgtgtatgcacctcgtcttcctcaacacctggggcgtaagcaacggcttttccattttcaaccaactgtacaccaaaacccttccagaatccagttccaccatctcatggatcggaagcatccagatctcgctcctcttcttttttggtgtcttcgccggccgcgctacagacgcagggtacttcaggctcatgtacatggccggtgcgttcttccaagttttcgggttcttcatgctgtcattgtgcaaggactactggcagatcttcctcgcccagggcatctgcatgttaatcagcaacggtctcaccttcgggcccggactggctgtcacgtcgtcatacttctccagaaaccgcgggcttgcagtagggatcgccgcagccggcgcaacaacaggcgggatgatataccctgtcctaatacaccagttgcttgatattcacagcctcagctttggctggacagtacgaatagccgcctttgtgatgttgataacccagatttccggcttactattcttccatcctcgcctcccccctcggccctccggcccgttcctcgacagcgctgctttcaaagagaagccgtttgtcttcttcgcgctcagcatgttcctcaatctctggggtctctactttgcctttttctacatggggacatttgcgagagaccggctcgccgtacgcgatacacagaacttcatactcatccagaacggcgtaggcgtgctcggccggatcctcccaactcgcctcgccgacagagtcacaggaaaattcaacattcttatcccgctgaacttcactgctgccgttgttgtctatgcgtggatagccgtgcataccgttgccgggctgtacgtcttcacagtgatctacggcctagccggcggcgcagcacagtctcttttcccggcgacagcgacgacaatgataactgatgtacggaaaacggggacaagaattggcatgattcttagctttgtgggcatcgcgaccctgaccgggccggcgattgacggagcgctgattcaggcgatgcaaggagagtatacgggggcacaagtgttttcggggacttgtattgtgctgagagctgggtcagcgctggcagcaagagtggcgaagacggggtggaa

SEQ ID NO: 19683 - DNA, 1166 bp, Emericella nidulans
gcgggaccgcaccaatctgtacttaccgaccttgccttgtatatgcgcctctcaacgggtttatgctaacacctgtcctctcgcagttacatctcctaccgtcagtcatttacccatcaccccgcaaagaagccgcgatacctcggaacacccaatggcttctccgacgtagcgtcacaatctgaagaaagtcggcggcttatatctgaatccacggggattgacgacgatggcgatgcgatcattgagatggatgtgctcccgccacgctgggtcgatgtgcaggaggatgtgacggacttactcgcggacattgcacagaagtcggcccagctagataagctgcaccacaagcacctcttaccgggattctgcgatgaggaagtacgaaagcaagacgagcgtgttattgaacggtatacgcaagaaattacacgcggcttccatgagtgtcagaagcttgtcaagcgcatagaggttatggtacatgaagccaaacagcaagggggggtgagtagcggagatgaaaccatggccaagaacattcagatatcacttgcatcgagggtacaagaagccagtgctcagttcaggaagaaacaaagcaattatttaaagagtatgttgaccggtttgtcgctgctcctagacggccagtcagctaacgtatgtgtcattagagctacgaggtcttgaagatacggcctcacaattcgatcgttctactacgccaatgcagaatccgtatacagatccgtcattaatggagtccgatgccgataagtccttctcgcaaaccaccctgatgcagacgacacagcggatgaccggccaaaacgatgccgcaatcctacaacgagagcgggagatcaacgacattgccaaaggaatcatcgaactatctgatattttccgcgagctacaggcaatggtcatcgaccaaggtacaatgctggatcgcatagactacaatgtggagagaatgaacaccgatgttcaagcagcccagaaggaactcaatgtggtatgtctcacaaccctactggcgggcatacaatctatagaactcgaaaactaaacatctaactcaggcgactaactaccaacggcgtaccacaaagcgcaaaataattcttcttttgatccttctggtggtggggatgata

SEQ ID NO: 19684 - DNA, 1166 bp, Emericella nidulans
gtttggcgcccccatgaaagcgcacttcctcctcgatcctaattacaacaatctcaaccacggtctttcctctccttcaacgtcgcttacagcaattgctgacacaaccaggctctttcggcacctacccttcccaggtccttgaaaagcaacagtccatccagaaatctctcgaatctaggcccgacatcttcatccgttacattcagcccggccttatcgacacttctcgggccgccctcgcgcccctccttaacgtccccgtctcagacctcgttttggtcaaaaatgccacgacaggtgtcaacactgtcctgcacaatctcgcactgacccgtactctgactgcagatgacgttatcttctactttgacaccgtctacggcgccgtcgagcgcgccctctttgccctaaaggaatcctggggcgtcaagctgaggaaggttaagtatgttttcccccttgaagaggggggaatggtcaagaggtttagggaggcactgaagagcgtgagaaaagagggcttgacgccgaagctcgcggtctttgagacggttgtgtcaaacccaggcatcaggtttccctttgaagaaattacgagggcttgtaaggaagagggtgtgctgagtcttattgatggagcacatgcggttggtatgatcaagctggatctggccgcgttaggggtggacttcttcacgagtaattgtcataagtatgccctgtctctcccttttcattaccctagcgcaggcttgatggtttatgcttaggtggctctacactccgcgctcctgcgcagtcttatacgttcccgagcgcaaccagaagttcatccggacaagtctccctacgtcatgggggtatgtgccgccacaggttccaccttctgaatcaggcgaagacaaggatatccctccgtccacgctcccaaatactggaaaatccccgttcgtcgcgctctttgagttcacagggacaacggacgacagcgcgtatgcgtgtgtccctgcagcactcaacttcagagatgaggtctgcggtggcgaggagaggatctatgcttaccttgaacgactcgctggggaggcgggtgaactccttgcgtctgcattagggacggatgtgttgagggctgtgaaagatgcaagcggtgcagggaaagg

SEQ ID NO: 19685 - DNA, 1169 bp, Emericella nidulans
tggtggccgaaacagtgtcccttggtgttctgtcgctgcctgccgctgttgcaggtttgggttttgtcccgtatgtctcagattagtcccaaaactcctattggattacaaaatgatcacaagaaccgttcgctgattagactgtttacagagccatcattattctcgttgcgctgggtctttttgcgacatatacgggttacgtcattggacagttcaagaatcggtttccgcacgttacgaacatggcagacgccggtgaggtcgtggcagggaaatggggtcgcgagttcatgggcgttgcgcagatgctgttcttcgtcttcgtcatggcgagccatttgctgacgttcactgtcgctatgaataccctcactgagcacggcacgtgctcaattgtctttggcgttgtgggcatgatcgtctcgttcatcctgtgcttgcctcgcactctggagaagatgtcctggctctcgctagtctgtatgtgcatcgcctccttcaatcttatctccttactgaccttgtcgggacagcgttcatcagtatcttctcggccgtcatgatctgcatggttggcgtcggtatcagcaagccaggggtaaacaatactgcagctgtcgtcgacacggacctctaccacggcttcactgccgtgactaacattgtctttgctttttgtacgatctcaacatcctccattcaagaaaaggaagaaagctaatgatcctaaaggtggacacgctgcttttttcggtctcgctgctgaactcaaagatccccgcgacttccccaagggcctctgcctccttcaaggaattgacatctctctctacctcatcgcggccgtcgtgatctaccgctacggtggcgcagacgttacctcgcccgctctgggatccgcaagtccaatcgtcagcaaagttgcctatggcattgccctccctaccgtatgaccctcggcatcccacatgtcccgattacatcaagactaacaactttcagatcctcattgcaggtgtcatttacggccatgttgccgccaaatacatctatatccgcatcttccgcggcacagaccgcatgcacaagccggacgccgtcgccatcggctcgtgggttgtcattgctctttgcctctggattctagcctggatcattgccgaggc

SEQ ID NO: 19686 - DNA, 1169 bp, Emericella nidulans
cgaccttgcgttccctcaccacgataacgaattggcgcagagcgaggcgtactggcactctcatggtgaccagtgggtcaactacttcctgcacatgggtcacttgtcaatccaagggtctaaaatgtccaagtccctgaagaattttacaactatccgtgaggcacttgagaggaaggagtggactccgcgcagtctgagaatcgtatttcttcttggtggatggaaagatggtattgagattaccgacgagcttgtcagcgccggtaactcgtgggaagataagttgaacaacttcttcattagggtgaaagatcctgcagcccgtcaggggcccgcttcgagtacagacaccacccttgccgaagccttagaggcagccaagtcagccgtgcacgagcaactctgcgattcattcaacactcctggcatgatgaactcgatctctgagcttatcaccaaatacaacatcgctgataaatcgacgctgaacccgaaggacgtcgaggcagttgctcgctgggtaacttacatggtcaacgtgcttggtctcaacggccagacgcctgccgactcgcgtgagatcggatggagcggcattgacgttcctgaagaagccaagccgttcctgtatccgctttcggccatgcgtgatgctttgcgacagtctgcgcgacgcaaaacgcttaacgcgggtgagatctcgaagattgtcgaacaggaagccatcccagaggcaacaacagaaaagaccaagccctacgccaccgtagtgtctaatttccgcaccaaggtatcgtcactacaagactccggagacctcggaaaggaggttcttgcgctctgcgaccgcctccgagatgttgatctgttcgatcttggtgtctacctcgaggacagagagaaccttccagccatcgtccgccccgtaagccgcgatcttatccaagcgcgtgaggagaaggctgctcaggcactgcagaaacagcgtgagcgagaggcaaaagagaaggaggcactaaagaagctggagaaggggaagctgagccatctggaaatgttccggacgaacgagtatagcgcgtgggacgaggaaggtatcccgactcgcgatgcggcgggcgaggagattgctaagagtcgctcgaagaagctgcgcaaggactggg

SEQ ID NO: 19687 - DNA, 1169 bp, Emericella nidulans
tccggaattggttccttgcatcaccccccatagaatatgcgatatccaagctgcgagacctgctggttggagcgatcaaacaggggccagttccacaacatatcgcattcataatggatgggaatcggagatttgcccgatctcacggtatcgaaaccgtggagggccataatctgggatttgaggcgctggcacgggtgagtctcatgccatgtctagacaccacctgtctatttcgcagccgctttactgtcttctttcaagtagctgtgcagtaactaattctttttgctgtgtagatccttgaggtgtgctacaggagcggagtacaagtcgtcacgatctacgcgttcagtattgagaatttcaaacggtccaagtttgaggtggatgctttgatggagatggcaagggtcaaattgtcgcagatggcccaacatggagagatcttggatcggtatggagcgaaagtacggatactaggtcgattggacttgctccgccccgacgtgcttgccgcggttaaccgcgcagtcgacatgacgaagaataatggtgaccgtgttctgaacatttgctttccttatacgtcgcgcgacgagatcactggcgccatccgcgaaacggtagccgagtacagcaagcctatccgaacggctcactcgtcgtccacaattccgcgcacaccgttctctgaagaccatatcacacagaacattcggtcccaaacattgaatgggaagttggaaaacttgagtaatgaatccgattctgtatcagaatcatccacacttggtgaagatgatgcgcaaaaaccaaacgacaagaacaaggtctaccagtctgaatccgctctctcatctggcgccactctcctcttacccgaccagcttacgaaaggtcggacgacgaattcttctgattccgagcccccagttttcaaatcgccagaaaccattacacgacaaaccttggcagatcatatgctcacccgcgacaaccctcccctcgatctgctgatccgcacgtcaggggtggaacgtctcagcgacttcatgctgtggcaatgtcatgaaaacacggagattgccttcttggatatcctatggcccgagttcgacctatggcatttcttgccagtgttattgaggtggcagcggatggtctcc

SEQ ID NO: 19688 - DNA, 1171 bp, Emericella nidulans
tgctgagtgggagattgactgtgcgagaacccatcccattcgaatacttgctgccctgtagtcaactgacaagcttgtagacctgaaatacgacgactgcggggtcccagataactggaaagacccatacactttctgcgtccccgacacagccaacaacgccgggccttttccgaacggcacttgtcccagcctacccaatcccgcaccggcaaactacaactggagcacatcccccagcgccgaacgctttcgccgcatgcttgatgccctcaatacccaggaccgaacaattctctactccctctgcaactggggcaacgcagcagtgaacacctggggcgctgagattgggaactcatggcgcatgagcggggatatctctccggggcgcggggaagtagggcccgacagaaccaggattgcagtctgggagagaattgcggagattacgaatgagatgagttttcttgttagagagtatgcggagttttggggatggcctgatgcagatatgcttgaggtggggaacggcgaaggggggatgacggtggcggagaacagagcgcattttgcgctttgggcggcgatgaggagcccccttctgattgggacgaaagtgagtctatatattcttactatttctacttttctgttcaggcttggctttgttcggcttgtggcttgttacgaccgtcttgggatggcttgccctaacttcgtcatgtctggacgtcccagttcaatgcaccgaatgattcaataagcgctaggagatgctaatcgcatatagcttgatacaatcagacaagagcacctgaaaattcttaagaaccctactctcctaacattccatcaagaccccatcatcaaccgcccggcttacccctacaaatggggttacaatgcagactacactttcgacgccgcccatccagcagaatactggtctggaccctcgcctgcgctagaaggcacgttggtcgtcatgctcaactccgagaatgtcacgagcacgcgcatggctgtttggagcgaggtcccggagttacagaatcaagaccaaggagatgcgttcgaggtcatggatgggtggacaggcgaggatcttggttgcattaaagagaagtatgaggtcgagcttgacgcgcacgatgcggcggtcttggtt

SEQ ID NO: 19689 - DNA, 1175 bp, Emericella nidulans
ctttcttcgtctgctcagagcatcatctcacaaaatcagtctttgtcaaatacctcgaccaaaccaatatcagcaatgcgtatgtcagtggccttaaaggagatttccggctttaaggggatgaactgaattactccaatgtctgctattacactgcgtatgtggtgttccaggtgccagggttgctcctactatcaagacccaagctgtacggcctgttttcgaccttttgagtgttgggactattttgaccatggattgtagagcgcgctggcttcttcccactcttgagatcctctggggaagttgcaccttcgcccagagccgcgtcagaaacgtgcatcagctctatgccttgcggtttctggtaggcatgttcgaagccccagtcttcgcagaaacgcacttcatcttgggtaagttccaactctggtcattactggatacaagtttgacaggacaaatcaggctcttggtactccggctccgacctattcaatcgcgccgggacctggttcatctgcaatccacttagccatttaataagcgggtatctccaagcagccgcatacacgaatctctcgggagttgggggaatgccagggtggaggtggctctttatcatcgacggaattttcaccattcctgtggcactgatcgggtttcttgtttttcctggcgtacctgactctccagcgcctttcttcctgacgaagcgagatatcgagattgcgaaggattggctgagcagagcgaagattcggcgaccggggagtttggggcccgacgtgttcaaaaggaccgcgaagcgctggcatatttatatcttcttgttctcctacgcgtacgtcttcgccaaagataccaataaaggaagataagattggacattagctaacaagaatagttgcatgatcctttcatcctacccaagcagctacatgaatctctggttgaaggatgaagggtactctgttacgaaaatcaaccagtatcccaccatcatccaaacaatcacgattgtctcctcgtggctcggaacgactctggcttcaatctatccttcgtggattatctacaccatcatctcgacgttttcgttgttttcgaccctctgcatgtgcatctgctgcatcccgacaggcttgaagtatgttccgctttcctgcctgtca

SEQ ID NO: 19690 - DNA, 1176 bp, Emericella nidulans
ggcgtctgccagttgcatgggatctttcgcttttgcatttgatactggcgttatcagtatgtatcaatgtctggctgtgggaagttgtggctaacttatgactaggcggtgtcctcactctcgaatcgttccagagggactttcggtatactgaatcgcagaagacaaccgtcaattctaatgccgtctcaattctgcaggctggtgcgtttttcggctgtttcctcaccacgccagttgcatcgcgctttggccgtcgatcaggcttgatcatcagttctctggtcttcaccgttggaacaatcttgcaaatcatcaacgcgcatactctggcgacgttctacacaggtagagtaattgccggcgtcgggatcggcgcggcaactgtgttgattccgatgtactccgctgagatggccccgaaagagatccgcgggcgactcggtgcttgtttccagttattcttcgctttgggtgtaatgatcgcctactgggtcaccttcgccgtttcagagacccagccaccgaagcccaagcaatggcagatagcgctcggtctgcagctactgccatccactctgttgctgatcggaatggtcactgtcaaggaaagtgcccgctggctggcggtcaagggccggaacgaagaagcgtgggagtctctgaaatgggttcgaggtggagaggacacgccggagctgcagcaggaattcgatgaaattctcgcaggcattgcagaagaagcccgcgtcaaagaaaactttacttggcgtgaactccttctgcccgcgaatcggtaccgaatcttcattgccattacgattcagctctgtgcccagttgtccggtaatacttccttggcatactatgcgacccagatattctcggccgtcggcgcggggagctccgccaaactggtgactggcttctttggcgtggtcaaggtcgtaggtgtcagcatcttccaattgtttgtcattgacaagattggacgaagggtgccattcatggctggggctttcgcaatgggttcgttcatgcttattatcgcgtgcgtgcttgcaactcatcccacgagctcggatggggccgactcgggagcaacgccggccggtattgcaatgatcattatggtgtacgccgaagcctttagcttcaatatgtcctggggcgcgc

SEQ ID NO: 19691 - DNA, 1178 bp, Emericella nidulans
cggacaagcttccccctccccttctggcccttttccaaccccggccgcccttgcgctgggttacgcccatcgatcgtgcgcccgacgacatcaagaagagcaaactttctggcgtcgcccagttcttacccgaagtgaagaagacggccgaggagaccgaatacaacccggcagaaacatggctgcagcgcaaattgcgccaaaaggcggagaagaaagagcaattgcataagcatctcactgagggtcttgcagcttgtatgatattgaaggctaaatgaatatcaatcaattacatgctaatacttgggagtagatgacccaaattctgatccccaagcacgtggggatccattcaagacgctcttcgtctctcgtttaagctatgaagctactgaacaagatctggagcgggagtttggacgattcggtcccattgaacgagtaacgaaaccaatgcccttctcctggttcgcctgagctgacagtagctagatccgcattgttaaagataccgttacccccaaaggcgcgaagaagccccaccgaggatacgcatttatcgtctatgagcgcgagaaggatatgaaaggtaatgatatataatgcttccgtttgtcttacttgtactgatatagatctcattcataaattagcggcctacaaggaaacagatggtatcagaatcaaagaccgacgcgtcttggttgatgttgaacgtggtcggacagtcaagggctggaagccccgtcggtttggtggtggcctagggggccgaggttacacaaaagcattaccttcacgtcctattggccctggaggctttggtccaccatctggtccaggtggttatggcggcggattccgtggtggtttcagaggaggttccagaggagggtttcgtaatgaccgtggctttgggcctcgcggcggcattgggtatcaaggtggccgtagcggattcggtggccaggcgccgccaaacgctccgtcaggaccaggaggtgggcgcagtggaggttatggtggccgttcggatcgtggtggaactgggagcaatcgtgaacctattaggcctcgggatagctacggtgatcgtgacaggcgtgaccgagaccgcgatggcgaccgtcgagaccgtgatagagacagctatcggtaccgcgaccgtgatcgcg

SEQ ID NO: 19692 - DNA, 1178 bp, Emericella nidulans
gtcaagcgcccctggctgaagcgctggatgatgccaattgccaattggtacaccgatgccgcgggctacaggaagctcggtctaaagtacgcactccttttctggtaacccaggacaagcgctggtgacaattgatgtgggagcataatttgcactgctcagctattttgctgggtttgctgcgatagcgtcatcgcctcttgtttggggccaccaaagctctcattaagtcaatccagcatcaggttaacatggaaacagggccgatgacttgattcctgaggaaagcgataccgtccaaaccgctctcaagcgtcttcctcccaaggaagcttacgaccgcatcttccgtatccgcagggccttccaggtcggtttgattgtatgataagcatgaaagggatatttgctgaaccgaatggctgttaatagtgctctgtctctcacactcttcttcctccagaggagcacatcaagcccaacgaggtgagtcaatttgagcttctttcagtcgcaagcgctttctcagtctccgcatccttttgaccaatcccgtacgccggatttgtcaacaaatcgataccccggatatgccgtctactgaacgatagagccttctaaagagcggtttgttaaagatgacatactgattgcggcgctaggatgtcgagtacctcagccccatcatccgcgagatcgagaaggagaacgccgagcgtgccgaccttgacaaccttgtcgtcaaccgaaagaaataaatagctttttgtaaattacaaagctacaaaccctccccaaggatatagacgtgtggaataagacgatacaagacctgttctttcgggcttatgctccgtcgattggagcatctgccatttgcttgagcctttggagttatgtcgtgcaaaccacgtgtactgatactgtaaaaatctattttgttactgcttgatatcgaggtagtatttatgcgctgcgagtattggtgacctagagcccagctcactaggtgtcgggttatatacacttaagatatctatgcctgtttctaaaaatcctgagatgatataagcgtggtccctgccttgcttgcaaacagagaccacaacaggtgtatgagctactcgctctagccgctcagcacagtgacatcgacttcttctacacgccacatgtac

SEQ ID NO: 19693 - DNA, 1178 bp, Emericella nidulans
gactgggttagccgggcctcatacttcttcaacaacagcgcgctcatgcagggggtctcgacgctgttctgggtgccgcttctcaacaagtatggtcgacggccgatctacatcggctcgttcattctgtatttcttcatgatccttggagcaggactcgcaaagacctatgcgggcgagatcaccacgcggaccgtcttgggtatcggggcgggtgcaggcgagtgtctggccccagtcactatctctgacgtgttctatctgcatcagcgaggttacggcatggcgtaagtgcttggtagaaagaaaggcagaagaaagagaaatttctgactggtactggtaggatttacaacgccgccctgagtgcgggtgttgcctttggcatcatcatcgcaggtctcgtcaccatcaaccacgactggagggccatttatttcgtcggctgtgcctcgttggagcgctcaccctcgttacattcctcttcttcccagagaccgcctacaggcgcgtcggcaatccactggttgaacagtctctggacctccaaaaacagtcagatcctcacagcgccagcttagaatgcgcctccgtcccacggattccgcccaagaagacttacctccacaatctacggctctggtcgggtgaaacgtacacggaggagtccttttggcggatgttcatccgtccgtttggactcatcctcgtcccgcctgtcttctgggcgaccatcgtcatgtcagtgaccattggattcctagtggctgtggtctcaaactttgccacggcattcagcaccacctacggctttgaagcgtggcagtctggcctctgtttcatatccggcatgttgggctgcttcttagggacctttgccggcggtcccttctcggactgggtggcagactacttcaccagacggaacgggggcattcgcgaacctgaaatgcggttgccggcgattatccccagtgttattgctgcgccgctatctcttgttctgtacggctgcggcatcgccaatgcgtggcattggatggtgcctaccgtcggcctaggcttatgtacgttgaccgtgcctctgtttcgtcattcttagactctactaacagcgattatagtatcctttgccatcacccaaggaaccaacgtctccttcgtctactgtattgact

SEQ ID NO: 19694 - DNA, 1178 bp, Emericella nidulans; identical to SEQ ID NO: 19693

SEQ ID NO: 19695 - DNA, 1179 bp, Emericella nidulans
cgccaacaaccggcgatcagcgataactactgacagggcgcagatcggccataaacatggctctcaagcgtctgaagaaatatgccgcgcgatagcattctatgcaaagatgttcgcgaagcatagcaatcttgactggcctcaggtacaggaactagctcgggatttcgatgggttgatcaagcatcggtggccgcggtattatgaagagctgaaaggtttctacaaccgctcttagtctccaacaaggtagatagacgctaactggaacagggattgcggatggtgcgaagacagaccttattgacatcattgcgctcaacgtgcggacggaaatcgtcttcgggcggttcagtgatgggtgcacaagtctctattaccagaatagcgagcattcgttccagggccagaactgggatgtacgttcaacgtcccacggcttctacggtctgcatagaactgacagtggtagtgggataccgaacaagccgttaacctaatccagctcaccgttatccagcaagatctcccgaccatcaagatgatcactgaggccgggatcatagggaaaattggtctgaattctaccggtgtgggtgtttgtttcaacgcgatccgtgcaaagggcctggataagacccggatcccagtacatttgggactccgcatcgcgcttgagagctcctccgcactgcaagctgtggagaaccttgagaagattggaatggctagctccgcgcacattctaatcggcgatgcaacgaccgcgatcggactcgagttcactcgtctacgttcgcccggatccccgtgaatcagaaagggtttattgtccactcgaaccacatgcttcttcctcattctggtatcgacgagccggcgtggttggaagattcgccggtgcgagttcaaacaatgagtgagaatattgagaagcttcaaggaacgctcagctgggcatcgttcggcgggctgttcaaggatgagtcgaactacccgtgctcgataaaccgtgctgccggtggaggaagcgatctagcgacattgttcaatatcattatggacttgcggacgaagagggtggaggtcatcatgggaaggccgtcggacgcggctgcggagagggtcatccttgcatttgagtagttgtcgagggtaatcgtgttgtatatacatata

SEQ ID NO: 19696 - DNA, 1180 bp, Emericella nidulans
cgcaaagacgatggcccaaagctgtctgtgctatatacaccggcgatctgaatgtcacgaaagcagctatgctggaaagggtccaggtatgtccccggcggtattgtctatatccttttctgacatatataagacccgtttcaacattcgactgcacgcgccaacagtggagttgctctacttaacaacccggaaatatgtccagagcagcatgtatccctacatgacgcttctaggccagtccctcggctcactaattgtgggctacgacgccttcacgcttctcgtgcccgacgtctttgtcgacaccatggctacgcattcgctgtggcattctgcaagcttctctttccctcagttccaacaggtgcctacgtgcactaccccaccatctccaccgacatgcttcagtctctcgacgacaaaactggcctgaagggcgtcaacgccggcgcgggaacaggacttaaaggcacccttaagcgcaagtactggctcgccttcgcccacctttacggctggattggcggccatattgacgtcgtcatgtgcaactcctcctggacatcagcacatatccgctctatttggggcccatcccgacacacgcccttcctatcatcgaaaaccctcaaatacaaagatcccgtcgtcgtctttccaccgaccgccgtctcagacatccaatccactattccagtgacacctgaaacagaaacaacccgcacccctacacttctctacatcgcccagtttcggccggaaaagaatcaccctctcatcctgcgttcctttgcccgctttcttgaacgccacaagaaaaccaaggactcttcgaccaaggactcttcgaccaagaaacaaaagccagagccccagctcatcctcatcgggaccgtccgcccctctagcccagatgaaacccatatctacaacctccgcctcctcgcgcacgaactccggatccgcaacaacaccaccttcctctgcgatgcctcctggcccacgatcctttcgcatcttggcacagcttccatcggcgtaaatgccatgtggaacgaacatttcggtatttgcgtcgtcgagtaccaagccgccggcttgattgccgttgtccatgactcgggcggtccacgcgaggatattgtgatcgatcttcctgaatccgagtctggtgctg

SEQ ID NO: 19697 - DNA, 1182 bp, Emericella nidulans
agcagttcatcgtttgtatctcgggttattatccatgaggcaacgacgaagcgcttaaatgaccgagatccagaaggactgttcgcgtttgcgaacatcaatcgcgcgtttcaatggctggacctcagttcaaagcataaagacgaaccattgtcgaagattcttttcaccaaggcacatatgataagccacgatgtcaatgaaataaccaaaagctcggcgcatattgatgtgatcatgggatcatcggccggagacatcttttggtatgagcccatatctcagaagtacgcgcggatcaacaagaacggaattatcaatagttctccagtaacacatattaaatggatcccgggttcagaaaacttcttcatagcggctcatgaaaatgggcagttagtggtgtacgacaaggagaaggaagatgctctttttatcccagaactgcccgaacaatcagcagaatctgtgaaaccatctcgctggtcactgcaggtattgaaatcagtcaactctaaaaaccagaaggccaatccggtcgcggtctggaggttagccaaccagaagataactcaatttgctttttccccggaccacagacatctagctgtagtcttggaagatgggacgttacggctgatggactatcttcaggaagagtaatctaccctgtgctacggtttatagcagaagctaatagaacatacagagtcttggatgttttccgaagttactatggcgggtttacttgcgtttgttggtctccagacggaaagtatattgtcactggtggccaagatgacttggtaacaatatggtctctaccggagcgcaagatcattgcacggtgtcaaggccacgactcgtgggtttctgccgtcgcgtttgacccctggcgatgtgatgagcggacatacagaattggcagcgtcggtgatgattgtaacctactgctttgggactttagcgtgggtatgctgcaccgcccaaaagtggtatgtcaccagagttgcagcctccggaacgaagttggttatctaacttcaccatttgatatagcatcatcaaaccagcgctcgccatcgaacaagcctaattgcgccaagctcacaacaaccaaaccgccatagagctgatagctcgggaaaccgaatgaggtcggattctcagcgaaccgccgcg

SEQ ID NO: 19698 - DNA, 1185 bp, Emericella nidulans
tttgggctccaagccctccctttccttctatccctccttttcgcggtctttgcctcagcggagcatacgtccaactgggctgtcctcgtcgcaacctctcgcttttggtttaactaccgccatctagcaaatgtcctctctctctatcgaaccgtgaagcggttgggtatccctgattcccagataatcctcatgcttccggatgacatggcctgcaaccctcgaaatgcctttcccggaacggtttacagtaacgcggaccgtgcggtggatttatacggtgataatatcgaggtagattatcgcggatatgaggttacagtggagaatttcattcgtctgttgactgatcgtttggacgaagacgttcctcgcagcaaacgcctgggatcagacgccgggagcaacgtgctcgtttatatgaccggccatgggggcgatcaatttctcaagtttcaggacgccgaggagattggcgcctgggatctggcggatgcgttcggtcagatgtgggaaaagaagcgctaccatgagctgctattcatgatcgacacttgccaggcgaacacgatgtacactcatttttactcgcccaatatcattgcgacagggtccagcgagctcgaccagtcgtcttactctcaccatgctgataatgatgtgggtgttgcggtgattgaccgttggacctattacgtgctcgagttcctcgagaatcgggtgacgagcctggattcgaagcaaacgctcggcgacctatttgactcgtatgatgaaacgaagattcactcgaaccccggggtgcgatgggacctgttccctggcggtgagcaggagggccgtcttcggactgtggtggactttttcgggaacgtccagagcgtcgaaattgagaaggctgatgccgatgagccgggttcgttgaaggaggaccttatcgagattgcgcagcttgtcgagaagtggcgaacattttcccaggactatgctgtcgccaacagtacgtcccagcaggaagaaacaagaagtgcgcctgcatatgaagtgaagaaaaggaacgtcggtcctgcgagattgaccgatgagactccttgggaaaagcgcttgatcgggctgtcaatcctaggagcgtgtgctgccgtctggttcaccggttctaccttaggcaagaccatggcctgatcc

SEQ ID NO: 19699 - DNA, 1186 bp, Emericella nidulans
cctctggcgaccacctgcactgtcttttattactttgttcatcagtctactcaatatttctaccatggatttctctgagtacaccggccccagcgacgagtgggttgcccttgagcgcgatctgcccgctgacgtccctgatctcgaccccaaccagctcaaggacgccgtcaacaaaacccgcgaggagggcgcagcccgtgagctgatcgagcagggtgagctcttgtacactcggacggtagacgtaattaacacacgtaggcctctcttccaaggtaacactgcgcgaccacaccatccccacccgcgacggctacagcctggaggcacgcagctacaggcccgcaaatgtaagcccgtctgagcctctgcctatctacattcacctgcatggaggcggttttttgttcggcacgctctcatccgaggatgcaacctgcgcgcggattgtcgcctcactccacgagcaaaacacgcccgtcgtcgtcgtgaacgtcaactaccgccacaccccagaacacatttacccgactgcctggaacgacactgaagacgcctttcactggattcacgaccacctttcagaaatcggtggcgatggagagcgcctcgtcatgggcggtatctccgccggcgcatggctgactgcatcgacgacgatcgctcaggcaacaggcagaaacaaagaccttgcgcaacgccctaagatcaaaggacaggttcttatgattcctccgctggcacattataactgctatgacccgcagctggcgcagatccgggaccccagcgtgtcgagctacgtggaaaaccgcgatgcgccggttctgccattcaagagaatggagctctttacgtcattgctcaaggttaccggcgggaaggaggttgagaaggatctgaggctcaacccagggaatgcgagcaaggaagatgtcaagggactgccgccatcgacgttcggggtcgctgggatggatgtcctcagggatgaggggctgttatatgcgaagctgctcgctgagaatgggtatgtctctttccctgtctaataacctgtgctgataatttgttatgcagggttcctacacaaacgaatgtcttcaagggtgtcccgcatggctttagacggtatggagatcggctgtcggtgtgcaagaagtgggacgaggtcatggcaggg

SEQ ID NO: 19700 - DNA, 1186 bp, Emericella nidulans
ttccccgagtgctactactacttctttcagcaagtctgtaggcggttggatctattacatggtgggcgacctccgcgacaagaagaaggaagagaagacgcttgcagaagaacagccggaatggttggcgaattcgacagtcgctggggcagctactgcagggtttgctgggccgtcatcgttaggaagtactgggggcttcctcactgaggctgttgtacgggaaacgttacaaggctttggtcttcataatatgagtcctgaagatgcatgggacttcttaaaagcaaaactgttggtgattttcgacggcgaagatgttcgcattgcaattgaggatctgaacaaactagtgatcatccatattcagcgctgcgtgcagaggcgtacgccgacagctatagtcgacgatctacgcgggctgctggaagctggctttgccaccttgaaccataccctcaacggcgtaccggatgataagctggtgccccatctcgtgcagatctggatgctagtatttggcaccattctccctttcattcaagccgtcttcctacccctagatcttgaattcaaaggctgtggctccgtcatgaacatacgagaagcaaagaacttctggagcctcgcgctagatggggaatatcccggttgcgagctcgaagtccgcaacctcgttcttatcgccttccgcgacatggtcatcatcaaccgctacgataacctcaaagccaccttctcccgcttgagccttgacagcatcaagctcggcaactccgcccttagcgtaacaacgaaaagcagtaataatagcaataacggccgccctacgacctccgcatccttcgacggcgggtttggcagttacagttcccaatcatccaccttcctaaatacagccggcagcttttcttcggaatccccaggatacaaccgcagtcgtgctacctccaacacctcctcaaaccccgaccaactcatcttccaatccttctcttccccttctcaacggcccacgattatccaccgcgcaaacaacgcatcagatacatctcacgtcatcaccgagacagtcggccgcatgctccagtgcatgagtgtcctcgcaagtgtgcagaccaacgatactgcgcaggaacgaattgagacactcagcaaagatctcaagcataactggttgggacgc

SEQ ID NO: 19701 - DNA, 1186 bp, Emericella nidulans
atcccatcgacaagctaaggactaacaaagataggaatgggcggcctcacgtcggccctcgctctcgcggaaaaggggttcaagcacatcgacatctacgagacagcttcagatctgggctttgtaggcgccggcatccagctcgcaccgaatatggctcgggtgctggacaagctcggtgtctggaaggcaatcgaggccgaagcagtaaacatcgaggaaacgagtgtgagaggtgcgtcgtctgcttctatatttactgcgattttatgaagagatgcggcttggtgtgagggctaactgaagcgacagtcggcgcatcaaactccgaactcgcccatgtcgatctgcactatattgagccgacgtatggctacaaacatatggttggacaccggtactccctcgcaaacggcctgtaccagggctgccttaagcacagcgacaagatcactttccactttggcacgtccgtgactgaggtgcactcttttgggcgcggaacgcagccaaagccctcattcaccgtaacgccacgggactcttcgaaacagccctataccgtgcacgcagacattcttctcggcgcggatggaatcaaatccgtgacgcgcgtcgcgatgctcaacgacctcgccatctcacccgtccccgcggtaaaagacacaaaccaggccgcgtaccggatcatgattcacaaggatcagattgagtctgaccccaacgcagatccagagctgaaagcgttgctggccagcaataaggttgtgcggtggattggcgagaagagacatatcattgcttacccggtctctaacaacacaatttacaatctgagcaccacgcagccggatacaaatttcgcggctgccacgaatgccacctacacgacgaagggttcgaagagtgcgatgttgggcgtgttcgcggatttctgtccgcttgttcagcgcatgctgaattatgttcctgagggggaggtttgtgagtggaagctgcgcacacatgaacctttgccgacctgggtggacgggtgtacggcgctggtgggtgatgcttgtcatccgacgctgccgcatctggcgcaggcgcgggcccaagcgattgaggatggggctgtgctggctgttgtgctgagcaagctaccgagtacagatacagagagcatcaacaaggcattaaaggt

SEQ ID NO: 19702 - DNA, 1187 bp, Emericella nidulans
tcggggcactgggctcaagagcgccagttcgaaatcagttccatgccggtcacggacattatcgaaatggttgcagggcttctgaccaagattaccactaccaacgattctcatcatgagcaggtccatcggcaaatcccttctgtcgatgggtcgagcaatttgagccaacaagcgcacagcgtgcttgcatttcacggcaaaaacgttccgagtattagtatcctgagctatctcaccaggattcacaagtattgccccacgacctatgaagtctttctcagtctactagtgtacttcgatcgcatgaccgagatggtcaataaaggtcaattagaccgtttacgcggtcgctacaatcgtacagatgccttacaatctgacgtcgcattcagacctagatcttcggagtcgtctatcacacagaggtctcatacctcaccaatggtgactccgccgccctctgctgggattacagcacaagactcggcatcgacgtcacctgtttccccggccatgaatccgctgcaaggagaggactatctctcacacttttttgttgtcgacagcttcaatattcaccgactagttattgctggcgtaacttgcgctagtaaattcttctctgatgtattctacaccaattctcgatacgctaaggtagttctttccctatgctcgttcttgttctttagctaactttcgcatcaggtcggaggccttcctctagctgagctgaaccacctcgagcttcaatttctgctcttaaatgacttccgcctctcaataccggtcgaagaactggaagcatacgggaccatgcttgtggagttctatgcgcgggaaattgtagctcagcagcagcagcagcaacaacaacaacaacaacaacaacaacactcacagtctcaggcaggaccaatggcacgggagtcagaatcggacgcgatgtacatgcggcgccagcccgcacacccggaagtccgtcaaaccagcacaccaccttgaaatatcattaagacataattagacgacgtatctatagcccgcgaggctcccctatatccgcaccgcgtacgcctacatcgccaggcactgatcctgcacccaactcgtcaatcttaaagatctggcccagcaacacgaataccattgccagtaaccctgttatctggtcttggtcttgg

SEQ ID NO: 19703 - DNA, 1187 bp, Emericella nidulans
taacaatcaacacgttaggatgcttttgctttagccaaacggaatcctcccagcggtcacagttcagagcccaatctcattaacgggtcagttccgtatagaaccatagatccctgtctgaggttctactctggtcccttcgtatcccagccaaaccgtaagcgctagagcaggaaaggcaagcaagcgacggagccccctcaagccacttgtaagatgggtgacctttcagcgcaggtcaacaaatccatcattcacactgtatcttctatcttgaacaacgatagatgaaatggcacagaaccctataactcaccacatcccctacaaccccgccaacgtccaaatcgtctctgaacgcccccagaagcgcatcgagatcgtcgagccggaccccgcctggcccgctgcttttgccgtcatcgaggcacgcatcaaagctgctctacctcaaggcaaccttctctatatccaacacgtcgggagcaccagtgttcccaacctccctgcaaaggctgtcattgatgtggatgtggttgttgtcgatcctacagcggaagaatcctacgtccccgctctcgaaaatgcagggtttcagtttctcctccgcgagcccaagtggcatgagcaccggctgtttggatgcgacgagccttatgccaatatccatgtttttgcgcctgacagtcctgagcttgtgaggcataggctctttcgagattggctaagggatccaacgcatgaagccgatagggaattgtacgccggcgtgaaacgacaggcagcagtagagagccgggaggcaggggagacggtcatgcaatataatgatcgaaaggagcctgtcattcgagggatcttgaggaaggtgtatgaggcgcatggattgctgggggataaccccgcggatatataaactgaaacgcatatcaggcatatccgtaaactaaatatgagcgcctcttaaaacccattatggagagacggtcagagccaataggcaactgcgctatggaaaatagtctactagcatttttttcagtctcggtaagactctgccagttgtagaaagctgatgctggtcagacgtggtatggagttgacagtcagagctggctgttcgtctacctaggcttccccctggaacaaggcgaagaaacagactataaccagggcccagtcgtcga

SEQ ID NO: 19704 - DNA, 1188 bp, Emericella nidulans
attgcggcactgcagcctccatccctcaaggccatcgccccctgggaaggctgtggcgacctttaccgcgagcagtttgcgcgtggtggcatctacgggggcgacttgtttgaccggctgatcgtcaagtacatgctgcgcggtcgaaacggcatggagagttttcgccagatgtaccagcaacacccgctcgcttgcgcctggtggaacgataagaggcccgatatgaagaagattacgatccctacatacattactggtacctggacgaacactatgcacgggatgggcgcgattcgaggctggctggaggtgcagtcgaagcataaatggctgcgctggcatccctaccaggagtggttcgatctgtgggggaatccagaggccaacaaggagcttctgagcttcttcgaccggtatctgaaggggatcgagaatggctgggaggctacaccacgcgtacgcatggcagtgctgaagtacggcgagagcagtccattggctggcatcgtcgagccggacttccctctgccacggaccgtctatcgaaaagcgtatctgaacgcagacggcagattgctcctagacagcccctcgtctgcctccggtacagtgtcctataattccgaagagccctcgtcgatggccaagtttacctacaccttcccagaacgcacgcagctggtcggtatccccaaggccgtgctttacatgaattgcgacgagcatgacgacatggacgtttttctcgtcctgagcaaactgtctgtgtcaggtgagctgatgttcaacctcaatatcccgtggaaggggctcccagtctcatcgattgccgaaatcccgaccgacaaacgtacagaggtcatcctctatcaaggcccaacaggcatcctgcgcgcctctcaccgcgccattgaccagagcaggtccatgcaccccaactggccgttccacccgcacgagcgcgaggagaagatcccgccgggcacggtcgtacgcctagagatcggcatctgggccatgggggtcgagtacgaagccggcgaaagcctgcagctgaggattgccgggcactaccaggggatatcaaattttgggacctctgaccatatccggaataagggacgccactttgtccatgttggcggcgagtacgacagtcatctggtgctaccgtttgtttagctt

SEQ ID NO: 19705 - DNA, 1190 bp, Emericella nidulans
tctgctgtcgtgcgttggcttaatgacggagaggtatgtgcctgagatcccgggactggagaccttccagggtcggatatgccattcggcctcttggccgaagggaggcgttgacgttgcagggaagaaggccgccgttattggaacaggggcatcaggtgtacagatcgtgcaggcatggggcaaggaagcaggctcgctctttgtcttccagcggactcctaacatctccctcccgatgcagcaggagagcctctcacccgaagcgcaaaaagccctaaaggctgagataccgcgcctattggctgcgcgagaaaagaccttttccgggttcttgaaggatcccagtccccatcgcacattcgaggtctcgcgtgaggaacgagaggcccggttcgaggccctttaccaggaaggcggctttgcgttgctgctcggcgggtacagcgatatgctgctcgacgaagaggcaaaccgagaggtatacgaattctgggttaggaagacgcgagcgaggatcaacgatgcccggctacagaaaatcctcgcaccagatgagccgccgcatccgatggccaccaaacggtcgtccatggagaacgattactttgagcagttcaacaagcccaatgtgcacctggtcgatctccgcgagtcgggctgtgccattgcagccatcaaacccgacggcctcgtgctgcagaacggcacgttctacccgctcgacgtgatcgcccttgcgacaggctttaacagctacacgggcagtctgacccagatccctcggctgcgcaacacatccggcaccacgctagcggaagaatgggcgcaggacggcgcgagctcgtacctcggcttgacgcgcagggggtacccgaacatgttcctgtgctatgcgctgcatgggccgtcagcactaaccagcggaccggtctcgatcgagctccaggcgcggtggatcatcgaggcaattcgcaagattgacgagtccgggctgacctatattgagccgacagaggaggcagagaagacatggaaggcgacaatcaataagattactgagatgacgctattccctaaagctgactcatggtatatgggagccaatattcccggtaagaagagagagatgttgaactttccggggggaatacctatgtatgaggagatgtgcttcaaggcgctgcaga

SEQ ID NO: 19706 - DNA, 1192 bp, Emericella nidulans
accgccactggtgcctggtcgtacgcgattccacagctagagcaagaggtgctggagctcccagaaactcactacgagcagcaagagaagtatctcattgagttgtcaccataccagacgagatgggtaacggaggaggagaaatgggctctgaaactcgtatggcgcactggagttccccgctctttcggctgctaaccgctggctaggacggggtgaatttcatcgatattacggaggatcgtaactacggactatttccaacattagacgctggcagctacgtcaattatccgcaaaagatgggatatgttgacaccgttaaggggctcatcgcggggttatcgatggacaatatgcgtaaggacctggagaactttacgtccttccacacgagatactacaaatcgtcgtccggcgtggaatctgctcagtggctatatgatcaggtgtccaaggtggtccgcgactcgggagccgacaaattcggcgcgacggttcagaaattcgatcattcttggggtcagttcagtatcatcgcacgtatccctggtctgtcgaaaaagactgttgtcctgggtgctcaccaagacagcatcaacctattccttccgtcttttctaggcgctccaggcgccgacgacgatggtagtgggaccgtcaccattctggaggctctgcgtggcttgctgaaatctgatatcgttgcacacggccaatcgccaaacacaatcgagttccattggtactctgcggaagagggtggaatgctcggctcgcaggccattttctccaagtacaagaagaaccaggcggatgtcaaagccatgctccagcaggatatgactggttatgttcaaggaaccaaacatgctggtcagaaagagtctattggagtcatgactgactttgttgaccccgcactcacatctttccttaagaataccatcgtcaccgtaagtacacttcttttcgactgttgaatatttgactaatcccggttaccagtattgcgccatcccctttgttgagaccaagtgtggatacgcctgctctgaccacacctcagcaagcaagtacggatacccgtctgccatggcgacggaatccacgatggaaaacagtaacaagcatatccacaccactgacgacaagatcagctatttgagcttcgatcacatgctggaacatg

SEQ ID NO: 19707 - DNA, 1194 bp, Emericella nidulans
ttggatgggaccgcgaggaatgcaggtaatgagtatccacgccgggcatacttgggagacagcctttgtgctgcaagcctatgccgaacggattgagcaaggtacctgaaatccaagcagccatagagcgtgcatacaagtatctggtcgagcagcagcatgtggttgactaccctgaagactcgcaatgccacttcttctcccgccttggtggctggccgttctctactcggtaccaaggcaatgtctgctccgattgcactggcgattcgctcaaatctatcttgatgatagagagggattcccgtttcacccggcttacgacagaacaccaacttcagcttgctgtggacaacctcattatggtccagaacgcaagtggcggctatagcagcttcgagccaactcgaggaagcgagctactagaatatatgaacggtacggagctgtttggtaaaatgatggttgaatatgacttcacggaatgtacctcgtcctgtattacggcactggccctttatcaccagcgcaaccccaactatcgaaccaaggcggtctgtactgccattgaccgaggcatcaaatacatattgaagcagcagcgggcagatgggagctggttgtcatcatggggtatagcgtgcacatatggagccttttttgcgttggaggctctggcaattgggggcctgaattatcagaacagccctgccgctagaaggggctgtgacttcattgtcaagcagcaactagctgacggaggatggggtgagacaatagatgtacgtttactcctctgaatcgcaagagaagggggaagcaggctaacggtatccagtccatcttgacggaatcatatacttcatcagaagcctcccatacggttcagacagcctgggtgtgcttagccttgatgcaggctcagtacccaggccaagagcccattcgcaggggcgtccagctcttgattagtcgacaacgagagaacggcgagtggaggcaagagcgcgcagtgggaagtggaatagttacttggtatattattgatgatgtgtcgctctggcagttcctttaagctaacctaacattctagtgagcttctgtaccacagctacatttactcatttcccatccgcgcacttgcgatgtacaaggcgaagtatggcgacgatgcagtcatagattaggtaccct

SEQ ID NO: 19708 - DNA, 1194 bp, Emericella nidulans
acacgccctttggccgctttctctcgtacatgacggcatggatcaacacctttgggtggtggaccttgacagcgtcgcaagtcgccttcatgaccgagttcttgctaggcatgaaaaccatgtttgatccagactgggacggtgcggacaagggctggcttcaatttgttgtctacatagctgtcgtcttcgtcctgacattgaccaatgtcgtcagttgtcggtcggaacaggtgcttccctggctgaacaatttcgtcggcgtctggttcacggcgctctttgttatcctctctcttgccctgttgatctcagtcggcgtcagatcggatttatccttccagcccgcctccttcgttttcggacaatggatgaaccgcaccggctggcccgacggcgtcgtctggttcacagggctcgtgcaggccgcgtacggccttacagccttcgacgctgtcatccacatggtcgaggaaatgccgtctccgcgccgcaacgccccgcgtgtgatctggcttgctgtcctcctcggcgcaataacaggcttcatcttcatgctgatctgtcttttctgcatccaagaagttaataccgtcgttgatgcaaacctaccatttatcgaactgatgcaggagaccgtcggtctccagggcgcagctgttttgctcgcgctgtttatcttcaacggcctgggccaggggatcagtatcttgaccacggcatcacggttgacgtggggttttgctagagacggcggcctccctttcagtccgtatctcgcgcacatcgacacaacctggaaagctcccgtccgcgctctctggatgcaaggcttcctgatcgcgctagtgggagtgctctacctcttcgccagcaccgtcctcgacgccattctcagtgtcagcactatcgctctcacggtttcctacggcattcccatcgccgctcttctatatgtcggccgggacacgcttccgccgggcccattcaggctcgggcgttggggtgcactagtcaactggattagcattgtctattgtgctgttacaactgtgtttttcttcttcccgggaggtccggacccgaagcccgcggatatgaactacgccattgcggtgtttggcgtaatgctggttgtcgctattgggttctggtgggtgcaggggaagaagatgtacctgcgcacggaggatg

SEQ ID NO: 19709 - DNA, 1194 bp, Emericella nidulans
agttgtgggagcggccgagaccgggaccggccaatcggtcagctagccgaaactaaggcaggaaagcaatactgcctgccgataaccagatctatatcaatttggcgaatcgcgaattgagaatggcatgtgtcatcaaatctttctggttcactctttgaatatggcctcctacctcaccccagctcaggagcctccagccgggacagtctggatccaagcctcagtgcggccctgggctttcgatcattgagtcgacagccgtattcagaaggaaggccgcatttgtccccaagacatcgggatccgggaagatgggcagattggggggttgaagaggataacgaacttcgtacatacccagaaccagattattgggatccagctcagtcatgcagatcgcaaggcagcaagaaggcgcccctcttggagaggaccgttacggcagagaaggcaaatgggggctggcccgacaaggcctatgcaccgtctgcgctcgcttataatcaggcttatctggcctctcctgcaatgaccgttcagcagattcgtgacttcaaacaggcctttgacgacgctgcgctgcggtcggtaaggctgggctcgacctggtcgagattcatgcagcgcatgggtaccttcttcatcaatttctgagccccgttagcaacagtcaggccgatgagtaagggaggatctttgacaatagaaccggttacttctagaaatccccgctggcgtccgggcggccattccagcagagatgccactgttcgttcgtatcagtgccacagactgattgggaggcttgaccaattagttccctgagagctggacggtggccaattcatgtcgacttgctcctatccttgtgacccatagagttgactttttggacgtcagctcagggggtattcgcgccaagcaggaaacgagtattaaatctggcgacggataccgggcgccgtttgccttggagattaaacgggctgtggggaatgtcttgctcgtgtgtatggtgggaggtgttaagaaaacaggtgagattgccgaacgattccttcagcaagggctggatgttgtgatgtgtggtcgatggttccagaaaaaccctggcctcgtctatcagtttgcagatgagcttggagtgaagatcaatatgtcgacccagtatggacgggctttccaaggtgg

SEQ ID NO: 19710 - DNA, 1195 bp, Emericella nidulans
cgccccgcaaacgttcaaggccaggttcaacattggcgacaacaccaaggatcctgtctacactgatgccgagcgccgatttcaggaactcgaaaaagagacaaagaaactccacgatgagtctaagaagtacttcgacgccgttaatggtaggtttcgtccggacaccttccgtctccactccggctaataccccgcttagggatgctggatcaccagattgagttctccaaggctatgacagagctttataaaccaatttccggccgtgcctccgacccgagcacttatacgattgaaggaaaccccgaaggcattcgggcttgtgaggagtatgaagtgattgtgcaggatctgaaggaagcactagcaccggagcttgagatgattgattctcgtgtcgtcagccccgcgcaacagctcttagaggtgattaaggccatccgcaaggttgctgtgaagcgagaccacaagaagctcgactacgaccgccacaggaacactctgaagaagctccaagataagaaggacaagtcgctgaaggatgagaaggccctttacaaagccgagggggacgtagaacaggctactcaggagtacaacctatacaatgatttgctgaaggatgagctgccgaaactcttcgccctcgaagcagaattcatccggccgcttttccaatccttctattacatgcagctgaatgtcttttacacattgcacgagaagatgcaaggcatcaacattggttactttgatctgacacgcgacatcgaagaagcgtatgaggagaagcgcggggacgtcaaagagcgcgctgaagaactcaccattgttcacttcaagaccacaggtggtcgtcggccgggctcaaagctcactggcaaagataaactagctgcggagcacaaaggccgcttcggatcacggcccagtgaccccgatgttgtcgaaaacccgccgcctccgtactctcctggcgccagtggaagcgccctcgcagcagccgcagccaaaaagccggcacccccacctccaaagcccaagccatcgcagttccgtgcgcccgtcgagacagttacggcgttgtatgattacgaagcacaggcccacggtgatttgagcttctcggccggagacgtcatcgagattgtgcaaaggaccgataaccaaaacgagtggtggacaggccgtg

SEQ ID NO: 19711 - DNA, 1197 bp, Emericella nidulans
ttttctgactttgacgctggtcatagggatctagtgactgtgacgaagttcaactactatggcaaccgcatagttaccgcttcgtcggaccatcgcatgaaggtctgggaccagaaagatggcgaatggcagttaactgacacttggcgcgcccatgatgcagagatacgtgatgtaaggttccccccttccttggtaaattgtacgtatttaacgatccgttaccgcaggcaacctggaatgggcctttcactggccagcatattgggagtgtgggggaggacatgaagctgaaaatatggcaggaagatgtcactcagccgccgaactctggccgccgtttcagatcaatcttccgcttgatggcgccacaacggcatccatatgtctcgcttgatttccgcaacattgaccttgaatcatggctggccgtcataacgcgcgacggcttcctgagagtcatggaacctgtcagcccagactcactcgctgactggcagactgtcgacgaattcagggtctgcgccgcgccccagcgcggggaagagacgagcttcaaagtgcagtttcatcacgaccctatagatatcacccactccattttaccctcctgggaccggaaaagcctgtctcttgtagttgcggctatggacagtgtgaagatcttccggactgatgccaaccgtcgcttctaccacgctgtagaattaaaagggcatggagggttggttagggatatatcctgggcaaatggctcagttcgcggctatgatctcatcgccagcggatgcaaggacggctttgttcgaattttcgaggtgtatacctccctatcgtccaacaatgcgcgagataccgatcgcaaccacccccaatcgtccgcacaatctcagtcgtcccgcaccacagcgcagtcagggataggctcagctctggccaatcgtgcgcctctgtccatggccagccggcccgcaacgggtgattcgccgttcaagcattcttacaaggaagtagcttgcatcgatagcaagcatctcgatgtatggcaggtcgggttctcctacgccggttagttccttcgattcactctattatttattggtttcgctaatgaccatgcaggtgattgcctcatttcttctggagatgacggggtggtcagattttggaaaaaagctctatccggggaatggctcg

SEQ ID NO: 19712 - DNA, 1198 bp, Emericella nidulans
ggcacacgaatctgctgcaacaaaagattatccataacaaataagaggacatattacttgactctaacaaaaatttacacaacacaaaatggccccgacctcgacctggacccgattgatccgcttcattgccgaagaggatggacagacgcatcttggtgaagtagatgcggcccaatatccagacgttggcctgtctgtggtaaatggagagcgagttgttgcacgaatggttacaggatctatctttgacggaatcgttactgaaaagaccttgcacgttgcgcgagttggtgccccccgtctcttaggctccttcatgtctccttgccaaatcaataatgacgtcttatagctcctcgccccgatcgatatggatgacgtgcctctcattcgatgcatgggtctcaactaccgggaccacgcgaaagaagccaacatgcctattcccgacgtgccggtgctgttcatcaaaccccggactgcgctgaatggtccacacccagccatgatcaatgtacctaagatcgcccaggatggctccagcgactacgaggccgaattatccgtgatcatgtccagaacgggccgcgacattcctgagtgcgacgccatggactacgtgctgggctacacgtgcagcaacgacgtgagcgctcgcacgcagcagtttaagaatagccagtggagcttttcaaaaggtaagcggagcagactggcactcccagctcgtcttttgttgtcccgcttgagcctgactttgaatgttagggcttgatggctcgtgtccgctaggacctgtcttggtggctccctcagaagtcgacccgcaccagctcgatatcaaggctattcacaatggattagtggtgcaggactccaacacgaggtaagaccagttttattctgttatttttatttttacttttattttcttttttatttttgcgtggtccatcattcaatgggaagagcccgtggctgatggcagagcagaagagatgatattcgacatccctaaaatcatcgcgttcctatcgcagggcaccaccctggagcgaggcacggtgatcatgacggggacagggccagggattggggcaatgcgtgatccaaaggtcgtgctgagagatggcgacgatatgcgtgttcaaatccaggggatcggcacgctctgtaaccggatttactatgaata

SEQ ID NO: 19713 - DNA, 1199 bp, Emericella nidulans
tcaaccacctcggctctcccaggtaatcgcctgattgcctacatccaatccttgctaaagccaaaaagggattgccgtatggactgcccgtttgcgttgcaccatctcacactgtcaacagcacggacgctcttctccgcttagcatcgcttatcggcccatatatcactatcttgcaggttcaagcggacattatcgatgactggtccgaggatactatccgccaattgactttgctggccaaaaaatatgcattcttgatctgggaaggcggtcgaattctgaatgccactattggggtcgttggtcgacagagagcagagtcgagagaagtgaggaatacgttggttgacctgatccgcaagaaatacaccaagggtgtggtgaaacccgcctcctgggcgaatatttcaactgcctgggcctctggggtagcagtcaataaccaagctgcggacatattgatcccgactctgaaggctgctgccagagaggccgtcgctgatgctgtccagactattaggacagaaatcaccgcggtcatcgactcgaaccgtccatttagtccacacgactctttcggagctcaaacaaatggtgaaaccagccatcaacgtcagccatcacattatgcgataggggaaggcgaacataatagcttggcgctccccccacggaaagcatccactatctctctcactcgaacgataactcagcacactgaggagtcgactgatgcgctgatgggaaccgagtcctatgagcccgaggacgtctgggactttggagtggcaccaccacccacaatcgacaccgaccttcctccaccaccgctcctcgcccgtgggattcttctctgccttccctccgctacggactccgcattcactcctgaataccgcaaaagcaccatggctgcggcatacgccaatcaagacttcgtacttggattcatctgcggtgaaccatggcatctggtctcccaacgagacgatcaaatactaggtttcgatgcactgatggatactttaacaccaaccgagcaagaccaactctctcacgacatggatggaatagaagatacaccatctcaccctctagcattattgtcaataatcccgcatacgctaagctcggcaaatgaccagcagctgggcgatacaacaccgacaacattcgaaacaccagagatacccaca

SEQ ID NO: 19714 - DNA, 1201 bp, Emericella nidulans
cccacgcggacacaacctgatccatgctcactcgtacgacatccggcacagaggcttcttcctgttcctgggatcttcttgtctcctcagtcactacgccctgctcggcggcgtcgattagcgacgttattaatgacctcaaagatgtattcagagacccttcttcattccgagcagtcgataaccagtctataaccggctgcacaccactgctgttccatccacgctcgtacagagccgcgttccgtacagactcgcggaacttatccaaggcttcggcggccttgttggtatccacaaaagaaagccggtcatcgttgatagcgagcccggaaccctctagctcgacagccgcaaatatagaacccgcttccttcctaaggtccgattgagcaatcaacccactataggcaagtagcccgtcaactccttgcgcgcacacaatactcctatgtaccggatatcgcaccatattatgccgtcccgtatgcgaggtccggattgtcactgtcggcacaaggaacgcatctgcggttaatcttgctccagacatatccgtctgcgcgcctagacttgtaaccaggatttcaagcctcgccttcttcaggatctgcgacggtaccgagattgtagggacgaggtggttcgagatactctccgacacttctccgtatctgcgcttgttagctaactcactgcgaacgtaaatgtaggatgccatgacttatggcatacctaatcagcaaccccctctccaaatctccattttcagacaccgaatccaacatatcctcccaatcctccctctctttcaaaggatcagccaataagagcctgaccagtttcctcgcggcaacaacatcgttcaaacccagaactacgcatccaacaagtcagcaaagaaacagtccagccagctcaacccaacttgtcgtaggttagagatttaaggcaagatgaacccacccgcaaccctgattaaaggctcctcagtctccagtcctcttagcgccactgctagccgactcagattcacctgctccggcgcaatgctctgaagttgcacgagcgactcgtacacctcccttaaccgcaagggaacatggcgggctgtgtgagcagttgttggggcggtcgagtatagttttgcacctggccttgcaagagaattgagacgtgatattggcgacgatttatgtag

SEQ ID NO: 19715 - DNA, 1203 bp, Emericella nidulans
tggccaagaagcagaaacaagacgaggcttctgagagtcctgaagaggctggtaaaaaggcagaagaggcggaggccgcagaaaactgaaggaggagaagaaagctcagaagaagcagattcaaaaagagaagaaaaaggcaaaagaagccgccaaaaaaactcaaggagaagacaaacgggctgaagagcccacaaacgatgctgccaactcaaagactgctgagaaacctcaatcctcaaaggccgaagattctgatgttgacggtgaggaagatgctgctgccgaaaagctttccctcgagtttaacgaagaagagaactccacatcctctgcccctaattccccggcattcgacacatccaatccccaatcgggcagctcttctatatcatccatcgttcctccatccaacaccgccaatccttcctcctccgaacccaaaccactcaaacccacacctgaagagctgagacaaaggttacaaaagcgactagacgaactccgcgcagctcgtcaagcggatggcctgaacggcaagccggctcgaaatcgacaagagctcattgaagcgcgtcgacaaaaggctgaacagcgaaaagcacacaagaagctcctccgtcaaaaggcgaaggaagaagagcaaaaagccaaagacgaagccatgaaccgccgtttctcgccggggggctccggctcactcctcgcatccccccgatcccccgccgactcagtagggtcagggaactacgccttcggccgtgtcgtcttctctgatggccaaattgccgacccttccctatctgaactacgtgagaaacctaaagcacacggcccgcgcgatcccgcttcagccctcaaagccgctgaggccaagaaagcgcgtcttgcagcccttgacgaggagaagcgcgccgatatcgaagagaaagacatgtggctcaatgcaaagaaacgcgcacatggcgaacgagtccgggacgacacctcgctactaaagaaagcccttaagcgcaaggaatccgccaagaagcgctccgagcgcgagtggaaggagcgtcttgaaaccgtcaaacggggtaaagacatgaagcaacagaagcgtgaagagaacctgcgcaaacgcagagaagaaaagggcaagtctggaggtggcaagaaaggcgctgccgggggcaagggtgggagcaagccccggcctgg

SEQ ID NO: 19716 - DNA, 1204 bp, Emericella nidulans
ccaacccacgggcgtaccacatctgggtaacttccttggcgctcttcgtgaatggtttaaaattcaagaagctgccaccgagaacaccaagttgatattctccattgttgatttacatgcattgactgtgcctcagcaaagcagtcagctgaggaaatggaggaaagaggccctcgcaacattgatagctgtgggtttagatccaaaccggtcgacaatattctatcagtcttctgtatgctgcaatcgctccagcttctactagtcggctaatttacccgtcaggtcccccaacatgctgagttattttggatcttgagtactgtagcttctacgggttatctatctcgtatgactcaatggaaggtgagtttcgagtactgcaagtcattctgtggtctccggtacgataacatccgcagagcaaactccaactgccagaggatgcgagcttggacaactccgaggttcgatcaaatctacgccttggtctcttctcctacccagtgctccaagctgcagatatcctggttcataggtgtggttgccaacagttttgatgaatatcatttgctaaggtgatacagagccactcatgttccagtcggagaagaccaaagacaacatctggagtttgccaggtataccgcaaatagctttaaccatctatatgggccgatttttccctctccagaagcactaatctgtgagcccgtttgaactgtatgaacgatttttggactaactgtcgttagcccccgcaaagagagtaatgtctctgaaagagccgacactcaaaatgtcgaaatctcatgcggatggacgctcgagaatcatcctcaccgactctcctgaggatatccgacgaaagatcaaagttgcactcacagactcagagcctggcataacttatgatccgatacgccggccgggcatctcaaatctcatagaaattttcagccatctcgaaggaaagccgtgctctgagattgcctcattgtaccaggacgcaaccccccgtgctctcaaagagcatttatctgacaaaatctgccaaattttatctccgatcagagagaagtttcatgcggtaatggcagacggccatgcgttgagcgcgatttcagagcagggggcgcaggaagcacgtgccaatgctgagattactatgaaaaaagttcgagatgccatgggtctttgaagc

SEQ ID NO: 19717 - DNA, 1205 bp, Emericella nidulans
  unsure (1)..(1205): unsure at all n locations
gtttacctcgcttcttgggtatctgctgacttgaacagtttcgaggtagctactgggaggatgatcccatggaaggaatgatccggcatggagcgacacgccgctttgatgaatactaccgctgttatcccgtggccatgatgcccggtcctgaaagagagaacgtgaatcacggcggcaaagtcattatgcctcccagtgctctggacaagttaactcgactacatatcacatatcccatgctattcgagctacacaatggtgcaaaagagaagatgtcccacgctggtgtgctggagtttattgccgaagaggggaagatctacctaccgtactgggtaagtcatggtggattgatagcttgccttgtatatcacttttgctaacgagctacaccatagttgatgcaaacactcctgctcgagcccggcgacctagtacagatcaaatcgacagacctcccccccggccgcttcattaaacttcaagcccagtcaacctctttcctcgacatcagcgacccaaaggcggttctagaaaatgcctttcgaaatttctcttgccttacaaaagatgatgtcttcacattcgcctacaatgatcaggtgtatgaaatggctgtgctggaaacgaagcctgcgaatgacacaaacgctatatctgttctcgagaccgatcttgaagtcgattttgcgccaccggttggatacgaggagccacagcgcccgagtggcactagcacaccagggagcgtagtgagcggaagactgccggctggcgggctcctccacccacacggcaccatggcccagtcgatcaactatgcagccatagcaccagagtctactgatgctgctgcaggtgcacgggcagtttcctcgaacttcctgtccggcggccaccggctgaatgccaagaaaggcagcaaaaccccaacgccaacggtcnaactcccacgccgggagcaacaaaccccagtcacccccctcccgttaaaagaacgaatggcccacagccactacgcctaccacctaatcagctgttctttggctatgccataaaacctgtgccgaaacgagacgagggcggaaacgtagttgagccggagaagcctcgtttccagggaaccggtcaatctctccgaggaaaaaagaaaggtatagagggttcgtctacgcctacttgagcaaatagattaattcgca

SEQ ID NO: 19718 - DNA, 1205 bp, Emericella nidulans
atctgtcgatctgaagctatgcgtcgagaaacatattgactatatcaagaaactggatagcgtgcgtcgtcctttttttcctaccgtgccacttctcttcacgaggagacggttgacaggtgttggtagcgaaaagatgagctggaatactggctcacagagcacctgcgacttaatggagtctactggggcttgacggctttgcatctccttggatgtcctgatggcttgccgcgcgacaatgctgtcgactttgtcctctcgtgccagcaagagaatggtggcttcggcgctgcaccgggccatgatgcgcatcttctgtatacagtctctgcggtgcagattctggtgactttggatgctgttgacgagttggagaagcgcggattgggcggcaagctgaaagtcggttcctgtaaatatagcccttatcacttcggagagggttaaagaacgcatggctaagtgttttcagtcatcgcagggctgcaggacaaggagactggctctttcatgggcgacgagtggggcgagttggatacaaggtttctttatggggcgctcaacgccttgtctctcctgggactattagacttggtagatgtcgccaaggctgtctcgtatgtccagcgatgcgagaatcttgatggagggtacggagtcacccccggtgcggaatcgcacgccggtcaagtctttacctgcgtaggagcactggccatcgctgggcggttggacctagtcgacaaagaccggctgggaggttggcttagcgagcgacagctcgaccatggcggactcaatggacggccggagaaactcgcagatgcttgttacagctggtgggttggggcgagcttggccatgattggcaagctcaactggattgacgggtccaagctcgctgcctatattttgcgctgtcaggtttgttactccattctagcgctagtgcttttggctaaccctccttaggatccagaggctggtggctttgctgatcgtcctggcaatgccgttgacgtctttcatacgcatttcgcgattgccggcttgagccttctggggtacgagggcgttgaggaagtagaccctgtctagtgagtcaacgacatcccaaccgcacagttccgtgataactaatcatgccacttagttgtatgcctaaatcaattacaagcaagattttgtctgcgtagcatgat

SEQ ID NO: 19719 - DNA, 1206 bp, Emericella nidulans
gccgttgacgcagtgctttccgttgctgatctcgaacgtaaagatgtggattttgaattgatcaaggtagacggaaaggtcggtggggctcttgaagactcactccttgtcaagggtgtcatcgtggacaaggatttctctcacccgcagatgccagatgaggttacagacgctaagctggccattctgacctgcccattcgaaccccccaagccgaagacaaagcacaagctggatatcacatctgtggaggagtttaagcgcctgcaagaatacgaaaaagagaagtttacagagatgatccagcatctgaaagactccggggccaacctggtgatttgccaatggggtttcgatgacgaggcgaaccatcttcttctgcagaacaagctacctgctgttcgctgggtgggtgggcctgaaattgagctgatcgccattgcaacaaacggtcgaattgtgcctcgctttgaggatctcagcgcagacaaacttggtacagccggtcgtgtgcgcgagatgacctttggtactacgcgagagaagatgcttgttatcgaagagtgcgccaacagccgtgctgtgacggtatttgtgcgaggaagcaataagatggtaagatcgcccatctatactagaccgtgcattactgatttattactagattatcgatgaggcaaagcgatcactgcacgatgctatttgtgttgttcgtaacctagtcagggataaccgcgtcgtatatggtggaggtgcagcggaaattgcctgctcaatcgctgtggaggatgctgctgtcaaggttcgtggcgttccagtttcctatagtcatttactgacattgccctcagagccctggaatcgagcagtatgccatgcgcgcgtttgcagatgcgcttgatgcagtgccgttggcccttgctgagaactccggtttgagcccgattgaaacactcgcggccatcaagtcgcgccaggtcaaggagaacaactcccggctgggtgttgactgcatgctgactggaaacaatggtaaatactcttgatgaagacagtagaattgatattgattaggctacagatatgagagaacactttgtcattgatccgctcatcggaaagcgacagcagttgttgcttgcaactcagctctgccgcatggttctgaaggtgagttagatacctatgtttattgtacacatgcag

SEQ ID NO: 19720 - DNA, 1206 bp, Emericella nidulans
cagggtcccaatatatgcagcttcttcttgggcgagtattgtatcactaaaggcgtcactatggctggctcctattcgtgacgtatacgaggtatcttcaactgccagacacttaagttatattgtttgttgacaggctgttctgcaggccttcaccatctacactttctttcaactcctcatcaacttcctgggcggcgaacgagcagtgattattatgatgcacggtcgtccgcctgttcaacatgcatggccgctaaatcacatcctgtccaaagtcgatatctcagacccatatactttcctcaatgtgaagcgcggcatcttgcaatatacctggctgaaaccagttctcgccattgtttccatcgtcatgaaagcaacagatacctacaaggaaggttatttgggcttatcgtccggttatctctggaccggtattctgtataatattagcgttaccattagtctttattcgctggcgttgttctgggtgtgtcttcatcatgatctggccccattccgtcccgtcccgaagttcctctgtgtcaagcttattatctttgcttcctactggcaagggttcttcctatcaatccttcaatggcttggagctttgcccaacggcacaggggattatacaccggataaccttgcggctgccatccaagacagtttgacttgtttcgagatgcccgtgtttgcggttgctcattggtatgcgttctcatggcacgactatgcagattcaaccatctcggccgctcgcctcccggtcaagtacgctcttcgtgatgcattcggggcgaaggatttgatcgaggataccaagatgaccatgcggggcgaaaactacgcgtacaggctcttcgattcgggtgaccatatcattccgcatgcagaatctaattcgcgcgtgcggcgggtcatgcacggcatgcgatacgagcgcggtggaaaggcgaaatactggatccctcagccgggagaggttaacagtcgaacacctttgctgggcggcttcgacggtagcagtggtagtcgacgcaatagcacgctcgaccggtatcgctcccacagcgagtcggaggagactactctcgacgactctgacgagaggctcttttcacaagcccgggaactagaattcggcgacttcaatgtaagtgttttgtcagcaaccctaagatatcccgaagctgaact

SEQ ID NO: 19721 - DNA, 1209 bp, Emericella nidulans
ccggcaccgaccagctactgacatgcaccaggtctttctctacgagaaatgatccacgattacaaataccagaccctcgttctattcaaggcattacttttgcaaccaaaggtagtctatttttacttctttgctgtctctccatgcttatcaattaccacggaatagatgcttttcttcggctcaagatgcgaacggctatgcatgatccagttttcgctcgtctctttgatcccggggctcatgaaccaccttcaagattgcgccgacccttcctttgatacatatgcgcagaccgttaagaaaccgacttctctcaaaaccagcgataggagctcttgtatgatgatgcgcacataatttctgtcatgagtctttgtactgatactagcagtgctggcatatatgggcctcccgttgcagatttttggaaaggtatgcgcacattatgtgtccctccgagtatagattaatctcacattgccttagggaagtatgtttggaccgtacacacctctgcagcagctggatctactggcagatgatggaacaaaatcttacgttgttggttctacgaattctttgctactgcagcagaaagatcgctatagcgatatcttgattaatgtaagaaagtcctgcacattcacaaaacctgctctaagaagaccactttcaccagctcgacgaagatacgattaatatcacgtcatcttctttacgaaacgcactgaccctatccgttgcggatcgacgctggatcgatgccattactcagattgtgaacgatacatgggacgaagcacatcccaaccaacccaaaacgcatgggtacatgggttcggaagagtttataaggcttcaattcgaggagtaccttctggcattactatcatgcatgaagtatcatgaagaactcaactcctacctgactggtgaaccgagccgccgtaaccgagcgcagttagactcttataacatcgagggggacccagcgctagagttcaaccaagagttcttagctcattggagaactacttccaactacgctttgtttcaacgccttacctcggacgcgcttttattctctgtcgctgagcctcgacatccctctgctggcggcctcacaatcgatgatgttcaaagacgaatttctcagcaagtcgcggacctccacctcgacgaaaaagtgcgtgaaggccgtgaagc

SEQ ID NO: 19722 - DNA, 1209 bp, Emericella nidulans
cggaggtgcgggaatgggttgagaaggagatcgaaccatatgtgacggagtgggatgaggccaaggaggttcctgccaagatctacaagcaaatgggcgagcgcgggtatctcgcaggtctactcggtgtcaagtaccccacgcaatacaccccgcaccgggtgcagtcggttgcgcctgagaactgggatctcttccacgagatgcttctaacagatgagctttcccgtgctggcagtggtggtctggtttggaacctgatcggcggctatggcattggatgtcccccgctggtgaagtatggtaagaaggcacttgtggaccgcatcctgcctggtattctcgcaggtgacaagcgcatctgtcttgctattactgagcccgatgctggtagcgatgttgccaaccttacctgcgaacggaacgtctctgaagatggcaagcattatatcgtcaatggcgagaagaagtggattacgaacggtgtctggtctgattacttcacgactgcggttcgtactggcggccctggaatgaacggaatttcagtacttttgattgagagagaagctggtggtgtcagcactcggcgcatggactgccagggtgtctggagcagcggtaccacgtacgtcacgttcgaggacgttaaggttcccgtggagaacctcattggcaaggagaaccagggatttaagggtaagtcaagtcagccctatttcgtcgtcgcatcagtattgacggaatatctagttatcatgaccaacttcaaccacgagcgaattggtatcattatccagtgtctccgcttctcccgcgtctgctacgaggaatccatgaaatacgcccacaagcgcaggacattcggccagaagctcgtcaaccaccctgtcatccgtatgaagctggcccacatggcccgccagattgaagccagctacaactggctcgagaacatcatattccagtgccagtcgatggaagagaccgaggcgatgctcaagcttggcggtgccattgccggtctcaaggcccagtcgacgacgactttcgagtactgcgcgcgcgaagccagtcagatctttggaggcttgagttatagccgtggtggacaaggtggtaagatcgagagattgtaccgtgatgtgcgtgcgtatgctatccctggtggaagtgaggaaatcatgttggatctgagcatgcggcaga

SEQ ID NO: 19723 - DNA, 1211 bp, Emericella nidulans
tggccgagttcattcgctctgatatcttgggaaccacctttgagaccaccagcaggtacttccccacgattggataagacgatcctcaggcaactaaccactaacaatgcagatatgcgaacttgcagcccgttggcctcggcactgcaggagttgtatggtatagtttaggaaactatcgtaatggtagtcagataacaactgatagactgctagttccgcttacgacttgatctcggaacaagtggttgcgatcaagaagatgatgaagccatttcacagcacttcggttgcgaagcggacatatcgagaagtgaaacttctgaggcatcttcgacatgataatgtgcggatccttcggggcaggccgctttggagtaggccactatgactgggacaactggcactgacctatattctccagctgatcaatatgagcgatatcttcatctcgccactagaagatgtgtacggactccctgaggctccagtttcggttgacggcagcaattgacatgacgtgacttccaggtatcttgtcaccgaactcttagggacagatctgcacagactgctcaacggaaagccactcgaaagcaaatttgcccagtacttcacctatcaaatcctggtaagacgcaacattgcaattgcatcccgcactaatctcatttccttcccggggcttactgactgacgcaaccctgctccgtcttgcctggttctggtcttactacagcgcggactgaaatacatacactcagcaggcgtaatccaccgagacctcaaaccgggaaatctcctcatcaatgagaactgtgatcttaagatctgcgattttgggctggcccgtgtccaggagccgcagatgactggttatgtttcaacaagatactaccgcgcgccggagatcatgctgacatggcaacggtatgggagcaaggttgatctgtggagtgtgggctgtattcttgcggagatgttgctgggccggccgctgtttccgggcactgaccacattaaccagttctggctgattacagacctgctaggaaatccgccggacgaggtgattgaccggataacaacgaataatgtacgtaaccccgccccggatcttcaaccctccaaccatctggagcccgctaacggaaatcgccggatagactcgtcgggtggtgaagtccatggccaaaaggaatccacggccg

SEQ ID NO: 19724 - DNA, 1211 bp, Emericella nidulans
tcgcatcaatgccgataccaaggttcttttccagggcttcactggaaaacaaggaacgtacgtagctcctccccggactcttgattgataaatggatctgatgctgatatgcgccaatagttttcacgctgagcaggcgatcgcctacggtacatattgccatttcccttgcagctgtttcgcgcactgcgtcgttttggatcggacactcacgcattctaggtactaaggttgttggcggtaccaaccccaagaaggccggctctacacatctagacctcccagttttcgccaatgtcagcgaggctgtcaaggagactggtgccactgcttcggccatttttgtcccgtatgctatgataagctccaaacttctgccagaaagtcggcgctgatgcttggaatttagtcctcctctcgctgctaagggtattgaggaggccattgaggctgaggtgcctttggttgtctggtaagcttcgcctgacttgagaaactaatttacatgttactgaatgttccggtatcttacagtatcactgagggtattccccagcacggtatgagagagcaaccacgattcgcacgtattgctcacatttatactaactgagccagacatggtccgtatcaccgatatcctgaaaacccagaacaagactcgtcttgttgggcctaactgtcctggtatcattgctcccgtaagtatctcttagtgctcgtccagtgctgacggcagcttctaacgtggcattaacatatagggtcaatgcaaaattggtatcatgcctggtttcattcacaagcggggccgtgttggtattgtttctcgttccggtactctcacatacgaggccgtgaaccagaccactcaggctggactcggtcagtccctcgttgtcggtattggtggtgaccccttctctggcaccaacttcatcgattgcctgcgtatcttcctcgaggatgaggagactgatggtatcatcatgatcggtgaaatcggtggtagtgccgaagaggatgctgccgagttcttcaaggccaacaacaagcacaacaagcctgctgttggtttcattgctggtatcagtgctccaccgggccgccgtatgggccacgccggtgccatcgtcagcggcggcaagggaggtgctgactctaagatctctgctctggagagcgctggtgttgttgttgagcgcagcccg

SEQ ID NO: 19725 - DNA, 1211 bp, Emericella nidulans
tggttgccgtagcggctggtaccgcgatggctgcaccccagctcaagaagcgcgccggttttacgtgtacggcgtcaaccttcttcagcttgttgaggtagcttgctgatctaggcagtttttggagtcaccgaggctggcgctgagttcggcgagaaaagtattcctggtgtttgggtatgcctagaggtccatctggatgcgacctaggctgacgaacgcaaatgcagggcactgactacaccttccccgatactgaatccatcttgaccctcatctcgaagggtttcaacactttccgcattcccttccttatggagcgtctgacgcctgagatgacgggctctttcgacgaaggatacctgaaaaatctgacttcggtacgtccatggctctgttcgtcgatgtaagacttcttctaacgaatcaggtcgtcaatgcagtcaccgatgcaggagcatgggccatcgttgacgcccaaaactttggccgattgtacgcccctggtttaccctacagaagcatctactaatagacccagcaacggcgagatcataagcagcgcctccgacttccagacttggtggaagaacgtagcggccgagttcgcggacaataagaacgtcattttcgataccagtatgtcattcctattcgttaggcggtcatgttttatttctcttgtatattactctctgcatgggtcttaaagctaacacgtctggggcagacaacgaattccacgacatggaccagaccctcgtgctggatctcaaccaagccgccatcaacggcatccgcgcagccggcgccacctcgcaatacatcttcgtcgagggtaactcgtacaccggcgcctggacatggacggacaacaatgacaacctgaaatccctcaccgacccgcaggacaagatcgtctacgaaatgcaccagtacctcgatactgacggctccggaacacacgagacctgtgtttcggagacaatcggcgccgagagggttgaatccgcgacgcagtggctgaaagacaacggcaaactcggtgtcattggtgaatttgcgggcggcaataacgagatatgccgcgcagcggtcaagagtctactggatgcgctgaaggagaacgatgatgtttggctcggtgcgctttggtgggctgctgggccttggtgggaagactatatgttcagcatggagccgacggatgg

SEQ ID NO: 19726 - DNA, 1212 bp, Emericella nidulans
tgatggttcaaccaaaagtgaggcaaaaccagcgcctattcgcaggattgggcggccgggtttcaagccaacgggagtgcagaataccactgttctctcttcacgtacgtccctcgaccggcttaatggctttactgacaattacaggacccactcggagtgagtcctcatatccggttttctgggtggaggcattcaacgaagccttccagaaatgggtcgttattgatcccatggtgacgaaaacgctcgcaaaaccgcacaaactcgaaccccctgctaccgatccttataaccttctgagctacgtcgtagcttttgaagaagacgcatcagcaagagacgtcacccgtcgctatactagagtgtttaacgccaagacccgtaaactacgggttgaatcgaccaagaatggtgaagcttggtggaaaagggtcctcgaacacttcgagaagccatttttggaagaccgcgatgagctagaaatagccgagctgaccgcaaagacagcctccgagcctatgccgcggaacgtgcaagacttcaaagaccaccctatttatgcgctggagcggcatctacgtcgcaacgaggttatctttcccaagcgggttactggtcatgttagcctaggaaagtctggtgggaagggtcagacggagccgatctatcgtcgctcagatgtccatattctgcgcagtgcgaacaagtggtaccgtttaggccgcgacataaaggttggcgagcaaccgctaaagcggataccagtgagaaacaggggaatggccgtggatgatgaggaagaaggcgaagaaactgctctctacgccttcttccaaacggagctgtataaaccaccaccagtcgtccagggacgaataccaaaaaacgcatttggaaatttggatgtttatgtaccgagtatggttcccgctggtggtattcatatcacacatctagatgctgcgcgggctgcccgaattctagggatcgactatgcagacgccgttaccgggtttagtttcaagggacgccacggcacagctatcatcaaaggggtagttgtcgcaagtgaatataaggaagcagtcgaagaagtcttgaaagcactcgaggaagagaaactgcagaatgagcaggaagaaagagccgtcgaggttctgcgagcatggaagaacctcttaatgaagcttcggattgctgagcgagtga

SEQ ID NO: 19727 - DNA, 1213 bp, Emericella nidulans
gagttggtttagttgtgatccatactgatttgatagactcctcgactaccttccacctaccaagggacctcactgtccaacgtctgtgtcgcttgataaagatcatgccaacaaggaaccttgaagacgtcagtaggtattatcctttactgactgctcatagccttcttatccagcacaccgcatacaccctccttcatcagtacattccaactgcacaagagcaagtgtcctttgatgtggccttgtcaaagacagaggccaagctcccatatgagctgatatccctgctacttggagcgccaactatggagtcaatttccctgtcgtatggagatgagaggacctgggccgacatacgctcgtatcttctgagctggagattggtcttcgacactttgtgaacgctgtatgtgttcgctctgcgttaagagaagcagccgcgctaatgaatttgtagtctttcactctccaagaacagtacgcatctaatatcaaagaacacgatgttttgccatcgttactggatttcatgtttgatttcctccagaagggccatggaaagcttgtggatgcgtctaagttcgacatccgctctttcgagttagacatgtctgaaagctatgagaaggagatccaatggttgcttgttcacttgtactttttgtgtctgaggcatcttgccaacttgaccaaagcctggtggatcgacgcaaaaaagcgtatcaagggccctgttgaaacttggacggagaaatcggtatgcgccgtagcatttccttcacaggtacatgactcacaccgacacagatctcaccgctggtcattgaggatgcgctagaaagagtgaaccaatggatgtccacgcaggaccaggacgaagagcgtgcacttaacgtcaaggtctcgtcgaagacagcagaaattattgcaagcattccggtcgatgaggaatcaccaccagtctcgatatcgataaccctcccagctgcttatcccttgcaccccgcacaagtctttggccgaagccgagtattggtagacgagaggaagtggaagagctggctcctcaccatccaaggagtgatcatgtttgcaatggcaacctagaagacggattgctggcattccgccgaaacgttcagggcgcgctcaagggccagagcgagtgcgctatttgttactcagtcatctcgaccgacatgcagacgcc

SEQ ID NO: 19728 - DNA, 1214 bp, Emericella nidulans
ccggcgcctacgacaggctcgaaacgggactacaagggatttgtagctggagtgttttcgggaattgctaagctgagtggtgagttaccctgcagatcatccaccattggagcataactaataatggcttatgtacatgttagttggtcacccgtatgttctcttgcgccagtcctgccggttctccttcgctacgcatattagggatggaaacgaaaaatgctaactccatccattaagatttgacacagtcaaagtacgattacaaacgagcaaagacgggcatttcaaaggtccgctggattgcgtgctccagacggttaggaaagaaagtgtttcgggtttatacaagggggcgacgccaccgttagttgggtggatggttatggactcagtgtgagttgcgctgcggtctcgatttgagctatgcggggatatctaacaggaactttgcagaatgcttgggtccctaacgttataccgccgtctgctacttgaaaatgtcttctcgaacccttcaatacgtgctatgactccgtttgcgaagaaccagtctgacctacatacactgccgagtttcggacacggcattgccggtattatggcgggcacgacggtcagctttatagctgcccctgttgagcatgtcaaggcacggcttcagatccagtacgcagctgataagtcgaagcggttgtacagcgggccgatagactgcacgcgcagaatcgtacggaacttaccccttccttaccgacggtgtactaataggcccgcagcttagcgcccacggcatcagcggcctctaccgtggcctctgtgcaacaatcctcttccgctcctttttcttcttctggtggggctcctacgacgttctgacgcgtctgatgaaagagcgaacttccctttcagcaccggcaataaacttctgggccggtggtatctcggcccagatcttctggatcacgtcgtatccgtcggacgtggtgaagcagcggctcatgacggatccgatgggcgggacgcttggcgacggggaacggaagttccggtggtggaaggatgcggcgaaggcagtatatcgggagagaggctggaagggctactggaggggctttgtgccttgcttcctcagagcgttcccggctaatgcgatggcgctggttgcgttcgagggggtgatgagatggctaccttaagataacactgccctc

SEQ ID NO: 19729 - DNA, 1215 bp, Emericella nidulans
cgcgttgatgctggcagtcggccaggggagccaggatatagtggagattctcgtggagcggaaagccaacgtcaatctagttgacaatgactacagaaccgctcttgacatagccgctcatgccgggtatgacggcattgcgcactacctcatccagcacggagccgacatgcgcaaagcgagagacttccaggagatatattccaagtatcaggaacggcagcaggccgccgcgtccaggaaacaggaccttccagacgaccagacgcaaaaggagaccgcaggagcacgatccactccgtttccttcctccgtgaagaaatcccagcccccgaacacagccacctggaaccacctaatgtccgcagtcttcgccaacgatctcgcgggcgtaaagcaaaccctccacaacggcaccgacatcgaaagccaagcacacgacgggcgcactccgctcatgctcgccgcctcgcggtcaaaccaagccatcataacccatttgctcgaaatgggcgccaacatcgacgccgtcgacaacaaaggctggaccacgctcatgcacgccgtgacggacaacaaccagccaatcgtggatctcctgctctcgcgcggggcagacgccaaccatgtctcgccggaccactgggccgccctcgctgaggcggcccagcacggccagacggagatcatggcgtcgcttttgcgctgcggcgcggacccggagtcgcggtcatcccatgattggacgccgcttatgcattgctgctataagggcgatgagatgggcgtgaggctcctgctgggctatggcgctgatgtcgtggttgggtcgcagcatgagtagacgccgctgttacttgcggctgctttggggcatgtggagattgtgcggattctgctggttgatgcgagggcgcctgcggagggggaatgggcgcggaagattatagagcgtgaaggggaggaccgagacctgcgggatcctggtgctggtgctggtgccggtgccgaggttgagagggcgtatccactcgggtggacgccgttgatggtggcctgtcaaggcgggcatgctgaggttgtgaaactgctcgttatggctggggcgaatttggagctgcgcagtccgatggagaaaacggcactggagattgctagggagcatggttgggtggatattgttggcattctagagggacatggtggtggtgctgg

SEQ ID NO: 19730 - DNA, 1215 bp, Emericella nidulans
cccgaactaccgagcgcacaatccgaactatggcaaggcgcaggatgcacctgtctggagtctgacatccccattaccccacgttgtccgaaatgggcgctggggcaagaggaagaagccacggcaagaccgccccgaagaaggggatactcaagctggaggagaaggaacaggagggagttactcgcgcccgaatgcgaacgcaccgcgccagccggcgtccgaagaagcaccggccttcgagcctccggaccaggcagacgaagagggcaaggcagaagctcagcaggcaacagaagacaatcgggaatttttcaactactggggcaagatccggcattatgtacgccaggaactggctgagtggctggggatgaccgttgccatgctgctcggtatctgcgcgggactgtccacattcacttcgtccaacctggcaggttcgtttccctcgctcgcagcggcctggggttttgggttcatggtcgccatctaccttactggtggtatctctggtggtcacctgaatcctgcaatcacaatctccatgtggatatggcgtgggtttccggcgcgcagatgcctcacatatacgattgcgcaggtcatcggcgctatcacggccgcgggaattgcatatgctctttatcacgatgccatcgtgcagctcgctgcttcaagccaagttccccagcctcgaacggacgcgaacgaggcgatggtggtgacgccgaagcccttcgtccagcccgttgccgctttcttcaccgaattcgtcggctcagctatcctaatcggtacaatattggcattgggtgatgactccaatgctccgcccggcgccggtatgcaagccttcatcatcggcatcatgatcactgtccttgttcttgccctcggctacacaaccggtggctgtttcaatccagcacgcgatttctgcgcacgcgtggtcaccgttatggcaggctggggtggtcagatgttcaccgaatatcatatctggtggctctggggcccctgggtggctgatatccttgaggggttgtttggaggattcatgtatgatcttatcatcttcacaggtggcgagagtccgattaattaccctccacgacgacgcaagagggcttttattctcaagaaccgcaatgcgagggcgcgcatgggggtgggccaggataagattccggatttggagagggcggcacaaga

SEQ ID NO: 19731 - DNA, 1216 bp, Emericella nidulans
tttaggagtacgtcgatcaaaaacacaacgcatattcagttctactgtcgcacagcgggtggagatctatgattcgcaagaccatcggatacatcaaacatccacacgccattcttcccgcagcacacccgttaactacgcgaggccgagcaatacagcctgcaccgaaaatgcttctcgaccactgcagcgcgaaggaacaaattccggccgatcacacggtagcattgtccctcatgaggattgggagcgcgtcaagagtcgcggcccagcacacgaggtggcccacaagcaagaaacctcatggcttacagacagggaaaagagctacaagagctccgcgaaggaattatatgagcagacgtccgagatataccaggaattgttaggagatcaggcctggagggaggctgccgacgctgctgccgcgtttgaacattttccagcacagttcgatgatacgaaaagttctgatgatctcaattccgtccgaaaactagaagaacatcttggggataagacaaaggcgaatcattacatatttacgctttacagagaacttccttctcctggggtgaggcatctctcaaagcggtcccgcggtctgcttctacgcaggttcgccgatcctccaggccgtcgttgggttgatgctagacgttatttagcattggtggaagatatgttggctgccggccttccactatctcggtcactttggtcctccgctatccacctggcaggtcgatcgacgggcaaggtgactaaattcgacttggtgcgggcggttggcatatggaatcaaatggagcatttggcaggaatcagatcagacagcgtcgtcttcacaattttattcgatatagctgccaaagcaggccaattcaccgtcgccgagcgcttaataaaagaaatggagagaaggcagataaagtttggtcgcgccgggaaggtcaccaatatcttctataatggtttattgggggatgttgatggtgtttgtcgggcttttgacgagtttgtggaaagcggagagatagtcgatactgcggtgatgaactgtcttatgacatcctttctcaaagctggcgaaacagaatctgcgatgcagatctaccagcaactattacagaatcagcccactacgaatctcgcgcgacagaacctcacatcggagctcattgcttatcggaaaagctctaagaaactgggtcgc

SEQ ID NO: 19732 - DNA, 1217 bp, Emericella nidulans
gcagcacgtcatgtacgttaaacccatcctgtcacttcatctccgtgtcgagaacagcccgatccacagccaactcttcccctcctgtgtcaatcctgccgtcaatttcaccggtcatgcgaaattactccttttccgcgcgttatgggctttatacgcggtttcctcgacaactacccgtgttatatgaaacatcgcatcatgatcttggggataatatatggacaaacttgctgattgcttgactttcgcgcctttacagtaacaaggactccggtgtcgaaggtttccctcttcgatcatggtcaatcgaggtgtatctcctcaatgagcatggggagcaggtgccagccaatgtcttcgacaaggtgacttactcattacatcctagtttcggaaaccgagcgactcaaggtcagtcactttccctttgagcttctgtggtctttataccctgcttttatcccgattctcattacagggagagctcggatgataaacgcaacatactggattactacagctagggctaacctggaacgatagtattcaaaaacccaccgttcagaattcaagaagagggatggggtgagtttgatatgcagatcggcctcactgctgcggacaacaaggagcacttcatcgcacatgatctcaactttgcgcaatcgcgttatgagtctaagcacgttattgtacgtctcgactgcttccagacagactcttatgtcatatatgcttacatcttctgtagacgttcaagaaccccaagccggctttattggcggcgcttcgtgaatctggacctgttcctggcgatgagaacggagtgaagtcgaagcgctctgcaggtggagaagaaggatccaagaagaagaagcgaacggataagagcgtgagtcaatgaaaatatagagactgaaatgttgacgtctgacattcttactcccaggttgacatggataaactagccgatggtctccagcgactgggggaagatgacctcctgcaagtggtacaaatggtacacgataataaggcccctgattcttacaccaagaatgatgtcgagcgtaagtcctccattccagtcagatctagtccgaaaaaccaaccactaaccacatctaacagaaggagaattccatgtcgacctctatacactgccagacccattgatcaaaatgctttgggagtttacacaggaaaaaggagct

SEQ ID NO: 19733 - DNA, 1220 bp, Emericella nidulans
accggggagcacagcgatcagtgtaggaaactgggacggcgtgacggtgtatgactttgacggagatgggcttgcagatgtggcagtgaggctggcgaacggggtcgtctttggcgatggggaggaattcagtgagggcacctctgacgatgagcagtgggttggcattgtagatgggcagaccggcgctcttaaggggagcagtaagctgccgacagactttatcgaggacgggccgctggctgcgcggttcggggtcggctatctcgacgggaagaggcctcatctggttgcgttcatgaagaacagacaggatgggggcgacttcaatcgggtgattggcgcttggacgttcgatggaacggacttgattgaagaatggatctcacttggcgatgctctcgttggcgcagacggacacaacacgcgcatcttggatgtgaacggcgacgggaaggacgatgtcgtggagattggcttcgtgctgaatggcgaggacggctcgttgctttacagtatgcccgaacccatcgtacatggggacaggtactacatcggcaagtttgatcccgagcgagagggactgcagggctacgggatccagcaggacaacgaggagctgctgatggaatattactacgacgccgcggacggctcattcctttggacgcactatggcagtgaagtcggcgacgtcggacgcggcctagcagcagatatcgacccaacctacgcagggtacgaggtctggtccttccaggggatctacaacgccgccacgaacgaaacaacaacatccgacacctcactagccccctggccacagatgagcatctggtgggacaacgacactctgacggagctgtacaacgacggcaagctggagaaatgggactgggagaatcccactgacagcaggagtctgcctcggatcctgacgattggcaactatggcgctcaaaatcccaataactataacccggccttcctgggcgatatcatgggggactggcgggaggagattatcacggtgaatggggatcattcggagctgatcatctttacgacggaccagtatactgatgtgcggctgtacactctggcgcataacccagcctaccgcaactcgatgacgctgaagggatacatgcagtcgcacagcattgactactttctcgggcatgatatggagactcctgcgagcccgaatattcagtatg

SEQ ID NO: 19734 - DNA, 1220 bp, Emericella nidulans
ggcggtggtggtgggatcaatacccgtccgcaggcctccataggcagtgcgagccaggatattctagcgaagatgaaggcttttcaactttcaagacaaggggttcctcccaacctaaaccagtccgtctcgacaggagcgatttcgcaaggcggtcaacaaagcacacccagcgtatctggtccattatcaggtaataactctccttcggccatgaacggcccattggcgccaaccgcttcagggcggcttcctccaactcaccgtccaggacctccgaagaattgggcttccgctcctactgtcggtggcggctctcccgtgagcggctctccgtaaaggtggcctggcggcgaaacgcatgaagcccggactcaaactatcagatgctactggaccaagcaatccggcagctggaggtcagtccccgccggtggaccgattggaggtggagagtcagctttcagcaagtattcggagtacattgacacgaaatcgggaaccctgaagttcaagacaaagccgtcctccacggaggcgggatcgagttctcgtccggccaaagtttcagcatctctctagatgaagtggatcgtatggatgaattgggcaagggaaattacggaactgtatacaaggttcggcatagccgcccgcacatgcgcaaacctggacaaggcttgagtgggattgtcagcagacctcaagggtctgacggttcagataccgaattgaagccgcaagattccctgactggcgccgtcatggctatgaaggagattcggctggagttggacgagagcaagtttgcgcaaatcatcatggagttggacatcctccaccgatgtgtttcaccgttcattatcgacttctacggtgccttcttccaggaaggtgctgtgtacatttgcgttgaattcatggatggcggctccgttgacaagctttacggcgatggtatacccgagaacattcttcgcaaagtggcgctttctactgttatggggttaaagtctctcaaggatgatcataacatcatccacagagatgtgaaacccacgaacattcttgttaacacacgaggtcaggttaaaatttgtgactttggagttagcggaaatttggttgccagtatcgccaagacgaacataggctgccagagctacatggcacctgagcgcattgcaggaggtggagtgcagcagtcaggggcctctggc

SEQ ID NO: 19735 - DNA, 1221 bp, Emericella nidulans
ggaccatgaagggtctaccgatgctgtttttaacagtcaactttacctatttgaggccgtcggtattatctgctcgattcccaccatacccgcggacaagcaagttctctacgcgcaatccgtgctgtctcctgtgtttgtggatatggaaaagaacctgggctcggccaaatcgggagacgcgcgaccgtgcttcagatacaccacgacatcatggcgcttggtacactcgcaagaggcttctcagactggcagcccggcactagctcccctgccacgcagctcccagcgcccgaggtctcagaggcgttcagccaggtgtcggaagccacccttgtcgctttggagtcccttaaggcttcatttgacattcggacagcgtctcgatttgcgttctcgcgactgatcggggttcttgggtcccgaatcctcccccagcttccccgatggattgatggtctgctgacccaaacatcgtcgcgggacgagatggcgctgttcctgcgcctgctcgaccaggttattttcggcttcaagggcgaaatctacaatatccttgatgcgctgttgatgccattcctgcaacgggtgtttagcggaatcgcggacccaacctcgggtactgatgacgagatccacctggcggagttgaagcgggagtatctcaattttttgctcgccgttctgaacaatgatctgggtgctgtcatcatcagcgaacgtaagttttcagctttgattgttccttctcccattttttatcctaactggtttgataggcaaccaacccatgttcgacacggtcattacaacaatagagcactttgccaaagacgccgaggatttcacgaccgccaagatggcgtttagcgtgctgtctaggatgggcagcgctggggtggtccggacatcgcaccagcagcctcaaacggcccctccacttcgcaagtcgcgcttccaggtttcggccagttcatgattacccgcttctctcctctatgctgggcgctccccgccaccccgtctttcaacgcaaaggacgcgcaagcaaaacaggttctcgctgaagcaggaggtctgcagcggaccatctacagcaagatggggatggagtatatcgaatacctgcgggaccgcgagctacctggcatgggcatgggagcagacctggtggaagagtacgtggggacactgagccggctggacctgagggggtttcgg

SEQ ID NO: 19736 - DNA, 1223 bp, Emericella nidulans
ccggcgccactgcaggtaagaaacaacataagccataactgaagaagaaacagcattcttaccacctgtcctttaggcactgcgttatcatcaccagcgaccacatccacggccatgtcctcaacgtccacgacatcggcggccccgaccgcagggacctccacaacaagcgcaacggcacccccttctctaccctcccgacctagcacacttagtactgttgcgaaccaaaacgcctcaaactactccccatatggcgcctcacgatttggtgcgtcgccatatggcggctatggcggctatggaagctactcatccccgtattcgcgattcggtggaatgggctcaatgtacggcggttatggcggctatggtgggatgtacagcggtatgggagggtacggaggcatgtacggcggtggcatgcctggcgacccaaatgacccgaacagtttgacgaactcattcaaccagagtactcaggcaacgtttcagatgatcgagagtattgtcggggctttcggtggcttcgcgcagatgcttgagagcacttatatggcgacgcatagttcgttttttggtgagtacattcataatctgtgacgtgatttgtatgcttatttttgcagccatggtatccgtcgctgagcagttcggaaacctgcgtaacacgcttggctctgccttgggcatcttcacattaatccggtggttcaagacgttgatcgcgaaaataactggtcgtccaccgccagcagacgctacggcccttacaccagctgcattcgctgcatttatgggcggccgggccacactcccagatggctctccagcgcctccacggccttcacggaagccattcctgatgttccttgttgccctctttggacttccgtacttaatgggcaaacttataaaatctcttgcacgttcccaagaagcacaacgtcagaaaatcatgatgaccgccaacggtgagcagcagggcgttttggacccgtccaagctcgacttctgccgcgttctctacgattatacacccgaatcacaggaaaccaacggcattgatctggccgtgaagaagggcgacattgtcgctgtgctcagcaaatccgatccgatgggcaatgcgtcggaatggtggcgttgccgcgcgcgagacggccgcgtaggataccttccgggtccgtatctcgagactatccaacgcaagccacagcagc

SEQ ID NO: 19737 - DNA, 1223 bp, Emericella nidulans
actgcttgctcgcggcttggcggagattggccctcgaggcggtttagaaggatggcgctggatcatgatcattgagggtcttttggtagcgattcctgaaatgtcttgtttcgtcgctaacatgccctaactagaccttcctttgcggctgccttgcctattttgccctgccgaatagcatagaaaccacgccatttttgaccgaagatgagcgccgatttgctcgtgagaggatacagctcgagaatccgcatatccaggagtgtgtaagccccagtcgtcaaagcattccacatactgatatttggtagggccctcgcagccgaacaggagagcttggtgtggtccgaagtacgtagaggactcctggaacctcagatgtggttctcggctacggcatactttgctattctatccggactatactcatttggtctatttgtatgcatattactctgttcaaatgcaataacagttactgataaactcttttacagctgccgacaatcatcgacgagagtggcttcgcgagcgatgcaaaccaaacgcagctctggacggtgataccgtacgccgtggccgccgtgctgacaggtattcccttcgctgtcttctgtgctgcgtactctaacagaagaacagtattcgtgtccttcctttctgaccgcttgaaactcagaggcgtcattatgctattctcccttccaatcgctatcgccggatacgcggcgattggcaacatcacctccccacaagcaaagtacggcatgacgttcctcatggctacggggatgtatgcgagtgttccatgcattctggtctggaactcgaataactcagctgggcattacaagcgagctaccacatcgggaatgcagctcgcaattgcaaactgcggagggtttgttgcgagtatgtctcacatctacttcccatcgctccttccgatgtaattagatactaaccgctatttagcattcatctaccccaacaaggataagccgcagtttcaccggggtcacacggtggtcttgagcttgttggtttttgcttggtttatgtacgtgtcgatctctgcgccagtgggttctatactaatgcaatacaggattctcttaaatgtcctctattgtgctaagatcaaccgggacaaaagaaacggcaagtactccaagtatgaaggatatagcgacgatcgtgatccgaaattcatgatggtgctg

SEQ ID NO: 19738 - DNA, 1223 bp, Emericella nidulans
aaacaaacttttatcacccgcacaatatggacttttgttatgattgccggcttcttcattgccatgttctcgggccatatatacatcattggtcttgttaccgctgttcagatcatctcgttcaaggaagtcattgctattgcgaacgtgccaagcaaagagaagaacatccgttttaccaagtcgttgaactggtacttcttgggaaccagcatgtactttttgtacggtgaaagcgtcatctattacttcaagcacattcttctggtcgacagagtgttactgcccttggcgtctcatcaccggttcatcagtttcgttctctggattatgggtatgttccacttgtatgaaggtattgctcatgctaatctcgataggcttcgttttcttcgttgcatctttgcaaaaaggccactaccgtttccagttcactcagttcgcttggacccatatggcattgtatttgatcgtcgtccaagctcatttcgtcatgaacaacatcctggagggtatgatctggttcttcctcccggcttctcttgtgatcacgaacgacatcttcgcctatgtctgcggtatcactttcggccggacgcagttgattcaactctctcctaagaagactgtcgagggattcctgggcgcctgggtttgcaccattatttttggctacttcatgaccaatatcttgatgcgctacaaatactttatctgccctgttaacgatctcggatcgaacgttctgacgggtttggagtgtgaccctaacccagtcttcgtccctcaagcattcgagattccggaatggaccggattcggcaggacattttacgttgccccgatgcaatttcacatccttctgttcgccacatttgcctcgctggttgctccttttggaggcttctttgcctccggtcttaagcgctccttcaagatcaaggactttggcgagtcaatcccgggccacggcggcattacggaccgcatggactgccagttcattatgggcttcttcgcgtacatgtactaccacagcttcattgccgttttcaaggcgagtgtgggcgacatcattgaggccgccatcaatggcttgacggttgatgaacagctggaggtgctccgcggcctgagcaaatatctatataaccagggagcagttcccgagtcggtacgtcgacggctttcatactatggtacgctggctaacttttgcaggt

SEQ ID NO: 19739 - DNA, 1224 bp, Emericella nidulans
cgacaacgagccaacagctctgatattgctgaggaacgtgacatccctttatacccaacagctcgaaaaagcgacggcaagattttacgaccgcagtataaagacatattgaaaggtatctctaagctattctgagacaaattgttggccagtctaacctgttcttgataagatccggcaaacgcattgaacctcatcaaccatgttgctcctccaaaaggtgcctcgtcgaaagatatggatgcatacacaagccgcatatcaaggattaataaatttaagcgccttttacaagcaagcactgtgcctctccaagagttacgaaatctcgcttggtccggcgtcccggacgaagtacgagccatgacttggcaactactcctgggttaccttcccacaaacagcgagcggcgaattgcgactctcgagcgaaaacgaaaggaatatttggacggggtccggcaagctttcgagcgcagtaacgcagcgaccactagggaaaattctcggtctacggataccggacgtggtcgaggtctggacgaagcaatatggcaccaaataagcatcgatgttccgcgcacaagcccgcatattcagctttatagttatgaagctacacaacggtcattagaaaggatattatatgtttgggctatccgacacccggccagcggttatgttcaaggtataaacgaccttgtcacaccactttttcaagtctttctcggtgtttatgttaccgatttgaacgttgaagaaggaatggaccctggccagcttcctcgaagtgttctggatgcggtagaagccgattcattctggtgcctgacgaaactactggacggaattcaagacaactatatctatgctcagccgggcattcacaggcaagtgagagccttgcgcgacttgacgatgcgtattgacgcaaccctcgcaaaacacctcgagcaggagggggtggaattcatgcaattcagttttcgatggatgaactgtctgctcatgcgggaaatgagcgtacgaaacacgataaggatgtgggatacatacatggtatggtggtttagtttaatccaaagctgcacgttgtctctctaactcatatccaggccgaagaacagggcttctcacgatttcatctgtacgtttgtgcggcattcctagtcaagtggacagaccagttggtgaaaatggattttcaggcatgcaaccccacct

SEQ ID NO: 19740 - DNA, 1225 bp, Emericella nidulans
gcgacgccatctcaggcatctgcgccggctttccaaatacctactggcaggaatgcgaccagctcgagcgcgacccgaaagaatttcacgcggcgcttgcaaaggctgggtggttgggaatcgccctgccagaggagcacgggggcgcgggactcggtatgacgcgcgtaaaacaccagcaacatatacctattgcgagaccaagactgactcagaaaaaggcatctctgaagcgacgattatgatgcagacaatcacgcagtccggcgctggaatggccggtgcgcagtccatccacgcaaacgtgtacgcaacgcaaccgctcgcgaaattcggcaacgaacaacagctcaccgagacgatcccgaacattatcaatggcaaatggcgaacgtgttttggtgttactgagccaaataccgggcttgagacactggcattacagacgcgggccgagctcaacagcaccgggacgcactactccatcaccggccagaagatctggatcacatgcgcacaggtagcgaggaagatgatcctgctggcgcggacaaaaccaagagaagaggtttccaagccgacgcaggggttgagcatgttctgcatcgacattgacaagaacgagcccggactggagctgaagaagatcaagaaaatgggcggtcgtgctgtggatgcgaacgaggtcttctttgacaagtaccaagtccctgcttcgacgctcatcggccgcgaaaacgagggtttccggatgatcctacacggtatgaatgccgagcgatgtcttctcgccggcgaagctcttggattggggtatgtcgctctcgaacgagcggcggagtacgcgaacacccggcatgtgtttggccgcgccatcggcaaaaaccaggccatcgcgcatccgcttgctgatgtctacatgaaactcgaggcggcaaagctggccacataccacgcggccaggttgtatgatgcctcgcggacagatgagtccatccccgcgcatagtgttggagtggcggcgaacagcgcaaaataccttgctgcggaggcagcctttacggcgtgtgagagggcggtcttaacgcatggaggcatgggctatgcaatggagtacgacgttgagcgatggctgagagagtgcctagttcccaggatcgcgccggtcagtcgtgagatgatcctgaactacgtgagtgagaaggtgctggggctaccgaggagc

SEQ ID NO: 19741 - DNA, 1226 bp, Emericella nidulans
cgccaggacattgacaaccccaatcctcagatgtgggtaagtacggctgcccgtttgaccacgtcaagctaactgtcctaggatcttgccgcctaccgagtcctgaagaaggaacaccacaaagcgcccggctgggttatcttcccaacatacgattttgcggtatgtagcctgtttctcattgtcggctcgtctaacgagagtagcactgtctctgcgatagcttcgaaggaatcacccacagtctgtgcacgactgagttcgtcttgtcacgggaaagttatgaatggcttaactcgactcttggagtctacgagcccatgcagcgcgagtacggccggttaaacgtcagtggaacgatcatgagcaagcgaggcctgaagaagctggtcgacgggggctatgttcgagcatgggacgacccccgtctgtacactgttattgctctccgtcgacgcggtgtccctccggaggctatcttgtcgtttgttaacgagctcggggtgactaccgctaactctgtcatcaacatcgctcgtttcgaacagtctatccgtacctacctcgaatcgcgtgtaccccgtcttatgctcgttcttgacccgctccctgttgttattgaagactttgataccctcagtgcagaacagctcaacctcgatattcctttctcgcccaaagaccctgcgatgggctcacaccaggtcggcttcaccaaaacggtctacatcgatcgttctgacttccgagaggaagatgccaagggttacttccgtcttgcacctggcaagagtgtcggtctgtggaaggccccgtacccgatcaaggcgaccaccttcactaaggatgccgatggaaaaatcacggaagttcgtgccgtcctggacaaggatggtggaaagccaaagacgtacatccactgggtccctgagggatcgcgcaagcttgaagtccgcatccacgaccaactgttcaagtccgacgagcctgccgctgccgagggtggcttcctcgcggacattaacccgaacagtgagaccatctacgcagacgccatgattgagtcaggtttcgacgaggtgcggcgcagggcaccgtggcctgaagccgcgggtgagacgagcgagggaactcctcgaccagagactgttcgcttccagggcatgcgggtggcctactttgccatggactcggactccaccgacagccacgttgtgctcaaccgg

SEQ ID NO: 19742 - DNA, 1226 bp, Emericella nidulans
tcacagaactacggagagtaccagcaagagatttacgggcaaggcgccttgatgggcctgaagccaaatgtcagcaccgacgcccgtttactcgaggagcaggcccgaaaggctttaagtgacatcgcgtataattatgtcgccggaggagctggagagaaggctacgatggacagtaatcgtctggcatttcgccaatggaagctgtaagctgattccttcgctgttgggtctacgtaggacatggaacgactgatgtccccggcatttacagaattcccaagatgctgaggaaggttggtgatgcccctgtctcttgtcctacctctgaattatttaataagtttgcttctctgtagatggataagcaggacatcagtgtaaatctctttgggcaagattacccgacgccccttattatggcgcctgtgggtgtccaagggctattccacccggacaaggagacaggtttggccgaggtatgcgctgagaccggtgtaccgtatactctaagcactgcgagcaccagctctattgaagaagttgcgaacgcgagcggagacggcaagaggtggtttcagctctattggcccggcgacgacgatatcaccctttcactggtgaaacgggcaaaagaaaacggatattctgtcctggtggtcacactagacacctggtctctgtcctggaggccggcagacctcgataatgcttacatcccgttcatccgcggaatcggcaaccaggtcggcttctcagatccagtattccgcgccaagttcgaaaaggaaagcggttcaaaagtcgaagacgatatcgttggagcatctagggcatggatcagcaaggttctatccactacgcctcatgtctgggacgaggtttccttcttgcggaaacactgggatggtccgctcgtgctcaagggcatccaacatgtggaagatgcgaagcttgcgcttgaagctggctgtgatggtatcgtagtttccaaccacggaggtatggcactcaatctctcttcatatttccttttccccatggcttcgctgcatgctaactgggcgcaggtcgtcaagttgatggagctattgcgtcgttggaggtgcttccggagatagttgacgcggtcggagataagttgactgtactcttcgattctgggattcgaacaggtgccgacattatcaaggctctatgtctgggagccaagggtgtcttggttg

SEQ ID NO: 19743 - DNA, 1228 bp, Emericella nidulans
atattgatgccatacccacaaatggttactatgtcacctacctgggcaagcccgtcaaaatcccataccccagccaaagtcccggggcgccgccaccggagggccgctcgttccaccatggccggttcgtgatgaagctgcgcgaactgcaggggcttgtcccaatgtcactatcgttgagacaaaggttacggacctgatcaccagttcccattccaagcaggttcttggtgtggaatgcgtgaccaaggagtccaaggactgctatttcggtcagatcaccgtcgtcgcggacgggtacgcctctaagtttcgaaaacaataccacccttataccccgaaggttcgatcgaagttctgggggcttgagctcattgatgcggaactgccgcagccacactacggccatgtcctcctagagcctgagcgcccgcccattctcatctaccagatcggaactcacgaaacgcgaatcctctgcgatatccccgaaaatctgccctcggcgtccgtcaagaacggaggcgtaaaaggtcatctccgcaacgtcgtgctcccgtccctgcccaaatgcgtgcagccctcctttgctgcggcgttagataaaggtcagctgcggtcaatgccgaactccttcctgccgagcgcgccgaacaagacaccggggttaatagtgctgggtgatgcgctaaacatgcggcatccattaactggcggaggcatgactgtcgctttgaatgacgtcgtcattctccgcgacttgctcagcccggagaaggtgcccagactaagcgacaccagactcgtcctcaaaaagctgtccaccttccactggagacgaaagatgggggcgtctgtcatcaacatcctagctcaggcgctgtactctctcttcgctgcagatggtaagccgcttccctcctaatccattcactatcgaaccaaatactaacctctcgcagacgataacctcaaagccctccaacgcggctgcttccagtatttctccatggggatgtacgaaacccccgtcagcctcctcggcggcatgctcaagaaaccagaagtcctctttgcgcacttcttcactgttgcgttcctctcactgtggatgatcatccgcgactcccccctgtacaaactcccgctcgcattgatccggtgcgcgcttgtcttttggacggcgtgtgttgtcatctttccttatatgttaattgaagccttttgt

SEQ ID NO: 19744 - DNA, 1230 bp, Emericella nidulans
gcagcaccaggaagccgatccgatgatgcactacgtttggctttatgagggcccgcaatggaagcaaaaggctatggctgccgccgtggtggctggtatcttcgcagtcgtgctctttccgctttggcccataatgctgaggcaagctgtgtggtatttgagtgtcggcatgatgggtctgctcggtctattcttcgcaatggccattttccgtcttattctcttttgtatcaccgttttcgctgtacctcctggtctgtggctgtttcccaacctgttcgaagatgttggtttctttgacagtttcaagccattatgggggtggcaagaggtacgctttccctgttcctgatgcagaacaatcactgaccaaagatttatcagactggcaagaagaaaaagaagtctaagaaggctgcgagtagcgcagctcaaacgtcaaatcctcaggctacagagtctgcccctgcagcaaccgctgagaccgcacccgcagcaactacaactgcgacagaaagtgcggatgcagcgggtccagtcaagcgtgatctcgcgcctcgtgttgaagaggttgaggagtgattttatagcttggcatatggcaacatttctcaggtgcctgcgatattgcattttctgcgatcaaaatttcatgagctcttcaatgcctttacgtatgcttgaactgggtcatctttcattccttttctcctaacttgttcttccgccatatcattgaaatgcttttacaattgggttaacggagaaaggagttctttggtgcaatgtaaatgaaaacaaaataaccatgaattctaattctctaagtaaatcgcgagtgaatcataccaagtaccgtctctacatggtagtccggatccttaaaggaagactattatagctcggtccgccttcatataaccaagacgacagagttaagcttggtctttctctttattctcttgagctgatctcacaggaagaggacgacgcggtatagcatggcgggcctccgggtgtggctgtggaatagcctcttcctcagcagcgatctcgccgctttccagcttcctgcgagcctcttcagtgtccccctcaattccagcgcggcgctcattttggatccgttgttgttcctgcttgtagtcctttgccttcaaggctgcctcttctcgtgccacctcccgagcactgatacattccaacccaactgtacggagtattcgccca

SEQ ID NO: 19745 - DNA, 1232 bp, Emericella nidulans
gctcgccaagagcgcatcgagcgattgccccctctctcggcatgctacaatctgctagatttcgagactgttgcgcggacgtgatgaagaagactgcttgggcttattattctagcggtgcggatgatgaaattgtacgtacggccgcgtttgttttctttggttctggtaggaaactaatctctccgacagactatgcgcgagaaccaccaagccttccagaagatctggttccggccccgagttctagttgatgtcgagaacgtggacttctcgaccaagatgctgggcaccaagtgctcgatcccgttctatgtcacggcaactgctcttggaaagctaggtaatcctgagggcgaagttgttctgactcgcgcggcacacgaccatgatgtcattcagatgatccccacccttgcctcgtgctctttcgacgagattgtcgacgcgcgccgaggcgatcaggtgcaatggctgcagctgtacgtgaacaaagaccgcgccatcaccaagcggatcatcgagcacgccgaggcccgcggctgcaagggactcttcatcaccgttgacgcccctcaacttggccgccgtgaaaaggacatgcgatccaagttctcggatgttggctccaatgttcaggcaaccggaggcgatgaagtcgaccgctcccagggtgccgcccgcgccatctcatcattcatcgatccctcgctatcgtggaaggacattccttggttccagtctgtcaccaagatgcccattgtcctcaaaggcgtccagtgtgttgaagatgtcctccgcgccgtcgaggccggagtccagggtgtcgttctctccaaccacggtggtcgccaactcgacactgccccatcgggcattgaagtcctcgcccaggtcatgccgatcttgcgcgagcgcggctgggagaaccgcatcgagatcttcattgacggcggtatccgccgtgcaactgatattctcaaagctctctgcctaggcgccaagggcgttggtatcggccgtcctttcctgtttgccatgtctgcatacggccagcctggtgtcaaccgagccatgcagctcctgaaagacgaactcgagatgaacatgcgcttgatcggtgcccagaagatcgcagacctcaaccctagtatggttgacgtgcgcggtctggttggtggtcacagtgcgtctgtgccagccgatacgctgagcctgggtgcttacgaccc

SEQ ID NO: 19746 - DNA, 1232 bp, Emericella nidulans
gcgcggtgcggatcgtattcttttacgttacagatcccaggaatgcgccgatctccccgctctgtccgaggtgttatcccgctgctacgagggcgtcgcaggagaatcgcggtactcaggtaccggaaactggcaggggtcatcctctgccaggtaacatgcaccccacgattacgggatatccgcaggctcctatgtaccccgggcaggtaccagggccatacgggtggtcaatccctaacccagctccatacccaccacagcaaggttctggattctttcacccggcgaaccctcatgtctatcattaccaatacccgcagtggcagccctgggggtggggcacacaacattcgcagcaatatgaaagctcgatcctgaaaggcggtccattaggctggttctcgagtcttgccgcgcaagcgcagaaatacggcgaccgcatctcggagcaggctctgcattacggggatcagataacggcccatgcacagtactacggcagcaaggtcgaagaacaagctatggctcatggccgctggatcgaagagcaagcaggtctcagtggtcgaaaggctgaaagcgccttttctggatggaaccaacctccgcaggcatatccacactactatccgcaaccacagccccagcatcagtctcagacttccggcaccgctcaatatacccagcaaagtcaatccgcaccggagaccacagtagcccagtctcagcaactttcttctgaccaacaaccgcagcaacaaccacaacagtcagcaaactcaacttcctacaaccgcccccgaagggattctacctcgtccacgacctctgactcctccctctcctccatcgattccatttccacaacatcagatctctcctcttccgacctcgccaccgtccgcgcccaactcctttctctatctgcccaccatgaccgtgaactctacgacgcagccgtcgaactccgtcggcagctcgacgctctccgcgaatctcgacggcaagcccgcgtctcttcaacccgccgctggagaccgggatggggacagtcgcgaagtgatcagcactcaacatcgcaatcgtcacaccaaggacggagtagctggggaaggtgggagtcaccggcagatcggcagcggaatcaggcggaacggcgggccgcgaaggaggagctgagagctacgaggaaggcgtttcgggatgttgtgaagagggcgcgcgaggag

SEQ ID NO: 19747 - DNA, 1234 bp, Emericella nidulans
tcgtcgagcatcccgcaagatgtgtcacggcggtaccgcagggactgggaggactgccgttagaacgggcgagttcgagattcgggcaaccggtgactgacggctcgaagccggattctgcgccctctacgcctgtgccagtgcatgaggaaaccattcgatctgttctagcagacgtcgtgggaatctctactgacgatatcaagccaaccacgagcattttcaacctcgggcttgactctctttcagctatcaggctcgcttctctttgccgcacaaagggtttgaaagtcagtgttggggatattcttcaggggaatacgctgcgcggtataagtacgcgtgtgcagttagaatccgaagtctctaccacgacaaacgggcacaacccagttcatggaacttcgtccttgattaaggattatcctcacgtcgaacaaaccgtcatctctaatctgcatctcagcaaagaagagatcgaaacaattatccccgttctccctggccaatttcaccacctggttggctggctcaagtcagaccggaaactgttcgaagcaccctgggcttttgtcgctcgtgatgataagcgtatcaatgccgataagctccagtgtgcgtgggccgatcttcgcaagcgacatcctgtgctacggacggcctttgcagctacctcggactcagaggctgtgcagattgttctgagaacacctgcagaaaactcggatgcattcagagtcatcgaatctgcggacaatattgccgacctagccagagcgcacgcccgcgaggaagcgttgcacccatcctccctctcttccccgcctgtgcgattacggcacctcaaggctgcggatagggatggcatcctgcttattatccatcactctctgtacgatgcatggagcattccgatgcttgtctctgaacttggtaaactctacgacgatcagccaacagattttaccacagccccagacttccctgccctcgtggacttttcacttcgtgctctctccaacctcgatgtcaacgagaaggattactggacctcgactcttaagcccgctacaccgactcttgtcaggagcgccggtacgcagaaatcaattgcaaacaacgaacagttgttcgttggcgaatgggaaagagtctccaatctatctacgatggagaaaatatgtcgatccgcgggattcagccttcagacgatcatcctcctcgctgttgcgcg

SEQ ID NO: 19748 - DNA, 1234 bp, Emericella nidulans
  unsure (1)..(1234): unsure at all n locations
cgtgaattcgtcggggttcgacccaagtttattccatgacgacgatgggaagaagtggtttgtaaatatgctctgggatcatcggcggcgaccgcgcgcgtttgctggaattgcactgcaggagtttgatcccgtctctgggaagttggtcggtcctatgaaaaatatctttcgtggaacggaactggacctcgtcgagggcccgcatctgtataagcgcaacggatggtattatctcctcacggcanaggggtgggaccgcgtacgagcatgcttgcacgcttgcgcggtcgagggagtatctggggcccgtatgaaacgcatcctcagacgcacattctgagctccaaagatgcgccgtttgcagcgctgcagcgtgccgggcacggcgaccttgttgatacgcccgatgggagaacttaccttgtccatttgacgggccggcccgttggacagagcaggaggtgtgtgcttggtcgcgagacggctatccaggaagcgtactgggataacaatgactggctgtgggttaaaaatgggcctgtaccttcgctgtacgtcgatgtgccggggacccgcgttgagaagcagtactgggtcgaacggcgatatacgttcggagatggcacgttacataaagacttccagtggctgcgcacccccgagccacagcgtatattttcgatcgagaacggtgctctgtcgcttataggccgggagtcaattgggtcgtggtttgagcaggcgctcgttgcccgacgccagactcatttctcgtacgatgcagagacagtcctggcagattacacacctatcaatgagcgccagtttgcgggccttgttgcgtactactgccggtacaactttttctacctcgccgtgacagcagacgaatacggacagcgggaaattaatatatttcgatctgaagcctcgtatccggaaggaaaactcgatactccagccccggacccggttcgacttccaaatgaggggagggtcaggctggcactgagcatccgaggcggactgactttgcagttcttttatgcccttgaagactcggacttacagccttttggaccagtctttgatgcgtcgatactatcggatgaatgcggagggcatcaagcgcatgggagtttcactggtgcatttgtgggcatggcttgctcagatgtgaatggcacggcattgccggcgaagtttgagtcttttgtttataagcctatca

SEQ ID NO: 19749 - DNA, 1235 bp, Emericella nidulans
gggacccaggatctagactccaccaatgcctttgaaggtatgttcgtctattctgagcagccggattctgactaactatgtaggccctgagaaactcctggaagtctggtttgctgcgtcgcccaaggacctgggcacctcgaaccccctcggtctgaaggcggtttcagaggatgtttggaaggaaatgctggatatcgtcaattgccaggtgctgtctattgtctcgtcagatgatgtagatgcctatctcctgtcggagtctagcatgttcgtctggccacacaaattgatcctcaagacatgtggcactaccaccctgttgtccggacttccccgcatcctggaaatcgctgccatgcatggtggcttccccaagtccactgctcctccgtcccgtggaattaccgttgcagcggctccataccgcgtgttttacagccgtaagaacttcctattccctgaccgtcagcgcgggcctcaccgcagctggagagatgaagttcggtctatggacaagctctttttgaacgggagcgcatacatgattggctaaatgaacggcgagcactggtacctctatctcaccgagccctacacttcactcacgcctcctgctactccaactgcagactcggacgatgaggttactcagaccaaattcatccagcttcccgaccggtctgatctcggtatgggtccgcaggacgaagcgtcagatgagaccctcgaggtgctgatgacggacttggatgaggagagcgcgaacgagttctacctagaccacgccaccagcgttgctgagaaacgctacagcaactttgaaaaggatgatcacgtcgatgtgttcagcaacggctccgacctagaggttgacgatgtctcctcttctcaaggcagcggaatcctgcctgcggaactcacaactgaaggccacgctcttggcaccgtcgtttccgagtcctgcggcctttcggacgtgtacccaaagggcaagttccctgactcgcgcattgatgcctacctgttcaccccttgcggattttccgcgaacggcgtgattccttctcctgatggtggcaaaggcacccattatttcaccgtccacgtgacgcctgagcctcactgctcgtacgcttcgttcgaaacgaacgtgccgcattcgaggaatggtcagacttctgctggtatcatccagcaggttgtcaacattttcaagcccggtcggttcactg

SEQ ID NO: 19750 - DNA, 1236 bp, Emericella nidulans
cgatgcatcccagggaaatggtcaaaccaatccctcccacatgccaccgccgccccgacctcccgtgattatccctcagaacaccaaccctatcccgaccgctatcaccacaccgatgtctgggaatatggtgtccccaactagcgctggcggatatgtgcgtcgtgcagcccctgaaccaaacaagagggctctctacgttggtggcctcgacccgcgggtcacggaggatatattgaaacaaatctttgaaactactggacatgtcatcagtgtcaagatcattccggataagaacgtgggtttccagactttgagcgctcaatttagttactttcgtcggaacattacttactaatgggaacagcagttcaacagcaaaggggccaactacggtttcgttgagttcgacgatcctggtgctgccgagagagccatgcagacgctcaatgggcgtcggatccatcagtcggtatgcgccaacacccttcacctgagttatctcaggctgcttctaacccctcttacaggaaattcgtgtgaactgggcgtatcaatcaaacaccgccaacaaagaggacacttcgaatcacttccacattttcgtcggcgatttgagcaacgaggtcaatgacgaggtcttgctgcaggcgttctctgcctttggctcagtgtctgaggctcgtgtgatgtgggacatgaagactggccgctctcgtggctatggctttgtcgctttccgtgaacgcgcagacgctgaaaaggcgttaacctcgatggatggagaatggctcggctctcgcgctatccgctgcaactgggccaaccagaaaggacaaccatccatttcccagcaacaggcaatggcggctatgggcatgacaccgactacgccatttggccatcaccacttccctactcacggcattcagagctacgacatggttgtccagcaaaccccagcatggcagaccacatgttatgttgggaacctcaccccttacaccacgcaaaatgatatcgttcccctcttccaaaactttggctacgtgattgaaacccgtatgcaagccgatagagggtttgcgttcatcaagatggatacccatgagaatgcagcctcggccatctgccagctgaacggctataatgtcaatggtcggcccctgaagtgcagcgtatgcgtctcaccaagcccaatctccgtttttgtagctaattatcaatagtggggta

SEQ ID NO: 19751 - DNA, 1237 bp, Emericella nidulans
gtagcccccgaaccgaaagcgcgctcagttcttcgcttccagagtcttccttacacagatacggaaatatggacccagcgctcaacgttccacagggctcactgaataattccgcgggcgaatcttcaccaactcctcgatcatctttcagagtcggcgttacagaggaccggaacaaaaaatgtcgccggactatggaagatacccatgcctatctttataatttccttggtaaccctgtaccgtcagcgcaaaatgatgattctgatcagagctcgcatcctagcgacgcttcgccaaagaccggagaattgacgcccattgttgaaacagataatggctacttcgcaattttcgatggccatgcaggaacttttgctgcccaatggtgtggaaagaagttgcatcttatcttggaagacgtaatgcgcaagaacataaatgcgcctgttcccgagcttctcgaccaaacatttacttccgtggaccagcagctggaaaagctgccggttaagaatagcggttgcactgcggttgtcgcattactcagatgggaagatagaattcccaccccaagttccgtgaccggttcgtccgccatcgggccggcagccgtggcagcgaccaaggccggagcggattcaaaggcagatgacacccctacccaggaagccgccgctaccccggttcctgctattccccccaagttacgcgaaaaggcgattcgccagcgtgtcctatatacagccaatgttggcgatgcccgtgtgatactgtgtaggaacggcaaagcccttcgcctgtcttacgatcacaagggtagtgatgagaacgaagggagaaggattgctaacgcgggaggcttgattctcaataatcgagttaacggagttctcgctgtaactagagcccttggcgatgcctatatcaaagatcttgttactgggcatccttacacaacagagactgtcatccagccagaccttgacgagttcatcattttggcctgtgacggggtaagtcaacatgcgtttctagcacggatttcgattgagctaatagttctttgcagctctgggatgtatgtagtgatcaagaggctgtcgatttgattcgcaatgtgtctgatgcccaggaggcatcgaagattctggttgatcatgcccttgcgcggttcagcactgacaacctttcctgtatggtgattcgtctctatgcagaccgccaccgcgaagtt

SEQ ID NO: 19752 - DNA, 1237 bp, Emericella nidulans
attatttattacttcaatgccgggctcggtatcacggcgggtaggttcttccttgctgtttctgctatgggagctttgagagagaggattaactgaccgttcttgtctagggtaccaccgcctctgggcccattgttgctacaaagccaccctcccactacagatctacctcgcccttgctggtgcgggactggtcaaggctcaatccgatggtggtcccgcggccaccgagcacaccaccgctatacagacaccgaaaaggacccgtactctgtccggaaagggttctggtactcgcacatcggctggattatcatgaagcagaactataagaaggtcgggcggtcggacgcgtcagacctcgacgctgatccggtggtgatctggcagcataagaactatatcaacactgcactgttcatgactctcatcttcccgacattggtctgtggacttggatggggcgattggcgcggcgggtttatctacggggggattttgcgagtgttctttatccagcaggcgacaaattgcgtgaactcgctggcgcactggataggcgagcagccgttcgatgatcgcaattcgccgcgggaccatgtcatcacggcactggtaactctgggcgaagggtatcataatttccaccacgagttcccgtctgactaccggaatgccattgaatggtggcagtatgacccgacgaaatggatgatctggatctggaaacaggtcgggctggcatacgacttgaagcagttcagggcgaatgaaatcgagaagggaaggctgcagcagatgcagaagaaggtggacgctcgacgggcggcgctggattggggagttccactgaaggagctccctgtctttagctgggacgagttcattgctgagtccgcgaaccgagccctggttgcaattgggggtgttattcatgatgtctcggatttcataaaggagcacccgggtggaaagacattcatttcgtccgcggtcggtaaggatgcaacagccatgttcaacggcggtgtttatcaacattcaaatgctgcgcataacttgctcgcaatgaagcgggttggcgtggttcgtggcggaggtgaggttgagatctggaaggacgcaaagcagccttcgaaagtgagctttccagaaatggttcgtgctggagagcaaataacaagaaggactgtgccggtgcttgatagatcgtagcctcaaagcctgcatcgatggg

SEQ ID NO: 19753 - DNA, 1237 bp, Emericella nidulans
gcgcttcagcatccgaaccccactgagtatgcgtcgcgtctgcctattcatcaggatggctcctgtaacggtctgcagcattatgctgctctcggtggtgacaaacttggtgcacagcaggtcaatctcgagccatctgaccgtccttctgacgtgtattccgccgtcgcccagtacgtaaaggaggccgttgcaacagaagctgcacaaggcgatcccatcgccaagatgctcgaaggaaagatcacccgtaaggttgtcaagcagaccgttatgacgaacgtctacggtgtgacgtttattggtgctatgaagcaaatccgcaagcagcttgcaaatcactaccccgaactttccgaccacgaaaagaaaacgggggccatctatattgctaggaaagtcttccaagccctagggactatgttcgaaggagcccgcgacatccaacactggctcggcgatagtgccaatcgcattacacagtcccttccgcccgagcagattgaagatctcgctaaagaggttctaaatccgtcgttttccacactgccactgactagccgtggcaaatcgaaaaagtccctttctagcagcgacccgtctgctcacttcaaaaccaccgtcatttggacgacaccattgggcctgcccgttgtgcaaccgtaccgcaataggttgccccgtcgtgttgtgacgagcttccaaagcttgagcgttgtcgagcaggattcccgctactgtgtcaccaggcgcaacgagctccaggccttcccgcccaacttcatccactcgcttgatgccactcatatgatgctgtccgcaattgcctgtcaccaggcgggcctcacgttttccgccgtgcatgactcgttctggactcatccttccgacgtcgactctatgaatcggatccttcgcgaggcattcgttcagatgcactcggatgacgtgatcaagaggctggcagcggagtttgaagtgcgctacggacgtaacttgcattatgctcgagtcccgcgatggagccggctcggaagagttgttgctgatttccggaagaacaagccaaaatcaactcgactcctcgagctgatcgaggaatataagcgacagaaattattgcggtctgatgaccctgagttgcaagctcagggtcgtgagatggttacagcggcaagttgttgtgaggcggcgggcggcacagacgacgatctggtcgtccatgcttctctaggtg

SEQ ID NO: 19754 - DNA, 1238 bp, Emericella nidulans
tggccatcatgcttgcagactcaatcgtcagcttaggctggctggtactgaagccggctctggtaattgcgccgaaggtcctaaagaggatttcaaatacccgagctggaagttggattgcttcaaaaagccctaaaattgtgccccgctcttacaactactccgcgttgagtcctataacagaagagtcatcaggcccgagcagtctcgcgcacgctgaaacgcgctggagagccgatgaggatgaagatgcgccgccatctcaactcatttccatgcgtacggtactctttctacttcccctaactctgctcctgaacgttatttgtatgcacattgtctttggcgatgtcatatctcccctcctttcaagccttgccacattgctcgctgtccttctatcaataatgggcgtccgtgcgctaggagagacagatctcaacccggtatctggcatcagcaaattaacgcagttgcttttctcgcttgcaaccccatcgtcgcatttttcgcgacgcaccgccctcataactaacctccttgcgggtgccgtatccgaatctggcgcccttcaagccggtgatatgatgcaagacctgaaaacaggccaccttctcggcgcgagccccaaagctcaattttatggccagataattggcagccttatcggtgctgttctttctacggccgtctacaagatgtatgtcaacgtctacccggtacctggccctatgtttcaaacgcccacggcatacgtctggatattcaccgcccgtctcgtcactggccaaggcctgcctccgatggcgtgggaagcctcctcggttgccggtattatttttgtagccatcaccatcctccgaattgtcgctgcttcaccgattgccaacggcggccgaccagttggcacccccgcgccttggcgatcctggatccctggtggtatcgccgtcgccgtaggcatattcaatgtaccgtctttcacccttgctcgagccatcggcggtcttatcgcgtggtggtggtctcgtgcccacacaaaccacacaaagaaggatgatggattcaaaccagcaactgaacccgctcagtcggtcctatcacgtcgaccagtcgaaagcgagaatcgtaaacctacgtctccagttgctggcaacgctgatgatgacgccgatgccgcttcatctagcgttgtcgttttggcttccgggctgattcttggcgagggaatcgtgagc

SEQ ID NO: 19755 - DNA, 1238 bp, Emericella nidulans
cgccgcgcgtgaatcttttcgcctggaatgtcggtgcgcgccgcctgtcgtctgggctggtgcctgctcctgctgggctgccccttgtcgaccttgtcccgctgggcagcatgagacagttggctgagatttacttttccaaggtcgacccgtgctatgggtttattgaccggcaggtgttcttacagcgtctcgatgcacggtggtcgtctagtggtagtggccgaagtggtatctacgatagtgtccttgcaggcgtggcggcgctggggctgttgttctctgaacggtccgccagtgcgacagagctacagctaatcgagaatgcaaagtctatcctggaaagctacgatggatatgcaccgccctctcttgatctgatcactggctgggtactgcatgttgtctatatgcggatgactgcagcgccgtactcaacatggctcgctagttcgacgataatgcatctcatcgaggccgcaggtctccagcatgagaatcccagcactgcctatgatccagacatccgccggcgcttggtgggtgttgccctgcaccagaacatgtggccttcctacgacattgggctgtccagagtgcaggtcaaggccgacttgatgcagttcacagacgtccgatccaagccaggagactacacggccgaactccttggcctgctgcctatatcagcccgccttgatccggaggaaaccgatgcggacggagacagcgacgtccacctacaccagtccctcctcgagaccctcgaccggacccacacacagccgccctctatcctcgcccagacgaacctggtcctctgtatcttgcggcgcctcaacctcctcaacatcagtacatctcctgccctgccggaccgcatcctctccctcttccaacgagcgctccagtcggcacgcagcatgctcacagcctgctgtccgtggcagcacatcgccaacgtccccttccacatcatcaccatccttctggaaatggatacccgctcatcactcgaactccttcccgaggccgtacagactgtgaaaatggtcgcttcgatatacaacacacccaccatgcgtgaggcctatacgacggcgaggttcctggtcttcgtctatcagcagcggcggtcccgcgatgtccggctactgaccagcgtgcttgatgcgaatgggcagcccgggaccgagctcgaacctggcagggcagcgagcgatgggatgcagcccgct

SEQ ID NO: 19756 - DNA, 1238 bp, Emericella nidulans
ccgagcaaggcctccacgtcctaattgcaggcgctggaattggcggcctttcagctgctatagcattacgacagcaaggacaccgcgtcgaggtatgtctcgtgagttgtcagcaggaacatccagcttagcacgccagatgaacagctcttcgagcgctcccgcttcgccaacgagatcggagccgcaatccaccttacacccaatgcgaatgccgcgcttctaaagctcggaattaatgcgacgacactcggtgctgtggagtctgaaaaggttcgtgaaagcgttgactgaaaggttgctagtgtgctgacgcactgcgacagctccgtgtcttccctccaaacgggccggagatattctcgttggacatcaagaagactgctggtttctggaggcatgtaagttgcacgttccataattctatgcatcaataatgacccttcagcgctggcttctcgtccaccgggcgcatctccatgagggcctgaaaattgctgctcaagctcccggccctggagtgcctgccaaactacacacctccaacaaggtagtagacattgatccccacagcgcaactatcaccctcgaaaacggagaaaaggtaactggcgatattgttctcggcgcagacggcgtacactcggtcgcaaagacgaaactttctggtggaaagaatataaaaaccttcagctcaggaaagaatgccttccggttcttgatttctcggaaggatgcactggatgaccccgagacaaaagaactcgtgaatgagccgggaacatggtacatgtttgacagccccgaccttcgcgttgttgtgtaccctgtgccaacaatgatctgctgaatttcgtgtgcatccatccggagtccttgtccaagatccacgatggttctgagtgggatcagggtgcaagcaaggaatcattgctggaggtgtacaaggatttcagcccacaggtccgcagattgctagcgaaagctgacccaaccacgttgaaggtgtggccgttgcttgacaccgatgacctgcctacgtgggtggaagaccgacttgcggtcatgggcgatgctgcacatcctttcctgccgtaccgtgcgtcaggcggcgcaatggctattgaggacgcggtctcattgggcgttatgcttcacaagggtgtgtctgtgggaagtatttctgagcggctgaagctatatgaaaaagcccgccgtacccgcgcaacgacaattca

SEQ ID NO: 19757 - DNA, 1238 bp, Emericella nidulans
cccgccagatacctgacgatgacaagtcccagagactggatttgattttcttcagatacactagctagtaacttgaattcaggcctgggcacggtcaagggtagtaggcagacattgttgcgccaaattgtcgccaagtcacgggatcgattgccggcacttcactctttttggaactaccaaagccaaagctttaactgtcaacgcatacgctacaacaatgtggaaaccttcgaagcctctctcgttattactggagccttcgctcctgcagagtagtctctgcctcaaatgtcagctgcgcggtacctctgcggtccgacctagagcttctctgcgttcctatacaacgccaaacagcaacggagagaagccgtcggcctcaactaaagcaacgacaagcagaagagttcaattccagcagaatgccactcctcaatcagctcctcccaaggcgcatgaacccagagaacaagagccaataccacttttagaccgcccaattggttcggcgattcccccgcaggagggtcaaaacactgggattgacaagcggacattgggacaacgacgggacgattttgtgaactatgaaaaacatatcaagaggcgtgaagagctgtatgtcatcggcctccatatgctctattacagttgcttactatattcctcaattattaggacacgacaagccgcaaagccatacttccgagaatggtcaaacatgcgatacaacgagggtaagacctttgtgtcgaacccgcgcttattcaagcgtgacaaagcgctctacttccctaacctttacggaactacactcgcctggccgcatgaaccgcagaataccacatccatactccgcggtaaagtgtctgtcgtgaacctcttttccagcgtttgggcagaaagtcaggtcgccacgtttactgggccccagttcaaccccggtctatatgaggcatttaaggaaggtagtcaccttgtgcagaaggtcgatattaacgtggaggacaacattctcaaggcgtggctggttcggatgttcatgtggcggatgagggggaagctgcccaaggaacaacatccaagatactttctggtgcgcaagggtcttgacgatggcctcaaggaagctattgccatgatgaacagtagagttggatacgtgtatcttttggacgagaactgccgtatccgatgggcaggcagtggacctgctgagcccgccgaattggaga

SEQ ID NO: 19758 - DNA, 1240 bp, Emericella nidulans
cgctgatcagcatggcgaacctggcatcaacctaccgcaaccagtacaagttcgcagaggctgaactacttgagatggagaccacgaagatcttcaagtcagtccttggctcccagcaccctattactctacgaagcatgggcaaccttgcgtctacaaagcggagcctggggaaacttgaagaagcagaggagcttgaggagcaggtgatgacgacgtttgactccattttaggacgtgctcacccagacacgctgacaagcatgggcaacctggcctgcacatatcgctatcaaggtcgctgtgcggaagccgagaagctggaaatagaggtactagacgcgaggaaaaagctactgggaccgagccacgtaaatacactaaccagcatgtggaatttggcccgcacttggaggaggcaggagaagtacacggaaagctataagttgttgcaagcctgtgttgaacagcagattcgccagctggggccgaaccatcctgatactctcgaagctacgctggaattggattcatggcaatcgggcatagatggaagctggatacttatgaaaaacgtggagtaaccgagaactgctattgatatatgacacattatgcctgcacaggggaaagagaaaatggaataatgatcagatcccactttagacctgggttttcttccccaccgatatcgcgaccttgaccataggtaagctgatatgcaatcttttcaagctgcgaagggtctcctcgtggcgcagggggtgcctgtatgccactgtgatccctctctaggcagcgaaggtcgatttcagcatttgtaacgagacagaccacccactcgggaatggattcttggacgtcaccagggatatcctttggccaacggatctccatccccttaagaacgtcagtatgctgtgtcttccccatcacatactgactgctggaacagagcctgatcccacgcggtgaagaccgtgatatcaaggatatcttcccggccgcattcacatcgaagactgacacatatacagtatcgaccgaagaagtattgttcagtgttatgcatatccggtctctgcaactaatccaggcagtgccattagtagcaagatcctctgtaccatgttctccaggattgattttcgagagtgtaatctgcaactcgtggtccagtctcacttcacctgcaggtttgatagacaacaagtgagctgctcgagatactgagtttgca

SEQ ID NO: 19759 - DNA, 1241 bp, Emericella nidulans
cgcctcttctgcatcttaggtgacattcaaagcgatccaactttgtatgaccgcgcctgggatgtctcgaaccagcggtatgcgcgcgcccagcggtctctcgcccgtcatttcctgaccctcaaaccgccggccctcgaaaaagctgccgaagcctatacgaagagcttaaacattaaccgactcaaccacggcgcctggtttgccctcggctgcgtgcaactcgagctccagcggtgggatgaagcagttgaatcttttacccgcacagtccaactcgaagataatgacgccgaggcatggagtaacctcgcagccgcaatgctgcgcacttccaaaccgtctgagttggacgattctacagaccaactggcggaagcgagcgaacccgccgacgacgaagaagactccgaaactcaaccggccaaacccgcacgagacccgtacaagcgcaaacgcgaagccatcgtcgcgctccaccgcgccgcacagctaaaaaatacagactctcgtatctgggacaatctgctcacagtcgccgcatccattccaccccctctaacaccctaccgcgacgtcattaccgcccaacgcaaagtcatcgagctgttgggtcctaagaaaggtgaaaaggcagtcgatatccctatcctgggaatgctagttgaccacctagttacggattacaactatgaggatctccttatcgacgttaacccggaccccggaaacacgtcaaacggtgacggagatgtaagcgggaggaaatgcagaacgaagaaagtcgtccgcagcggcacaatccccggctccattctttctttaatcgaatcttcagtcgtccctctaatcacgcactctgcgcccctctggctcctcatcgccacggtcgagcgcttccgcaacagaccctcgaaagccctcgaagcgcacgagaaagcctggcgcgcgaccgtcgcttctgctagccagggtgcgttccaaatgggcgatgagaagcggtggatggagattgtgagcgcgactgaacggctagtgaggagtgggtatgcgaagtatggaccacttgataaggaggatgaagacggtgaagaaacgaaagaggttggtgaagaaaaggagcttgttgcgaaagattggaggttcaaggcgaagagtgccgttagaggaatcatggggaagggaaaggagtattgggaggatacggagggatggggaaggctgaaggagttgcagggcga

SEQ ID NO: 19760 - DNA, 1241 bp, Emericella nidulans
atgtggcgccgtggttggttggctctttgaccaccatggcagtgcgcaagccgaccgctatccagcgggcttgtattccggagattttgaaggggagggactgtattggtgggagtcgaacaggttccggaaagacgattgctttctcggtgccgatcctgcagaagtgggcagaagatccttttgggatttttgcggtgattttgacgccgactcggtatgttttcctcctcataccaaccgggacaaaaagctaattgtgtagtgaacttgcgctgcaaatcttcgagcagatcaaggcgatctccgcccctcagagcatgaaaccggtccttatcacaggcggcacagatatgcgctcgcaggcaatcgagctcgcaggccgaccccacgtcgtcgttgccacgcccggtcgtctagcagaccacatcaacacctccggtaccgacacagtcgcgggcctcaagcgcgtccgcatggtcgtcctcgatgaagcagaccgccttctttccccggggccaggaagcatgctcccagatgtcgaaacctgtctctccttcctcccgggcccctcacaacgccaaaccctcctctttaccgcaacactcactcctgaagttcgcgctctgaaatcaatgccccaaacgcccgggaaaccgcccatcttcgtcaccgagatctccacagaagctaaagataccgtcccccccacgctgagaacaacatacgtccaagtcccgctcacccaccgtgaggccttcctacatgtccttctctccaccgaatcaaatatcaccaagtccgctattgtcttcacaaacactaccaaatcagcggacctccttgagcgcctcctccgctcattaggccacagggtcacctctctacactccctccttccgcaatccgaacgtaactccaacctcgcgcgcttccgtgccagcgcggctcgagtcctcgtcgctacggacgttgcatctcgaggtctcgatattccctccgtcagcttggttgttaatttcgaggtccctaggaacccggacgactatgtgcatcgtgttggacgaacggcgcgtgctgggcggactggtgaggcggtaacgcttgtggggcagcgcgatgtgcagctcgtgcttgcgattgaggagcgtattggcagaaaaatggtagaatatgaagaggaaggggtcaatctcgaagctagggttgccaagggttcgctgctgaaggaggttggggcg

SEQ ID NO: 19761 - DNA, 1242 bp, Emericella nidulans
tgcccttcgtgctcaacataagctaaggcctaatttgaccggcgtacagctatctaattggtttgaagaggtgtataatcacaagatctctatatccactgtatcacggattctctcttcaaactttgactggctggatactgcaagagatcaccagttagataccaagaggcaccgcacagagagctggccagagcttgagtaagcactttatgaatagattcagcgggcagagactcgaatcacagtatctcaagaccttatacatgaaaaggcacgccaattctggccatctatctatccaggaaaggagatgcctcaattcagcaatggctggctctgttgcttccaaagccgtcgaaatatttctttaaacagtcgtcatggtgaagctagcagtatctctatagatgtggatatagagatgtattctatttgccaggctataaaccagtatttgcctaaggatatctttaattgcgatgaaactggtctatattggaggataatacctgatcaaagccttacaacttgctctatatctggaaggaagaaagataaggcatggatcatagttcaattctgtacaattatggatgcctctgaacgccttcctatctggatcattggaactgcaaagaaaccacgcgtttttcaagctgctggagtgaatattgagaaccttgggtgctattggaggtctaacaagaaggcctggatgactggaaagatctttaaagagtggcttctctggtttgatactaaaatgactagaagaaaagttcttcttttgctggataatttctctgcttatgaagcagcttttaaagagatctccttgcagcttcagaatatattagttgtgtggctgccggccaatttaacagtaaaataccagctacttgatcaagggatcatatgcacatggaaagcttactgggaacgcaagtggctactctatataatggctgaatttgaccatggctatgatccagtggccacaatgacacttttatatgctgtacaatgggcaattcaagcatgggaggtggatctgacttgcgaagctattcaaaactgctttacaaaagccttgaccactcaagatgatacagaaatagtcaacattcagctcctaaataagcttcaagcaggcctggatcagctagcagtatccaatatctgagaaatcatgaagattgaccagttcctaaacccgatagaagaacaggttactgataa

SEQ ID NO: 19762 - DNA, 1242 bp, Emericella nidulans
cgacaaccccggtaccgtctctaccaaggtcgtcgagctggatgtacctgagcccggcgacaatgaagtcctgatcaatctgtgcgtgccctggatatacctgttaccttggaggaatgggatatccaagccgagtcgagtactggcatgtaccaattactaacgttataacattgtagcactcattccggcgtttgccactcagattttggtattatgaccaacacggtaggcacttagttcctgtcctggagtctcatcaagggcgaacgcatgctaatggatgatacagtggaagatactacccttccctactcagcccggacaagtcggtggccatgaaggcgttggcaaagtggtgaagctcggcgcgggcctgaagcatcaggattgaagatcggggacagagtcggtgttaagtggatttccagcgcctgtgggcagtgccgtacgtacatacaccttagacgcattttaaccaaaacttgctaacaacgcaaagctccatgccaggacggcgccgacggcctctgcttcaaccaaaaggtatcaggttactacacccctggcacattccagcaatacgtgctcggtcctgcgcaatacgttaccccaattcccgatggcctcccatcagccgaagcggcgccccttctctgtgccggtgtcacagtctacgcttctcttaagcgcagtaaagcccaaccaggtcaatggatcgtcatctccggcgctggcggcggccttggccacttagccgtccagatcgcagccaagggcatgggcctgcgtgtgattggcgttgaccacgggagtaaagaagagctcgtcaaggcgtcaggcgccgagcacttcgtggatatcaccaagttcccaacgggcgataaattcgaggccatctcctcgcacgtcaaatcgcttacaacgaagggtcttggtgcgcatgctgtcatagtttgcacggcgtccaatattgcttacgctcagtctttgctcttcctccggtacaacggaacgatggtctgcgtgggtatccccgagaacgagccgcagctatcgcaagtgcgtacccaggcctgtttatccagaagcatgtgcatgtcactgggtcggctgtcggaaataggaacgaggcgattgagactatggagtttgcggcgaggggtgtcattaaggcgcacttccgggaggagaagatggaggccttgactgaaattttcaaagagatggaggaggggaagt

SEQ ID NO: 19763 - DNA, 1243 bp, Emericella nidulans
tgccgtcgaccactagacgagaacagactttggagcccaagattctgtcttcagataagaaaattatcaagatatgggaccctcgaaatggtaacccatggacctccgttgagcccgccgttgacatcaactcggtcgcctggtgcaaagacagtggaatgctcctaacagccaacgaagggcgacaacagcactcattcttcatcccccaactcggtcccgctccgaagtggtgttcgttcctagacaatctggttgaggaaatggccgaagatccgaacgaccccaacgccttcaacgctggacaggccggctctgtctacgataactacaagttcctgactctacctcagctcaagactctcagtctagaccatctgattggaagaactaacctactgcgaccctacatgcacggatactttgtcgctcagcgcctctacgaggaagccaggttgattaccaacccgtacatctgggaggaagagcgcgcaaagagaatcaaggagaagattgacaaggagcgtgaaagccgaattagagggaagaaaaaggcagccgtcaaagtcaacaagaaactcgccgaacgcctcatgcagatggaggagaagaacgaacgccgcaacgcaaacgcgttctccaacaaggcggcgacgagccgatggaagatgccgatgctaccgcttctgccccacacccacagcagtactcagcgacaaccgtttcgccaaggtcttcgaggacgaagacttcgccatcgatgagacgtcccgtgagtactctctccgcaactcaggcagtgcttcggagcctgcccctcctcctaggaaagagcgcggcctcacagccgtcgagcaagaagccatcgacgaagtcccgaactcctcagactcagactcggattcagaaagtgaaagcgaaacagattaagaacgaccctctaaacgcaaaccctccgcccaaaaacagaaacccgccaataacatcacccgtcgtcagccccaaatgcaggtttcctcctccgcagcagccgccacctccaaccgcgaccgttccttcggtgctcgcgcccagaacatgcgcacgaaagagaagccagctcgtcgtgttaccgtggtgggtgagcaggaattcacattcaaccctagaggaaagggatcttcgaaacagaacaacaatgcgcccgtcaaaccaactaccgcgtcctccgactacaggacgaaggagcgaagaagcgcctccg

SEQ ID NO: 19764 - DNA, 1246 bp, Emericella nidulans
ctgcgagcgcgatttcgatgacctcaagattctcatctcacatcagaaggcgaaacactttaaatgtgagagatgtggcagaagactcaatacagcaggaggtctgtaccataatttcaagttgtggcgcattgcaactgtagctaactccgattctagggctgtctgttcacatgagtcaagtacacaaggagcaacttaccgccgtcgacaatgcactatctaaccggtcgagtctggatgtcgagatattcggaatggagggtgttccagaggatgccattcaatcgcataaccagcgcgttattgctcaattccagcaatcagaggcagagcgacaggcaataacgggaaacccgccgtccggagcatcgagctccagcggccaacctgcaaagaaaccaaaggttgagaacatatcagatttgaagaagcgactcgcagagcacaaggcgaagaaagcggaggcccgagctggaggaagcagtggcgaagcaactcctgtcggtgcaggccagactcccaatgtgcccggattcgtaagtgacgctttctgcaaacatagacacatttgctaatatattgcgctgctaggcacaacaaccaacgactgttgctcctacgcaaacgttttcttaccctcaaccgtatggcggggctggttccccttaccaggcaacggcaagtcctgtttacccaaattattcccccgggcaaccgcagttccctacttctacgcaatactctactcctgctggttactcgccccaaccagttccagtttttggaaacacaccgccgcagttgcaacaacagccgcctccggcggtcaacagcccgcaaaccacatttgcgcctcgatcgggaagcctacccacggcgccgagtctcccgcaacgacccgctgtcggtgctcctcaagtcaacgcatatcagttacaacagatgcatatgggccaccctcttccggggacggctgtgcccggccctgccaatggcgagaagcccgaagctacggcgatttcgtcttcgattgacgatcttatctctggagctgccaaacaagctgatcaggcggcggcagcgaccgccaaacctgcggagagcgcagaggaaaaaccgagtaagaaagataagtcgaagcagtcacggttggtgtattcagataacgagaccagcccggaggagaagatggcaagattgccaaggtacgcattcaatcctgatcatcggacggagacgacgc

SEQ ID NO: 19765 - DNA, 1246 bp, Emericella nidulans
cgaagactgtccctttataaataatggcctctccaatcccccgcggccttcgccaggtcctccaaaaatcgccttcggacatcgttatcctctcatctctccgcactcccgtcactcgtgcaaagaagggcggttttaaggatgcttatccggaagagcttctcgctcatgttttacgcgcgacgctggaggccaacccaaatcttgaccccgctctgatcgaggatgtgtgcatcggctccgtgcttcaagaactcggaggcgcgaaggcaggccgaatggcccagatccacgccggtttccctcacagcgtccccttccacacaatcaaccggcaatgttcatctggtttggctgctatttcaactattgggaacagcattcgggcaggagctctcaacattggtgttggtggaggaatggagtcgatgaccagaaactacggctcgcgcgctatccccactgttctgtggcctgagctcaaggaatcgccctcaaaggattcgagggattgtatcatgcctatgggaatcacctctgagaacgtcgcttctcggtacggtatcagcagggaggaccaggacgcgttcgctgccaactcgcacaagaaggctgcggctgcgcaaaatgctggactattcgactcggagatcgttcccgtaaagactctttcctacgatgctcagaaccctgaagccccgcctacggagataactgtcactaaggatgacggtgttcgcgccaacatttctgtcgagaagatggcctctttgaagccggctttctctgaaactggctccagcactgccggaaacagctcccaggttagcgatggtgctgccgctgctctgttgatgcgtcgatctaccgccacggaactcggcctgacttcgtccatcaaggcccgctgggtcggcacagccgttgctggttgtgcccctgatgagatgggtgttggccctgcagttgccattcccaagctccttcagatgcttgacgttaatatttcggacgttggcatctgggagctcaacgaggctttcgcgtcccaggctctgtactgtgctcgtaagttgggtattgatgaggccaagattaaccccaagggtggcgccattgcgattggtcaccctcttggtgccactggagccagacaggtcgcgaccctgttacctgagcttgagcgtaccggccaggaaatcggtgttgttagcatgtgtatcggaactggcatgggtatggccgg

SEQ ID NO: 19766 - DNA, 1248 bp, Emericella nidulans
ggcacgcatcgccaactccttaaagcggcgaacgaaggcgctgcgtttgcctggcacggcggggatctaagctacgcggacgactggttctctggcatcctcccgtgcgcggacgactggcccgtctgctacaatggaactagtacgcaattgccaggcggaggtccgattcctgaagagtacaaacagccccttccgcagggcgagacggcgaatcagggaggcccgcagggtggcgatatgagcgtgctgtacgagtcgaactgggatctatggcagcagtggatgaccaacctcaccgtgaagatcccgcacatggttatgccgggcaaccacgagtcagcgtgtgctgagttcgatgggccaggcaatcccatcaccgcgtatctaaacgaaggaatccctaacgggacatggccagccgagaacctgacttactacagctgccccccctcccagcgcaacttcacggctttccagcaccgcttccatatgccgggcaaggaaacagggggcgtcggcaacttctggtactcgttcgactacggccttgcgcacttcgtcagtctggacggcgaaaccgactttgctaacagtccattctcgaccttcgagcgcgatctcaccgggaatgagacccatccccgccccgaggaaaccgagaccacggacagcggaccgtttggcacgattgacggcgaccggtacgatgataataccgcgtatgcgcagtatcagtggctgaagcgcgatctggctagcgttgatcggaccaagaccccgtgggtgtttgtcatgagccaccggccgatgtactcgtccgcgtactcgagctatcagacgaacgtacgaaacgcgtttgagaacctcttgctgcagtacggggtagacgcatacctctcaggccacattcattggtatgagcgtatgttccccatgactgccaacgggaccatcgacgagtcctcgattgccgacaaccacacctacacgacgaacagcggcaagtcaatgacgcacatcatcaacgggatggccggcaacatcgaaagccacagctggtttgacgagggcgagggtttgacggagatcacagcgaaactggaccgcacgcactttgggttcagcaagttgaccgtcgtcaacgagaccgtcgtcaactgggaatttgtcaagggtgatgatgggagtactggcgattggctgacgcttgttaaaggggagacctgtacgattaacgtgtagtgg

SEQ ID NO: 19767 - DNA, 1248 bp, Emericella nidulans
tgacacaattcgcgccattgaagaatgatttactgttgagagccgcttggggtattgctaaatctattctcctcatttggaccttctcctctaacaatgtttaggcgacaaggtgcaccgcccgccgatatgggtgatgcgacaaggtatgctactctccatttctcctcaagctccttctgtgctcaatacaccatatatagacgaatggtcaactaacagttttgactcttgtagccggtcgctacctccctgaataccatgaagccaagggcaaccgcgatttcttcgaatgctgccgcgaccccgaaattgcctcaacgatcaccatccaacccgtcgaccggtatgagggtctcattgatgctgcaatcatcttctcggacattttagtcatcccgcaagcaatgggcatgacggtagagatggttgacaagaaaggccctcatttccccgagcccctccgctccccaaccgatggtcaatacgagaaggtcatggcgcgcgacgtcgatgtcaaggctgaattagattacgtgtacaaggctattacgcttacgcgaacgaagctgaatggacgggtgccgctaatcggattctgcggtgcgccctggacgctgctttgctacatggttgagggtggcggtagtaagatgtttatccagaccaagacatggatctataagtacccgaaggagtcgcaggcgctgctgcagaagatcgccgagatctgtgttgaatacttggcgctccaggttgctgcgggtgcccagctcgttcaggtgtttgactcatgggctggggagctgtcgccggcgtccttccaggacttctcactcccctatctgagacacatctcggcgaacctgccgcgccggttaaaagagatgggacttgaacccgtgccgatgacagtattcgcgaagggagcgtggtatgctctcgaggacctttgcgagtccggatacaatgtagtcgggctagactggctacatgacccggccgaggccttcaagattgccaacggacgggttacaatccaaggcaacgcggaccctggtgttctctacggaggccgcgaggctatcaaacaggctgtggagactatggttgctgggttcaagaagggcaagcaaggatggattgccaacttgggtcacggtatgctctttattcgtttatatcatgcagatgctaatttcctaggcgtcactccttttgtcaatccggatgacctcaaattctact

SEQ ID NO: 19768 - DNA, 1248 bp, Emericella nidulans
gcggtacgaaactagtcgcccaaggtcgaaggcccagcatcagcgcgctacatcgcacctcccgggtggaaatacccgatcggtgctgcacgcaacgcctttcccactatgcatgcaagctggcaaaggtaatcgattggttgatgtggacggatatgagtaagtgatttctcgaccgcctccagtccaactctgctaagtcaggccaggtacatcgactgtatgggcgatatgaccgcctgcctctatggccattcccacccggtgattatggagactgtggattcgaccatgaaaagtattgggatgaacctcggttcttcaacttcagcagaggctcatttcgccgaagcactatgcgaccgattcgcctccattgaccacattcgcttctgtacctcgggtacggaagctaatctctacgctttgagcgtagcacggcaatccaccaaccgtacgaaagttattgtttttgaaggtgcatatcacggcggtgtattgtcattttcccacggcattgcgccgaataatgtggacaaggacgactggattcttgggcaatacaatgacatcgatggggcagtgcaattgattaccgaaaacaaggacattgccgccgcggttgtggttgagggggtgcaaggcgctggcgggtgtataccgggatctgccggtttcctccatgctatacaagatgctgcaagagagaatggcattatcttcatacttgacgaggtcatgacttcgcgtttggcgccgggcggactacaatctatcctgctgcatccggaccacggcacccccctcaaaccagatttgaccacttttgggaaatggattggcgggggcctgagtatcggtgcgttcggtgggcgacgagacctgatgtcggtttatgatccgcgcacatcgatcatccaccattccgggacattcaataacagcacacttgctatgaacgttgggtgcaagggtctgaccctcggtgtacacccccgaagcatgtactagcctgaacaaccttggcgacgaactccgcagtggcttgcaggagctagcaaagggcacgaaaatggttgtaaccgggttgggtgcagtgatgaatatccactttgttcgggcgagcggatcgagagtcgttgcgagaacaagcgatctagaggtcaactcaggcagcgtagaggaagccctgcgagacctcctctggttctacctgatcgagcgcgggttctggatcgctcgtcgggg

SEQ ID NO: 19769 - DNA, 1249 bp, Emericella nidulans
  unsure (1)..(1249): unsure at all n locations
cggccagatcggcacaccactgagccttctctgcaaggcagtaagatcccagacggtattccttccgatagcccggcacgcacgctaacgtcagctgtctcagagtgacctctttgctgagattagcctgtacgatattgtgcatgtgccaggtattgccacggacctgatgcacattgacactagggcaagggtgacgggtcatctgccggacgactctggtctcaagaaggccctcactggcgccgatattgtcgtggtaactgccggtattgcgaggaagcctggaatgaccagagatggtaggttcatgcagcagtctacgagtgtgtgaccggttattgacgcgagaaacagatctattcaaggtagatttctaccaccctttctatttttccttctccctctccattctcctttttgtctattaatttttcttcgtgaagaagaaaggattgtacgacttatatctaaccagcgcagacaaacgcgagtatcatccgggacatctttgccgaaattgcagcgacatgcccgaacgcagtaagctgtgtagtcactaacccggtcaactccacactccccgttgcagcggaaacgctcaagaaggcaggtgtcttcgagccaactcgtctgttcggtataacgacgcttgacgtcgtgcgcgcctcaacctttgccgcacacgccttggacagcaacagcgacccaaaagccttcaaggtacctgtcatcggtggccatagcggcgcaacaatcctgccactctacagtcaagcggagcctccggtgaacctggataaggagaccctggctgcagtcatccaccgtgagtacacactactgtctacaccatctctcttgttcttcaaaagtcccatgcttacctaacccctaaaccaggtgtgcaattcggcggtgacgagattgtcaagtccaaacagggcgcgggtaacancaaacatgcatggcgtacgcgcgcttccggttcgtcaaagccattgtcgctgccatgaacggtgaatccgtaacagaggaggcctacgtctacctccccggtattgcagggggccaggaaattgcacaggagctgggcgttgattacttcgccctcaaggtcaccttgggccgcacaggcgctaaccaggtcttgcccattggggagatatctgagaacgagagtacactgctgaaggttgctatcaatgatttgaaggccaacatcgtcactggggtgtcattcatggcg

SEQ ID NO: 19770 - DNA, 1249 bp, Emericella nidulans
cagcaaatgccaagttcaacaagcaagatctggttaaggaggctattgcctctggctccccccttgaggaggctgaatctcctgcgcagattgctacagctgctgagcctcctacgacgacccaaagcgcgactgtttacaataagtcgacatcattctttgacaacatctctagcgaggctcgcgatcgagaggaaggctccaatgttcggcctggtggccgtgaatggcgcggcgaggaggagaagcgaaatattgagacgtttggccagggtagtgttgacggctaccgcagcagctaccggggccgcggcagaggtcgtggctatggtcgaggccgaggtggctacggccgtggctacggctcccgaggacgcggcggccgcaacatgtcgcagtcaactggcgttcccaccgcaaactaattaggtgctttttgttataccgttagcttggaaactgtttgatggcgtatttagcggtggacatgatctttcatctacgatcttttctctctccgacttggaagtgacgaataccttccagagtctacgttttgctgatatttccggcgtcagggcggtgcattcctccaagagctcgagttgacctgagtacacgcgcgtcaagactcgcagatctgcatgtgttcgcatgagtttacaatgggtggcttggtcagctatacagtactggctggctttggtttcgcatggtatccgtacacggcgtttgtcttctttgcatggattattggtcgtgggcctccgttgcatcactcaagacgttcggataatggctaccggtcttttgttgttcgccggctgtctcatcagcgacggtgcttctgtatcatacatagtggacaaaagacaaaaagatagtctccaagaaaaatgctaaatggggcgactagttgtcgttccctacaagctgcattcctttctttgtgccggcttagcatggacttgactcacaatcggtcatacaaccctgtctaaaaggatagcctacgtagcttgacgataggtaacccctcactctgaagcttctcttcccctctccgcactatgccaccacacttcctcggcccagagctttcgtaaccgattgtcaataaaccccttaactttaaaaagtcatggttcaccagtcatccccgtactcttcatgctccccattatcttttccacccccccaaccggaccgcagaagaaaccatcacgacaacacaatcctcaagatgagc

SEQ ID NO: 19771 - DNA, 1249 bp, Emericella nidulans
agctgcggcagatttaccagtggaagctcaagataatctgccttggtaaggctgcaatcggtatactcgttttggctcagctggctgaccatgtgcagggtggaaaagtaccgcccgaacaccctcgatgatgtctccggccacaaagatatattagctacgattaatcgatttgttgaggcgaatgtgcgtgtctaatccggtattgccaacccaatagctaactttatctcagcaattaccacaccttctcctctacggccctcccggtacgggcaaaacgtccacaatcctggcccttgcccgacggatatacggcagcaagaacatgcgacagatggtgctcgaactcaacgctagtgatgatagaggaattgatgttgttcgggagcagattaagactttcgcgagtaggtctagcggctctaggaagtgggattgcaggctaatcaagtctcgcaggcacaaaacaaatattctcaatggcaccgtccgctactggtaaatcgtcgctcgcgtcgttcaagctgattatcctggatgaggcggatgccatgacatccaccgcgcagatggcgcttcgccggattatggaaaaatacaccgccaacactcggttctgcattatcgccaactatacccacaagctttctcctgccctcctttcccgatgtactcgcttccgcttcagtccgctcaaggaacaggatatccgggtcctgattgatcaggtaatcgagaaggaagacgtgcgcattcaacctgaagctgtcgatagcttggtcaccttgagtcgtggtgacatgcgtcgtgctttgaatgtgcttcaagcctgccatgcaagcagtacgcgtctctattccatcatgaaactctcataaagctcttgtactgaccatactaggcaaaccgcttccaatcaagaacgcgccccaagatcaagccgtccccgagccggaaacgattacaaatgagacgatatacgactgtattgccgcgccacatccagccgatatccaacagattgtgaccacactgctcgcgaccagcgacgtgacatcatgtctcaacactttgaacacattgaaaatcaataaaggccttgccctagcagatatcctttctgcacttggggagcagctgtatcgactcgaggttccggcgcagacgcggatcacttggctggaaggcttagcagagattgaatggcgtctgtccgcaggcggatcggagaccgttcagaccggcg

SEQ ID NO: 19772 - DNA, 1251 bp, Emericella nidulans
tccacggagaaagggtgggatgtaccttcgctgaagctcatttactctggttagttaattggtttcttgcaacgtgtcgatactcatggctgacgtattttccaactttgcagggaagatccttcaggatgacaagacggttgagttctacaacatcgaggaaaagggatttatcgtgtgcatggtttctaaggtataagcttttcaagtttttctttgatacaaccgtactaactacgagattcctcagcccaaaactcagccgtcctcgcaaagtccgtcaacaccagctaaatcagtgacttcaactcccgcgccccctcctgctcccgctccgtccacaaacacatctacaacagccacctctggcccgttccggcaaccccttcgcccgcttcatctggggctgcccagtcctctgctagcactttcaacgatccttcagcgctgttgactggctcgcaaagtgaagaagtaatcaaccagatgatgagcatgggctttgagcgggagcaaatcaaccgtgctatgagggcggcgttcttcaacccagaccgggcaattgaatatctgctgaatgtgagtcttgtcgtgtttcaattcacgtaacagttactgatctctgcctttgcaatcaagggcattccggaaaatatccagcaggagcaacaacaaagatcagccgctaccacccctgccgctcctcaagccgccgctgctagcggagctccacctgctacctctggagaagacgagccggtcaacctctttgaggctgctgctcaggctggtgaaggtcgcggcggcgctggcggtgcgtctggtggcgaaccccagtcactcgacttcttacgcaatcatccagctttccagcaacttcgccagctagtccaacagcaacctcagatgctggaacctatccttcagcaagttggtcaggtaacccccagattgcccagctcattggccaaaacgaggaagctttccttcaattgttgagcgaagaggacgatgctgcacttcctccgggcacaacccagattcacgttacggaagaggagcgagacgccatcgaacgggtatgctttcgattccttggccgttctttttctcttagctgacttagccctagctctgccgactcggatttccgcgagacctagttattcaagcctatttcgcctgcgataagaacgaagagctcgcggcaaactacctgtttgagaattctgacgacggtgacgatgcatg

SEQ ID NO: 19773 - DNA, 1252 bp, Emericella nidulans
acattgtcaatcccaatacccctatcactgatcgatgtgagtaccctctaaatcgcaaatgtatggtcgcaattgctaaacctcgtcagactcgataatcaagcttctagggcaaggaacattcggcaaggtcgtcgaagcatatgacaaacaacgcaaagctcgctgtgctatcaaaattatacgttccatccaaaagtatcgtgacgcatcacggatcgaactccgcgtactttcgactttggcgtccaatgacaagcacaaccgaaacaaatgcattcacttaagagactgcttcgatttccgaaaccatatatgtatcgtcacagacttattaggacagagtgtctttgatttcctcaagggtaacgggtttgtcccgttcccaagcagtcagattcagagctttgctcggcagcttttcaccagcgtggcctgtaagttgttcgcatcatgtttcctctggatttcagttaacttggtacagtccttcacgacctcaatctcatacatacagatttaaagcctgaaaatattctccttgtcaagaacgcgtaccaaacctttacttacaatcgcactattccttcctcatccactgcaatatcgcggaatgctcgtcagagacgtgtcttgcttgacagtgagatccgcctcatcgacttcggctctgctaccttcgatgatgaataccattcttctgtcgtttccactcgacactacagagcccccgagatcattctcaatcttggctggagcttcccatgtgatatttggagtattggctgcatccttgtcgagttctttacgggcgatgctcttttccagactcacgacaatctcgagcacctcgctatgatggaagccgttattggtgagcggatagacccgaagctggtccgtcaagtgatgcaaggtgggcggaatggtaaccaaaatcaggcggccaagtaagtgttttcggttctgcaacatgatcacggctaattttccaggtacttcgtccgaaaccgtcttgactacccaaatgaagagacaacacgagcctcaaagaaatacgtgcaggcaatgcgtcgactgactgtatgtcttctctcaaacaaagcatttttaggccagttgctaatcatcccagtcgttcatgccaacgaataccaagttctaccgactcttcctggacctattacaacgcatcttcgtttatgacccaaaacaacgcattactgccaaggatgccctgaaacacccgtgg

SEQ ID NO: 19774 - DNA, 1254 bp, Emericella nidulans
aggacggcgaagcgacacgcgagcgattctcacagcgccattacatccgttgatgtccttttcggcgccgatgcggtcgatcctcgccccggttgggaagtcaaggacacacccatattgctagatagtcggacggagagcctggaagctcggatcacggttcggaggggagacccactgaaaatcaagaaaccggtaccaaggatcaacgagaatggtcgattcaagatcatgcagctggcggacctgcatctcagtactggtttaggacactgccgggaccctgtgcccccagagcttatccctggccagggatgtgaggcggatcctcgaacgctagactttatagagagacttcttgatgaggagcagccagatttggtcattctgagcggagaccaagtgaacggtgaaacgtccagagatgcacagagtcctctcttcaagtccgttaagttgttagtcgaccgcaagataccctacgccgctattttcggtaaccatgacgatgagggtaatctagatcgccatcaatccatggcaatcttggaagatttgccatactcactctcgtcggccggtccagaagatatagatggcgttggtaattatatcgtggaagtgctcggtcgtggaaataccgaccattccgctctaacgctctacctcctcgactcacattcatactcaccagatgaacgccagtttcggggttatgattggatcaagcccaaccagattcgctggtttaagaccacagcccaaggtctgaaagccaaacatcaacaatacgcatatatgcacatgaacatggcattcatccatattcctcttcctgagttcgctcaaagaggaaactacttccgcggaaattggtccgagccctccacagcgccagggtttaattccggattcaaggatgccctcgaagaagaagggattcttttcgtaggatgcggacagtaagtactatttactcttaacacaaggaagtatagtcgctaataaatcccgcagtgatcacgctaacgactactgcgccctcagcaaaaacgaggcccagaaaccgtcactctggatgtgttacggaggaggagccggttttgggggctatggcggctacggtggcttcatccgccgcgtgcggttctttgactttgatatgaaccctggtcgggttgttacatacaagcggttggagtatggtaatacggatgcgagaattgatgagatgatgattgtcgatgggggtat

SEQ ID NO: 19775 - DNA, 1257 bp, Emericella nidulans
cgggcacgcaggaaccgatatatggccctgaagccatccagccggtctcccagcaacagactgaggatgccccgtacaccgagctcaccaagcacgacttgcggtggcgtgcctatcagtacaccaatgtagagactcagacgtactatgctatggctgataatggcacgttggtgatggtccagatcatctacagcaacatcgcgtgagtcagcttttgtaacaccctttgtcgttaagatctgggcgtcacataattctgactgtacggttttatcaggggcatccatactaccgcccagttcaactgcaagatcttcaacacttccggcgacggtaccccacacatctggttctcggaccctctgtacaaccacatgtttgatgaaagcatgtcctcctttgctgctgataacatttcactgtctctaaatgaggagggcaatgcctacacccttaagtccgccgtgaacgaagggtgtcttgtggacttgacgttcaaccgcgctgcgcctggctttgctattggcaaagatggtactacatactttggtaccgacccccaaaatccctggggttcgatgcgccatatgttctggcctcggtgtaatgtcacgggaaccatcaccacaaaggagaaggtgcacgacatgacaggccgaggaatgttctctcaggctcttcagggcatgaagccccaccatgcaggtacgtcagaaacgtggttagataagatgttgtacacttctaacagggacagcttctcgctggaacttcatcaactttcaaactccgtcattttccgctatcatgatggagttcacaacaccaccatcgtacgggtctaccgtggttaacgttggcggtatcgccaaggacggcgagatcatttatgccggaactaccaacagtgcaacccacacagaggcgtcccaagatgagacgagcgactggccggagccaaagtccatcaaatgggtctgggaaggcaagacgaaagacggcaaaaccgttacagcggaggttgatggccccctcgggcctaagctagaccgtatcgacgtcatggctgaagtgccgggctttatcaagaccattgccggtagtgtcgcaggggcacgaccttacatcttccaggtaagccaccatcattgtgggtattgggttaagcttacaattcgccagtactcccctcaacagaagctctccctcaaactcaaggtcggcgacgaggagttcacggaggagggcagcatg

SEQ ID NO: 19776 - DNA, 1258 bp, Emericella nidulans
ctaacgggcggcctccgaacttttgatgccttccgtgagttcctaactctgccaattgaagatgacctaccatcgcatttggatataatgcgcccagtcgatatatactaatgaggaacggtcaacagccaaaacaaaaccctcatataccaccccctcgcgccgcggcggtcaatggaccgtcctaatcctcataatctgcaccatcttctcaataaccgaatttcgcacatggctcaagggccatgagacgcaccatttcaccgtcgagaagggcgtctcgcacgatctccagctgaactttgacgccgtaatacatatgccttgcgacgcactgcatataaatatccaagatgccgccggggaccgcgtgctcgcgtcggaaatgttgaagaaggagccgacaagctggaaactctggatggataagcgcaattatcacagcagcgagtaccagacgctcagtgactccaggggagacgaagaaagggtcgcggcaatggaggaggacgtccatgcaggccatgtgcttaacgagctgaggcgcaacgggaagcggaagtttgcaaaagggcctaagcttcgacgaggcgatgtcgtggactcatgtcggatttatggcagtctggaggaaataaagtccaaggggactttcatatcacggcgcgcgggcatggatatcgggatgggagagagcatttggatcattcgggtgcgtatatttcactccctttttctggtccacggtttgaaacatgggtatagtgatgctaattgatggcgtgcaaagcattcaacttctcccatattatcacagaactctcattcggcccacattacccatccttgcacaaccccctcgacaaaacgatcgcaaccaccgaatttcactactacaaataccagtacttcctttccattgtgccaacaatctactcgcgcaaccaaaatctgcggcttgacgctctgccgtcttcctcgtccgcacggagcaacaaaaacctcatcttcacgaaccagtacgccgcaacatcacagtccgatgccatcccagaatccccctacgtgatcccgggcatctttttcaagtacaatatcgagccgataatgctgctcattagtgaagagcgcacgggtttcttgaatctgcttattcgcattgtgaatacggtttcgggcgtgcttgtcacgggaggttgggtttatcagattatgacctggcttggggagttaagaaggaggaggaggggtggggaga

SEQ ID NO: 19777 - DNA, 1259 bp, Emericella nidulans
tcacctggactcatcagacgcacacattctcaaactcgctcgagacgctgttggttgcttggggtctagtcttgatcaaccgtattattgataacaaggtgcgaagccggaatctggagagtgatgactggctaatgggtgatagcggcgctcctctctcttctcttgcgctattctatcctttatctgcgtagcaggtatctttaacaggatcacatttccagccttcctggtcgttccaggactccagttactaccgcatttttggcgcaagtaagttccgttgcagttgtctttaggtctggttgtttacaatttcccgcgcaggccattatcgttcttttcccttgttggattcggtctcgtcttcttctgcattgctgtcttcgccgacacgacattctacaaaccatcggcatcgttcgcggatgtcttgcgctcgccggtaatcacaccacttaataatctcctctacaacaccgacaattccaacctggctctccatggacttcatcctcattataaccacttcctagtcaaccttcctcaacttcttggccctgcgcttgtggccatggttttgcaagcgtacaacagaggcttcatagcctcttggtttaagaacctccgcgcagcttctgctctatcggcaaccgcaatgctgtcaatctttcctcaccaggaacctcggttcttgataccttgtgtgcctctgctcctcagctgccttcaagtccgcaaatcgcgcatatttttaggagcttgggtcatatttaacgcaaccttgggtttcttgatgggtgtataccatcagggcggcgtcgtgtccacacagctagcagttccgtccgtcatatcaactaccacgtctctgtggcacgaatcgttgaagggcacacagtctctattcgctactgtagtatggtggaagacgtattctccgccactgtggctactaggcgacaactctaccctaaatctgaacatcgacacccgtgacttgatgggcaagcccgggtcagaaatggtcaaagagcttgagcgcttagtccccacctgcggctcaaagcagaagagcaccgagttaacgtcgagcttggaacagcccgatgctgtcttcgtagtcgctcccaaatcagtgacctttcttgaccagttcctggctccgcagtctcctgattcaagtctggaactgcttgagctatggagttacaagaagcatataagtctagatgacttggactttggctccgatggcg

SEQ ID NO: 19778 - DNA, 1260 bp, Emericella nidulans
tgcttgcctcggctagggctcgggcggcggagtatgagggtagtgagagcgatgaagatcaggatcagatggacgaggacgacgagatggaaggcatgagcgaggacgacgaagttgcagatgaagatggtgtgcctgcgcttgttgccgcgggcaaagaaacttcaaggcgagcattcgacaaagtatttaagaaggtcgttgaggcggcggatgtcattctttacgtgctggatgcgcgtgaccctgaaggcacacggtcaaaagaagttgagcgggaaattatggctgcagacggtggacaaaagcggctcatcctcatcctcaacaagatcgatctcgttcccccgcccgtgctaaaaaactggctcattcacctgcgccgctacttccccaccctcccacttaaggcctccaatggtgctggcaacgctcacagctttgaccacaagcaactctccatcaaaggcacatcggagacccttttccgcgcactgaagacgtacgcgcagaacaagggtcttaagcgcgccatctccgtcggcgtcatcggctaccctaacgtcggcaagtcctccgtcattaacgcccttacagcccgcatgaacaagggttccagcaacgcctgtccgacaggcgccgagaccggcgtcaccacccaacctccgcgaggtcaagcttgacagcaagctgaagctcatcgattcccctggaattgtcttccccaacactagcgagaagaagggcaagaagaagcaagatgatcaagctcgcctcatcctcctcaacgctattcctcctaaacacatcgaagaccctatccctgctgttaacctcctcctcaagcgcctttcctcctcggaaggcctccttcaaaaactcctccaggtttatggtattcccacgctctactcgggtacctccaccacggatcggacaaacgacttccttatccaggttgcccgcaagcgcggacggttgggtaagcgcggtgtgccaaatctcgaggccgctgctatgacggtcatcaatgactggcgcgacggacggattcagggctgggccacgcctccagtcctgaaagtcgtcgacacaacagcggacggcgctactggggatgccaacaactcggcagccgcgccaggtgtcgacacgagacaagtcgtttctgagtgggcagcggagttcaagatcgagggattatggggtgatggaaatgcagaggacgaggctatggaggagtgaagtctcatacttctc

SEQ ID NO: 19779 - DNA, 1261 bp, Emericella nidulans
cgcgttctctcgacttttgcctgtgccttctcaaaatggctacaaacacaactttgctctatgatctccctcctctcccggcgtatcaattgacaccgcgcccttcgcttgttgatggaatcccagacaatatcctcgcgttaatcctgccggttgttgcctactgggccgtgtctatgtttttccatgtcatcgatgtctatgatttattcccgcagtaccgtttacatactccggccgaagttcttacgagaaaccgcgcatctcgatgggacgttgtacgagatgtcgtcctgcagcaggtagttcaaacgctcgcaggccttatcttggcctactttgacgagcaggaatacattggacgggaagaatatgacgttgcggtttgggcgcgccggatccgttttgtacaaagaggtctcccctacctgttggctttgttcggtttggatgcctctggtgtggctgcgaacttttctcggaacggacacaagatgctagcgggagctgttgccggtggatattaccctggtgctacccagtccattgtctccagtggtggcattgagacagttgtgcctgcttttaccaactgggaaatgtctctggcagctttcatctcctggtatttcatcccggcgctgcagttcacctggggtatctgtgtcgtggatacatggcagtatttccttcaccgtgcaatgcatctgaaccgttggcttgatggtaagtcctgtagttcgaccttatgaggatatgagcattagctgtgcatcagttcacttccactcgagtcaccaccgcctgtacgttccatacgcgtatggcgccctctacaatcacccagtggaggggctcctcttagacaccgttgcagctgggattggcttcctgacatcgggaatgacacatcgccagagcatgtggttcttcaccttctccactatcaagactgtcgatgatcactgcgctacgctttcccttggatccccttcagcatgcaaccaccaacaacgctgcttaccatgatatccatcaccaaagctggggcatcaagacaaacttttctcagccgttcttcactttttgggaccgcctcttcaacacccaatggaaaggcgaggtgaagctccgttatgagcggtctcgagaggccgctgaaaaaaagcttagcgagggaggaatgcaacaagactcggatatggagaatagttcatctgatttcgcgcaacctaacggggaagctgccgttgtgtccccc

SEQ ID NO: 19780 - DNA, 1263 bp, Emericella nidulans
gccggcgacgtacgtgttgaagatgtcccagttccgcaagctagtgatgacagagtcctgattgaggtcgaatggtgcgggatatgtggaagtgatctcaatgagtacatgttcggtatgacagtcgtcttatgatccgcttggtgagccatgctgacaaggacgatagggcctttcgcgattccctcccttcaatctggaccacacccgctcacaaacgctctgctccctgtgacgatggggcacgagttcacaggacgcattaagtatgttccagagtccatctcccacctcaagaaggggcaggcagtcgtcgtcgacccgcgctactattgctcctcttgcacgccctgcttgcatacggccacaaacagctgcgaaaagatcggcttcatggggctctctggaggtggcggcggcctttcagaatttgtcgctgtcagaccggaggctgtgcatgttctctctgaggacggttctgcgtacatggatctcgcagccgcagccctgatctagccacttcgtgtcgcgtggcatgctcttaacctcttcctgtctatctcgccttgccaagcggctcaccaaaacgaggtagatctcagcaccgttcccatccttgttatcggtgctggaccggtcggtatagcaataagctatgtcctgcaagcccgtggcgcaaagacgatctatgtctctgaggtgtctcaagcgagaagggagacgttacgtggcatggagatcgtcacggaggtttttgattctggtcaagttgatgtgccgaagaaggtcaggttgttgacaggggatggtgtgggtgttgtgtttgactgcgctggtgcccaggcaggctttgatgccggctgtcagagtctgaggtttaggggtgtttatatcaaccttgcggtgccaaaggggcctgtaggttttccacgccttctaaggagtacagtgacgggctgatatgaggtagatgacgctccccctcgccccattcatgtggaaggatataatgtacaagtgctcgctggcgtataaccaggatgattttaaggatgtggtcaacgcgttcgtagccggtgagtcctctctttgccctcatcagcagtctgaatctggatattaacggtgggccggaccaagtaggccgcttccagggcgtcgagaagatgataaccagccgcctcctactggaggacatcgtcgaaaagggattcaaggaactcatcaagccaaacgatcatatcaagatcctcgctacgccga

SEQ ID NO: 19781 - DNA, 1263 bp, Emericella nidulans
ggccgcagacttcgcaagaaccagtcagcatacgaccgctatctaatacgcccccgggtcctacgggatgttacgaatctggacacatctactactatatttgggtcaaggtcaggttcccgttcgggttctcgccgactgcaatgcacgctctagcccacccggacggcgaggtggctacgtcaaaagcagcggctgcgagtggtatcttggtggtatcgtgatgaaactgtcgtgctactcgaccaaaatccttgaggatgtcatcgcgcacgcccaggaacccttacgctatgcagctgagtctgcttaagaacaaagaggcgatgatccagatgattaaaagagcggaaggcaggcattgaattggaggggagtggcgattgctgaactgatatttgacagctgccgggttcaaggcccttttcttactatcgatgtgcgctacctcggacgacgactcaacgagttgcgcaataattttaatatgctcaggggcatggagtacccaaacctttttccggggctgagcgtgggtaacctggatgatgggaacgagatcatggattatggtactgtacatcttagactgttgtctcaccaaaactaacccgtgccagactgcagttgggaatggcatcaactggtctccttcttccgacagcacaccaagatgcaaatatggggaaaaggcagtacttggatgcaataagacacatcctactcaagttgcgagtgaacttgacttattttcaccagtctctaccacagcagatgctgagctcgccatcatccacggccttgatggaatagtgatctccaacccctgctggcgacaactcgactctgtcccttccacactagatgtcctgcgagaagttgcccctgttaccaagggcaaaatcaccgttgccattgatggcgggaggagacgaggaacagatatcttcaaggcgctggcgctgtgagcggacatctgtcttgctgggaggcctgtcatttggggttagccgtaagcaccgcggctcctttctacattacgcacagggcttatgatttcggttcaagtatgacgataagcgggagtggcacttgtgatcaatctgctctatgatgagttcagaaactgtatggcgcttgctgggtgcgtcacatctcctggctggttaagggtcggtgctgatgatattgacaggcgcaagaatatctcagagattagtcgcaaccatgtctctctcctgcagcaggatgggcgactgttga

SEQ ID NO: 19782 - DNA, 1263 bp, Emericella nidulans
gcgcgaggcgttacgtcgaagggaagacaagctgtgccgtcgaaaactgacgattctaccttcgtcttcggttgatttctcatcaaacgactttttgtcactatccacatcgccagcctatcgagcgcggtttttggatattttgcaacaagcgccgccgttgcacccgtttgccagcggagggtcccgcctcctagacggcaattcagcctatgccgaagagctggagaacttcattgccgcgttccacaatgccccgagtggcctactgttcaattccggatatgatgccaatgttggcgttttctcgagtatcccgcaacccggagatctgatagtatacgatgaactcatccatgccagcgcgcatgagggcatgcggctctcacgagcagggaagcgtatcaagttccctcatagctctcccgatggcctgagagcagtactgcaagcagaaataactgcagatccccgacttcttcagggccgccggaacgttttcatcgcctttgaatccgtctacagtatggacggcgatgttgcgcctattcgtgagttcgtagagatcgtggaccagcttctcccttacggtaacggatacttccttgtggatgaggcgcatgcgaccggcgtctttggaccacgcggttctggggtagtccaagagttgggactggaggatcgtatgttcgtccgggtacatacgttcggtaaagcactcgctagtcatggaggtaagtctcgcgcgttgtctttgggtgtcgatattgactgtcctgctagcaatcgtattgtgttgtgcggatactagagactacctgatcaattacgctcgcagcctgatctataccactgccctgggatttccctttcttgcttcaatacgtgctgcctatgaactactcgttgagggaaaaactgagcaggtacggtccttcgcttgaggaagcaacgtttcattacaggcctatgggaaagctaacaaatatccagctccagcacaaactcggacaactgattgctcacttccggacggggttggacaatctcaaccacaaggactcgtcgacctttgaagttgaacattttacgaactcacccatattttcccttcgcagcagtgtgccccgtgtgctcgccagcgtatgccaggagcagggatataccgtccgtgcaatcatgccgccaactgttccagcagggaaagaacgtgtacgcgtatgcttgcacgcgggaaacacggtggaggaggtcgacggcctc

SEQ ID NO: 19783 - DNA, 1264 bp, Emericella nidulans
gatggagcagcgcacgatggccgagcgccgccagggataccgcagcttgcgggagcgtcaggttgactatgcaaagtctattgtcggctcccccgactacatggctccggaggtgctcaagggtgaggaatacgactttacggtggattattggagtttgggatgtatgctcttcgaggcattagcaggttacccaccatttgccggatcaacagtggacgaaacctggcagaacttgaagaactggcaaaaggtgctccgccggcctgtttatgaggatcctaactatttcctttcaaaacgaacatggaacttcatcaccacactggtggcatccagggagcaccgtttcaagaacatcagtgaaattcacgcacatgagtacttcagcgaagtggatttcagtcgactgcgcgagcagcgcccacctttcgtacctcaactggactcggagactgatgcagggtactttgacgatttcgaaaacgaggctgacatggccaagtacaaggaagttcacgataagcaacgggctctggaagagatggctgagcgtgatgaaaagatggcaaaggggctcttcgttgggtttacgtttaggttcgtgccttgcttcctccttgtgaatgacgagtctaaccagctgcagacatcgcaagccgaacatcgacggaactgggcgtctctctccccgcaagccgataccaaccgaggactttggtactatcttctagggctcatgaccttactgtctcctctttcgttgttgtggtccggacaagctggtcttgaatggccgttatctgattaaactttctaatgtatggctggcatgatccgaacggagttgacgagttgagttgtacgatacaaagatacctagtagttaacctgaacgtaaagctgtcaatcgcttgactatcttgccatcttgtctagccatgcagttgccgccttttgcttaccgtagaacttttggctccatcttggttgcctgctgtttaccaaagcattgaagtggccagtaaagggcttagaatcgttgatgtaccttgctgggtgttgcaggtgggatactagtgccagtcataatatggttttccaattgaagtactcgtgtgagcgattacgcgaatgatagtcggcgatccctaactggatgccattagtctcttgattaagtttgagatcgtttcgacaaagcgtagcaggggccattttcataaacaataaacaggctaccgagccctacacttgaagcagc

SEQ ID NO: 19784 - DNA, 1265 bp, Emericella nidulans
gacgcgcgcgaccttctcatggaatgttgcgttgaattcatcaccctaatctcctccgaagcgaacgacatcagcgaaaaagaggccaagaagaccatagcgtgtgagcatgtggagcgggctctacgtgacctcgggtttggcgattacgtcccggatgtccttgcagttgcggaggagcacaaggagcagttgaaggtatgctttctttccccaggaatatgagacatttggggtgacttctaactgtgtctgcagtcgcgggaaaagaagcagagcaagatggagcagagcgggttgtcagaggaggagctgcttcgtcagcagcaggagctgttccgctcggcgacggagaagtatcatgctgcgccggagggtactgagtgaaggaatatggtttattcatgcagatcgtatacctaatgagggctcgtgctggtcatgacggacggagtttatacttaaagggttatggagttataggcttctatcatagtacacttgagggaaatatatttatgtcggtctcattaacccaaatcaccaatcgtgtatgttcccgtcccgggtttcatcttcattcaattcatgtagacttcaagggtaatatttcgatatattttgcttttgggcgaccccctggagagctccatagcagactgcacgaacaagtattagagattttgatttcgacagcagattccattagcacgaagagcacagttgtatacatatggaacaacattggaggtagagattaaggtcagatacaatgtcgtttcttacctgaaccgcactaaccgcatttggcgtcccgaacttcagcgcgcaatcgcagcaaacaccgcggaacttcaagactatcattgaaagcacagcctacccaaactaaaaatgccaccttttaaggatgagcatatcttggtatgctccctagatatttactgttttagtaggcgggagaaatgctaattctgccagatgattgcgccaggatcgcaagtgaccctggcgcaactcggcctccccgagtcgttcacacctgctcgatggcgcttcccgacgcgaatgttcccgggtgaaaagaagggcgaattcgaaccgtacaagatccgcgagaggcgacaagaagttaaaattgccaatggctcgaccgcccctggggagaaggaagacgtcgacatgaaagaccagcctccgcaagaagaaaggaaggagaatacagacgcgccgaagacggaaaaaaccgacgagaccaaggcaga

SEQ ID NO: 19785 - DNA, 1266 bp, Emericella nidulans
gcggacaggggttgcgagacataacccggttcgccaggaagatctttcaccgcgacactgccggtttggatgaatggtttaatctcctgcactttgatcggctgcaacatccgcatctgatgtccgccttggcgcattctggcatgaagacaagttctctattgtctttgaggaagccgacctgacgcttggtgcctatctggaaaacggcggccatctctacactcatgaggcgctctggaaccaggtccaaggattggccgatgggctcgcatatctacatggacgaagtggctcagttatcgcataccatggtgacctaaagccggccaatatccttatcgtcagaggagtgatgaagatcgctgattttgggttgttgcaagttcgctaccggtcaatcgcaaacaatcttgaggtatggtcgttggaaagcgataccattgcttctagtcggcgaatatatggtgggccagaccacagtaataaagcattgatggatgtatggtcttttgccgctattctatccgaaatatccgtgttcaatttagagggtatacaggggcttaagcgctaccgtcagcgtcggtttgatgatgtccaggaggcaactccttcttataagacctataactttcgacatgatacacagatgaaagcctcagtgtctcaaacaatcgatgacctgcagcaactagtccagaacagcgagcaacagcaaacccgtatttcgcggttccaacgacgtttcttcaatgctggcttctttaccctgttgcgtcagatgttttcaagagactatgcagactgcccgtcatcaactcacgtttctgaggagctgaggaggattcactggcaggctacgctgccactgcaggaggctgttcaacgtggaaacatctgggatgatgtgagcagtggggcagtgccaaatagcccccaaaggcccaactgtagactgtaagtaaagcaaccctgctggttctgtggtgactaatagtgtataaggcgcgcaaggcttttcgagcaaacctccagtttaactagaacagactgcggcatacttctttttgactggaaagagggcaaatcacttcttgtccaatgcgtcctatatgattacaacgatgtcaacatatatattctccaagaacgctgtaagggcccctgatctggttacttattcctgctaacaagctgaagttatgaggctgaaccaagagtacccaagtttcgacccggaatatacagacaggagcagtaacc

SEQ ID NO: 19786 - DNA, 1268 bp, Emericella nidulans
gcagggtcctcgaccacaccacagaacaaacctatacgatacagacgaaatacctctttggcgcagatggagcgcggacgtacgtcgcacgcgcgctcgacttcaagttcattacgaagctcagcgggaaaagggcatgcaatgtgttcttccgcgcggatttggaccatatcgtccagcacaacaatagcaggagaggaagccgcgtcgcagggctgcactgcattctccagcctgaccggtccatatttccaggtgtcgtggcgcatctccgggtcgtccgcccctcgacagaatgggccctcgtctgcttcgggccagaggggagaaacccgctagatggaatgacggtgaacaacagtccggagcttgtcaagctcctgcacgcgctgattggcgacggctctgtcgatattgaaatcctcgcattccacccgtggacggtacgcgagagcgttgctgaagagtatcgctatcctcgcgagaacatcttactcggcgacgcagcgcaccgccacccaccggcctttggcctcggcctcaacaccgcattccaagacgcgtacactctcgcgtggaaagtcgcgtatgtctccgaaggcctcgcaggccctgaactgctcggttcatacagtgcggagcggtaacccgttggcgcggtcctcgtgcgcgagtcgaataatgggattcaagtacatgcgcgcatgtgggaggccctaggcatgtcagctagcactggagacgagggcgcgaggcagcttgcacggattgccgaggcgagtcctgagggtgcggcgagccgcctgaagatccatgaggcactaggagagactgaagtcgagttgcagagtctgggaattgcctacaatcaacggtatgatgcatcagaggaaattgctggcccaacaccaaagaatggcagtagcgatcatggtgatatgaggaccactgctagaccaccgctcgtagggaacccaataacaaccacccagatcagcacgttcccgggtagccggctgccacacgcccgactggacatcatgacggggcgcaaggtgatttccacgcattatctggcgagtaaagcgtcgttctgtgttttcttcggcgttggcggggagccgtggcgggaggctgtggtggacataggccattcgacgggcagccgaatcaacgcgtatggtatcggctatgcactggattatgcaaacatttatcgggaatggcaggtaggcgcggtgtcgaagaggatggctgcgttctgatcc

SEQ ID NO: 19787 - DNA, 1268 bp, Emericella nidulans
atattacggcacaactcaccaaaatcatagagtctgaagaatatcagcatgcaatcgcactaaatgcccgtgaacatcctgttccggcccacaccgataagaagcgtggcgtgtttgatttctacaagcggcggaactcggctagcagggacactctttcagcgccttcagcagaagctgtccagttgggtaatgatcctctgaatgcatacagtcccttgttgtctgtatattatcttgtcaaggaaaagctggacagagaaagaagcgagtccaatccaggggctctcagcatcgcccaagcccctggggatatgcttcaagtacctgatcttgcacctccggaagccgctcatacaaaccagtatcaagtgcctggagagaaggatactggaaggcgatcacgaccgcgcgcgagaacccatggtgatgatgaaattacagaaggcatgaagaatgccagccttgcaccaaatcatgcccaagcctcccacagccctgccgcatctcaaccagacactccagccaaaaaagaaagcactgctgctggtcttttgagacgctttagcacgcgaagaacgaaggaccgcagccgtgaccgcgaacggtcaagactggcgagccctcatcagccgtcgctcaatgtgcagccgccagccgattctgcttccccactttcaagagggttcagcatgcggaaaaaccgccgtacagaaccgtcagcgaccgcgattccgtcaacgggtagtcagccccaacatcaagatctccttaagactcctggatcggtagagccggcctcgcgatccaacaagtacttggagaggtcaatcagtgtcagctcaggagaaccccggcatcggcggtcccgtcgaactgaaggcgattctgggagccagccgccgcaaaccagcggctcagaatactcggccgtgccaaaggactcaacagctgggcgcgaacagaagatagcaccgcgtacgcacgctagccggacaatgtctcttggccacgctcggcgtgaaagcatacaggcgccgtagggctcgacgggacgctgcaagagaggcaaatgtccctgaagagacggacggagaaatttctggacccggggctgcattggagagtgcaaatgaagaggacctgtccaaaccagtctatctaaaaggcctatttagtgtttctaccaccagcagcaagccacttgcctttattagggccgatatcatccgggttctgaaacagcttgctgttgactatgttgaaat

SEQ ID NO: 19788 - DNA, 1271 bp, Emericella nidulans
accccaacacgggcatctcgatcctgatcgtcggcggcggcatcgcggcctctccttcgcgatcgaagcccaccgcaaggggcacaatgtccgagtgatcgaacggcgctctgcgggaaagacagatggtacgtgggatattcattatttagacgcttgaaactatctgtactaaccgattgtctaggtgaaatcattgccatcacgggcccagccctccacaccccgcacaagtggccgggatttatggataaggcacgcaaagaggccgtccctccgggcatcacgatgcgcaagtatgatggcaccacgattgggaccttccccgttggcgaccccagcaacccctcgctgccgatttaccggtcgaaactgcatcgcgtgctaggtgagtatgccgcgcagctgggtattgaggtggagcttgagactagtggcttcgggtactttgaaggagagagcgatgctggagttattctcgccgacggccgcagactgacagcagacctggttgttgctgctgacggggttggatcgctgtcgtgggagcttgtcatgggcacgaagcagcctcctgtgtcttcagggttcgtgctgtaccgggtgacttttcctgttgggccggcgctggagaatccggttgttgcgagggagtttgagggctataagaaccgggcgtttctgcatgcggggccgggggcgcatatggtttcttgtaagaatggggacgaggtttgctatttgcttacctgcagggtactgcaatccattatatatccctaactcccagtcggttgatgatggcgccgatgctaatggtttctatggcgtgaaggaagataacactaccgccgccgaagattgggccaagaacacctccatcgacaaggcgctcgaggccgtggagggctgggagcccttcgtatctgagctcatcaaggcaactcccaaccgtacattgctcgactggaagctcatgtggcgagacccccagccgaaatgggtatcggatggcgggcgtgtcgtgcaaattggcaatgctgcccatccatttctccctacctctgctagcgggggaacaatggccatggaggacgcgttctcgcttgctgcttgtctaaaaattgccggaaaacaggacatatcaacggcgacgaaggtgcataatcatctgcggtaagtcttcttccagatgtatgggaggcgaaagctgataggcgtagctttgaacgtgtctcttgcgcacagaaaatgggcttcaagaaccgcga

SEQ ID NO: 19789 - DNA, 1271 bp, Emericella nidulans
atggtactcgtccgacttgctcttctctttaaagattgaccatatacaggaattggcgctgcagatatcacaaagctgaaggcgaatggattcttcactattgctgtaattctcctgccagccctgttactgtcctgacgcttacttattgccatcgagtcgatccacggggcaacgaggaaaactctattgaagatcaagggttttagtgagatcaaggtggaaaagatcaaagaggctatcaacaagtgtttggtaagattagagaaggggtcttcaatatctatttatgctaaccgtaatagccttcggcttcgggtttcataactgcaatggaactcagccatcaacgaaagagagttgtccgtatttccactggcagcaagcaatttgattcgatccttggagggtgtgtatctcacagctgtgagaagctagttttctgacaaactgcagtggtttccagagtatgagcatcagcgaagtattcggcgagttccgctgcggcaagacccaactctcccacaccatgtccgttgtcgcacagcttcccaaggacatgggcggtgcagagggaaaggtagcttacattgacacagaaggcacattccgtcctgagcgcattgggcagattgcagaacggtttggagttgatcctgactctgctaaagagaacattgcttatgcccgtgctttgaatagcgagcatcagctcgagttgctaaacactcttagcaaagagtttgttggtggggagtataggctgctgatcatcgacagcattatgaactgtttcagggttgatttctgtggacgtggagagctagcggatcgccaacagaagctcaatcagttcctgatgaagctcgctcatatggccgaaggtgagcccgtcactcatcgtcaaagaactcggctgatgttttgtaatagagttcaatgtgtgcgtcttaatggtaagcacgacactctgcatttagaacgtggctcacaccactgttaagacgaaccaagttcagagtgatcctggtgccagtgcgctcttctctggagctgatggccgtaagcctgtcggtgggcatgttcttgctcatgcttcaacgactcgagttctgcttcggaaaggtcgcggcgaggagcgcgtggcaaaaatccaggactcaccaggttagttgacttttcctagcaagtaatggatgcctactgaatatatacttcagactgtcctgagcgtgaggcgacatatctgatcaccaatggcggaattgacg

SEQ ID NO: 19790 - DNA, 1271 bp, Emericella nidulans
ggagagggaaaaatgtccagagtcgagttttgtactctgggcatgtttattctcggtacgcgcacctagctgctggataactacagcacaatcgcttacctccaatcgggtacaataacagatgatatcaacttcgagggttcccgacccagcgtcaaaaatgttcttggtggtgcggcttcgtttgcggtcatcggcgcccgtctggcagcggggaaagagtactccaggtcggtcagttggattgtcgacgttggctcagactttccaccagaagtcctggatgtaattacggcatgggatacgaactgcgtgatcaggagggaccccggaagactcaccaccagggcatggaatggttacggaccgaatgagaaacggggtgagtgcccagatgctccgcgatgtgctaccggcaaattaatgaagatagcctttaaatacttgaccccaaagctacgactagagccatacatgctttcggactcccaagtgctgtcaaaaacgtttcatatggtttgttcctcgtctcgttgcgtatccatagtgcggcacattcttcaacgtcgggaggccctggccggtgggtccaacgagaggccaatctttgtctgggaacctgtaccagatatgtgcacgcctgaggaacagctgaagttcttggaggcgtgccgtgaggttgacgttgtaagccctaatgacttagagctaggcatgatgttcggacacccgtgctggaatgaaggaagcgctgaaggcaaggaaacagtgaaccagattcttgattcagggatcggatctcggggtgaagggtacttggttatccgagcagggaaggatggcagttacgcttattctcgaggtctaaggctctggttactccgcttatcatcagccgactgcctcaggaagctcacccgtcgttgatccaacgggagctggaaactccttcttaggcgcgctagcgcaggggatggtgagcgagggtagagatgcgactagagttatcagttcgattcatgcggagtccgcaaactggcaaaaagcacccgcaagctgcggaaagtatcacagcattccacccgctctaattctcgccaccgttgctgcaagtttcgtcgtcgaacagattggcgtgcctcgccagtctacatctcatgagggaaaggaactttggaacggtattgaatttacggaacgagtccgcctttacacccacaaattttgtcggacactcgaagaatctcctcaaaatcacctgcagatcaact

SEQ ID NO: 19791 - DNA, 1273 bp, Emericella nidulans
agcagatgccgcctcagggaggctcaaggaagatttcctttaacgtctcagatcaatatgagattcaagacgtcattggtgaaggcgcctatggtgttgtttggtgagaataacggtgtaaaccatgccggttatttactgatttttcccagctctgctatccacaagccctctggccagaaggtagccatcaagaagatcaccccctttgaccattcgatgttttgcctgcgaaccctacgagagatgaagctgctccgctacttcaaccatgagaatatcatctccattttggacatccagaggccgcgaaactatgagagtttcaacgaagtctacctcattcaggtaaattgcactagtgcggcgcacatctgagagccggctgattgattggtactgaaggaattgatggaaacagatatgcaccgggttatccgcacgcaagacctggcagatgaccactgccagtactttatttaccaaactttgcgtgcgctgaaggccatgcactccgctaacgtcctccaccgtgatctcaaaccatcgaaccttctcctcaatgcaaattgtgacctgaaggtctgcgactttggtctagctcgatctgcggcttcgactgacgataattctggtttcatgacggaatacgtggcgacgcgctggtaccgtgcacctgaaatcatgttgacgttcaaggaatacacaaaggcaattgatgtgtggagtgtgggctgcattcttgcagagatgctgagcgggaagcccttgttccctggaaaggactgtaggtactctattggtggttggtggagaaatgcgggctaacgcatggcagatcaccatcaattgactctaattctggatgttcttggaacacctaccatggaagactactacggaatcaagtcccgacgggctcgggagtacatccgttctctcaaaatcaagaagaagattccgttcaaggcactgttccctaagagcaacgacctagctctggatctgctagagaagcttttggccttcaacccgacgaagcgaatcaccgtggaggaggctctgcgtcacccgtacctggaaccatatcatgatccagatgacgagccaacagcgcccccaatcccggaaggcttctttgacttcgacaagaataaggatgctctcagcaaagagcagttgaaaagtaagtatctggcgccaatcgactccataagttatgcgacaatcaactaatgtcatcacagttctgatttacgaggagatcatgcgg

SEQ ID NO: 19792 - DNA, 1274 bp, Emericella nidulans
gggtcctctgttttcatcatgagatcctctatgaggcgaagattctcgaccttcgacacacagatcctgatgatcgaaagagcccatatgagtatctagtccattataagggctggaagaacacgtatgtatcacttatttgcttcaatccgtgattaatgctctgaaatctacgcgcatttggtcaaatgtgtgctgtgatctcttgttattgggaggaagattttgtgcctaacgcccctgacttcccgagtggcagctcgtaaccttggtggggaaaatggcagcgcgtcctctataaatcttgacggacttatactgacctttatgtgaaacagatgggatgattgggtaccccaagatcgccttcgtaaatttacggaggagaacagagagttggcaaccacccttcgtcgggaagccgaggctgcgtcgccagaagagcacgaaaacctctctgaagaagaagggaggctctgaccacagctccgcccgtggaagcgaggaaagacaaacatctgttcctggccgagggactaaacgggccagggataatgatattgaaaaggtccgttcccagtacctgcacaaatgccgctaagtgagggggcttgaagccaccgctaccacgtcggtcgttatgcgtaacgtatgctgaatttcctatctaggaggaacatttctacacccgaccatcagtgagaattgtgatgccagacaatctcaaatcgctgctcgtcgatgactgggaaaatgttacgaaaaaccagcaagtggtggcgttgccagccaagagctcggttaatcagatcttggacgactatcttaaagaggagagacccaagcgcactggttcatccgaagtagatgtgctggaggaagtggtcatgggtatacgcgactattttgacaaatctcttgacaagattcttctctatagattcgaacgggagcagtatcgtgtcctccgcaagaggtgggaatctgaaactgcagacaaagggccccttgatgtctatggcgcagagcacttgacacgccttttcggtatgatccccagcaaagcaaatcaagtagtttacgaggtaacactaatctactgctagccacgatgcccgagctcattgcgcagacaaatatggaccttcaatcaacgaaccgacttcgagaggagctatcaaaattcaccatctggctgagcaagaattctaatcactattttgcaacacgatatgtcaccgcaagcaatgaatacattgagaaatcacgcggcg

SEQ ID NO: 19793 - DNA, 1274 bp, Emericella nidulans
gccacgaagtttgaagacaatgaggaggcgcatatttttagacctatacgccacatgaccgaatctgtcttcaaagtcgcagttgaacccgtcaacccgtccgaacttcccaaaatgcttgagggtctccgcaaagtgaataaaagttatcctctaatctcgacaaaagtggaggaatccggggagcatatagtcctagggacaggagagctctatatggactgcgtgcttcacgacctccggagattgttctccgagatggagatcaaggtgtccgaccctgttactcgtttctgcgaaacagttgtggagacgtctgcaatcatgtgctattcaataactccaaacaagttgaataagatcacgatgatcgccgagccgctagacgatgggatagctgaggatatcgagactggtaaagttagcatcaaagacccaatccggaaatgtggcccggttcttcgaagaaaaatatgactgtgataaacttgctgcgagaagtatatgggcatttggtccagatgaactgggaccgaacatcttacaagatgatacattaccttctcaagtcgataagaagctacttggaagcgtcagagattctataacacagggcttcagttggggtacccgggaaggtcctttgtgtgaagagcgtacgtattctaatactgttatctcatcctagctaacttgttcattacacagcgattcggaatgcgaaattcaggctcacggatgtttccctggctgatcaagccatttacaggggcggtggtcagataattcccacagccagacgtgctgtctactcatcgttcttgatggcctcccctcgcctaatggagccgctctattcttgctcgatgacaggacctgcagatgctgttgcatccgtctataccgtgctgtcacggaggagaggccatgtcctttcagatggacccattgcgggaactcccctgtactcggttcgcggtctaattccagtcatagattcttttggctttgagacagatcttcgaatccatacacaaggacaagctgcagtcagccttgtctttgataagtggagcgttgtgcccggagacccactggaccgtgatgtcaagctaaaaccgctggagatggcacccgcaatggcgacggcacgcgactttgttttgaagacaaggaggcggaaaggtctggctgaggacgtgaccgtaagcaagtttttggagccggaactttggaagggcttaaaagagagtggcgtcctagattcgtgagcc

SEQ ID NO: 19794 - DNA, 1277 bp, Emericella nidulans
tgtcttgtcgattccctgaagaagaagcaattagctcccatttatccgcagcagaaggataatggacaaccggcgactcctagtccgcatatttttatgtgcatgattggtggtgggcactttgcggcaatgctggtttctctggcacccgaggttcatcggaaacagggtggtgtcgaggaaagacaagctcgcgttattgcacacaagtcgtttcatcgctatacaaccaggcgaaaacaaggtggctcccagtcagccaacgacgcggcaaaaggtgcggcgcattcagcgggttccagcctacgacggtataatgaggctaccttggaaaaggagattagggagctgttgcaggattggggcaagatgataaacgaggctcagctcttgttcgtccgcgctgctggctctacgaatcgaagggtcttgtttggccaacatgaggggcaagtgctgaagcagaatgaccccaggttgagagggttcccgttcagtactcgtcgggcgacacagactgaactgatgagatgcttcaaagagctcactcgtgtgaagattagtcaagttgatgaagctgctctcgccgcagccgcaaccaaacagcgagaagagtcaaaaccttctacaccaaagcctcagccgcagaaaccaaagatatcgaaagaggatgaagcggcaatcatgcatacaacacaaatacaagccctcatccgtcgctcgaaaattccggcgctgatgtcgtacctatccaaaaactctataccctcttcatttacctttcagccatccgacgtccagcagaattttcgatgtcccacacctcttcacctcgcctcaaacctcaattcccccgcaatggtattagccctccttaccaagcttgacgccgacccaacggctacgaatgcagaaggaagaacgccatttgaacttgcaggtgatcgcgctactcgagatgctttccgcgtacacgccacgagcttggcgagtccaagtggaattgggaggctgccaatattccgccagccatatccaaggctgaagcagataaccgtctgcaaagggagcggaaaacagcggaagaggaagaagcgaaccggcgtaaggcggaaatggatcgcttgcgacaggaagaggcagcgacggcggctcgaatgacaaaaaaaggtggccggactgtgggcagtgtagagaagacagctcaggaaagaagagaagaagaaacgcgggggatgacgccggaaatgaggatgcggttggagagggagcgccgt

SEQ ID NO: 19795 - DNA, 1279 bp, Emericella nidulans
tgccggtgttgacatagcaaggttggcatcgtcgaaaactataccgtcgacgactggaagcacgatatggagctagccaaggaaacgggaatcgacgcattcgctcttaactgcgccagcatcgactcctacacagacaagcagctggcatatgcgtacgaggcagctgaagaggtcgactttaaggtgtttatctcgttcgacttcgcatattggtcgaacggcgacactgccagaattacctccattatgcagacctatgccgaccatccaggccagtttcaatataatggtgctgcgttagtgagcacgttcgtcggggacagtttcgactggggtccagtcaagagggcagtagatcatccaatctttgcggttccgaatctgcaggatccgaactgggccggccacgcgacgacatcgattgatggagcgttttcgtggtatgcgtggccgacggatggaggaaatagtattatcaagggccccatgacgacaatttgggatgataggttcaggaataatctcaaggacaaggtttatatggctcgtaggttgtccattcttttgctcctgagacgacgctgatgacgatgctatagctgtctcgccgtggttttcaacccacttcaacaccaagaactgggtatttatctgtgaagaccttccacatctccgctggcagcagatgctggaaatgcagccagaattgatcgagatcatttcctggaatggtgagtctctcctttgacattagcaggcatgaataaccgtgaaagactacagcgagtcccactacatcggcccttactcagaagcccactctgacgacggctctgcgcaatggacgaaagactttccccacgacgcatggcgcatcatcgccaagccctacatcgccgcatacaaggcgggagagagagagcccactgtggagtctgaccagctggtctactggtacagaccgacaccgaaagccgttacctgctcgaaggatccgcttggtccgccaaatggaatcaacctgcttgaggatagtgtctttgttacgacgctgctcaccgagccggccacattgactgtcggcagcggctccctggagttttcggttgacgtagatgctggcattgtgacaaacagcttccccatgggtgtcggctcgcaggccttttctgtcacccgcgacggcgaggagatcctcggcggcgatggagggctggatgttcaggatagatgtgactattataacttcaatgtttatgttggctcttttagcgcc

SEQ ID NO: 19796 - DNA, 1280 bp, Emericella nidulans
caaccaccaaacgtcaaactcttgtatctcattcaatatgactccaatggatgcggcgatagaagcaattgaatcgctaaagccaggcgattcaattaattatactaaaattgcgaaagagttcggggtcaaccggataactctgtcaagaccccacaaaggaattcagcgctctaggagagaccaatatgaagaacagcgaattctcaatgaccagcaggccaaggatcttataaaatacattgataagctctctggcaaaggcctatatatattgcatgagatgcttcggaattttgcaaaagaactgacaggaaagaaaccaggaaatcactggcctggccgctttctaaagcgacactaaattgaactctcctctgcctatacaactgctatggactccaatcaaaagtgagctgattctgcatataaatattcgcgatactttgacttattagcccagaaacttgataaatataaggtggagccagggaatatatataacatagataagaaaggatttcttattggaatgctgtcaaaaggtctcaggatcttctcaaagcgcaaatataagcaaggaaacttcaagcagtgcctacaggataggaattgcgaatggataactacaattgcctgcatctgtgctgataagaccttgctatccccagtgcttatttaccaggcagctagcagtgatatacaagatacctggctacaggattttgatcctcaacaccacaagaccttttttgcctcctctccaagtggttggacaaatgacaagcttggatatgcctggttgactggagtttttgaccgggagacaaaggataaagtacagaggcaatggaggctcttattccttgatggccatggatcttaccttaccatgaagttcttcaattactgcgatgacaataagatccttttagcaatatatcctctacattcaacgcattcactgcagccgcttgatgttgggatcttcagcctgctttcccacgcctacagcagcgaactggaggcatatctgtatatatccatgggactaagtcatattataaaacgggacttctttcgcctcttcttcccggcctgggtaaaggccttatcaagcaaaaatattatatcttcttggagaatagttggaatacatcccttcaaccctgaaattgttctggcgagatttagcagagaactgcagtcaaggccatcaacaagtgagtcctcgcgctctatattaggtgcagaagactggcggaagatcaagaagctcc

SEQ ID NO: 19797 - DNA, 1280 bp, Emericella nidulans
tcacgacaggcgagaaatgaggaaaaatacagccatttcaagcatctagatacaaactttggtcggactgcgctgtgcttgtctggaggagcgactttcgcctactaccatttcggtgttgtccgagcgctccttgacaatgaggtgcttccgagtatcatcacggggacgtcaggaggagcgcttgttgcagcgctggttggtactaggacagacgatgagctaaagcagctgctggtgcctgctctagcgcataaaatcaaggcatgttccgagggcttcacaacatgggcgcgacggtggtggcgcacaggcgctcgttttgacacgatggattgggctcgccagtgtagctggttctgcaggggttccaccacgtttcgggaagcctacgagcgcactggacgtatactaaatgtgtcatgcgtgccatctgatcctcactcgccgacgatcttggctaactacttgacatcgcctaattgcgtcatatggagcgccgtacttgcatctgcggcggttcctggaattttgaatccggtggtcctgatgacgaagaaacgcgacggtaccctcgcgccgtactcgttcggccacaaatggaaggatggaagtctgcgaacggacatccccatcaaagcgctgaatttacacttcaacgtcaacttcaccatcgtctcgcaggtaagttaaacttacccaataaccccagatgttttctaactttacctcaggtaaatcctcacataaatcttttcttctttagctcccgcggcgccgtcggccggccagtaacgcaccgcaaaggccggggctggcgcggtggcttcctcggatctgccatagaacagtacatcaaactcgacctaaacaaatggctcaaagtcctccgccacctcgaactccttccccgccccctgggccaagactggagcgagatctggctgcagaagttcagcggcaccgtcacaatctggccgaagacagtgccgtcagatttttaccacattctctccgatcccagccctgagcgtcttgctcgcatgctccgcacaggccagcaaagtacattacccaaaatccagtttatcaagaatcggctcaagatggaatacgctatcctggaaggtctacatcgtttctcggttgatggagagagtgtcggtgctacgtcgatccagccattcccgtttgacaatggagccgccggtgcagatcagaagagcaacgatccgagagaagagcgtctcaaccgcaatttccccgagcgaagctctgaa

SEQ ID NO: 19798 - DNA, 1281 bp, Emericella nidulans
ttctctgcacgcgtcttactcctttactgctacatcttcattggagtcctcgcgctcctcacctacactatgtacgtcaaacaatctctaccggcctttgtcctgggtctagtcgcctcttcgcagaacgtcgccgctctaccgcaggcaagcgcggcgaccccaagtccagtcgcggacccgtataagatctacaccatcagcgccggcaatatcacggccaagcttatcccgcacggcgctcgtttgactcaattgctcgttcccgaccgcgatgggatactgcaggacgtcgttgtaggcttcgacgacccaacccaatacagtgacgacgacaacttctacggcccagtcgtcggccgctacgcgaaccgtatcagaaacggcactttcaccattgctggcgaaacatatcatacccctaagaacgagaacgacggccttgatacgcttcacggcggcgaggtcggctacgacaagcgcaattggacggtgacctcctacacgaactcatcgataacattctctttctatgaccatgcgctacagggcttccctggcgacgtcctcactcatgcaacgtacaccgttgacaacaacaacccgtcgggtctccctcagctcaccaccaaactcgtctcccttgccctaaccgaggcaactcccatcatgctcgcaaaccacatctactggaacctcaatgctttccgtgagcccaacgtcctcgaagacgtcaccctccaacttcctttgagcacgcgcttcatcgccacggacggtattctcattcccaacggcacaattgctaccgttgacgcttacaatggcgctccggacttcacgtccccgaaactagtcggtcaggacattaagaacgccgtcggtctctgtggcactgactgcacgggctacgacaactgctggctcatcgacagaccaacagggtactcctctgacgcgctaattccagctctctacatggcctccaagaacactggcattacccttgaggtcgccacaaacacccccgccatccagatctactcctgtaatgggcaagacgggtctgacccagtaaagccgtctcaaattcagcgcgccaagcaggccggctacaatgggccgactacagtcgacaaaaatgcctgcgttgttgtcgagactgagggatggattgacggtatcaatcagcctgggtggggacagacggacaaccagatctttacccccggtggcctgcctgccgtcaatctggctgtttacaaatttggaacggcttag

SEQ ID NO: 19799 - DNA, 1282 bp, Emericella nidulans
gttcagatcaaggactttgctgtggagcaagtatgtgccctgccaccccgcatcttgcggatatatcgtagcagaaattaatcccaccagtggatggacaagtacgaaacaaccgccaagtacaacgtggcagagacctgcagcgcctcgatttcggttcgagacctccaggcgctgtgcgaggacccggctttgaaccctttagacggcgtcctggatcgcaagctcacgtacggagagatccgcggttctaagcaactacgatcaacactggccaatctgtattctgtgaggacaccgactccattgccttcagacaatatcctggttactgccggtgcaatccaggcaaatttccttctgctatatacgttggtcgggcccggggatcatgttatctgccactacccaacctatcagcagctctactcagtcccagaatcgcttggggccgaagtcagcctatggaagtcaaaggaagccgaagggtggaagttggacctcgaagaattgaaaggccttatccggccgaataccaagcttatcatcatcaagtatggcaccattccctacgaacttcacttggcatctgacgtggtgatctagcaacccacagaaccctacaggggctattatcccacagggtacattggacgagatagtggagatagcgcgcagctcatcaatctatgtcttctgcgacgaagtctatcgccccctcttccactccatcagccctatggacccagacttcccctcgtcagtcttgtcgcttggctatgagcgcgctattgtcacagggtccttatccaaagcatacagtctggccggtatacgcgtaggatggattgcatcccgcgatcgaactgtaattgaggcctgcgcttcttctcgggactataccaccatctccgtatctcagctagacgacgcggtcgcgagctacgctctagccccgaccaccatccatgcactgctcaaacggaatattgaacttggccgaactaaccttggaatcctggagaagttcattgagtcccatcgatgggcgtgcgactgggttaagccccgagcgggaacgaccgcttttgtccggttcaataagatgggcaagccggtaaacgatactgccttctgcgaaatgctcctggagcggaccggagtgatgcttgtacctggaagcctgtgctttggcggcggagaggattttctgggctacgttcggatcggatatgtgtgtgaaacgcaagtgctggaagaagggttggcgaaattgaaggca

SEQ ID NO: 19800 - DNA, 1283 bp, Emericella nidulans
gcgggacatggcagggaatcattaaccagctggactacatccaggggatgggcttcacagccatctggatcaccccagtgactgccaatctcgaggatgggcagcatggggaggcataccatgggtactggcagcaggatatgtaggtctccttcatatccagtggcataaaactaacgataagtgcagatatgcgttgaacccgcactttggcactcaagacgacctccgagcactgtctgacgcgctgcacgaccggggaatgtaccttatggtcgacgtggttgccaatcattttgtgagtttgaactgcaggtgtgcttgcttttatagatgccaatactcatggtccatgtagggctacgacgccccggccgcgtcggtcgactacagcgccttcaacccctttaactcggcagactacttccacactccctgcgatattacggactacgacaaccagacccaggtcgaggattgctggctgtacaccgacgctgtcagtcttccagatgtcgataccaccaacgaggaggtcaaggagatttggtacgactgggtgggtgaccttgtgtctgactactctagtaaagcccctcccctatcctcccagtactgtatacatatctatgaaggtgttctcacatccaaaacaaagtcgacggccttcgcatcgacaccgctcgacacgtacagaaggacttctggcgcgactacaacgatgccgcgggcgtgtactgcgtcggcgaggtcttccagggcgatcccgattacacatgcgggtaccaggaggttatggacggggtgctgaactatcccatgtactttcccactatttatcccgattacctgcatgcccgctaactgtaccagctactaccccctgttgcgcgctttcagctccacatctggcagtctcagtgatctagccaacatgatcgaaacggtaaagtacacctgctcagacgctaccttgctgggcaacttcatcgagaaccacgataacccacgctttgcctcgtacgcttcctcaacccaatttccccggttcttctaggcaatgccactgaccagacaatacaggtacaccgacgacatctccctcgccaagaacgtcgccgccttcgtgatcctctccgacgggatccccatcatctacgccggtcaagaacagcactactccggcgcaggagacccggcaaaccgtgaggcgacctggctctccggatacgactcgacgagcgagctgtaccagttcatttcgaagacgaaccagatccgga

SEQ ID NO: 19801 - DNA, 1284 bp, Emericella nidulans
  unsure (1)..(1284): unsure at all n locations
tcctcccgctccctccgactccaggctccggccgcccgctctttcgcaaccgtttcggacaatgctccccccgtacaccaccacggcggtctgaaggaccaggaccggattttcacgaatctttacggacaccatggcgccgacttgaagtcagccatgaagtacggagactggtacaggactaaggatatcgtgttgaagggtcatgactgggtaggatctcgccgagccagccccgggcatgggatagattcgttggctaatagtggttatatagctcatctcagaactcaaggcctctggcatgcgtggtcgtggcggtgctggttttccctctggactgaaatacgtatgtccccccccttgattttcccaaagctagcgaatttgtctaatttgtaactcggctagtctttcatgaacttcaaagactgggacaaggaccctcggccccggtatctggtcgtcaacgctgatgagggtgaacccggaacctgcaaggaccgcgagattatgcgcaaggacccccaaaagctgatcgagggctgtctggttgtcggccgtgccatgaacgccaacgccgcctacatctacattcgtggcgaattttaccacgaagccactgtcctccagcaagccattaacgaggcttaccaagccggcctaattggcaaaaacgcctgtggaactggctacgactttgacgtattcatccatcgcggaatgggcgcctatgtctgtggcgaggaaacctcgctcatcgagtccctcgagggcaaggctggcaagccgcgcctcaagcccccgttccccgctgccgtaggtctcttcggctgccccagcactgttaccaacgttgagactgttgccgtcacaccaaccatgcantcgccgaggcgccagctggttcgccggctttgggcgcgagcgcaatgcgggtacgaagctcttctgtatctccggccacgtcaacaacccctgcaccgtcgaggaggaaatgtccatcccgctccgtgaactgattgaccgcactgcggtggcgtccgaggcggctgggacaacctcaaggccgtcattcctggcggttcttccacccctatcatccccaagtccgtctgtgacgaccagctcatggacttcgatgccctcaaggactcgcaaactggtcttggtaccgccgccgttattgtcatggacaagtccactaaggttgtccgcgccatctcccgtctatccactttctacaagcacgagtcctgcggccaatgcaccccctgccgtgag

SEQ ID NO: 19802 - DNA, 1284 bp, Emericella nidulans
tgcgagtgactggctgggtccccgcaagacccttgcaatcggcgtcgggcttcaaggcgtcattggcttcatcatgtctggttgctacgaatacctcaatacgcccaagaacgttgccgccttcgtagttgtctatgggtacgtcggtccccgaagcgcacaggactgcccacgctaacacctcgtagaatcttccttgcccttggtgaattcggccccggcgacaacatcggcctttgtgccgccaaaacaagtgctacctccatacgcggtcagtactacggtatcgctgctgccttcggtaaagtcggcgcctttgtcggcacatacatcttcccaatcatccaagacaacgcccccaacgcgatcagacgaggccaggaccccttctttgtgtctagctccctgtgtatctttagcgctgcccttgcgattttctgtctcccacatattggccaggacaccatcaccgatgaggaccgtaaattccggaagtacctacaggaacatgggtatgatacgtctactatggggcagactcagaccccgcagccgactgaggaagcgtagtggaagatataaaatatgtagtttacacagtacagatgagcgagcgagattatatactgaatctgttttgactttcttcatgttctcgcaattgtatcactcgcgacggttaagcctagaaggcttgatgttatccagaaacaggtcagtcgggcctaccgggcacgcaatatgctgaccgtcaggagtgacaagcaacctatgcccgccacttccagttccctgatgcgcattacgagtacatgccaactaagacggtccataaataaagaaacaagaacatctctgatgtcttgatcctgcttccacccgtccaggcgtccagcgtatacagagcggagcttagcaagcgcagcttcaatctgcagttttacccttgtcttcgccagcagaggttctcgtcgataggtctctattgctaaggggtaaatcacgcacactgcatagaggaaatggaaacagctgtgtccattgccaaacccgataaattgcaaccttcagactccaccctaaccctaacctccctcaataggcctctccagtcataatcatggttacgtgcagatatcagaggatcaatcagcggagataccgttgtaatcgtctaaaatatctactaaacgtagaattccaggctgtgacatgctccggtattgccttgcatcgctccccatcaagctacaacattccaaccataatcactacagtacatgt

SEQ ID NO: 19803 - DNA, 1284 bp, Emericella nidulans
tcctcgcaaccacggaatccaccgcaggaaagacttacatcgtgactggcgcaaacactggtcttgggtttgaagcggcaaagcacttcgtccgcctcggtgcaaagagagtaatcctagccgtgcgcacgataccttccggcgaggccgcaaagcaaaaaatcgatgaagccacggcgacaactgacgtcgccgaggtctgggcccttgatctgagcagctatgcttccgtcaagaccttcgcaaagcgtgcgattacagagcttgaccgaattgatgctgtgattgagaatgcggctgtggcgacggcggaacaaaccagagccgaggggcatgggttatcgctcacggtgaatgtcttgagtacttttctcttggccgtgctgttgttgccgaagctgaaggagtcggcagagaagtatggtgttctgccgcacttgtcgattgtgacatccggtgttggatgggatgtgcgtgagacgtgggagaaaattcgagaggatccgctggtcaggatggatgagttgcctagtgagcaattgatggttacgtatgtccattgtatcacaacttccttgagtcttgttgatgctaacatatgctgtgcgagcaggtaccctctttccaagctgatggataccttagctgttcgtgagctggcggctcggttgcctgttgagcaagggaaggtggtcatcaattccatttgtcctggtctctgtaagactgagctggttcggaattgcccacctgcccagaagcaggcaattgtcgaacagcatgagctatatggacgaactgcggaggatggaagtcggactcttctcgctggttccgttctaggaaaggaaagccatggcgcctacacttccaattgtgagattagagagtgcgtggccccaaacctctaatgcgtcggactgtgctaatataatcaatagagacaaagtccctgattgggcgaagggcgaggaggcgaaaaagtggcaggaacatttatggaatctcattgtgaaggaaatcgagactgccgagccaggatgtgtgcgaaaggcgttgcagaaataagtgccatgtaaccttttcgtcgctgcatctgttgtatcagtgtaattagtcaatttgagttgagaagctgagaaatttctgcgtattgcaaagcactgtgccggttctatcatgtatcgcatccacccatgggaagccagcgagtgcctcctttacgtccttccaggaggagagaccaagagcgttcattgcagtattagttgttggtatcagcca

SEQ ID NO: 19804 - DNA, 1286 bp, Emericella nidulans
gggacgcaacgtaattgcgacaactcgtactcgtcgctcacagggcagcgcagagtgaggagtagccgctcccaaagatgaaaactccctggaattgactgtcatctagacctcctcgacttcacaacacccgaacgtgtccggatacacctatcttctctatcgacacccaacttcgcgacgagttatacactcggtaccgtcgggctaatcgagggctccatttcatacctatacagcaatatatcattcgacaatacgccaagtaaaagcgctctaattcccctccgcaagcttgctcctggctatagacaagtacaagcgcccatcgcgcccccggttgaatcttggaattgggactcaatactagacggcaccaatgccgggaattatggctatggacagagctcaaagggccagaaggcgacgctacttcatgcaactttgcatctgccgccaccaacgactctcaacgcgcttttcttgcgacgcatttcgccgactatgcagctctcacttgccgtctcctcaacaaggggacctccattatcaaaatccgcgccacaggctacactcctgacccaactcacccacgacaccggaaaatacagtaatgagtatctgttcagtacggataattccctctttggctggcgcggactatggaactttggtcctgatccccggttcaataacaacgcgcaacggttatccctgctatcggctggtgcagaggcctattattctcccgtatcatcattaataggcatgtcgaccggcctcaggttctgcactttaccagcggccacttcatcgacgcccaaccccaatacaccaatttctaccttcccatataccctaacactcacactcactccgttgaccggatcgctctcaacgtcctactccgtacgggcttctcccaatctttccttcagctcccgtttcggcttcaacgtctacagctgggaaagcgaaatggtggcagggttcgaactctggcgacagtcaagaaaggccgccatagtagacaacgatggccttgaatgggctcgcaataaggctcgcatctgggacattccggcttcttcccaggtgccagaaccaatcacgcctagcgaagaagaaacccaagaatcagtccttaaggtccgagttgatcagtcttggaatgtacgccttctctgggaaggccgagttaaggagctccttgtgagcgctggtgtcgggcttggaccgagttcgttctcaccttcctcgtatgcaaattctcaagctacggcagg

SEQ ID NO: 19805 - DNA, 1286 bp, Emericella nidulans
tcctgccacggttcgaggtgattgagccacagaaataaggactgtgcatttattcactgactagtcagactactacaacgaaggcgctatggacctgatcacattacgcgacaacgaggcggcatttgaccggtataagatccttccccgggtcctgatcaacgtcgccaaagtggacacgagcaccgagatactggggacgaaggtcctgaccggacaccagatccagtgaaaacatggctgacggtatgagcacaggtgtctctccccttcggattcagcccagcggcctcgcaaaaactcgcgcatccagacggcgaactcgccacatcacgcgccgcagccaactttggcatctgcatggggctgtcctcatactcgaactattccctcgaggatgtagcggcccaggggatgggtaacccgtatgtcatgcagatgtgcgtgctgcgtgatcgatctataacgctgcagttgttgcagcgggcggaaagtgcgtatcggttcgtgtctgaagaatcctttgctaacgatgccagaatctgggtacaaggcgctgtttctatctgttgacgtcccggttttgggaatgcgattaaacgagttccggaacagctttgttctcccagaagacatggagtggccgaatatcttgagcaacggcagtgacctgtcaaataagacagattatggtgaggctctctatctctagaactatagacgcccctaaccgaccgtccttgccagatccaagtcttgactgggccagtacaatcccgtggtccgcgaacacacatcaatgcagatatggctcaagggggtgtgctctcccgcagatgtcgaactcgccattcactacggcgttgacggcatcgtcatctccaaccacggcgggcgccagctcgatggcgtccctgcaacactcgactcgctgcggctgtgcgccgaagtcgccaaggggcgtataccgctggctatcgatggaggcatccggcggggttccgatatcttcaaggccctggcgctgggtgcgagatactgcttcatggggaggattcccatctggggacttgctgtacgtttaacgttttttatgatttattctctttaaaatatgtggcgttatatgctgacagtcgcagtacaacgggcaggaaggagtcgaacttgctataaagattctgaggcaggagttgagggtgacgatggcactggctgggtgagtacatgagctgattcgctctagacagcacgaaaataatgatatcttgcaggtgccagaccat

SEQ ID NO: 19806 - DNA, 1287 bp, Emericella nidulans
tcaaactatagcgataccgaagttcatagattatttcatattactacaatcatgtttcgttctgccttaaagaaaacccccaacgacatcgtcctcctctccgccgtccggtcacctataacccgcgccttcaaaggcggtttccgtgactcgcacccagaggacctcctaattccaatcctccaggcctcacttcagcgtgccaatatctccccagacagcgtcaatgacgtgctcatcggcaatgtccttgcagaactcggcttcgccaagacgggtcgtaccgcactcaatgccgcgggctttaatcctacaaagactacattccacaccgtcaatcgacagtgcagtagtagtctgcaggcgattacgcatattgcgcacgcgatcgcagtagggcagatcgaggtcgggattgccgggggcgtggagagcatgagcaggaattacaatccggctcggggcattccaagagacgtgagtccgttgttgaaagagtgtggagtgaaagaggcgaccgattgccttttgccgatgctggtgacgagtgagaatgttgcaaagaggtacggggtcggtaggacggagcaggatcagtttgcagcagagagccagagaaaggctgtggttgcgcaggaggagggtaggtttagcgagatcgtgccggttagggcaaggaggcttagctcggagacggagaatgagacgtttgagtttgtcgatagggatgatggggttaggcaggggctgactgttgagaagttggcggcgttgaagccggttctggaagggggtgcttctaccgccgggaactcgtatgtcttcttgcctatgccactgttctatgctaatacgtagtcttcagctcccaaatttccgatggcgcttccataacgattcttgccagccgcgcctgggctgaatcccacggtctaaggcctattgcccgttttgccggaacccaggtggccggctgtgcccctgacgagatgggcatcgggcccatcgacgctatcaagaggctgtacaagcacagcggggtctcacagagcgatgtggatatttttgagctgaacgaggcgtttgcgagccagagtatccattgtatcagggagctaggcattgatatggccaaggtaaatccgaacggaggagcgattgcactgggccacccgatcggcgcgacaggggccagacagacggctacgttgttggcagagctggcgaggtcagataaggaggttggggtggtgagtatgtgtgctagtacgggaatgggggttgcaa

SEQ ID NO: 19807 - DNA, 1287 bp, Emericella nidulans
ggggccaatccagctgagcatatgcttgaggtgattggggctgcgccaggggcacagacagatatcgactggcctgaagtgtggaggagcagtcctgagtaccagcaagtacgaagtgaacttgcaagactaagagagttggccaatcgtccatcgccagtctcagacccgaatgacaagtctagctatgctgagtttgcagcaccgttctctgagcagctccttcaagtcggccgccgagtgtttcagcagtactggcgcagcccgtcctacatttattcgaaagctttgttgactgttggctgtgtaagtcgtctcccagtctctagagcttgcttttccctaactagatcagtccctctttattggattctcgttcttcaaagcggacaacaccagacaaggccttcagaatcagatgttcggtgtctttgtatttctttttgtagtcgttcagctcgtcatgcaagtcatcccctccttcgtcacacagcgaactctctatgagtcgcgggaacgacagtcgaaaacttatgcatggcaagcatttgttctttccaacatcatcgtcgagtttgtgtggaatacagtacgctcctcacttcgtcttttatgacttccaccttctatggctcccactaacgtcatgcctagatcatggccatcttctgctacctcgtctggttctatcctgtcggcttgtaccagaacgcgcgatatacggacaccattcactcccgaagcactctcacattgcttatcatctgggcggtcttccttttcgccagttcattcgcgcacatgctgattgccggcgtggatagtgcggagatggcatccgccctctccaatatcttcttcatcatgatgtacgcattctgcggtattcttgccggtccaaatgcgcttcccggcttctggattttcatgtaccgtgtcaatccgcttacatacctcgtgtcctccttgctatcagccactcttggagatgcacccatgcactgcgccaataatgaggtcttgacattcttcgcgccaccggggctaacctgtcgcgagtatatggaagattaccggtctgtcaatgggggttacttgctcaacccggatgcgcaaggcagtgatcaatgtcagttctgcagcttggagtacaccaaccagtacctgagcagtcttagtattgacttcaataaccggtggcgggatttcggcctcctctgggtctacgttattgtcaacaccgtcggagcaatcgtcttctacaagctgttccgggtgcctagggca

SEQ ID NO: 19808 - DNA, 1287 bp, Emericella nidulans
ctttatttctcctttctcttttgtttgccaggcttcaatccggcaacaatatcgcagctttgttctagttgctcaacggatcgccccttcaaggtattctctcgcagtgtttatgccggaattttctgcgcttgcccaaacatgaccgcgctttgtgttacgcgccctcatcacatataattcatgtcctaactcttcacgacggcttagtcaatcatctcaaaatccatcgtcatgtctgccgaatacgagcacgaaaacggccgttatgatggtacgtaaactactgtcgccatggaagcgatctcgatggcatgggtctaacttcagttcttagacgagccacgcttcgctcgcgaccgcagcgcctctccccgtgatgagccgcgagccgatcgtgcccgtagccgttctccaaacggtcgccttgacgagcggtatgtcgtcctttagcatcggctggagacaatacgcgagcatatatgctgacgctcaaatatcagtggtcccattgatccccgcaagcagcttgatgatgacgagggtgctgtcaacactggctctaacctcttcgtcaccggaatccacccacgtctgactgagtccgacatctcacgtctgttcgaaaaatacggagatgttgagagctgctcgatcatggtcgaccctcatactaaggagtcccgaggctttggcttcgtcaacatggtgactgctgagcaggcagatgcagccaaggagggcttgcaaggtgaggttattgaaggccgcactctaagcattgaaaaggctcgtcgtagccgtcctagaaccccgactcccggtaaatactttggacctcccaagcgtggtaagtcaccctttagaccgccgacgtgtctcggctaatatgtataacagagtttggtggacgccgaggtggccgtggcgaccgctacgatgaccgacgtggcggctacggaggcggaaactggcgccgtggtggtgatgactaccgcggctacggccgctacgactcctacagcgaccgtcgcgactacggcggccgcgattaccgtgattatggccgtcgcgactaccgtgacgactatgcaggcggccctggtggcagtggcagtggtggataccgcggtggagctgaccgctacgcctccggtggccgtgaggaacggtacggtcgtgatgaacgccgcgatgatcgtcgtgacgaacgccgtggttactatgaccgtgatgctaaccctcctagttacggacatggtgctccttcacgcgacccttaccccg

SEQ ID NO: 19809 - DNA, 1288 bp, Emericella nidulans
cgccagtcctgccggttctccttcgctacgcatattagggatggaaacgaaaaatgctaactccatccattaagatttgacacagtcaaagtacgattacaaacgagcaaagacgggcatttcaaaggtccgctggattgcgtgctccagacggttaggaaagaaagtgtttcgggtttatacaagggggcgacgccaccgttagttgggtggatggttatggactcagtgtgagttgcgctgcggtctcgatttgagctatgcggggatatctaacaggaactttgcagaatgcttgggtccctaacgttataccgccgtctgctacttgaaaatgtcttctcgaacccttcaatacgtgctatgactccgtttgcgaagaaccagtctgacctacatacactgccgagtttcggacacggcattgccggtattatggcgggcacgacggtcagctttatagctgcccctgttgagcatgtcaaggcacggcttcagatccagtacgcagctgataagtcgaagcggttgtacagcgggccgatagactgcacgcgcagaatcgtacggaacttaccccttccttaccgacggtgtactaataggcccgcagcttagcgcccacggcatcagcggcctctaccgtggcctctgtgcaacaatcctcttccgctcctttttcttcttctggtggggctcctacgacgttctgacgcgtctgatgaaagagcgaacttccctttcagcaccggcaataaacttctgggccggtggtatctcggcccagatcttctggatcacgtcgtatccgtcggacgtggtgaagcagcggctcatgacggatccgatgggcgggacgcttggcgacggggaacggaagttccggtggtggaaggatgcggcgaaggcagtatatcgggagagaggctggaagggctactggaggggctttgtgccttgcttcctcagagcgttcccggctaatgcgatggcgctggttgcgttcgagggggtgatgagatggctaccttaagataacactgccctctgaccggaggtataaggtacatactacttatggacatccatatatacaggacatagacttgaaggcgaacagatactgcaaatagtttatggcatcagcttgagagggttctgaatgtcgctggatgtcatggtggcagtttgctggctggaacgctgcacttccgcttccggcgacttctcgcgagtcaccaagacgcgaacaaaaacttgtagcagaggtactggggctgtgacagag

SEQ ID NO: 19810 - DNA, 1288 bp, Emericella nidulans
tccgatcctcacgtcgctgttcaattcgtcctacttcatcggtcaaatcaccgccgccgctgtagggttggggacggttacgattccgtcagactgggcatggagagtaccctctttgctccagattgcacccgctatggtacagatcgtgacggttatgtatgtttcttcatatcacttgatatagtcacgctgattgatgtgctgctaggttcctccccgagagtccgcgttacctggtcagtaaggaccgcaccgatgaagcggtcgagatcctcaccaagtaccacgccgagggcgaccgcgactccgttattgtgaaagcagaaattgcccagattgaaagaactatcctactcgagcgagaagaatccaagcaatcatggggagatctgttccggaccgcgggtatgcgccgtcgcctctttatcactgctttcctcggactgttcacacagtggtctggaaacactctgatctcgtaggttctcccaactactctttagcgagatgctgatctcctcaggtattatctgagcgacttgctcgatatggtggacatcaaggactcagtcgtcaaatcgaagatcaacgtcggtatcgcctgctggggtcttgtatgcggaacaaccctggccttgacagctccgcgtttcaaacgcagaacaatgtacctcaccaccgcctgctccctgctcagcgtgtacattgcctggaccatctcgatggaaagggccatgaccaccgagaccaaagctgctgctgttttaaccatccttttcatcttcctttactcgcccgcatataacctgggatacaacgccttaacctacagtatgcccctcacttctctcggcaaggcgcctttgctaactctaaaaagcatatctcatcgagatcttcccgtacttcaatcgatcccgcggcctctcgtggttccagttctacggccgtggagccactttctttgcgacttatgtcaatccaattggacttgaccgcattgagtggagatggctgattgtgtactgctgctggctggcgtttgaagtcgtttttatatacttcttcttcccagagacatcgggacgtacgctcgaggagttgtctttcagtaagtttttccgttgatgcttttttagatgttaatactaacaatggcgtagtgttcgagggcagagagaaagcagatgaggttgctgctgccgtgcataagcagattgacgagacggagcacaagggtgcgacgactgagattcgcgagaaggtgtagtagggctagtctgtg

SEQ ID NO: 19811 - DNA, 1288 bp, Emericella nidulans
aatggctctgttactatctctcagccttcttgccacaacaatctcagcccaacagattgggacgccagaaatccggccacgtcttactacctaccactgtacttccgccaacggctgtacagagcagaatacctctgtggtgctcgatgccgccacgcaccccatccacgatgcatccaaccccagtgtctcctgcaccacctcaaatgggctaaaccctgctctatgcccagacaagcagacttgcgcagacaactgcgtcatcgacggcataactgactatgctgcgcacggagtcgaaacccatgggtcgcggttgacactcactcaataccgaaacgtgaacggggcgctctcctctgtttcaccgagggtctatctcgttgatgagtccgaccctgatgagcaggagtatcgagccttgtccctgctcgcccaagaatttaccttcactgtcaacgtctccgcgctcccatgcgggatgaacggcgcgctatatctctccgaaatgtctccctccggcgggcgcagcgcgctcaaccccgccggagcctcctatggcacaggctactgcgatgcccaatgttatgtgaatccctggatcaacggcgagggaaacatcaacggctacggagcctgctgcaacgagatggacatctgggaggctaattcgcggagtacggggttcacgcctcatgcttgtttatatgagccggaggaaactgagggaagaggggtatacgaatgcgcctccgaagatgagtgcgatagcgcgggcgagaatgacggcatctgcgataagtggggatgcggctttaacccgtatgctctgggaaatacagagtactacggccgtggccaagggtttgaagtcgacactaaagagcccttcacggtcgtgacacagttcctgacggatgacggaacaagtacaggtgctttaaccgagattagacggctatatatccaaaacgggcaggtcatcgagaacgcagttgtctcgtctggtgcagactcgctgaccgattccctctgcgcctctaccgcgtcatggttcgactcatacggaggaatggaagggatgggaagggcgcttggccgtgggatggtcctcgccatgagtatctggaatgatgcgggtggctacatgcagtggctcgacggtggggatgcaggaccctgtaatgccaccgagggcgcaccggaatttattgaggagcatacgccgtggacaagggttgtctttgaagatttgaagtggggtgatattggcagtactttccaggcg

SEQ ID NO: 19812 - DNA, 1289 bp, Emericella nidulans
gggctggtcttttggtgcgttctcaccctctactatctgtttgaaccccaagaacagcttcaatgctaactgatatctgaacagtttatcgccgtcttcctaggctacgttgccgtctctggagtctcgctctaccactactcgaagaacaaatcgttcaacggcgatggaatttacgactcagccaacaccttctccctcgacacaaacactttggtcctatttatcttcgtcctttgtgtcgcgctcgccttctcatggggatattttctgctagcgcggcaattccccaaattcattatttgggccacggggatactgaacatcgttctcgcactcgcgacggggatatactacatcgtgaggaaacagtacgggggaggaatagtattccttgtcttcggcgtattcgcgataattgcgtttatcagctggattccccgtattccgtttacggcgtttatgttgaggacgagcatggatgtctcccggaagtacgggcacatgtttcttgttagtgcgctgggtgggattatctcagttgcttttgcggcttggttctccgcgactttagtcctatatacgtcacctacgaacccaacagcgatggcaccaatccctcatgcaggaatggctctggcagctgtagcacagcccgtgtgatcggcctcgtcgtgtacgtcactttcgccatgtactggttcagcgaatggctcaagaacaccatccacacgaccatcgcaggatgtatacgggtacgtggtacttcttcgccaattccccccgtggcatgcccgcacacgcaacaaggggtgctctcaagcgcgcaacaacctactcgttcggaagtatatctttcggtagcttgattgttgcaatcataaattgcctgcgtcaagcatgctcagttgcccagcgccatgaagcagccgagggcaatctcctgggaagtatcgggttctggatcttaggctgcttcatctcactccttgactggcttgtaaccttctttaaccgctacgcctactgtcatatcgcgctctacgggaagtcgtacattcaatccgcaaaagatacgtggactatgatgaaggatcggggcatcgatgctttggccgctgactgcctcgtcggccctgtgttgacaatgggctccgtatttgtgtcctatgtctgtgcgttgttggcatatctatatctccagtttacgcatcctgcgtataacgatggtggtgactttactgcagtcatcatggctttttcgtttgtgattgggttgcaagtatgcc

SEQ ID NO: 19813 - DNA, 1289 bp, Emericella nidulans
cgccggcgtgaccagctactcggagactggtacctacaccatccctgctaccaccatcaccgtcaccgataccaccactgtctgcggcgctactaccactgagctccccagcggtacccacacctacggtggtgtcaccaccattgtcgagaccgccacgaccatcacctgcccctatgccaccgtcaagcccactggcagcaccgtcaccagcgtcatcgagaccacgacctacgtctgcccctcggctggtacctacaccattgccccgaccaccaccttcgtccctacctccaccgtcgttgtctaccccaccccggaaaccgtcacccctggcacctacaccaaccctggtaccaccatcaccgtgactcgcactgaggacgtctatgtctgcccttacaccaacggcaatgtccccaccagcgtccctgccctgcccaccacctctgctgcctcgaccactactgctgttcccagcagcagcaccaccacctcgtctgccaccagcgtccccaccggtgctagcggaaacaagatgggtatgactttcaccccctacaacaacgacggaagctgcatggccaagaacgatgttcttgagcaggttggtcttatcaaggggaagggattctcccacgttcgtgtttacggaaccgactgccacaccctcgagtacgttggagctgcttgcagcacccacggcctcaagatgatcctcggtgtcaatgtcgagggctccaccggttttgatggtgctcgttcccagttcaaggacattaccaactggggccagtgggatcttgtctctctcattgttgtcggtaacgaagtcgtcactagcaacatcgcgtccgctgcccagctcgccagcttcgtctccgagggcgccagcgctttctctgccgccggctacactggccaggttaccaccgctgagcctatcgacgtctggctcagtaacggtgctactctctgccctgtcgttgatatcctgggtgcgaaccttcaccccttcttcaaccccgagttcaccgccgctcagtcggtatctctcgtcagcaaccagatcaaggatctgaagcaggtctgcactggcaaggacgtcattagcctctagaccggctggcccaacgccggtagtgctaacggcaaggctattcccggtcagtcccagcaaaccactgccatcaagtccctcgtcgagaaggttggcgatgtttccgttttcttctcctacgccgatgacggctggaagtctaagttcgctaccagcgacaaatacaatg

SEQ ID NO: 19814 - DNA, 1289 bp, Emericella nidulans
ccacctcatcggaccgctgtttctcgcgccattctccgaaatgttcggtcgactgcgcatctatcaggtgggcacgttgacatttacgatctgtaatatcgccggtgtctcgcccctaacatcggcgcgctgctggtctttcgcctgtttgccgggatttctgggagcagtccggtcacactgggggcaggctctgttgcggatatgtttgctcgacaggagcgtggagtcgccatgtccatctatgggctgggccccctacttgaccctgtcgtcgggccgatcgcaggtggatacctctctgaagcacagggctggcgttagattttctagctgctggccattgtggttcgtatccccttcaatccgcctctcctgtgccccaagctcactagtttaccatcgtagtccgggatcgcggtcattcttgttttctctgtcctatctgaatcctatgaaccagttctattgcgacgaaaagcgaatcgcatcagacacgagactagatcccaggtgaacgctgcacaagccctaaagccagactcaaggaaggtttccacccaagcaataaccagaccgacgaagcttctcctcttcacctcaaatgtcgccttgttctcgctatacaggtaagtagctctccaatcttgggtaagacacgattgtaacaattgtttgtcaataataggagtggtttctggatacccctacttactcttcaccaccgtcaccgaattatacgaagccacctattatttctggcaaagtgccaccggattcgtttccatcggcattggcgtcggagccctcattggtatatcttgctttggtgctctctccgacaaaatccagaaccggcttattgcaagaaataacggccaggcagagcccgaatttcgacttccgccactcattccaggaagcctcctgatcccgataggtctcttttagtacggctggtccgcccagatgcgggttcattggatgatgcccatcatcagactgggctgggttggctgtgggatgattgccacccttctccccattcaagcgtacctctttgacgcttttggcatatatgccgcctcggccatagcggccaatacagtggtacggtccattgtcggagccttcttgccgcttgctggtccttcaatgtatgctacactagggttgggatgggggaatccattgcttgggtctgtcgccttggtttgttaccagtgccagcagtaatctactcttacggcaagaggatccgcttgaaatctcgctatcatgtggcggtg

SEQ ID NO: 19815 - DNA, 1290 bp, Emericella nidulans
catgccgcggctggacagtaagtgactcagccctgtgaacgacaagcatggagattcccctggatcgactggtttctcgatccaggcctgatctgtcactttccccggatttacaactatggaaggttgacaataatttctttttttcgtggcagtgacggtgttcggtgtacgctctccgggtccttcatcgcaaaaccatgtaccgctcaagaaatcgctttctatgaatcaaccgccgcccaccccacctttcgcgaatttatccctacgtacattggaacgttaagttccgccgatcagaaagagcccgctgctgccctcactgccgcacgcttcgcagcagggagctatcgtcatcccgggctccgatcactcaacacccgcagaaactccggtcaccagcgaaactgtccgattgtccacatcaaccgctccgagtacgtctgaagcagcatcagacgtaacatggactccgtccacatctgctgggaaaaagctggatacagggttgtctatagtactagaaaatgtcgcgtctgggttcaagcggccgaatgttctagacgtcaagcttggggcgagactctgggctgacgatgctatccccgcaaagcgagcgaaattggatgcagtgtccaaggagacgacgagctcttctcttgggttccgtatcgcagggatgaaagtttggaccggcgtcaatggcgaggccgatgaggggagcaaaacaaacccttatattacaaggtatcaacaatcagcgggcgccaaaggcgaagtgactgagctggacggttataagcgttacgacaagtggtatggtcggtccctcactgccgagaacgtcagaagtgggctagaaacatatctcgcaggcgcaaaagccgctggaactgatagatccaaattggtagccagcagactggcggctgggttgagacgcgtgcaacgggttcttgaatccgaagagagccgcatgtattcatcgagcgtgctaataatctacgaaggggacacagaggcaatggagcttgccctagaggaggaacggaaggcaaaagaagcacctccacaagattcagatcaggcggatgaggacgaggatgattttggtggcctcgagctccaggatatagccaatttgcccgctggagaaaatggagccataaacataaccattgacgcccagaccgctcagatgggcgatcccgatgaagaagaagacgatgaggagggaccgaaagtacatgatcttcgtctgatcgactttgcgcatgccagctggac

SEQ ID NO: 19816 - DNA, 1291 bp, Emericella nidulans
cccaccgacgcctgcaaaaggaagcccggtcgtatatcgacacccacatagccccatattgtgacgaatgggaaaagaagggttccgttcctgtagaagtatgtactcaacacactctgaagtccttgataatatgcattcctaacgttgcacaggtgtaccagcgccacgctgcgcttggatatacagcggccaccccatttcccctagccacggactatctgcgtggccagaagctccctgcgggaatcaaagccgaagaatgggacggcttccacgacttgattgtcatcgacgagattgcgcgatgcggctatcttggtgttatctgggcactgggatgtggcaattcaattggcgggccgcctgtcatcaactttgggaatgaagagcaaaagaaccgattcctgcccgatatgctaagtgggaagacacgattttgtctgggtgttacagagccggatggttcgtactcttatctacgcatagttttatgctgtgggctaattgggacagctggatccgatgttgcgggcatcaccacgaccgcagaacgccgcggtgacaagtatatcgtgaacggggcgaagaagtggattaccaacggtatttttgcagattattgtacagctgctgtgcggacaggaggcgagggtatcgctggggtgtcggccctggtgattccactcaatgcgtccggcgtaacgcgcaggaagattgacaactcgggtgtccttgccagcggtatgcatgtagtctacatgtgcgagaactatcctgaactgacgcattcatgaagggtctacgtatatcgaatttgacgacgttgaggtgcccgtgtccaaccttctcggcgaagaaaacaaagggtttcccattatcatgaacagtatgccctgcgactaccctaccaccagttgtcgtgcctgacatggatagactttaaccacgaacgtctctggcttgcttgtacatcgctgcggatggctcgcgtctgtgcggaagatgcttatcgtcacgccataacccgcgagacgttcggtaagaagcttatcgagaaccaggtgatccgggccaagttcgcagcaatgggacgaagtctcgactcagcatatgcatggatggagcaactcgtgtacatggcggagacagcaaaggccaatcacaccgacgcggcaatgggaggcctgtttgccaaccttaaggtccttgcgggacggaccctggagatggtaaatagggaagcccaacaggtcctcgggggtctcgggtactcgaagaacggccgggg

SEQ ID NO: 19817 - DNA, 1291 bp, Emericella nidulans
caccgccccaaagctcgaaaagaagcccgtcaaattcagcaacttgctctgtaagtatctagttctatgctcttctttactcaggttctgacgcaattactacagtgggcgctggattaaacttgtttgagtaagtatccaaaagtacatgaaaaaaaaccgttgctgatagctcgattagggtcactactttgggacaggtatattatcttctgagcgattgtgaattccttttactgacgccataatcatagccactggaggtgatcaagacaaccatggctgcaaaccggggcgatacttcgctggcgctatgggtcggatatggggtcgtggcgggatcctcggttgtaagtatacccgcaatccgcacacccgcatatcccgaggtatggggtgggtaaacatcttcgggctaacgcgtgtttgtcgcaaagattaccaaggtctcattccgtgggcctggattgaggcctctacgaagggtgctgtcctcttgttcgtcgcctccgaggcggaattccgtgccaaggtgctcggtgcgcccgacttcctcgccggtatctccgggggtatggccggtggtatcgctcaagcctatgcgactatgggattctgcacctgcatgaagacggttgaaattacaaagcataagatggcagctcagggtgtcaaaccccccagcaccttcgctacgttcatggacatctaccgcaaagaaggaatcagaggcattaaccgtggtgtgaatgctgttgccatccgtcagacgactaactggggatctcgattcggcctttctcgcttggcagagcaggctcttcgtaaggtgactggcaaagacgagagccagaagctcagcgctcttgaaaaggttatcgcatcaggattgggtggtggtctctctgcctggaaccagccaattgaggtcatccgcgtcgagatgcagagcaagactgaggaccccaaccgtcccaagaaccttacggtcggcaaggctttcaaatatatttacgatacaaacggcatcaagggattatatcgtggtgtgacacccagagttggtctgggtatctggcagaccgtctgcatggtggctcttggtgacatgtaagttttcccctgcctgatcaaagtttatgaatctggggtctccatatcctgcactttttgccaatttcatgtgatatgccgaggcgtaaaacaaggctaacctgtgggtctccgctgcaccgagtagggccaaagaggcagtcgaaaaactgacgggcgacaaagtcaccgcgaagca

SEQ ID NO: 19818 - DNA, 1292 bp, Emericella nidulans
gctttcctcgcctgtgtgcctgggggcttcggcgccggtttagagtcaccaatctcacccaatactccgatgtcatccttgatcgcttcagcaaaagcacatctctcgagtggttcgcctcgagacgctttactgtatctggatgcagcgatctcccgggatcccacaaactacctcactgtcttccagcgtggcgcggcctacttatctctgggacgccgggcgcaagcccaagatgattttgaccgtgttctccagctgaaaccgaattttgagggcgctcttctacaaagggctcgtctcagagtcaatacggccgactggtctggcgctttaaatgatcttgagaaggccggaaagaagaacacacccgaatatgaagaatttcagaatgcgcgagacgccaccattcgagcactggatgcggagaagaaaggcgcatgggaagcctgcgtgagtgaggcgaccaccgctatcgcgaaggccagtgcgtctctcaccctacggcggagccgggcacattgtcgcttcgaaaaaggcgagctcgaggaaggaattagcgatcttacacatactttgcagatttccccaggcttaatagacccgcacttgcagatctcatctatgctcttttacactctcggagatgtcgaacgaggactcttacagatacgcaaatgcttacattcagatccggattcgaaaccgtgcaacaagctttaccggcgagagaagcagctggataaacgcctccgaaaattgcaggatactctagcagcacggaagtttaataatgctttgaattttctggtaggtgctgacggtcagcccggtcttgtcgatgatgttcgtggagatgtagggcaagccaaagaggcggggtacatcttttctgactcccaaggtgtactttatgcatccttggtcgagaaaacctgtgaagcatataaagaggtacgtgagccatgaaagtaggagcagcatgtagacgtacagaccttgctaattttcttttgataaggcacatatgcccaaacgcgcgtccacgttctgctccgaagcccttgcattggacccccattctttgccagcgctcttgttcaatgctcaacatgccctggatgaggatagattcgaggatgctatccgttacctcagcacggccaaggaacatcaccctcaatcgaaggaggtccaaactctcctccaaaaggctatgatcttacagaagcgttccaagcaaaaggactactataaagttctcggtgtatccaaagacgcggacgaaaagg

SEQ ID NO: 19819 - DNA, 1295 bp, Emericella nidulans
ccgttcatcatggcgctcgacaactactaccgcaacaagatcgagagcatgaagctcgagattattcaagggcaagctgtactacgacgacttgaagcgcaacgcaatgattataactcgcgggtgcgcctactgcgagaggaactaggcctacttcaacagcctggctcttacgttggagaggtggtgaaagtcatgagcacaaagaaagtcttggtgaaagtacatccagagggaaaatatggtaagccacccttttgctttcctccaaactctctagcttggtggcttggtgctaactaagtccaacagttgttgacatcgcggatggcgttgacattggcaagctgaccgtcggcaagcgtgttgccctgctctcagattcatacaaactggaaaagatgctcccgtcatctgtggacccgctggttttgctcatgatggtcgaaaaggttcccgacagtacatatgatatgattggtggcctcgaccagcaaattaaggaaatcaaggaggtcattgaacttggcttgaaacaccccgagttgttcgagtctctgggaattgcacaaccgaagggagttcttctttacggcccccccggcaccggaaagaccctcctcgctcgagcggtggctcatcatacggactgcaggtttatccgtgttagcggatcagagcttgtacagaaatatattggtgaaggtagccgtatggtccgtgaattattcgtcatggcccgagagcatgcgcctagcatcattttcatggacgaaatcgacagcattgggtccagccggatagactccgcgggctcgggtgactcagaagttcaacgtaccatgctggagcttctcaatcagttagacgggttcgaaccgacgaaaaacattaagatcattatggctacaaatcgactcgatattctggaccctgcattactgcgccccggaagaattgatcgcaagatcgagtttccacctccatcgtaaggctatacctttgtcgtatgagaaatgctgttactaactgtcctcttacccacaacagtgtggaagctcgtgcggatatcctacggatccattctcggtcgatgaacttgacgcgtgggatcaatcttacgaagatcgccgagaagatgaacggatgctcgggagccgaactgaagggtgtatgtacggaagccgggatgtacgcccttcgagagcggcgagtacatgttactcaagaggactttgacttggccacggccaagattctcaacaaacatgacgacaaggaggtagctgtgtcga

SEQ ID NO: 19820 - DNA, 1295 bp, Emericella nidulans
tcaacggcgaccgtctatggtatgtaggcaactgtagattagtcaagtcatggctgacgccgcgcaggaatgatattcacttcactgcccaatacagcgctccatccccgggaggggtgacccgattatgtgcagacgagaatgacaagtttgcccgggactggttccgagaccaagtgctgcagctgggtgcagagtacaaggtcaatgcgacgggcagtcaattcgcagtattcggcggcgaggactataccgtgccaccgattgccatggggagccatcttgacacagtagccacaggcgggaagttcgatgggccactcggggtatgttactaagtgaatactgtacggcatgacaaggctgaacgtctgaacaggttctatcgggtctggaagttatacgcagcttcaaagaacagggcatcaagacacgtgcccccctcgccctgattaactggaccaatgaagaaggtgcacgcttcttccccccactgggctcgtcgaccgtttacgcagggcagacgggtgtagagcaggcgcatgcgtccctctccaatgatggttctggcatcaccatgggagacgggttaaggaagatcggctacgtcggcgacggtccaaacacattcgaggaatttcccatttcggcccattttgaagtccacgttgagcaggcaacggacttggaaaaggccggcaagccggtcggctgggttgaagggtggcatgggataacctactatgaggtgaccttttccggcgaggacggccatgccaatacctacccaatgtacggacggcgcgatgcattgactggcgcagcaaaactcattacgcagctcgaaacactggcatatacaaaaaacggatataccacggtaaccaacatccaaagcgggccttggggtgcatgcaacatccagtcgaagacgaaggttgtcttctgtcttatgcacagagaaggagaaggactggaggacatgggcgctgatattgtccggtcaatcaagggcattgcctctctacatggactggagtataagttaagtcgaccagtccatcttttgccgggcaacttctggccagaggccgttgactgtgttcgtcgagcttgcggtgataggggtatcggatcacgcacgggcactggccacgattcgactatgacccggctcaaatgtccaacagcgatgatcttcgtgcgaggaaaggatggaatcagccattgcgcgaaagaatggagtgacaaggaggattgtgaagaaggcgctctggtcctcggcaaggcagtgc

SEQ ID NO: 19821 - DNA, 1295 bp, Emericella nidulans; identical to SEQ ID NO: 19820

SEQ ID NO: 19822 - DNA, 1297 bp, Emericella nidulans
tggcgcaccaagactccaagctcttccagcctctcgccatcaacaatggcaatatcactcttaaacaccgcgtcgtccatgcgccactgactcgcaatcgcggtgtcccggagagtcccgtcagcactcccgagaagccgaaccgggtctggtaccctggcgacctggttgtcgaatactaccggcagcgagcgacggatggcgggttgatcatttcagagggcatcccgccctctctagaggcacgttccagtactgggctcgcgatgctccacggactatgctgacagtggctgatgcagagtaacggcatgcctggcgtccccggcctgttcaccccgtctcagatcgccggctggaagcgcgtcgtcgatgccgtccacgagaaaggcggctacatctacgcccaactctggcacgctggtcgtgccacgatcccgcaaatgaccgggtcgccggccgtttctgcgtctgcgaccgtttgggacgacccgacagagtgctactcgcacccgcccgtcggcgcgaccgagcgcgtgccgtactccgcacaccctcccattgagctgacggtcgaccacataaagcgtaccatcgccgactactgcgcggcagccaaggcagccatggaagcgggctttgacggggttgaggtgcacggtgggaatgggtacctgcccgagcagttcctcagctcgaatatcaacaagcgaacagacgagtatggcgggtcacccgagaagcgctgccggtttgtcctcgagctcatggatgagctggccaagaccattggcgaggagaacctggcgatccggctttcgccttttggtcttttcaatcaggcgcgcggagagcagcggatggagacctggacgcatctgtgcaaggagctgaagcgcacccacccgactctctcctatgtcagcttcattgaaccggtactctccgctttccattctaaggctcccttggaagattgccatgactaacctcgcacagcgctacgaacagatcttcagcaccgccgagaaagacgccttcctatcgtcctggggcctttcaaacgtcgacctcaccagtttccgtgagatctttggcgacacacccttcttctctgccggcggctgggaccagaccaactcgtggggcgtgctggagtccggccggtacgacgccctgctgtacgggcggtacttcaccagcaacccagatctggtggagaggttgaggacgggcacgccttttgccccgtacgatcgtagtagattttatgggccgtttgaggataaccggattt

SEQ ID NO: 19823 - DNA, 1297 bp, Emericella nidulans
tttttacttttctttgtgccgccaatactgacgatcgtcctgaacagtttggaaccaaagcctcggttgctcccatcttcgccgcagaggctgcaatggaaatgtcccgtgggcggatcctgatgctatggcagatgtttgatgccttgtaagtattctctctctctctctccatctctctctgggtctgacctcgtgctaagatgaggacagcggtattatgctcggattcgtggttgcgttgatagcccctgtgagctgggaggttcagcttggacttgccctgattccatcattagcccagattcttgttgtattgctatgtcctgaatccccccggctcctgatccgtaacaaacgctacggagaggcgtataaaagcctgcggcgacttcgcaggctggaacttcaggccgcgcgcgacctctatttcatccactttcagctgcgacaggaggtcaggctgtacgatctggagcaggagatcggaagttcctccttcccgtaccaggactacgtggaaaaaatagacagtttcaagcgcatgctgtaccttttcactataccccggaacagaagggcatgtctcgttgcctttctcgtcatgacttcccagcagctatgcggtgtaagtagacgaggcggcgaaatactgcactgcagctctggttaacccactgttagatcaatgttctcgcgtactattcgtctattgtttttgggaatgcagcatccacgaacaagatagacctactcagtttcggttcgtcacctcttccccttcacaagctggttgatgtctgaccaccacttcttgctaggttttggagcatcgaattttgtcttcaccctgttggcattcgttctcattgattcaaaggggcgcagatttacccttttgacatccttcttctttatgacattcaccctgcttggagcaagcttctgcttcaacattgaacctgaaggaagccgtgtcgcagcggtcgtggttaccttcattctcctatatacggcatcatactcgatcggcgccggccctgttccattcacgttaagcgcggaaatcttccctctagcattccgaggtgagatacatctgaccctcttgtcttcccactacggcaactgataatgccatcgccactgtatcagaggtcgggatgagtttcagtgtcatggtgaacttcctcggccttggtttgcttgtcctgttcgtcccccgcatcacccgcagttggtcgcctaccgaaaacgagcgagtcggtcagcgtaatgtcctgcttctatttacgta

SEQ ID NO: 19824 - DNA, 1297 bp, Emericella nidulans; identical to SEQ ID NO: 19823

SEQ ID NO: 19825 - DNA, 1298 bp, Emericella nidulans
ccatggtctctggcacgcaaaaccgctattgttaccggcggatcgcgaggcatcggccgagtatcgcaatccatctaacgtgcaaggggctcagcaagctggcgatcacatacatcagcaacctcgcagcagcggaatcaacgctagacgaatgccgaaaaaacggacttgggatgggtatcgcgattaaagccgacctccttgatccaaacattggccatggtctcgttcagcaagcgttagctggcctcgaaacaccaaccatcgacattcttgtcaacaacgccgcctatctcgatccaagcgaggcggcttctgttgaagaactaacgctccccgtcttccagaaggtgatgcaggcgaacgctttcgcgccaatttctataattagcgccacaatgccccatctgcctgtctccggtgggcgcgttatcaatatttccagcgcggcagctaagttggcgaacccaggtcctgttatgacttacggcgcaagtaaagccgcgttggatagctttactcgctctctagctgccgaattcgctacggacaaggcggccacatttaatacggtttgtgttggtccgactgttacagatgggtttcatgtcgttgggaagttgtaccctgagggttttatggaggagctggcgaaggcgttcactgcggcacagagagttggcatgccccaagatattgcgttcattgttgggttccttgcgggggaggaggcaagatgggtgaatggggcgtgtatgagcgctaatggggggtttcgcgaggttcttccagctctaagttaggtctcgcttgcattacttatgggctgcgttctatagcattgagtattagagatgcgtcctttcaactgctcatggtagtctcatcgtgcttgttagaggtctgtttttgagataccccagcaatttcggaagtgactcccgcatctaggtagcgggcaagcgctgtagtgtccctaacaatcatgagcccatcggcctggtagagagattagcctgagaaaccttgtaagcacggattccgttctaccaataaggtctcggccagcagcctgttctacacccaattacgtgctgctgcgtggcaaatcaatcactcaatttgccgtgaaggtgctgaatagtctgggatcattctcagggcctagactttggtgaagcagcaggctgctagtagctattccccgtgattccatttcaggaaaaaaaataaagagacagatacggcacataggttacggttagtacgaggtagattagcgcgggtcatacggtcga

SEQ ID NO: 19826 - DNA, 1298 bp, Emericella nidulans
tcccgaaggagaggtatcagtccagtcgcagaatgctcagagtacgagtaaggagagcggtttggcatctaagagtgttgcggaggataaggataagaaggctgtcgaggagccgaagaaggagtcgaagaagttgacgattgggcagaagatcaagaaggagattcagcattattgggatggcactaaactccttgctaccgaagtgcggatcagctcacggctggcgttaaagatggcgggtgggtatgagctcagccgcagggagcatagacaggttggttctacatgacggcgttctcgtatatatgctgacggtttagcttaaacgtacggtaacggatctcggccggctgattccattctccatgttcgtcatcattccatttgcggaactgctgcttcccgttgcactcaagctgttccccaatctcctgcccagcacgtacgagggtaagtctgcccgtgagaagaaggcgctcagcctgagctcgacccggaaagaagtctccacgttcctgaagaacacgttgaaggaatctggtctgcccgtgacggcggcaagcgtcaagaacgatgaatttgccgagttcttcaagaagattagaagcaccggcgagaccccgtcggctgaagacgtcatcaaggtttgcaagatcttcaaggatgatcttactctggacaacttgtcccgaccccagcttgttggtatctgcaagtatatgaatctcaacacattcggcactgacgccatgctccggtacaacattcgtcaccgcatgcgccagatcaagcgggacgaccgtgctatcttttacgagggtattgactctctttctgtgcccgagttgcagatggcctgtgcctcccggggtatccgtacacacggtgtctctcccgcccgcctccgcgatgatctctctcaatggcttgacctccgtctgaagcagggcgttccctcgactttactggtcctcagcaacgcctatgtctacgcacagggcggcaaggaagcagagatgtcttctcagattgagtctctccaggctgtcctgtcgagtattcccgaagaactcttccacgagattgagcttgaggtgcacaatgccgagggtgctgccactaacaagcagcgtctcgaggtcatcaaggagcagcaagagctcattgaagaggagaaccagcagaacagcgagaacgaagagaagggtgttgccgcccccaaggacaccgagaatatcgatgaggaccacaaatacgagaccactcagtccggagaggcttccgaggcgatgcaa

SEQ ID NO: 19827 - DNA, 1298 bp, Emericella nidulans
ctcgatgaggcagaggcgctgacagaggcgaccaacatccttttcctggatgtttgggcatcaacaacggagtttgtcgacattagactcgcgaaggaagttgtacgtgcgaggccagcccctgacggccgcgatgctgaccctctcagataccttccttactcggcttattgcccgactcccttcagactgcctacgtgccccttattgataacctgccggaggctatctctgctacataccccgctcgccggtcccttggactcaatgaccaatttatgcctagcccgtccactcgtgcgcccgatcttttctttgaagactatcagccgttgtcggtcattacaccctggatgcagctgatggcgtccatgttctcttcgcacgcccgaatgattaacgttggcgtctcttacgagggccgtcaaatccccgctctacgactgggacgcagttcccaaccgggcgaatctcgtccaatgattctcatagttggcggaaatcatgcgcgagaatggattagtacgtctactgtcgcgtacattgcgtacaatttgatgactaggtatggatcatctgccgccgtcacgagtttgttacaggactacgattgggtcctggttccaacggtcaatccagatggatacgtttatacttgggattccgaccgtctttggcgcaagaaccgacagccaactagtttccgattctgccctggtattgacttggaccggtcatggtcttttgaatgggacggcaatcagacgcagacgaacccatgctccgagaattatgcgggagaagagccgtttgaaggcgttgaggcacaacagctggcggaatgggcactcaacgaaacagagcataataacgcgcgatttgtcggcttccttgacttccactcctacgcacagcaaatcctctatccgtatacatattcctgctcatcagtcccaccaaccttggaaagcctagaggagctcggcctcggcctggctaaagtcatccggctaacaacacacgagatttacgatgtcacctctgcatgcgaaggtgtcgtaataccggccagtggtgacaagtcggcaaagagcctcttccctgtaggaggtagttctggcggcagcggacttgactggttctatcatcagcttcgaacccgctatgcctaccagatcaagctgcgcgatcgcggcagctacgggttcctcttgccgtctgaatacatagtccccacaggaacggaagcttttaacgccgttctcaaactcggccaatttcttacagaacaggattat

SEQ ID NO: 19828 - DNA, 1301 bp, Emericella nidulans
cgggcaggaagcatcgcaagatgagctcctttgctaagctctcgacgaagaacaactacaaaaacagtgtgaccaaggagaataatgaaaagaatattgcgccgccgcggaagaatgaaaagcaccaacagaagcaacacacaaggccaattgtgccgtttcgcagaaaggatcgtattctattagttggagagggtaagttcacgcttccctgattctggctgtctgagatagtccaagaagtatacacgaatggactcaggagcccgcaagcaagcacctaagagttctgcgaaactacaccagcgcggccgattcgccctaagcttaagattgatgtatactcatcaacccgacgcacgcttgtctagtcttcgtgtccctaagcagcctagacctgacgcggctccttatcaagaacccttatatatcgttcctatatcccacctaagacgtctcaagtacggtgatactaacgcacaaaccacgtccaggcgacttctccttcgcgcactccctagccacgtaccaccgctgcaaacacctactagcaacatgctatgactcccaagaaacactcttcgctaaatacccacaagcggagaagaaaattgccgagatcattagcttaaagactaagaaccagctgaaatcgggaaggttaggacaatgatgccgccaatcctcagagtttaataggcccaaaagtgctgttctccgtcgatgctaagaaacttggttctgcgacgggaggcgcgagggacgtccgaactgggttttcgaggcaagagcggaaggaacctgtctggaagaaacacgatgggaataagagaagtactaggtctgcgaaagctactgaagataccgcgagcaataagggcaagggtacgggcaaggaaaagggtgggccgtgggacatgatctgtttcaatttcccgcatgtaggtggcctttcgacagatgtgaatcggcaagttagggcgaatcaggagctacttgttgcattcttcaaggcgtgtgttccgttactggcagagcggcctgaggagctcggcgatgatgctgaggtggatgacgattgggagttcgagacagatgtggaagatgaatctgaggaaagtgatggcgattatgatgaagagaacggcattgtcaaggcgaaagacgagcgtaggacggagcccggccaggtattagttacgttgtttgaaggggaaccttacaccctatggaatattagggacctcgcacgacacgctggattaagggtcgtgacgagcttcaaattcccctgggcgtgc

SEQ ID NO: 19829 - DNA, 1302 bp, Emericella nidulans
accgcgacgatgccttggacgccatcgccgccactgtcggctcggataatggctcagtcgctcctttcccaattccggagtttaagatcggaacccttgacgctcttgtacagcaagcggacgagttagccaaactagaggctgcgtgtcagggtgtcgtcagcaaggttggcgatgcgttgaagaatatcctagaaggtgacgaggcgcagattgagaagatgaagaccgtcaacgatagtatggaatacaccttttccctgatttgttggttatggtgaagttgacgaaaaatagagcccgtggaccagtacctccgaacgttctcatggaataaagtcaaataccgcgccgacaagtcgctatcggagctaattgatctattacaaaaggttagtttcgtgaaatggatgcccgccatgagctaactcgtcaaaggaagccgtgagtatcgatagtgaccttcgatcgaaatactcccagtacaatcagatcaagaatacattggccactcttcagcgaaaacaaacgtgaaatctcccaactacggttcgcgaagctcaactaacttgaccagcggaaacctatccacaaagtcccttgcctccgtcgttgacccccgcgccctcgttcgggactccgaatacattgagacacatctcgttgctgttccagcgcagcaagtgaaagacttcctcaagacctacgagactgtatcgcccatggttgtcccccgatccgcgaacttggtcgcctccgatgacgagttcaccctatatgccgtgacaacattccgcaaacatagcaccgagttcgtccacaaatgtcgcgagcagaaatggattcctcgcgattttaagtacgtggaaggcgggaaggaagaggagcgtcgggaagtcgagcgggtaggcggcgacgagcgtaagctgtggggtgagacactgcgactggggcggacttcatggagcgaggcagtcatggtatgggtgcatgttctcgtcctccgcgtatttgtcgagaccgtactccgctacggcctcccgctggactttgtctgcacgcttatcaaggtaggtaccacaatatgctcgaagagtcaagactaattcctggcagacaccaagctcaaaacacgctgataaagcaaagaagaaccttgacgagaaatactcatacctagccgggaatgcattcggacgggacaagaagggccgggtcaagaaggatgaccccaatgagatgcatggcattgaaggtggtggtgctgactacacggcctatgtgtattacgattttgaattc

SEQ ID NO: 19830 - DNA, 1304 bp, Emericella nidulans
ggaaagagggagggaaggggaggtgtgccgctcaaggctgtggttatgagtgctacggctgatatggagagtctacaagaattttttgtggagggatacaaagctcgggaattgcagaaggaagagaagtcagagaaagatggtatcgcagtgtgtcatatcaagggccgtcagtttccggtcaagacgatatattcgccggaacccgtgcatgactttgttgatgctgccctaaaggtcattttccagatccactataaagaaccgattccaggcgacattctggtcttcctcacgggacaggagacggttgaagcgttggaaaatctggtcaacgagtatgccacagggatggacccttcattaccgaagatacaagttctcccactttttgcagcgcttccccaagcagctcagcagcgagtctttgtccctgcgccgccacgcacccgcaagatcattttggctacgaatattgctgaaacttctgtgactgtatctggtgtgcgctatgtcgtggattgtggaaaggcaaagatcaagcagttccggacccggcttggattggactcgctgcttgttaagcctatctcgaaatccgctgctatccagcgcaagggtcgtgctggaagagaagcgcctggccagtgctaccgactatatacagaaaaagactacctggcactagatgaggtcaatacgccggagattctacggtgtgacctcagccaggcgatactcaacatgaaggctcgaggggtcgacaatgtcattgagttcccattcctgacacggcctccacgagaagctctagagaaggcgctcctccaattactgagtatcgaggccctcgatgaaaccggcaagatcagtgagaccgggtcgcacatcgccaaacttccgctcaccccgacgttaggccgggtgttacttgccgcgtccgactttggaccggattgtctgactgacgttattgatattatatcgtgtctgagtgtggagaacatatttctaaacaccacgtcagaagagaagaaagaagcggccgaggcagctcgccgcgatctatacagacgagaaggcgaccatcttacgatgctagcgacagtacgggcctacgcatcggagaacactgaccggaaggcatgggctgagcgacatctggtctcgcatcgggcgatgcagtccgtcatggtaagtttgctgccctacctagataccatgtctctaagcaaccctcacggctaatattcgggtccttaggacgtccgcaagcaactgacggctcaatgccgacaggccaa

SEQ ID NO: 19831 - DNA, 1304 bp, Emericella nidulans
gcctccggaggcattggtcaggcatgcatacctaccttctcaacatctgtcgatatttgatgcaattctgaccgacgtttccagcctctatcccttttgctcaaggcatccccctttattgacgagctcgccctttacgatgttgtcaacacccccggtgttgccgctgacctctcccacatttcttctgttgctgtacgtcacgcctacatagaagcagtaatctaatggactaactcaaagacagaaaatctcaggttacctgcccaaggaagatggcctgaaaaacgccttgactggcactgacattgtcgttatcccagctggaattcctcgtcagtacaatatgatttattggtctatatctccacaatattagtggcactaatgttgtctggtttttaggtaagcctggtatgactcgtgatgaccttttcaagatcaacgctggcattgtccgtgaccttgtcaagggcattgccgaatacagccccaaggctttcatcttgatcatttcaaaccccgtcaactccaccgtacccattgctgccgaaatcctcaaagccgctggcgtctttgacccggcgcgtctctttggcgttacaactttagatgttgtccgcgcagaaaccttcacccaggagttctccggccagaaggacccatccgcagtgactgtccctgttgttggtggtcactccggcgaaactattgtccccctcttcagcaaggtttctcctgccttccagattccggcagacaaatacgatgcgcttgtcaaccgtgggtattcctgtaaaagtctaagcaataatgttacgtcttactgatcttcgtataggcgtccagttcggtggcgacgaggtcgtcaaagccaaggacggcgccggctctgccaccctttccatggctttcgctggcttcaggtctggcatcctgtgtgttttgggccgccgcttttaatgctaactcctatacaggtttgcagagagcgtgatcaaagcctccaagggccagtctggcattgtcgagccaagctacgtctacctaccaggtgtgcctggtggcgcggatattgccaaggctaccggcgttaactttttctcgactcctgtcgaacttggagtgagtatttggaattgaggtccctaggtgtctgaattaatgctaacaacacaatagccgaatggtgttcaaaaggccataaacattctcgacggtattacagatgctgagaaaaagctccttgatacggctatcaagggtctcaagggcaacattgacaagggcgtcgaattcgctca

SEQ ID NO: 19832 - DNA, 1306 bp, Emericella nidulans
aagccagggccgtcttgtctatatattgcagcatatatgtccctgcgaggagcggcaggaggatgaggtcgaccttgcgcacgagggctttgttgcgaacctcatcggcaaggaagccctctaggtcattgtttgtgatattgtgttgtctcagaaagagccggccttcatcgaggtcactgacagtgacagtcccgacttggatgtctttgtcagggcaacttccgttggggggagccttttcatccatgattgagtaatgggttttgaaatggaaacatgaccggacaggccctatatatggatgggcgagtactatccaatatctccagcatccctgacaaacccagatagctggccgacaggacgagatatgcccatcgtcggtatcaagccgaacactgataaatgataaatccatgcgattgttttccgatattgcgggggtgctgttactccaaactctgaagactccaacacgctttccgagcacgtcagcgctctattggaggataagtagagctcgctgtccttgtcgctttttcctgcttagaggaatgcctattgactattcactatggcacggccttcagtcacgcttccccagggcaaagttgtcggaatccgactcgaatacaaattcccacagcctgtcgacgcctttttaggtattccctatgctcgccctcctgttggcgacttgcgcttcagacctgctgaaaggttccccaattcaactgaaattattgacgcttccaattatggtcccgccgctccaggaaaagccctgttaccaggaggcccggcgctcaggcaaagcgaagactgcctaagcgtgaacattttccggccgtcgaagtcaaacttggctgagaaacttccagtggctatttatgtacatgggggcgcatacaaccggggttcagcagcgatgcataaaactgcgtcaatggtagcttggtcagaggagccgtttatcgcagtcactttcggctaccgtctgggggcgttgggatttctgccgtctagtgtttcgaagaaggagggactgctaaatctcgggttgcgcgatcagtcattcctgtttcaatgggtgcaggaaaatattgctctgtttggaggagatcctgggacagtcactctgtttggtctttctgctggtgcccattcggtacggtaccacccatgttttgagctcgaacgacactaatagaaggtagattggacatcatctgctcaactatgatggccacaaaactccgctctttcaccgtgtcatcctcgaatctggttcgccgacatcgcg

SEQ ID NO: 19833 - DNA, 1311 bp, Emericella nidulans
cgtcatctgtccgagacgctcaattcaccggtctgtctgacccggcctgccctcttggccccctttgaagagcagacagcggatgaccggatcaaagctcgaacagtggatgagatcctcgcagctcccgaaattgcggacgttgctgacgcacctctgcctgccctaaccccgtcttcgaccgatatgcttgccctcatgctgacctccgggagcagcgggcaacgcaaaagctgtccctctgacccatcaacagctccttgcggccttcaggggcaagtccaccgcggccagcctccgcttcccccgcagcccgttcctctcctgggtgcacatggaccacgtcgccaatctagtccactgccatatcttcgccatcgtgtccggcatatcacagattcaagtccctgctccggatcttctcatcaacccggctcagcttcttaacctgataagcagacaccgcgtctcgcgcacgttcatgccgaacttcctctgcgccaagttgcggcgacagctggagtcggggagtccagagtatatcctggaccccggcctcaaccttgagacgctctatattgataccggtggtgaggcgaacgtcacagaggtttgtattgcactccaatccctcctcagccggtacggggctcccgacaacgttttcaagccctccttcggtatgaccgaaaccgtggccggatgtatcttcaactcgcactgcccaagctatgatcacgcccagcgccatgagttcgcctgtctcgggaaaccgatgcctggagtgcgaatgcgggtgacacggcttgacactccgagcgaagaggcagcccccggtgagcgcggcagcctcgaagtaaccggggaagttgtctttaaaggttactacaataatcctgccgccacagcagaggcgttcaccagcgatggatggttccggacgggggatctggcgttcattgacagcaacggcaatctgcacctcgacgggcgcacgaaggagatgatcaacatcaatggagtcaaatacctcccgtacgaactggatgctgctctcgagcaggcgcagatcccaggcgcaacacctagttacttctgcacgttcagcagccgcgatgcaaccatggataccgaggtcgtggttgtgctctaccttccatcttatgtggagagcgatgacgaagccaggttcagcacgcaaagcagcatcatccgtgtcgtggccatgcacacgcggtcccggccgcgcgtagtgccgctgcgtccgcaggatatgccaaagagcacgctgggaaaactgtcgcgcgcaaa

SEQ ID NO: 19834 - DNA, 1311 bp, Emericella nidulans
tggcgtgccacgtttctgaacttgccgccagcaaaagttgcttccctggattgttccagcctattctcagacgcattacatcggccgttctattgcgcgcacatatcccttgaaccgtacgcatccaacataccagctaggaaccaaattactcggctaccaaacctctctgccgaagagttcgaggagaagtggtctgacacgcctttcatcctcacagaaccagtgaaggaatggcctgcatatcaccagtggtcggttgagacgctccttccgaagcatggagagacgctcttccgagcagaggcagtcgactggcctctgcggacatacgtggactatatggagaataactcggacgagagccctctatatctcttcgataaggaatttgtctcgaagatgagtctacgggttggaccgccacatcaggaaccaggaacaacgtattggccgccgccatgcttcggtgaagacttcttttcggtgctgggtaatgatagaccggatcgacaatggctgatcataggtcctgagcggtccggaagcacttttcacaaggacccgaatgccactagcgcctggaatgcggttattcgtggttccaagtactggatcatgttcccctcgtcatccaaacttccgcctccgcccggtgtctacgtctcggaggaccaaagcgaagtaacttctccgcttagtatcgcggagtggcttttgggcttccatgccgaggcccgccgcacaccaggctgcattgagggaatttgccgggaaggagaaatcttgcatgtaccttccggatggtggcatctggttgttaacctggagcctgccatcgcgattacacagaacttcattcctcgagcccacttgactgccgcgttggattttctctccaacaaagcagaccaggtatctgggttccggaaggacattaacaatccgtacgaacggtttgtggctagaatgcgacagtcgcatccggaactcctgcaaaaagctcttggagaactcaaaaagaaggccgaacgcaagaagcgcaaatgggacgaaatagtccatggcaaaacaggcacggatgatgtaacgctgactccgaggccggtgcattcagcttcggatttggtggtgatgacagtgacgcggaagttccttgaacaaagccttcatatattatatgcaatgactgtactaatttaggctttcgcccacctataccaatgtcggaacaagaaatgcaaatatatgccatcgactcaatgacaagcgaccgactttgtcgcggacatgttctccccgaacgccaga

SEQ ID NO: 19835 - DNA, 1313 bp, Emericella nidulans
gggacgcaacgtaattgcgacaactcgtactcgtcgctcacagggcagcgcagagtgaggagtagccgctcccaaagatgaaaactccctggaattgactgtcatctagacctcctcgacttcacaacacccgaacgtgtccggatacacctatcttctctatcgacacccaacttcgcgacgagttatacactcggtaccgtcgggctaatcgagggctccatttcatacctatacagcaatatatcattcgacaatacgccaagtaaaagcgctctaattcccctccgcaagcttgctcctggctatagacaagtacaagcgcccatcgcgcccccggttgaatcttggaattgggactcaatactagacggcaccaatgccgggaattatggctatggacagagctcaaagggccagaaggcgacgctacttcatgcaactttgcatctgccgccaccaacgactctcaacgcgcttttcttgcgacgcatttcgccgactatgcagctctcacttgccgtctcctcaacaaggggacctccattatcaaaatccgcgccacaggctacactcctgacccaactcacccacgacaccggaaaatacagtaatgagtatctgttcagtacggataattccctctttggctggcgcggactatggaactttggtcctgatccccggttcaataacaacgcgcaacggttatccctgctatcggctggtgcagaggcctattattctcccgtatcatcattaataggcatgtcgaccggcctcaggttctgcactttaccagcggccacttcatcgacgcccaaccccaatacaccaatttctaccttcccatataccctaacactcacactcactccgttgaccggatcgctctcaacgtcctactccgtacgggcttctcccaatctttccttcagctcccgtttcggcttcaacgtctacagctgggaaagcgaaatggtggcagggttcgaactctggcgacagtcaagaaaggccgccatagtagacaacgatggccttgaatgggctcgcaataaggctcgcatctgggacattccggcttcttcccaggtgccagaaccaatcacgcctagcgaagaagaaacccaagaatcagtccttaaggtccgagttgatcagtcttggaatgtacgccttctctgggaaggccgagttaaggagctccttgtgagcgctggtgtcgggcttggaccgagttcgttctcaccttcctcgtatgcaaattctcaagctacggcaggtgcgcaggggagcagtggaggccctcc

SEQ ID NO: 19836 - DNA, 1317 bp, Emericella nidulans
tcgacgcccttgatccccaccctcatcgcctctgccctcgcctcgatccgcagcgagatggacacacttatgctgcgctgcagtatgtcccccgcgattcgagagcagcaggatgaattcaatgtgatcactacggccgagggcaagatgctcgtcggccaatttggcagttttattacgcagttcctgcgagcgtggaaaggcaccattgaagaaggcgatatgtttatcactaatgatacatacatgattgaaggcgctgtgacgcacttgaatgacgtgattgtcctcctgcccatcttccacgagcacagactgctcgggtgggcgtcgcagtttggacaccttactgacgttggaggtattgttccaggcagtatgtctatcaatgcaacgtctgtcttcgacgacggcgtccagatcccttgtatcaagctgtactcgaagggagtcatgaactcggaccttgttgacctgctatgccgtaactcgcgccagcctgactggtaccggtccgacctgatggcaatcattactgcgtgccgcacagctgctagtcgagtctgcgagctggccacacgattcggaagcgagatatacctcgcggcctgcaatgagctcctcctgcgcaaccgcgtcgccatggccaagatcattgacaccgacttcgaccccgagccgacgacattcaccgactttgtcgatgacgatggccacggcgttggaccctgggcactcacctgcacaacgaagaaattcccaggtggccgcctcctctttgactggagcggaacttcccctcagagcgaccacagcatcaacttctacctctcagagaccatgttcaagatgttcatcggctactacatgatcgctgctgcagcccctgggacagtgatcaacgacggtttccacgacctgatcgatgtgtacatccccgaggggagcattctcaagcccgtcaggccggccccaatctcctgccgaacgcatatgctcggccgtacaatggacgtcatgcaagcactcatcgcgaagaagaacccggtttatgcggccgccgcaggcttcagcgactctccgcacttcttttactcgggctacaagcccgacggcgagtggtaccagttgtaccagattggctttggcggtgttcccgcgcgacaggccggcgacgggcttgactgtcactgccttttccccgctatcaagtccatcccgacagaaatcattgagctgaattaccctcttcgcattgaggcgaatgagagtgtccctgatagcggagggccggggttcttccgtggtgggaacgcg

SEQ ID NO: 19837 - DNA, 1318 bp, Emericella nidulans
gcttctgtgctgctgggctatgcctccgccgaggttcacaagctcaagctcaacaaggttccccttacagagcagttcgtgagtatatgagctcaatcatcttacgatatgatgtttgtttatggctgtgactgattcattcagatcacgcgcaacattgccgaccatgcaaatgccctaggccagaagtacatgggccagttccagcagcatgtacttgaggacgagccagtcaacgccatgcgcggtcacgatgtgctggtcgacaatttcatgaacgcccagtgtatgttcttaggactctgcgtggctgagtgatactgattcttgctagacttctccgaaatccagctcggtaccccccctcagaccttcaaagttgtccttgacacaggtagctccaacctatgggtgccatcgtcagagtgtggctctatcgcttgttacctgcaccagaagttcgactcttctgcctcgtccacatacaagaagaatggtagtgaatttgccatcaagtacggatccggcagcttgagcggattcgtgtccagggacaacctgcagattggcgacttgaaggttaagggacaagacttcgccgaggctaccagtgagcccgggttggcttttgcatttggccgttttgacggtatccttggcctcggatttgacaccatctccgtcaacaggatcgtccctccgttttataacatgatccaccagggtctgctcgatgagccggtctttgctttctaccttggtgatgccaacaaggatggcgacagctccgttgccacctttggtggtattgacaaggatcattacgagggcgagctgatcaagattccccttcgccgcaaggcctactgggaggttgaccttgacgccattgctcttggcgatgaggttgctgagctcgagaacactggtgtcatcctcgacaccggtacctctctaattgctcttccttccaacctcgctgagatgatgtgagtaatatcattgccgtttcacgcgatctctagatactgacattgacatctaaaagtaacaccgagatcggtgccacaaagggtttcactggccagtataccattgactgcgccaagcgcgactctcttcctgacctcacttttactctgaccggccacaacttcaccattggtccttatgactacaccctcgaggtccagggttcctgcatcagtgccttcatgggcatggacttccccgagccagttggccctcttgctatcctcggtgacgcctttctacgcaagtggtacagcgtatatgaccttggcaacggtgccgttgg

SEQ ID NO: 19838 - DNA, 1319 bp, Emericella nidulans
tcacctcacagcaggccacgagaccagcgctgtcgttctgacataccttatgtgggaactctcccaacatatagaagtacagaaagaccttcacaaggagcttcttacactacaaccaaggatagctcctcgttgtctgtctggtcatgccgagttgccgtcgccgaaatccattgactcgctaccttttctagaggcaatactcacagaaactttacgactccacgcttcaattccaggcatacaacctcgagttacaccgacgccgacatgcacgcttgttgggtatgacaatatacccccgaataccagagtaaacgcacaggcctattctcttcatcgaaatccggaggtatttccagaccctgagacatgggagccgaagcgatggctcaaagactgcaataaaccttccgaactggaggaaagaaagcgatggttttgggcgttcgggagcggtggacggatgtgtgtgggaagtaatctggctttacaaggtaggttagagttcttaatgagcaaagaaagcgctttaaccacccaacagagatgaagttggtcatcgccgccatctatacaaacttccgaaccactatcgtcaacgatgacggtatagaagcaattgatgcttacacggtcaaaccgaagggagaaaaattgattctcaggtttgagtatatatagatcaacttaggtgtccatatgcccggttctagccagcttcactaccgttgcacttaggacgcactcagttcaaacgattctagaactcggtctgcagccaaaatcaaactacatatacccagttggagcaacctagagagtaaatctttgccttgaaaatgaaataatatacaaacagtatgtatacagaaggcaatgtcaaagaaaattcgcccatgcaaaccataaaaactccataaagtatcatccctgtcaaatcccactctagcaggacgcaatagtacagccaccgatcaccgttgtgtagcgcatatcgcacgcactcgagaatgtatcacattctctagatagagacattgacccaggactgtccagcaaacgatgtatatctccccatcgagcactttacgtcttcttcttcttcggacccacaaccttaggatacattcgcatgaggtgatagttgatggcgttcctcttcgtgcccgtagttttctggataaaagtggagtattagcatatagtctggagtccatctggcgaaacaggagctaagagcctcgaatacgccagctcattgaagtgaaatgacttgtggaggagagaaaagatacgcacatgtgtgtccatacact

SEQ ID NO: 19839 - DNA, 1319 bp, Emericella nidulans
tcaaaacactcccttttgctgatatccatgttccatctcccggcttcggggctatgggtctgagtttcgggttgggctcaaacctcagcttggaagaggcagagcccgtgctgctgaaggccatcgagctgggatgtacattctgggataccgctgtaagctgactcgagtcactgaaactaggacggattctgatcggaagggaaggttgtttaccaagccggtataaacgagaagcttcttggcgcattcatcaaaaagcataacgttcgcgataaagtgtttggtaaaatcccctctttttttgcgaattgaggcttctctctatgtaccaagttaacaccaacaccagtcgcctctaagtgtggcttcgatgtctttggcaagggcggcgtcaccaactctgctacccatattaaggagtacatcgagggaaccattaaacgccttgatttcacgcctgatctctactatctccaccggattgaccctagtacgccatagaccggaataaatggccattgaagcactcatctaaccataatgtaacagatacgcccctcgaagagtcaatcccggccctggatgagatccgcaaggccggaaagaccaagtacattggcctctctgaatgctcagctgcgaccctgcgaaaggcgaactcaagtatgcacccctcaaacgtcccaccttggcttcttggtgctgactggtttgtgatagtcgccagaatcgacgccatacaagctgaatactccaccttcgaaaccatccatgaaacagacggtcttatcgacacagcaaaggagctaggcatcgcctacattgcctacagtccgctaggccacggctggctcgtcgataacttcgactacaagacacctgacgattttgcgccggatgatttccgacggaggagtacgttacgaaacacctaatcccgacacctgcccaaaaggaactcatcaactaacggataaacttgtgtaggccccaagtttcaaggcgagaacttctacaaaaaccgtgccatagtcgaggagaccaagaagcttgcgctgaagaagggtgtctcgatctcgcagattgcgcttgcttgggtcgccgcgcaggggatgattgcaattccggggacgaccaaggcgaagcgtttagaagagaactgggcctccagggagattgagtttagtggggaagagtggaaggagatgaggaggattattgacgctgcaaaacctgcgggcaatcggtatgggccggagcaccaggctttggtggggcattgatatgtttattcctgtgctagttggttacatctt

SEQ ID NO: 19840 - DNA, 1321 bp, Emericella nidulans
ccggaatcgcctgtatatcccagacaatgatgatttaaaggcaaaactaacctgcttagcccatgataaaccaacatctggacatcctgggagagcatgcacatacgaactcctagcccgagaatattattggccgaacatgtattaatatgtgagtcaatggataaaaaactgtcatacctgtcagagaatcacaccctcttataaggcgcggcaagggatattgcggcccctgcctgtccctgaacatgcctggcaagatatctccatggactttattacccatctgcctaccagccaaggctttgattccatcctggttgttgtggaccgtctaaccaaaatgaggcacctaattgcctgtcaagccacaataaatgctgaaggagttgctcacctctatacacaacatgtgtggagacttcatggcctcccccggacaatcacttctgaccgtgggccccagtttgtcgctgagttctggaaacacctaaataaacacctggatatccagagcctattatcaaccgcctttcacccagagactaatggtcaaactgaatgggtaaatgcaatgctggaacaatacctgcaagcttatattacctacctgcaagataactggtctacctggttaccactagccgagtttgctctcaatgctacctattccgaagctatcagaacatccctgttctttgccaactacaggtttcacccacgtatgggcttcgaacctgtccctgttcctgactgtccagctagccaagatgctgagaacttcgcccagaagatgcaagctatatctgactatgtccgatcccagatgacctccgctcaagcccgttatgaagaacaatcaaacaagacccgtcaacctgcccgacaatataaggccggtcagcgtgtgtggttggatgcccgcaacatccgtaccgtccgcccaagcaagaagcttgattggaagttcctgggaccgtttactataaaaaggatgatcaatgcacacgcttacgagctcgacctaccagccagtatgcggatacacccggtattcaatgtgagcctacttcgcccagccgccgacaatcctgtgccccgtcaaagagctgatcccccaccacccatcgaagtggaaggtcttgaacattgggaggttgagagcatcttagattcgcgctgggagcggcgaggccgaggaggccctcgtctgaagtatactgttaaatgggttggatatgacgatcctacagaggagcctgccgagtacttgacccacgccaaacagctcgtacagaacttccaccgccgatatccgcat

SEQ ID NO: 19841 - DNA, 1321 bp, Emericella nidulans
tcatgtcagtttcccaccgtttgcaaacagatatacttcaaagctaactaatcgcagaccattgccgcacttcttgtgctccaattcccaacaccctcttccgctttttgcgccatggccaatgcccttaaccgtcccctacccgttgcatttatgaccatggaccatggagccatcggtcgaactttctcgctagcgtctgccacacttcgctacaagttccctcgtctggccactcatctatatgaaactctgcgactatccgacgaagagattttcgaaagcatgttccggtcactgcttaccaacggcctcgacttggagcgcctcagccgtgtctgggattgttgggtctttgaaggtgatcgcatatttattcgcgctgccgttgcaatccttggctgcctacagacgcagctgtttggttttactgagccagatgaccaaagtcgtttggcagtgaaaaacattcttgcgtggggaccacacgatatcggaaccaaacccaaggaacgtcgaagcgcacccgcagctcctatagctggctttgcgggaggtctcatcggagccgctgccggccattactggattctgacatctgcaggtgatgaagatggattcataagtgaaatgcgcgaggcgggcaaggttcaaccacgggcctagcactatatacacttgttcaagcagcagtcgtttccataaatagcatagtatgaagcattcttattcaagtaccacaagcagctgagctcgtggggtcgttcccaggctcattatcaaggacccaactgtgcaataacatcgtgattatcaactagttctttacagtcacaagcgctgtgtaaatcgatagtcattttacagtggctatggataaaacctcgcctttcccgtgcatgtcacttatatccgtcttcaaccccagcagatgtcaggtttggagtagttgggggcatagatgcagagagtaagtggattaagctctgttcacttgtactcgtactcgtatacagtaggcttggcatttgcttatttattgcagtattgattactcagtcgcactgtgacatgacatcactattatcgataagcagtatcacatgaccttgatcgcctcgccggccgaggcaaactaaacgtgactagaagggcctgtttgaaaagtttcagtgtaaacatcgtgaagctgatccacccgcagagacagagcaatcgcaaaatgacgggtctacccagcatcagcccaccgggaatcattccccaattgtacatatttgcgtgcgaccttgggcagagctgcttccgggggacccgaaaa

SEQ ID NO: 19842 - DNA, 1323 bp, Emericella nidulans
gttgccagaatgatcatgttgggtatcaagatgactggcaaggttcctttcaaggaggtctactgtcattcccttattcgtgattctgaaggtcgcaaaatgtcaaagtctttgggcaatgtcatcgatcctttggatgttatggagggtatcaagcttgaggacctccatgccaagcttctcgtgggtaaccttgctgagaaggaggttgctaccgctacgaagtatcaaaagaaggcgtttccaaagggcattcctgagtgcggtgctgatgctcttcggttctcccttgtgtcctacactaccggtggtaagttcagtgacactgttttggcactgcgtatgattctaattgtctgttgaaggcggcgatatcgcatttgacatccaggtcattcacgggtaccgtaagttctgtaacaagatttaccaggctaccaagtacgttcttggaaagcttggtgatgatttcaagccgctgccgaccccgacaaagactggcaaggaatctctttctgaacgctggattctgcacaaattcaacgccgccgctaaggaggtgaacatagccctggaggatcgcgaattctcccatgctgcttccactgtttaccagtactggtacagccagctctgtgacgtgttcattgagaactccaaatctctcctagcccctgagctaccacaagaagtgcaggaatctgccaagcagactctttacaccgctctggaaggcgctctcactatgatccatcctattatgccatttatcaccgaagagctatggcagcgtctgccgcgccgtcctggcgacaacactatctcgatcatgaaggccaagtttcccgagtacaaggctgaatttgacgactctacagccgaaactgcttatgagcttatcctgaacacgtccaaggccattcgttcgatcctcgctcaatacgacgtcaagactaaaggcgatgttatcgttcaaacctacgatgcaaccagtcacaagactgtttccgatgagcttcatattgtcaagtctcttggcggtaagactcttggtgaactcagtgtgctcggacccgagaacaccacgcctccgtcaggctgtgtcgttgctcctgttggttcacaagcggctgtctaccttcgtgtgtctaaggaagttgcccttgaacaagaagagaagggcaaggccagcttgaagaaggcgcaggaaaccgtccgtcgccagactactttgatcaacagcgccgggtggaaagagaaggcaaagcctgaagtgcgtgagcaggaagagaagaaactccgggatgccgaaagcgaggttgc

SEQ ID NO: 19843 - DNA, 1324 bp, Emericella nidulans
cgctctggggttcggctatggagtggtcgcagctcccactctaaagcaagccgaacgccgatccttcaaggttgagactgtccgccggagcaacactatctacggtccagctgctctacgaaaggcctatgtcaagtacggcattgttgctgcggacatcggactcgacctagatgactttgaacccagcgttaaggttgctgctgcggccgatactgacgcggaagtcgctgagcccgacttgaccggtgctgtcagtgccaaatctgtcgagggagatgcgtcttttgtttcgcctattaccattggtggccaggaactcaccatcacctttgacacgggttcgtctgatgtgtatgtgctacggttctttccccacgctcgatagtgctaatcaagtttccagatgggtggtgaacacactgctccccaaagactctattgaagggcaaacggcctttgacccatcaaagtccactacgtacaagaaaatgacagggtcgacctttaacatcacttacggagacgactcgtatgcgtacggtcccgttggaactgatacaatcaatgtgggaggggtcacagtgacaggtcaagcaattggccttcctactgcagttgcctcatctatcctcgaagacacccacagcaacggcctggtgggactgggtttcagctcactcaacaccgtcaagcccacacagcaaaagtccttttttgaaacaatcgccggcgtcctggacgagcctgtcctcagcgcatctcttgtgagtgatggagtcggcgagtacgagtttggcactgtcgacaagtccaagtacaaaggcaacctcgtcaatgcaaccgttgattcttcgggtggattctggaaattcgagtcttcatactaccgtgttggagacggcacgttgaagaagcacgacgacgcaacttggacaatcgccgatacgggaacctcgctcatgctcctcgagcagaccgtcgtagatgagtactatgcacaggtgcgaggcgcgcagtacgcaaccagcgcctcaggctacatctacccctgcagcgccgagttgcccaacctctccatcgccatcggccctcagcatctggcgacagtacctggtaatttgattaatttctcggaagttggcaccaacaccaccaccggggaagctggtatgtgacaatcttttttctagagattaatatatcgctaatatttccgcagtctgctacggaggtgtccagtccaactcgggtcttgacatgcaaattctaggcgatgctttcctgaaagccttctatgttgtctttgacctgcgtggcccgt

SEQ ID NO: 19844 - DNA, 1327 bp, Emericella nidulans
gtcttcatcaacaacttcaccactatcgatgcacttcaatccagcgatcggatctgggatctgcggaccaatgtcctcgaagggccgaatgtcaaacactttcagctcctgtctacggcagagtactggagcgacctggtagaagcagttcactcaaggaagcacgccggcttcaacacttccatcaccgactactggggacgggcgctctcgtaccagttcattaacgcgtcagacggcgggcccagctacacttggtcgtccattgcgttgatggataactttaagaacggccaggtcccgctgccccttctcgtagccgacggccggaatccaggggaattggtggtcgggtcgaactcgacagtgtatgagtttagcccgtgggagtttggcacttttgacccggccatctatgcctttgcgccactcgaatatctcggctccgactttacggcgaatggatcctgtgtgaggggattcgataatgccgggttcgttatgggcacctcgtctagcctcttcaatcaggggctactccgcctgaatagcacgtctatccccgagacctttaagaaggcgctcgcgtcgatccttgaagcagttgggcaggcaaacgaagatatcgccagctacccgaatcccttcaagggctatcagggcagcaccgcggccatttcagccatcagcgagctcaacatcgttgacggcggcgaagacggccaaaacatcccctttcacccactcattcagccggccagacaggtagacgtcatcttcgcgatcgactcgacggccaacattcacaactggccgaatgggaagagcctggttcggacgtacgagcgcagcctgaactcgaccggcgttggcaatgggacggtcttcccaacgatcccagacaccaacaccttcataaatctgggcttgaatcagcggccgactttcttcggatgcgatgcgaagaatctgaccggccctgcaccgttgatcgtctaccttcccaatgcaccgtacacgcacatgtcgaatacctccacatttgacctgagctacagctatgccgaccgcgacgccatgatcctaaacgggtacaatgtcgccacacgcggaaacggaacagtggataggcagtggcctgcgtgcgtggggtgcgcgattcttagccggtctgcgaataggacggggacctcgctgcccgatgcttgcacgcagtgctttcagaactactgctggaatggcacaattgatagtcgccagccacaagattatgcgcctgcactcatgatcaagacgagtgcagcggggacgatcaggccttgggggt

SEQ ID NO: 19845 - DNA, 1327 bp, Emericella nidulans
tccgcccagaatgtagcccatctcgtggccggccgagtcattagcggtctctctggtgcgtcagtttctcgtgtgaatgtcgtctaaaactctaaccgcagattagtcggtgtgacttcttcccaagtatgtgtttacctggcggaactggccccagcccgtatccgcggacggattgtgggaatccagcaatgggcgatcggtaagactgctagccttctcccctacttctcttctcgtgtactcgactgatgggtccagaatggggtatccttataatgtacctgatctcgtggggctgcggcaaaggcatcgctggaccctccgccttccgagtcgcctggggtgtccaagccgtccctggtctcgtcttgttcctcgcgttatttttcttccccgagtctccgcggtggctggccagtcgtgaacgctgggaagaagcacttgatgttcttgccgccctccacggaaagggcaaccgcaacgatccagtcgtccaggtcgagtttgaggaagtaaaagagcgtgcgcgtctcgcagctgaagccaaggacgtctctttctttgctctttttggcccgcgcatctggaagcgaaccctgtgtggcgtcagttgccaggtctggcagcagttgcttggcgggaatgtggccatgtactacgttgtttggatcttccagatggctggaatggtaagtcgcccacgcacgccgacccgcctctgctggggaccgttctaacacgacctagagcggcgacacctccctctactcctccatcattcagtacgtgatcttcgtcgccacaaccggcgtcatcctcccctacatcgatcgcatcggacgccgtctccttctcgtctcgggcgccattatctgcatgatcatccactacgccattgcggccgtgatggctacacgcggcaacccggtcgatgaaatcaatggcaacgcctcgctcaagtgggaaatcaccggcgcgagcggcaaagccgtcatcgccatgtcgtacatcttcgtcggcgtctacggtctaacctgggcccctgcagcctggatctacgcgtccgaagtgttcccactaaagtaccgagccaagggtgtcggattgagtgccgccggcaactggatcttcaactttgcgctggcgtactttgttgcacctgcgttcacgaatatccagtggaagacatacattatcttcggtgtcttctgcacggtcatgaccttccatgttttcttcatgtatcccgagacagcgcagcgaagtcttgaagagatcgatcttatgttcgacacccatgtgaaaccgtggcagacggcgaaac

SEQ ID NO: 19846 - DNA, 1327 bp, Emericella nidulans
caagtccatcacgtccctcaaccctgcggacggtgctgcgctccctgagcagaacttgactcccaatgaaattgttaacatccaattcacctccggcaccaccgccatgcccaaggcagcctgtctaagccaccgctccatcctgaacaatggcgcccagatcggcgaccgcatgcgcctctcgccagccgacacagtctgctgtccgccgcccctctttcactgtttcggctccgtcctgggctacatggctacagcgacgcatgggtcggccattgttttccccgcagaagcttttaatgccagggacaccctacgcgccgtccaggaagaacagtgcacagccctctacggtgtgccaacaatgtttctcgaagagctcgggctcctggaatcaggccaggtcccacacaagggatttgaatatctccgtaccggcatagcggcaggaagcagtatccccgctgaactgatgaaaaagcttcacaagacgttgaatctaacggaactgacaatctgttatggcatgacggagacgagtcccgtgtctgcaatgacaacgacagatgacccaattgataagagaatcaataccgtcggacgtctgatgccgcatgttgaggcgaaggtcgttgatccgctcgaccgtaacaagattctccctataaattctcgcggtgaactcgccgtgtctggatacctgcttatgaaaggatactggggtgatccggagaagacggcggaggtgatgctgaaggataaagacgggaaggtttggatgcatgtatgtctttccatcacccgatccacctgctcaaaagacctaacccagggataccgtctagaccggcgacgaagcaactatttcgccagacggctacgtcaccataaccgggcgtattaaagacctgattatccgtggcggcgagaacatacacccacttgaaattgagaactgtctcttgaccttccccggtgtcgcggatgtctctgttgtgggggtccccgacgcccattatggcgaggtcgtggcggcttttgtgatatggaaacaggcgcatcagaatacggaagagcaggcagagacgggagagaagctgaggaagtttgtaagggagaaactgagtgcgcatcttggtaggtcgctatttttctttcttctgatcttcaggacgctgggtttgattcgggcggtgctgatacttttgcgcatagtgccgaagtatatattcttcctcgagccgacggattcattcccgaagacggcaagtgggaagatccagaaatttaagcttaaggagacagcgatcaagcttttgggtgggca

SEQ ID NO: 19847 - DNA, 1329 bp, Emericella nidulans
tgagccaaacaaagagtggtcaaccttctacgctgcggctccagagatccacaagtattggaagcatgtatcagccaaatatggctgcgaaaagtacatcaagttcaagcatagagttgttagcgcaacgtgggacaatgaccgaagcaagtggacactgcaggtgcggagtgtctccgtagtaggctcaatacattgctaatatctgagtataggtcaaaaatctcgatagtggcgaggtcattgaggatcaatgtgatgtggtggtgtcagctagcggcgctctgaacgaatggaaatggcccagtatcccgggtctccatgactttaaaggaaaattgatgcacagtgcgaactgggacgagagctatgattacagcgtaagatgcgtccatctctgcagcgtccgtatactaattgcttgggcagggcaagagagttgctgtcatcggaaacgggtccagcggtatacagattgtccctggaatgctgccggaagtgacccatctcgatcactacatcagaggccgcacttggctctctcccacctttgcgcgtgagcaggtcgacaagcgtagtgcagaactcgagaactgtgagtatccaacctcccggatcggttcccgctgacaatcggcaagtcgcattcaccccagaggagattgagacattcaaaaaggaccattcagcttatcagaaattcaggaaaggtaggagagaagctcagaaacggatgactttcgacagctgctgatgatctgcagaaatcgagacggagttgcagtcggtacacggctgcaccattgtaggctcgccagaacaaattggagcgacggctttcttcaccgagaatatgaagcgccggctcagaaagaagccggagctcatcaacgatcttctgccaacattcgcccctgcctgccgtcggctgactcccgggcccgggtacctcgaggctctcacggacgataaagtcgacgtcatttcaaacccaattgtcaagatcgttgaagacggcatcgtcacggaagacggacaacatcatccaaccgacgttatcgtctgcgctactgggttcgacaccactttcaccccgcggttccctatcgtcggcaaggacggagtgtctttggcgaagcgatgggaggcaacacccgagaactatctctccctcgccgtggacgggttccccaattactatatctgcctgggtcctaatgcagcgttgggcgagggcaacctgctcctcctgattgagaaggagatcgactacatcacctactgtcttgctaagatgcaacgggacaatatccgtgcaatgagcgtgcg

SEQ ID NO: 19848 - DNA, 1331 bp, Emericella nidulans
cactggacaagcattattctgatgatttctttaatctttgggggctgctgtgcgaatgtgggtagatagagatcacttttgcaagatacatcactaattttctaatcaagggatttgcccttgaggcaatagtaaagtgagtctgagtagactagactgtggaattacagattcgctaatctaatgcagagatcaaccagattcaggtatataattccacttctttgaccctgaaggaggttctgattatccgtttgtcaggtccattaataacatttgctcagttcattctgactgcgctttttatgttaccaaacttcatttccccatcagcgggcttccgatcattcttcctcagccagcgctcaataccattaagatcatggttaatttacacggctttcttcgttacggttaatcttcttaacaattgggcatttgcgtaccggatttcagtgcctctgcatattatactgagatccggtggaccagtcgcttcaattgctgttggttatctttatgctggtaaaagatattcaaggggacagattctatcagtcgcgctgcttactttcggagtcgtcacttctgcattagcagatgcgcaggcgaaaggagaagcggtacaatttgggggtagtggaagctctaacatatacagcacgtttatcggctttgctattcttgcgttggcgatgctgctttctgcatttcaagggatatatgcagatcggctgtatgaaacctttgggcggagccattggaaagaagctctgttctattctcatacgctctctttaccactctttcttcctacttttcccagacttttaactcagtggcgcacattgaattcgtctccttcattgctataccatatccgagccctgttgaatccgatgggacacccaaccgaattgcccgcctctgacgagacggccggcgcaagcaactcttgtgcaatctccacaagcaacccagccgaagccttcctccaactgctggtgacttgccgtgtatatgaaggattccagcctatcttgggtatgattcccgtacaggtattctatttactagcaaatgccttgacgcaatattggtgtatacgcggagtgcatcttctctccgcgaaatcgtcgtcattaactgtgacgattgttttgaacattcgaaagcttgtttcgctcctgttgtccattcacctttttggcaatgccctttcaaaaggtgttgtcatgggggctatacttgtgtttgtgggaggaagcctgtatggcttcgagggtgcgcggctaaggagggcagctcagaagaaagattgattaggtcga

SEQ ID NO: 19849 - DNA, 1332 bp, Emericella nidulans
accgcaaatccgcccagcatcaacatgaaggcatcatcgcgcggccatcgggctaccgggtatcatggcacgcaaaccctgcggtagaactgcatcacttcggccagtcgcacccaatgaagccatggcgcctcacactcaccaaacaacttgtgctcgcctacggcatgcatcatgcgatggacctataccactgtcgtgccgcaactgttgaagagctcagcgacttccacacatccgattacctggactttttgcagacagtggtgccaggtgacatgaatgacgcgcaagcgtccaaggatttcagcgaaaacatcgtccgcttcaattttggcgacgattgccccatcttcgacggcctattccaatactgctcgctgtacgcgggagcctcgctcgacgccgcccgcaagctctgcaacaatcaggcagatatcgcaatcaactggtctggcgggctgcatcacgccaaaaaggccgaggccagcggcttctgctacgtaaatgatattgtgcttgcgatcctgcagctcctccgcatacacccgcgcgttatgtacatcgatattgacgtccatcacggcgacggtgttgagcaagccttctggtctaccgaccgcgtcctcacagtttcgtttcataaatatgacaaggagaactttttcccgggcacagggcccttagatagtacagggccaacacacccgctcaacccaggcgctcatcacgcagtcaatgtacccctccacgacggcatcgacgacgaatcttatgtccagctcttcaaggacgttgtaggtgcctgtgtcagcaagttccgaccggccgctattgtcctccagtgcggcgccgactcgttgggctgcgacagacttggctgcttcaacttgaatgtggccgcacacggcgcctgcgtcgcgtacacaaagacattcggactacctatgctcgtcgtcggcggcggcggctacaccccgcgcaacgtctcacgagcctgggcgcacgaaacctccatactaatcgacgcccaagacaaaatcaaccccgttattccgtccaatgttgcatttcggaaccatttcggcccggacttctcgctgtttccgccgctgtcggagatgcgcaagctcgaaaacaagaactcgcgcgcttacttggcgacaattgtgcagacgatcacggagcagctgaggtatttgcaggcggcgccgagcgtgcagatgtctgtgattccgccggatctattagggctcagggaggaaacggagaaagaaatcgaggaggagattgcgaagttggaagagaaaagggaggaggccgaaggtggga

SEQ ID NO: 19850 - DNA, 1333 bp, Emericella nidulans
tgccggtcttggagggttgggggcagccattgccctcaaccgggccggccacgatgttcttgtgcgtcagatggcgctcatccaagcagtcaaattgagctaatagttgaccctctaggtcttcgagcagtcccgatttctgcatgaagttggagcggcaatccatgtggcccccaacgcttctcgcatcttacaatcgtgggaggtggacatggaagccctgcaggcggttgaatgcatcgcaatcaaggtctgggatgcacaggggaacttcatctcaacgactgcggttggtttcattgtcatctatcattgccgatccccgtacacgaggctgatatgtgcggagcacaggcggcccaagactaccggagcatctcaacctctctgatgcctggttgctgacccatcgggtggacctgcataacgcgctgcgcgctgcggccgcaaaggaagtcaatggccggcgagttcagattcggctggcctctcgtgtcgcgactgtggtcggttacgttgcgggccctgcatttttacagtagctgatcccaagcccaggacgccgaagctggagcagtcacatttgaggacggatcggtatacaccgccgatctggtgataggagcagatggaatgcacgtatggtatcctatccgtaattatacacctctcctgctgacaactgaggcagtcaagaaccgtcagggccgtcattggaacagaccaaaacaaacaaagcacagggcagagctgcttcaggtgtctcatccccgtttgcaagctgcgcaataattcgttgacttcaccacttcttgacaaaatcgggctggacgcgacgattgtcttcaccagccccgaccgacggctggtcatgtacccttgtcgtgcgggttcgcttctgaacttggctggcatccatccatcagacgcgatggccagaaccgagtactcatcgtggcttgactccggaagcctggaagatatgctagcaacgtatcgagatttctgccctgaactgcaagaattgtgccgccaggccgaggatgtcaagttatggagcctggcatcgcgccagcccccgccgacattcgtgaagggcaagctggccttgctgggcgacactgcccatccgacccttccacgtaagtcagtcctgaaccgcgtgtcaacgccattctcaccagtgaagaccagggccagggcggcgcacaatcaatcgaggatggcgcggctcttggggccattttcgccccagatacgaccccggttcaagtgcccaaactgcttgcagtctacaataagacacgctacgaccattcgatcactgtcatga

SEQ ID NO: 19851 - DNA, 1335 bp, Emericella nidulans
cccggccagagttcctcatcatccggagcaggtcgaccgtttcctccacaccaacttccgaacgcccactcttcaggaacaatggcccattgtgagcgggcctccaggcccatcatccaatgcctttcgaaatcctcaattagaggcatatccagcgtccagctgcagacgcgcgccttccagaccacagctgctgtccaggaggaagcccagaccgaagcgaagagccagcccttctacaaagcgcccgacccagctcttgtgtcaagcccgcgtttggagcgaaggttgatgcgccagggtattctaccgatcgggtctcgtcgacgtcgtgccgcgttgcaaacaacagacagtttgcctttcgaacagctaccatatcaatgcttccaggaggcacggaaggttctgattgcggaccgggaggagaagttgaaggaaattgcaacaaccagtgagaagatcgctaagattcaggcgctgccggaagaagagcaaacaaaacactccacctatgctcgactgcgcgcgctggaggtacatcttgatagacttaaggttctcgcggacatcaatgaccccctcgtgaagaagaagtttgaggatgggcagggtaagttgctgcggccttcgtcctagtaaccaacatactgactgtgtaggtgacatgagcaaacctatctaccgctacctcgccgatcagaaatggagagagtatcgccgcaagattctcgttcaacgaattacccagatgaaggtcattcctgatgtccttccccattgcgacccgatagtcgacactaaactgtacttcggccgaaaagctgtaccacctggagagtttgtaaactctcaggttagcagtgtccctcccaaactcgacatccaggtattcgacggtgaaaacaggctggtaacaattgccgtcgtggattcggatgttcccaacgtcgaaaaggacagcttcgactatatgatgcactaccttgccgtcaacatcccaatctctgctctgaacaccaaggttgacctctctcagctgtcgacggagtctcaggttgttctaccttggcttccccctgttgctcagaagggcagcccgtaccaccgcttgtcccttttcgtcatggagcagaaagacaacaagcctttggactttgcggccgtcaaggccaaggagactgaccgccttaacaagcttctccgcactttacaagcacggtaccacctcaagcccattggagcgcacctgttccgaacaatctgggatgacgacacccgcgatgtcatgaaggagattggcttccctcttgcagacatggaactccggcgcaa

SEQ ID NO: 19852 - DNA, 1338 bp, Emericella nidulans
ggcggaggggcaaagacgttcgttttcttcttcttgctaagcgtccttcctgtcctggtggcgttttggacgtacgcctcgactttcagcccgcgcaccaatgagaaggtgaagcttccgggccgtccggttgagcactacatcaccttcaagcgtgaagaggacaaggcgaaatggcatggcaagaacaagatccccatgcagacctttgcggaaatgtacctcgacggccttgtggatttcaatggcgacactctcgatgttatggagtaccgccacgattgggccaacttttcgtttacctgggacctgttcaagtttattgttggcactttctttgtcgacgttctcttccacaccaaggctcaagatgaggagcaggtgcgtcctaactatgacagtggtaatgatcactacgcttggttccttggaccccgtatgatctacacatccggcatcatctcggaccccgaaaaggaggagacgctggaggaaatgcaggacaacaagatggctattgtttgcgaaaagatcggtcttaaggaaggcgagaccatgctcgacatcggctgcggctggggcactctagctagattcgccagtctgaactatggcgctaaagtcactggactcaccattgccgagaaccagacagcctggggaaatgacgctctccgcaaggctggcattcctgaggagcagagcaagattctctgcatggactaccgcgacgccccccgcaccaagtttgacaagattacgcagctcgaaatgggagaacacgttggtatccgcagactcaccggctttttccgccagtgctatgatatgctcaaggatgatggcgccatgtacgttcagctttccggtctccgacaggcgtggcagtacgaagacttcatctggggtttgtatctcaacaagtacattttccgcggcgcggacgcttcgactccactgtggtattacgtcaagtgcttggagcaggccggttttgaggtcaaggggtgagtatcttgtttctcgtcagtggaaaaatactgataggggatagaatcgatactgtgggtgttcactactccggtaccctctggcgctggtaccgtaactgggttggtaacgttgaggcaatcaaggccaagtacggccctaggtggtacagggtgagtttggaatctctttgatttcacgatgtcacgaattcatgctgactgttgacagatctgggaactgttcctcgcttggtccgtcatcgcctctcgtcagggttccgccacctgctaccagatggtcgtggttaagaacctgaactcgactcatcgcatcaacggtgttgcc

SEQ ID NO: 19853 - DNA, 1338 bp, Emericella nidulans
tgcgtttctcgcgtacacatcgcagatctttttcctgtacttcgaggacgcaccgctgaaagaggacgaagtatggcgaatcaacattcttgccatatgcatttggatttgctattatcgcgcttgcacagttgatcctggtcatgtgccgaaagggtggatgccatcggaccgtgagcggttgaaggccgatcgagctagcggtcgtcaacgatggtgtcggaggtgcgaagcctataaaccaccaagagcacatcattgcaagacatgtgaaaggtacgattgtctaagtatgcagactagttgtcatactaacgtgttctaggtgtgtcccgaaaatggaccatcactgcccatggacctccaactgtgtctcacactttacctttccgcatttcgcgcgatttctgttttatgcggtagtcggtattgcgtatctcgagactcgtctctggcagcgtgtctccaaagtttgggggtcaaggcacctgcccagtgtaagtaagatagcccgtgtctcgattacttactaacgttccgtagtatctaggacctagcatgggacaaatcggccatctattcgtcctattcgtcaccaacagcttgaccctgtttgcactctctctgcttcttctgaggactctctggtcgctcgggtcgaacacaactaccatcgaatcgtgggaaatcgaacgacatgaaaccctgcttcgacgcgctcggcgtctcggcggcagcttgcccgggccagggggcatcagtgtgcatataacgaagcaggagtttccctatgatataggtatctggtctaatatcagagctggaatgggcggaagtgccaatgtacgtattcgctaatcactgtgacatcagcagctaactttctctccaggtgctaagctggttttggccgttggcaaggacgcctgaccgtagcacgggattagagttcgaggagaacgggttcgaaggtagggagtatgtttgccctgtaatgcactccgcttatgcaaatagatcctactgtttcatggccaccgccagatccagatcgcatccctcttccacccatggatcagcgagatagtttcatgtacgacattacagacacaagcggtacaagcggtcaaatcgacattgaagcttttaatagacgaaaggaggcagacctaagacgtcggagagcgccgactgaaattgagcgccgcaagccgtttcatgtacggttggaggaatactcaaatggctcgtctgatgccgaggctgataccggaagcgacgacgactccgaccacggcgaagaaggttggaagaactctgaaggagaacggctgcgtg

SEQ ID NO: 19854 - DNA, 1339 bp, Emericella nidulans
cctgagaccgcccagggacagttcttgaacttccagaaactgctcgaattcaatcaacaggcaatgcctttcgcttcagcgtctatcggcaagtcgtttcgaaacgagatctcgcctcgggcaggtcttttgcgtgtccgagaatttctgatggctgagattgagcattttgtcgaccccgaaggtggcaagaagcatgcgcgtttcgaggaggtcaaaaatattgagttgacgctgcttaaccgagacgtgcagctgtccggaagcaccaagactgaacggatgactgtcggaaaggctgttgagacaggattggtggataacgagactcttggatacttcctcgcccgtatccagttgttcctgctcaagctcggtgttgaccccaccaagctccgcttccgccaacacatggccaacgagatggcccactatgcatgcgactgctgggatgctgagctatacactagttacggctggattgagtgtgttggctgtgcagaccgcagcgcatatgaccttaatgtgcacaagaacaagactggtgcccctctggtcgttcgggagactcgcgcagagccattgaaggtcgaggaatggcaaattgagctggacaagaagaagttcggtcctcgcttcaagaaagatggcaagaccgttgaggctgccattgatgctttgtctcaggagcttcgggagaagctggctcttgacctcgaaaagactggcaagattgaggttgatgtcgagggtgtcgcttccggcaaggttgaattagaaaaagatatcatcacgattgagaagcgcacccgtgttgagaatgttcgggaatacaccccgaacgtaattgagccatcattcggtattggccgtattctatacagtcttatggaacatgtctactactaccgtgaaggcgacgaagcgcgtggcgtaagtatctcaaacccttttgcgagttcactcccttttcttacacatcatttaggttctttcgttccctcccgtgatcgctcctactaaagttctcctcgtacccttatcgagcaatcccgccttccgccctatggtccaagaactgacgaccaaacttcgacggttgggcgtctccagccgtgtcgatgattcctccgccagcattggtaagcgatacgcacgcaacgacgagctcggaacaccgtttggtgtcaccgtagactttcagtctgtcaaggacaatactatcacgctgcgtgaccgcgactccacaaagcaggtgcgcgcgagccaggaagagattctgcaggctctcaagtctctggtagaaggagaagagacctgggaggatgtccggaagcga

SEQ ID NO: 19855 - DNA, 1339 bp, Emericella nidulans
tgcggtgcttgccagaccattattacgctccctgtgagaccgttgcccaagatttggctgctagtattgaaaacggtactattcgccaggctgtcgagagtctgccgttgctcaataccacgaaactgcgcaccaagccagaatggaggagagcctatgtggtcctttcctatcttacacatgcctatgtttggggtggtgaaatccccaaggaggttggtgttttgtcctctaggcatttgatatggcttctcactattagtgtcacgctaggttctgccttctgctatctcagtgccatacctggaagtttcacgatacctagagctgccttctgtagcaacatatgcagcccttaatctctggaactggtcaacttcatcacccaacgatgacctcacctgtgccgacaatctctccgtcacattgtcatatactggaacgaaagacgaggagtggttcttcatggtctctgtcgccctggaagcgagaggagcccgggtcatcgaaatgatgctaaacaccatccaagccgtgactgtgggcgacgaccagagaatagtcgcatacctcaaccagattactgaaggatttaatgagctggctcgaattctggaacgaatgtacgagaagaaccgccctgccgttttctttcacttactccgtccgtacctcgctggaagcaagaatatggcatctgctggtcttccaaacggactgttctttgaccaaggaaacggtaagggtgaatggctccaatacagtggcgggagtaacgctcaaagctcccttatccaaacttttgacatttttttgggcgtcgagcacacagccatgggaggtcccactaagactgagcttccaaaggcaaaattgggaaagactccatacatccaggtatgccaagtcacctttctcgggctgttgtttatgagcaatcagacattaatgatctattgcaggaaatgcgaaactacatgcccggaccccaccgacgcttccttgaaatgctcactcgaaacgccaatctccgtccgtatgcgatgagctgcaagctcggctcacctgtgagagatgcttacaacaccgccgtcatggctctcggctcgttccgcgacaagcacgtacagatcgtaacgaggtacattatattggcctccaagctccctcctccagcgaacacacctgtgcggataaacctggcttcgacaacgcaaacccagatgaaggactcgactgagaaggtttccacaggcttcagcggcacaggtggaactgatttgataccctttctgaggcaaactcgtgatgacactaaggctacggcgtactatgcgga

SEQ ID NO: 19856 - DNA, 1340 bp, Emericella nidulans
aggaaaccggcggtgccaatgtcctcggtactaaccccaaggacattgacaacgctgaggatcgccacaagttctctcagatcctggacagcattggtgttgatcagcctgcttggaaggagctcacctctgttgctgaggctgagcgcttcgctgaggctgttggctaccctgtgttggttcgtcccagttacgtcctctccggtgctgccatgagtgttatccacagccaggatgagctgaaggagaagctcctgaacgccagtgccgtttctcccgatcaccctgttgttatcaccaagttcattgaaggtgcccaggaaattgatgttgatgccgttgcctccaatggaaagcttcttctgcacgccatcagtgaacacgttgagccagccggtgtccattctggtgacgccacccttgtccttccccccgcttccctggagaagcccgtgatgagccgtgttaaggaaatcgctgagaaggttgccaaagcatggaacatcacggtcccttcaacatgcagatcatcaaggccgaccaggagggtgccgagccccagctcaaggtcattgagtgcaacctccgtgcttctcgctctttccccttcgtcagcaaggttcttggaaccaacttcattgacgtcgctaccaaggcccttgttggccgtgatgtccctgagcctgtcgaccttatggaagtcaagcgtgactaccttgccactaaggttcctcaattctcttggacccgtctcgctggtgctgatcctttcctcggcgtcgagatggccagtactggagaaatcgcttgctttggtaaggacgttgttgaggcctactgggcttccctgcagtccaccatgaacttccgcgtgcctgagcctggtgagggtatcctgctgggcggtgatatcaccaaccctgctctggcccagattgttgacctcctccaccctctgggcttcaaattcttcgctgccagtcctgaagttaaggctcacatcgagtctgcaaccaaggagcacacccctgtccaggtgatcgagtttcccaagaaggacaagcgtgcccttcgtgaggtcttccagaagtacgacatccggggctgcttcaaccttgccaagactcgcggcaagacccttctcgacgaggactatgttatgcgccgaaacgcagtcgactttggtgtccctctcttcatggaaaccaaggtaaggcaccacacttcaggtaaatgagatcttgagctaatcaacttcactagactgcccaactattcgctcaagccatgaaccagaagctccctcgtcctgagggcattccctccgaagtccggacctg

SEQ ID NO: 19857 - DNA, 1341 bp, Emericella nidulans
gggccgatacgactggagcccaaggtgctccatggccacacgcttacgaagggaactacattccgagaagtgtgttacgcgatccgcgatagtgcgttcatcgtcagcgacctgcctgttattgtgagtctggaagtacatgcgtcactcgagcagcaagagaccatggtggagatcatggaggatgcttttgatgggatgctcattcaagtcacaccggagatggaggccatggagacgccaccaccgcttagggatttgaaacgaaagatcttggtaaaggtcaaatgggtctcgccctcggctgaaaacgccgaggatgtagatgaccgtacagacgacctggagcagctggccccaaccaaatcagccggtgcatcatcccagtccgcctcacaagcagcccagaaaccgtcgaagatcctccattctcttagcagacatgcgatcttcaccaagggctttagtttcaagcagttcagccaacccggtacggcatccctctatttgactctaaactccatactaaccctaaccagaggccaaagttcccggccacgtgttctctctctccgagcgagctgcccgccaagccgacgagaaatacggcaaggagctatttgagcacaaccgcaagtattttatgcgcgtttatccctatggtctccgcgttaactcctccaatctcgatcctaccttcttctggcgccgcggtgcccaaatcgtagccctgaactggcagaactccgacaaaggcatgatgctaaaccagggaatgtttgcaggcgaacagggttggatcctcaaaccccagggctatcgaagcacggaaccagagtctgcgcctattcctcgtcggactgtcgacctctcaattgaggttctagcaggtcaggacctcacactaccaccgggagacaagaacgagaagggattccgcccttatgtggcttgttatgtgcatgtggagacaccggaggatgcggcgaaccctgggctcaagggcgatgacagcacggattctgagaagacgagctacaagcgcgtcactaaggccggggagggcgtcaacccggatttcggatcacagattctgcagttcccgacgctgcctggtgtagtggaagagctgacgtttgtcaggttcgttgttgcacttgcaatatggcttgactattttactgactatgctgcagattcaaggttaaggatgacgaaatcggattcgactcgttggcttcatgggcctgcattagactgacccgtttgcaggagggataccgtgtactccgtctgtataagtgtgatggatctgactcaggtggtttcctccttgtccgg

SEQ ID NO: 19858 - DNA, 1342 bp, Emericella nidulans
atgaagcacggccgctacgccgagggcttccggtcaatgtgccgcctgcgagcccatcccattatcggcgccagagattactactactcgtacgtgatctaccaggaggagatcaaggaggcccgcggcgctggctacttccgccgtatgtgggattgcttctcgatcccgcgaatccgacgcgccaactacggtgcttccaccgtcatgatcgcccagcagatgtgcggaattaacagtgagttgtttcgtcccagccatataaccacagttctaccatcagaatctctaactgggttgtagttatctccttttacagctccagtatcttcaaagatgccggatacactgattcggaggcgctgtacgcgtctctcggttacggtgcggtccaggttctcgctaccatcccgacgctgttccttatcgacaccaaaggtcgacggaccctatgtttgattgtgagcagtcctgcctggcaagtgatacccgtagctaattggatcctagaccttccccggcatgtgcatattcctgctcgctgccggcctttctttgctcgtccctgacagcgctagcacctcggcgcagctggggccagtcgtgctgtacgtttgcctcatcgctcggagtcgagaacaacctcctctaacttaccttctttctaggttcgtctatctgttcaccattatgtactcgttaggcgagggacccgtcgcgttccagtactccgctgaggtcttcccgaccgtccagcgtgagcagggcatggcctgggccgtctgcatcaacaacaccttcggtaagcaccaatcacttgatcattgagacacgtattctttctaaccctgtccagccggtattcttagtctgaccttcccacgtatgagaaccgttatgacaccaaccggcgcctgtaagtgaccatctgtacccgcccaccatacttgtctgtggctaaccggccttcaccgtctagttgggttctacgcgggcctcaacctgatagcctgggtcatgatattctgtttcgttcgtgaaactaaacagctcacgctggaagaactggaccgtaagtgaccaaccaagccatcaatgcagctcaccactaacaccccacagaggtcttctccgttccaacaaaggaattcctcaagcacgaaacaactgtgtggctgccgtactttatcaggcgccacatcttccgccaggatatccccaagccgccagcgattatcgcgactgccgatgagaagcgcggaagcagtaactcggttgatgcttgatgtctaaactaattcagccgtgcataattggatatgggtaatgagtatgaaaggcg

SEQ ID NO: 19859 - DNA, 1343 bp, Emericella nidulans
cccggccagagttcctcatcatccggagcaggtcgaccgtttcctccacaccaacttccgaacgcccactcttcaggaacaatggcccattgtgagcgggcctccaggcccatcatccaatgcctttcgaaatcctcaattagaggcatatccagcgtccagctgcagacgcgcgccttccagaccacagctgctgtccaggaggaagcccagaccgaagcgaagagccagcccttctacaaagcgcccgacccagctcttgtgtcaagcccgcgtttggagcgaaggttgatgcgccagggtattctaccgatcgggtctcgtcgacgtcgtgccgcgttgcaaacaacagacagtttgcctttcgaacagctaccatatcaatgcttccaggaggcacggaaggttctgattgcggaccgggaggagaagttgaaggaaattgcaacaaccagtgagaagatcgctaagattcaggcgctgccggaagaagagcaaacaaaacactccacctatgctcgactgcgcgcgctggaggtacatcttgatagacttaaggttctcgcggacatcaatgaccccctcgtgaagaagaagtttgaggatgggcagggtaagttgctgcggccttcgtcctagtaaccaacatactgactgtgtaggtgacatgagcaaacctatctaccgctacctcgccgatcagaaatggagagagtatcgccgcaagattctcgttcaacgaattacccagatgaaggtcattcctgatgtccttccccattgcgacccgatagtcgacactaaactgtacttcggccgaaaagctgtaccacctggagagtttgtaaactctcaggttagcagtgtccctcccaaactcgacatccaggtattcgacggtgaaaacaggctggtaacaattgccgtcgtggattcggatgttcccaacgtcgaaaaggacagcttcgactatatgatgcactaccttgccgtcaacatcccaatctctgctctgaacaccaaggttgacctctctcagctgtcgacggagtctcaggttgttctaccttggcttccccctgttgctcagaagggcagcccgtaccaccgcttgtcccttttcgtcatggagcagaaagacaacaagcctttggactttgcggccgtcaaggccaaggagactgaccgccttaacaagcttctccgcactttacaagcacggtaccacctcaagcccattggagcgcacctgttccgaacaatctgggatgacgacacccgcgatgtcatgaaggagattggcttccctcttgcagacatggaactccggcgcaagagaagcg

SEQ ID NO: 19860 - DNA, 1344 bp, Emericella nidulans
gacgcacatcattgcatggaggattgctctggtttgcctcgctctagttccactgctgcttggtgccggtcttatggaactccatatactcgggaagttcgaggagcgtcacgagaacgcttataccaagtcggtcgacattggtgttgaagccatcacctccatcaaaacgattgcatctctttcccttgaagatgagacactgaagacctaccaacggtccctgaagggtcctcgtaaggaaacgcttacagttactctacaggcaagcttttggcaggcgatgacctacttcctgggtaacctcgtgaatgcgttagcctactggtggggttccaaacaaatcttggcgggcaattatacccagactcagttcttaattgtggtgttttccctgcttgttagtgctttgctttggagtcaaatgtttgctcttgcgccagagctttcggcagcacgagctgcaatggccaggttactgggtcttattgagatagggtcagataagatgcaaggacacgtaccccctcgctcccttacggcatcgtcttcaggggaggaagaggcagctgtcgaaactaagcaacatgcatcagacagcaaagcctccagcgtccagcttcgcgacgttcactttgcgtacccagcccgaccagacattaaggttatgaacgggttgactattgacatcaagcccggaaagttcgccgccctcgtcggtcccagtggtgcaggcaagtccacaatcatttcactagttgaacgcctttacacgccgcaatctggctcgatcctcgtcgacggcgtggacattaccaagcatcgggatgtcggcttccgagactcaatcgctctggtgccccaggaaagcgtcctcttcgaagggaccatcaaattcaacattagcctcggcgccaaaccaggccacgaggtttcgcagggggacattgaaaaagcttgcaaactagcaaacatccacgataccattgccgcccttcccgacggctacgacaccctctgcggtcccaacgggagccagttttccggaggccagaaacagcgcctctctatcgccagagctcttgttcggaaaccgaagctgcttatccttgacgagtcaactagcgctcttgacgcggagtctgagaaactgctgcaggatgggctcgaaaaggctgctaagggaatcacagtcattgccattgcgcatcgtttgcatacaatcaagaaggcggatgtcatctttttgattgagggaggtcggtgtgttgaacatggcacacatgaggagttactggccaggtcagagagctacagggctaatgttatgcaccagactgtggc

SEQ ID NO: 19861 - DNA, 1345 bp, Emericella nidulans
catcttgcgattgggccgtttacacgtgaacggacggctttttgactcccaggtctccagattcgaaggctgagaacgagtcatgccacggaaccatggttgtcgtagcctgataggtgtaggttaaagtaaagcctatgtgactatgggcggagaacgaatttcggggtggatggtaagggtacgaccaatctggaaaccaatctggatgcaaatgcactcccgggcagacagtctccagatcttgtagactcgatttctagggagtaaagactgaattgttgaaagggggagtccagagaagattggacaaagcattgcgcttacccgtaaaatacagccatggtaatcctagaacgatacctagtacaatatcccagtaaataacttcgcgaccggagccttctccaaaccttcctccgtgctggaacaacttccaactctaataatcttcgtagactacacttatccgtaggtaaggcattgcagtctgtgcctgacccctccttccagttctcttgctgatcattccctttcccccgcggcccagacacaactattcctgcacccggacatagcccatccgtaccagtggaaacatgttgcatggggcctgtgattggaccacaaggcgcgtggacaatgtagtcagatagccatgtatctaatacggcatgacgcgttcgctcgaaacgaacatctacccctgttcttcagcttcataggtatcagctggatagacaaggtctgaaacgctgcaacgttctattttaaacagtttcaagacagagctgtgattaattcaggatggtttgaaatggagatgacgagtccatgaacagccgtgtcttttcgctgcagatccccgatgaggagaaggtcaagattgacgtgaacgacgtccgattcgtacccaagcccgtcgaccccaaagccgagaaggagcgcaagaagaaggaaaaggctgctgctcagggcgccggggccgagcagactgttgttgttggtcaaaccaagcccgaaaaggctgcccccgatgccgccgccgccggaaaggccgagggaaagcccaagaaagagaagaaagaaaagaaagagaagcagccgaagcccgctcctgctcccgcagcgcctccttccccatctctcatcgacctccgtgtcggtcatattctccgtgccgtcaaccaccccaacgctgactcactttacgtctccaccatcgactgtggtgatgctcctggctcagacaacacatctgtggatgaggagactggaaagaccgttcgtacagtatgctctggcttgaatggcctggttcccttagaggagatgcagggccgca

SEQ ID NO: 19862 - DNA, 1346 bp, Emericella nidulans
cggtggcaaactccccaagggagttttgcttgttgggcctcctggaactggaaagactctgctagcccgtgccgttgcaggcgaagccggtgtccctttcttctacatgtcaggctctgagttcgatgaagtgtatgtaggagttggcgccaagcgggtccgtgaacttttcaaccaagcccgaagcaaatctcccgcgatcattttcattgacgaacttgatgccattggtgcaaagagaaatgaacgagatgctgcctacgtgaaacagaccctgaatcagctcctaaccgaactcgacggattctctcagtctaccggtgttatcatccttgccgcaaccaattatcctgaactgcttgacaaggccttgacccgtcctggtcgatttgatagaaaggtcgttgttgacctaccagacgttcggggacgcatggacatcctgaagcatcatatgaagaatgtgcaaatcagcactgatgttgatgtagcagtgatcgctcgtggtacgagcggcttctctggtgctgacttggaaaatctagtcaaccaggccgccattttcgccagcaggaataagcaatctaaggtcactccgaaagattttgactatgccaaggacaaaatcatcatgggtgcagaggctcgcagcaggattatccaggataaagacaagcttttgaccgcctaccacgaggcggggcatgctctggttgcctacttctcgccgtcctctatgcctttgtacaaaatcaccatcatgcctcgaggaatgtctctaggttcaacgcatttcttgccggaaatggacatggtatctaaaaactatgtccagtatctaagcgacatcgacgtctccatgggcggtaaggtggctgaggagctgatctatggggaagacaaggttactagtggtatctcagcggtatgttcacaacgcttgaatctttaagctcagggcagtcgctaatggatgtaggacctcgcgagtgcgacgcggacggccttcacgctcgtcacgcgttttggctactccaagaaacttggaaacgtcgacctgtacgccaactacgatagcctatcttccgaaacaaagcaggaaatcgaagctgaagttcggcggttggtcgaggaagctcgccagcgtgccaccaacattttgaccgaaaggagacatgaactagagttgctgacaaaggcgctgattaagtatgaaacattgaccaaggaggaaatggagaaggttctgaggggcgaaagtctcgacagacttgtcgtgccggccgatgcgcctatgaaactacctgagcctataagtgcgacgaatctgagcccgaaccaaggcg

SEQ ID NO: 19863 - DNA, 1346 bp, Emericella nidulans
ttaaaaatggttgaaagcgtcctcgacgatatctcccaccggagatataatcctcttcgtggagcctatgttctggtctctccccaccgtactaaacgtccctggcagtaggtgatgacctcccttttatctcattcaaacgcttgtcacttgaattcagcggactgcgagatgaaccatgtatactgtagcctaacctggcgacagaggcgcccaagaaacaccctccaagacaaccctgcctgactatgacgctacctgctacctttgccctggtaacaagcgcgcacagggagaccacaaccccaaatacgaaaagacttttatcttcgtcaatgactacagcgcggtcaaggaggacaagcgccctaccacccagaagccggaaccggtacgtcatagcgagacaataccctgcatcttcatgacatccattaactgccattcagagaccgaatcattctttctgcgcgccgacccggtcaccggaaaatgctacgtgctcaccttctccgccgcccacaacctaaccctagcggacctctcaccggtcgagatcgtccccgtcatcaacgcctggacagacgtctacatcgcgcatttgtccccaagcagcccccttgccgccgccgcctccaaactcaccatttcctctggctctcctgcagcaagcctcgccaaaccaaatgaacagtaccgatacatgcagatcttcgagaacaagggcgcggcaatgggctgctcgaacccgcacccgcacggccagatctggacaaccagttctctccctgaagagctcgctgccgaactggaacagatgaagaagtatcgccgcgaacataatgggggacacatgctggccgactatgccgcgctcgagagcaagaagcaggaacgcgtagtctttgagaacgatgcattcctggtcgtttgtccctggtgggctatctggccgtttgagactatgatcattagcaagacgcacaagcgtgctcttgttgatctcgatgacaatgaaaaggcgcagcttgcggaggcgattgctgaagttactaggcggtacgataacctctttgagacacatttcccgtacagtatggggattcaccaagctcccttggaggggtctgaggaggagattgaggcgtcatatctgcatctgcatttctatccgccattattgaggagtgcaacggtgagaaagttcttggttgggtaagttcttcgaaaccattcgcaattttgtgagcgggtgttgacagggcatagttatgagttgatggctgagcctcagcgcgatatcacccccgagcaggcggccgcaaggttacggggttgtgggggtg

SEQ ID NO: 19864 - DNA, 1347 bp, Emericella nidulans
gaactggccaaggggcaggatatggctatgcaatctactttggccctatcctggtgaccaagggacatggccccgcgggccccaggacagaggtctatgatgcagaaatcatgggcgctgtagaaggcctacgcgcagccctgggacaaccatgtgtgggttactctacccagctagttatcctcctagacaacctagcagcagcctccctgctagcaagctataggccaactccgcataggcatggactgtcagagtccttcggccagcttgctacccagtggttggaagctccctcaatcctaaccaggccacggaagccccttcaagtccgctggatcccaggccattctgggattgctgggaacgagctggcagacaagcttgcaaagcttgggtcctctatatacagccctaacatccccccatcccctgcatacctacgacgggaggcaaaacagtggcttcgtacagaggcatatacagcatatgctagtaaggcaccccaagcctacaagaccctggatatcagaccccatacaaaggaaagccgcacccgcgagcacaagcttccccgttgggtacttggccgactcgtcgccgcccgtacaggccacggagactttacggcataccaccagcgcttcaaccactcagactacctggagagctgctcttgtggcaagaccaagaccccagtacacttcttcttctgcccatacaccagaaagcgctggaaagatagatggagatgcataagggacggcccgtcaaaaacaatagactggctcttaagtacagctgccggggctgaagaattcagccgcatcgtgcaagaatcatccttcttcaaggatatatgcccgaactgggcccgccggagcgcttgatagtgcgacagtccacacatctacctggataaagggtacggcccctccccccaatctataggtagtcaaaacgggcatctgccctcgaagaccaggccagggtagcgccggatgcttcttccgctcatttccaacatatattgtccatagttgctgcttcaaacctgtatctagctagttttagggagttctgtttagacagcacgtccagatgccccctgggaggccgcagatcacgtgggccccgtgatccgccgagtgacgttaaataataaaaccaaaccaaaccaacgctctcccggaaccgatctgactgactcccgaacttgaactcaccaccgaagttgaaccgaacaaacaatcacgccagccccagttctggccatgggcgatagaaatcgccattatggctgataagatgatgttaacctgaaactggtcgggaatcggtcgtgtc

SEQ ID NO: 19865 - DNA, 1347 bp, Emericella nidulans
atgccgggatcaaaatatgccattaaagatcctttctcctaccataccggcctcaattcataccatgagtacgcccccccagctcaacaacctatggcttttctaacatgggcgaccagatcaacagccatcgaagacgccctaccccgcccgcaaagtctcccccaacggcacggcttaggcctctaccctgaacgtatcagcggcacatccttcaccgcaaagcgcgccgtgaacaaacagacattcctctaccgcatcctcccatcgactgcacagtcctcgtggaacaggctctcggaccatccgctgaaccatcgctcgcattcagcagagctcaactttgtaccagaccaactcatatggcctcctgcccaagtacaggaggacaagacattccttgatggactacagatgataggaggtgcaggggacccaacggtcaaaaatggcgtggcgtattatgtctacacctgtggtctcagcatggacgagaaacaggccttctactccgcagatggggacatgcttatcgttgcccagacggggatccttgatatccagaccgaaatgggtgatatacgagtgcgcccccgtgagatctgtgttgttcccaggggtatcagattccgagtttctttgcccaaggggccgtctaggggtcatgttattgaggcgtactccgggcatttcgacctccctgagctagggcctatcgggtctctgggcctggcaaatgtgagggatttcgagattccacgcgcgagatacgtagatacggaagagattacagaggtcatcgcaaagtttggaggtggggtctacagcgcagagatgaaggggagtgcgtttaatgctgttgcatggcatgggacgtattatccattcaaatatgacctaggtaagtcctcccagcgtcccaataacaagttcgagagactcaatagctgcgtctaccaggaaaattcatgcctatgggctcaacgctctacgaccaccaggtccgtcttccctttagcagttctttgtccagcccaaataaccgccgcaggacccatcaatctacgtagtcctcacctgcccctccgacaagcccgatcatgcagccgtcgacttccttgtcctcgggccccgctggatggttatggaagacacattccaaatcccgtatttccatcgcaacaccatgtccgaattttcctccgtaatcagcgggggatttgacctctcgcgcgtgccgacgccgatgtacggaatgagcgggctgcacaacgtcctcagtccgcatgggctgtcggcgccggagacagaaaatgcaataaagaaggtgctgaggccggagcgagt

SEQ ID NO: 19866 - DNA, 1349 bp, Emericella nidulans
tccaaaacctgcactcccagtcaaaagagaagatcaatgaatttgtcagagggcatttctatggacacaatgactttgattttgacgatactctttacgtatttacatccggtcggtacgaatttcgcaacaagggtgttgacatgtttatcgaagggctggcgcgtctcaatcatcgtctcaagtccagcggatcgaagaccacggttgtagcattcatcatcatgccagcgcagacctcgtcactcactgtcgagtcactaaaaggccaagcggttgtcaagtcgcttcgcgacacgattcatatgatcgagcaaggcattggaaagcgcatgtacgagcggtgtctagcctggaaggagggtgacaatatgccggatgagaaagaccttatcaccagccaagaccgcgtcctcctgcgacgtaggcttttcgccatgaaacgtcatactcttcctccaatcgttactcataacatgatcaatgactccgaggatccgatccttaaccagatccggcgtgtccagctcttcaatcaatcttctgatcgcgtcaaaatcgttttccatccagaattcctcaactcatctaacccagtgttgcctttggactacgatgactttgttcgtggtacacaccttggagtcttcccgtcttactatgagccctggggttacactcccgcggaatgtacagtcatgggagttcccagcattacaaccaatctctcgggcttcggatgctatatggaggagcttattgagaactcctcggactacggcatttatattgtggaccgccggatgaagggcgtagacgattcagtcaaccagctgaccgatttcatgtacaacttcaccctcaagagccgacggcaacgcatcaaccagcgtaaccgtacggaacgtctcagcgacctgctggactggaagcgcatgggcttggaatatgtcaaagctcggcagttggctcttcgacgaggtatttctcgcagcccgggttattctttgtttgcttactgactacgtgcagcatacccctcgtctttcgacaaccaggaagattactttgacgttattggcgggacagagcagaagatatcgcgaccattgtcggttcccggatcaccacgcgatcgctctggtatgatgacacccggtgatttcgcatcactgcaagaagtcaaggagggtctctcgaccgaagactatgttgcatggcgccttccgtaagtcctgcacatctacctaggaagctcgagctaattcagcatcagaacaagcgaggaagatgatgcggaagaccacttttaccctctcacccttcggacgaagaagtccgaccgaccg

SEQ ID NO: 19867 - DNA, 1350 bp, Emericella nidulans
gtggaaggaccgcacgcagaaccagtttggaaagcttcagatccaggttccatggcggtccatccaactgctcgtcccgcatcgcatgcggcggaagttaaggtccaaattgcgcagtagagcgtctcctacctcgtcaatagcctctttacagacgtcgttatcgcctgcagacacactacgatcgctccaaagccaccgatggacggtttacgacttccaatatctgcttctgttgatcgtgggcatcttctctttgaccgttatcgagtcgcccgggcctttgggcaaaacggccattttctccatgctcctattctctctcctgatccctatgacccgccagttcttcctcccgtttctgccgattgccggatggcttctgtttttctacgcctgccagtgagttaaaaacaacccgctaccagaccccgtgcagcagttactcacatatgcaggttcatcccaagcgattggcgccctgcgatttgggttcgtgtcttgcctgcactggagaatattctctacggcgcaaacatcagcaacatcctatccgctcaccagaacgttgtgcttgacgtgctggcgtggctaccctacggtatctgccactatggcgctccgtttgtgtgctcgttgatcatgttcatcttcggtccgcccggcactgttccccttttcgcgcgcactttcggctatatcagtatgactgcggttactattcagctgtttttcccttgctctccaccttggtatgagaatcgctatggtctagctccggcagactactccatccaaggtgatcccgcagggcttgcccgcattgacaagcttttcggcatcgacctttacacgtctggtttccatcagtcgcctgttgtgttcggcgcttttccgtcgctgcatgctgccgactcaaccctggccgcacttttcatgagtcatgttttcccccgcatgaagcccgtcttcgtgacctatactctatggatgtggtgggcaacaatgtacctctcacatcactatgcggtcgatttggttgcgggtggtctcctggccgccattgctttctacttcgccaagacccgattccttccccgtgtccagctcgacaagaccttccgttgggactacgactatgtggaattcggcgagtctgccctggagtatgggtatggtgcagctggctatgatggagacttcaatctcgacagcgatgaatggactgttggttcttcatcctccgtctcctcaggctccttgagtcccgttgacgatcattactcatgggaaaccgaggcactgacctccccacatactgatattgagtccggcaggcatactttcagc

SEQ ID NO: 19868 - DNA, 1351 bp, Emericella nidulans
tctctactgctattattgtggcgtttactgcgagtatattgtaacggcgcagaacctgcatactacataatgtattgtaatctatccctaccctctagatatcatggatacctattctccagaatggtgcttgaaagggtccgtttgatgagacataaacaaaaggcatcgacaaatccaggccacaagaagaggacaatgggggcactgctactcgaccacaagcattgaagaccttgattgtgtatgctgctcgttctaggcaccatggatagcaaatggaaccaccgacgcgtggcaacagtgggccgctgcgtttctagaaagcacggattgtggatgatgtaacgaaaaaaaaaaatactcggtatatgcaggtactgtcttctcgtactggagtcattccgttagacttgcaccaataaatgacatttgagggccgtaagcgttcaagaggaagaccagtggcttgataacaagtctcagactgtctgggatgtgggagaaaaggtaaaaaaagaaatatttccctgaattagggcaaagcctagcacctaaacaagccatgatcgtcctaccggaactcccgagtgcgtggccggaacaggttccgatgccggttccgaaccaaagcagtcctaagtatagggaaattgcaaggtgacagactgacacgctatcatagacacgagtcttgaaactcgacagtggggccaataccatatgcaagatcttgatctgcaggcgcgcatggcgaatatttaaacactgctgttgtacccagcgatgtgactgatatacaacccatctaccatggttgcgctcaacctcctcctcgccgccacgcctctggcggcagcacagtcgctatcagacctctaccttgacagtgccccttcgtcaccccgtccttatatcattccccactacgccaacagccatgccgtcacaatcggcgcccagctctaccggtttcccgttaccggccctgcctctgactatgccttcacgctgatgagcaccaacgcccctgccagtggcagccttggtgtcctcccgcacatccatcagaggcactatgagaactttttcaacttcaagggccgcttccagctgtgggcacaaaagggggatggcgagcaggaagcccggcttctgacccagggcgactacggctctgtcccgcggaacacgacgcatacgttccagatactcgatccagataccgagatggtcggggttatctcgcccggcggctttgaagacctgttctacgcgttgggaacaaattactcggacgcgacgaacacgccgtatgtcccggccgccagcaatgggacctcgtccccgg

SEQ ID NO: 19869 - DNA, 1351 bp, Emericella nidulans
gcccgcgaaggtacgttggaacaaagattttcccttagctttttgagggggtttgcgttcttccagtttcgtccatcccgtccggcgtgtttgacaagttgttattctgattttctcgattcgaatcactcaccgtcgcattagtcgctgttccgacgcgctgctgctcaaccttccatcgtccgctcccccattgcggcaagatgtgcgttcacctcattatatccgattatcggaagaatatggtgttaaccctccggtatcagcttttgcgacagttcagcaggatatcttcaagccaacgaagtatggtggcaaatacactgtgactcttatcccaggtacggccactaaatccacaccatatccgcgacgttgcgcgacgcgtacttgattcaccgaccaactaacgtcttactctgcccatcaggtgacggtatcggtgccgaagttgcggagtcagttaagactatcttcaaagccgacaatgtacccattgagtgggagcaggttgatgtcagtggcgtagacaccggcaacaagcactctgaggaactcttcaaggaatcaattgcttctcttcgacgaaacaagcttggcctgaagggtattctctttaccccagttgagcggtctggccaccagtccttcaacgtcgctcttcgacaggaactcgatatcttcgcttctgtcgtgctcatcaagaacatccccggctataagactcgccatgacaatgttgacctctgcatcatccgtgagaacacagagggtgaatactctggtcttgagcaccagtctgtgcaaggagtcgtcgagtcacttaagattatcactcgcgccaagtccgagcgtatcgctaagtttgcattcagctttgcgcttgccaacaacaggaagaaggtcacttgcatccacaaagctaatatcatgaagcttgcggacggtttgttccgcagcactttccacaagactgccgaaaactacccaaccctggaggttaacgatatgattgtcgacaacgcttctatgcaggctgtctctcgtcctcagcagtttgatgtgatggttatgcccaacctgtacggtggtattctttccaacattggcgctgccctcgttggtggacccggtgttgttcccgggtgcaacatgggacgagatgttgctgtcttcgagcctggctgccgtcacgttggtctcgatatcaaaggcaaggatcaggccaaccccagcgctatgattttgtctggttcgatgcttctccgccatctcggactcgacgaccatgcaaaccgtatttccaaggctgtctatgacgtgattggtgaagggtgagtatactgtgcgc

SEQ ID NO: 19870 - DNA, 1351 bp, Emericella nidulans
tgcggtgcttgccagaccattattacgctccctgtgagaccgttgcccaagatttggctgctagtattgaaaacggtactattcgccaggctgtcgagagtctgccgttgctcaataccacgaaactgcgcaccaagccagaatggaggagagcctatgtggtcctttcctatcttacacatgcctatgtttggggtggtgaaatccccaaggaggttggtgttttgtcctctaggcatttgatatggcttctcactattagtgtcacgctaggttctgccttctgctatctcagtgccatacctggaagtttcacgatacctagagctgccttctgtagcaacatatgcagcccttaatctctggaactggtcaacttcatcacccaacgatgacctcacctgtgccgacaatctctccgtcacattgtcatatactggaacgaaagacgaggagtggttcttcatggtctctgtcgccctggaagcgagaggagcccgggtcatcgaaatgatgctaaacaccatccaagccgtgactgtgggcgacgaccagagaatagtcgcatacctcaaccagattactgaaggatttaatgagctggctcgaattctggaacgaatgtacgagaagaaccgccctgccgttttctttcacttactccgtccgtacctcgctggaagcaagaatatggcatctgctggtcttccaaacggactgttctttgaccaaggaaacggtaagggtgaatggctccaatacagtggcgggagtaacgctcaaagctcccttatccaaacttttgacatttttttgggcgtcgagcacacagccatgggaggtcccactaagactgagcttccaaaggcaaaattgggaaagactccatacatccaggtatgccaagtcacctttctcgggctgttgtttatgagcaatcagacattaatgatctattgcaggaaatgcgaaactacatgcccggaccccaccgacgcttccttgaaatgctcactcgaaacgccaatctccgtccgtatgcgatgagctgcaagctcggctcacctgtgagagatgcttacaacaccgccgtcatggctctcggctcgttccgcgacaagcacgtacagatcgtaacgaggtacattatattggcctccaagctccctcctccagcgaacacacctgtgcggataaacctggcttcgacaacgcaaacccagatgaaggactcgactgagaaggtttccacaggcttcagcggcacaggtggaactgatttgataccctttctgaggcaaactcgtgatgacactaaggctacggcgtactatgcggattgaaagattta

SEQ ID NO: 19871 - DNA, 1355 bp, Emericella nidulans
tggcggccaaatcacggttcacaaggctagatgccttcgcgaaaacagtcgatgaggctcgcatccgcaccacctccgggggaatcatcactatcgcctcgctgcttatcataatatggcttacgtggggagagtgggtggactacaggcgggtggcagttttgccggagctcgtcgtcgacaagtcaagaggagagaagatggagatccacctgaacatcacattccctcgacttccctgtgagctcacaactctcgatgtcatggatgtctcgggcgagcagcaggttggtgtcgcgcacggtgtgaacaaggtccgccttgcgcctgctgcggagggcggccgcgtccttgacgtccaggcactgcaactgtaagcggagtagcttccaatccatcagcctcccatagaaccccgctaacaggtccaagccacgccgaagaagccaagcacctcgacccagactactgcggtgaatgcggcggcgcgcccccacctcccaacgccatcaagcccgggtgctgcagcacctgcgacgaagtgcgcgaagcgtacgcccagaaacaatggggattcggcaaggggaccaacattgagcaatgcgagcgcgagcactactctgagcggattgacgcgcaacgccgcgaaggatgccggcttgaaggcgttatccgtgtcaacaaggttgttggcaactttcacattgcgcctgggcgcagcttctcctctaacaacgtgcacatccacgacatcgcgaactacgaggaaaggggtctgtcgccggctgagcagcacacaatgtctcatatcattcacagcctccgcttcggaccgcaattaccagacgagctctcggatcgttggcaatggacggaccaccaccatactaacccactcgatagcacgagccaagaagcacctgagcccgcttacagctttatgtacttcatcaaggtcgtctcaacatcctacctgcccctcggctgggaccctctctattctgcatctctccacgctgcggccgacacaaacaccccgctcggcgcgcaaggcctcagcgccggctcacaaggcagcatcgaaacacatcaatacagcgtaacctcgcacaagcgatctctgcgcggtggcgatgcctcagacgaggctcataaggagcgcatccacgcagcgggcggtattcccggcgtctttttcaactacgacatctcgccgatgaaggttatcaatcgtgaggcgaggccgaagaccttcactggtttcttgacgggtgtatgcgcaatcgttggtgggacgcttaccgttgcggcggctattgatcgcacgctttacgagggagttagtagggttagga

SEQ ID NO: 19872 - DNA, 1355 bp, Emericella nidulans
gccaccatgtccggtgacgaagaacctcctcctgaggtccatcattatgagaaccgtggccaggtgccttgggacattcagaagtacgaataccgccccactggcttcggcaggaatcagctaacgccgctctccagctactggtcccaacgctatgatctcttttccaaatgggacgacggcatttggttgactgacgatgcctggtttggtgttactccagagccagtggctacgtatgtgatttttacccgagtcatccgaattctacaccagaaagcgcagaagcgctaatgcgaaccatgctacagaaagatcgcagagcaggtagcacacgcttctcccccagagcggaagattctggtcgacgtttttgcgggcgcaggaggaaatactattgcctttgctcggtccgggcactggaaacgagtttacgctatcgagaaagaccccgcgacactgcggtgcgcgcaacataatgcagaggtctatggggtcgcagacaaaattacctggtttcaaggagactgtttcgatatactcaaatcacaattaaaggatttggcgccctatagcgtcctatttgctagtccgccttggggaggtatgtctgttcctgcgttctcctgctagcaatcctcactctgaatgctaatctcgccggttcactataggtcccggatatcgatcagaatctgtattcgatcttagcacgatggaaccatactcattgaataaactgtacacggagttttctcttttcacgcaatatgtgatactttacttaccacgaacatctgacctcaatcagctagctgccatggttaagaatgatgaacctgctccggtgatgcactattgcatgagaggggctagtaaagcgttgtgcattttctatggcggatttcgattattataaatagcaatcctcagtgcttcagattacgcgagacccttgaaaacaaagaaacgatataatcaaaagatctagcatataccctttgaagctcctctcagaacaagccataacgtggttggtaagcgagctgcgcatgtaagcgagctgcgcacctgcatacagatttcccatattttgaccttttaatcaaccacaacgcctttatattaattattatttatttggacaagcatttcttctatgcccaattctatggcaggtactacatgtaggtaatgcccgtgcctttggtgtttgtgcaccttctgctggtggcccgcatggaccaggtattgcctgaaaagacgcattatgagcttcctcgagctctgtcccctcttgtacagacagaccattatcatgaaatatccatctatgcgtacgagctcgctttcgc

SEQ ID NO: 19873 - DNA, 1355 bp, Emericella nidulans
gctattggccgtcgcgctgttcttcgtttcgtcaattgtatgcgccacagcggtggatatggcaatgttgattgtaggccgcagttttcagggtgttgctggaggtgggcttatccagctcattctcataactatatcggatctgttcagtgtcaggtgagattaacacacttctagctcggtgcgttttgcttacgcaacgcagactccgtagcctgttcatgggtcttatggaatgtacctggacggtggctggtgctctcggtcctgtgcttggtggtgtcttcaccgagtccatctcgtggcgctggatcttttggattaatcttccagtatgcggtacggctttcgtgctgctgatcctgttcctggatgtccataatcccaggacacctatgctcgaaggaatcaaggcagtagactggtttggcagcttgtccattctagccatctccgtcatgattctcctcggattagactttggcggcgataccttcccctgggatagccctaaagtgatttgcttgatcgtgttcggcgccctgatgtccgttgcattcatctacagcgagaagcgtctggcgaaatacccgctcatgcccctccacatcttcacaagccgttcaaatattgcttgcttcttggtggacttcacacacggctttgtcagtcaatgctaaaacaattctactccgttttaaactgccaggctaacattaacaggcatttctcggtgcggagtactacctcccactctatttccagtctgccaaagcggcctcccctttccactcaggtctgctcattctccccttcatcctaaccgaatccttcaccagcctcgcagttggcatcgtgatccaccgcaccggccgctaccaagaggtcatttggctggggatggccctcgtgctgctaggaacaggcctcttcattgactacagcacttccacatcgcttgggaagatcatcggctaccaaatcatttccggcttcggatgtggcctgctcttcttcccgccactcctcgcactccaaagtaacatcccaacgaaagacaccgcaacagcaaccgcgacattcgggttcgtgcggaatgtcgccatggcgctttccgtcgtgctgggcggcgttgtcttccaaaatagcatgggtctgaagagggatctcctagaggacgctgggctgtccagtgccctgcaagaggactttacaggtgcggaggcggcggcgaatgccctggctgtaaaggatattacggactctttgcagagagaagctgtcgagacggcatttgcttggagtatccgaaatatctggattttgtatactgctcttgccgcagtgggccttgt

SEQ ID NO: 19874 - DNA, 1358 bp, Emericella nidulans
gcgttgctgtggggcttgaatcatacttatgaaaatggtgatgaggtgcaaagagatcgtgaagacgagaatgaaggttacttccctacaccagaggagatagtccgtgttgatattcctacgttacgaacagcagggttatcacagcgcaaggcggagtatatccacggcctcgcggagaaatttgcgagcggggagttgagtgcgacgatgttgttgaacgctagtgatgaggagttgctggagaagttgactgctgtgcgaggactggggagatggtcggtcgagatgtttgcgtgcttcacgctcaagcggacggatgtgttttcgacaggggatttaggtgttcagtgagttaactaaattccttaacgccttgtttttgggcttggatttacatctgcttcgcatccaacgaggcagaatgaattgaagctgaactggactgactgcagcgtaggagaggatgtgccgctttcatgggaaaggacgtaagtaaactcaaggcaaagggtggtaagttcaagtacatgtcggagaaagagatgctagatttggccgccaagttcgcgccgtataggtatgttctgtttcaagctccgaagtttgcaatatgtgctgcattactcacatctctcaggagcctcttcatgtggtacatgtggcgtgtagaagaagtcgatgtcactgtgctgagcggctagagcgagtagctcatacacctgttgtggtctctgtttgcaagcaaggcagggaccacgcttatatcatctcaggatttttagaaacaggcatagatatcttaagtgtatataacccgacacctagtgagctgggctctaggtcaccaatactcgcagcgcataaatactacctcgatatcaagcagtaacaaaatagatttttacagtatcagtacacgtggtttgcacgacataactccaaaggctcaagcaaatggcagatgctccaatcgacggagcataagcccgaaagaacaggtcttgtatcgtcttattccacacgtctatatccttggggagggtttgtagctttgtaatttacaaaaagctatttatttctttcggttgacgacaaggttgtcaaggtcggcacgctcggcgttctccttctcgatctcgcggatgatggggctgaggtactcgacatcctagcgccgcaatcagtatgtcatctttaacaaaccgctctttagaaggctctatcgttcagtagacggcatatccggggtatcgatttgttgacaaatccggcgtacgggattggtcaaaaggatgcggagactgagaaagcgcttgcgactgaaagaagctcaaattgactcacctcgttgggct

SEQ ID NO: 19875 - DNA, 1359 bp, Emericella nidulans
tccgcaatccagccgctacaacgaccatcaccatgcccatcctccctcacctcacggtgaacacctacaacctcaccgttgtaatcctcgtggccataggcacaatctcgacagcgtatggcctcgccgtcattgggtccaccgtcggccaaccgaatttctacaccttcttcgacctagaggccgacaccaccgatcccgactacaagcacacgacgaatatgatcggcgccttgaatggcgtcaactccgccggcgccttcatgggttgtatcctgcaagcctggagctctgacgcatatgggcgcaagaccaccatccgcttgggcgcggcggtgctgattgtaggtgcgcgctgtgcgctggggccgtgcatatggccatgtttctggtcggccgatttgtcgctggtctaggagctggcattctagcgtgtagtgtgccgatctatcaggcagaagtgtcgacggcagagacgaggggtgccatggtctgcgtgacgggcgtcatgtatgcggtcggctatagccttgccggatggttagggtacgcctgctggttcatggaggcgacgagcccagcggcgcagtttgcatggcggtttccgctggccttccaggtgcttttcccgctgtgcgtgctcgtcggtgcgccgtttattccagagtcaccgcggtggctgttggcaaaaggtaaaggggttgaagctctaagcgtgctgcagaaactgcactcgaccaacgggcatagcaacggcgacaacaccaaagcgcgggaagagttcagcctgatggagaaacagctcgaactcgaccagtcgcgtatcgtgaaatccaggtggccagcgctagcactcttctctacgcccgcaaaccgtaaacgctcactcattgcgacgattctcatgatcggaaaccagttcctgggcaccttcgtgctgaccaactacggagtccttatctacgcctcccttggtctaacagggtctatcccgttgcttctgaatgcctgctggacatcattcacgcttatcggaaacacctggacagcactgtacatcgaccgcttcgggcgccgtcgtttcctgctcgccggcgcaacaggctgcacactgtgcatggtcttcttgtgcgcactgacggcatctttcctgaatacagacaacacccccggactgcgggctgccgtcttcttcatcttcttctatatcttctggtggtgtttcttcgtggacgcgacgcagtttgcgctacattgctgagatcttccccaaccatctacgcagtcagggagttgcgctgggactgggctggttttatctctcaagtgaagtgacccttgttgcagcgccggtagggt

SEQ ID NO: 19876 - DNA, 1360 bp, Emericella nidulans
gccagacaaaaagcacggcagacaatggcgcggtctccgctaccgcattttcatcgtctacagacggctgttctcgctggtcttcatggcaaaccttgccatgctgatatgcttcttgacgttctccatcaaccgccggcatataaccaccgtttcctttgtcaatctcacaattgcggtcctcgtccggcaagatatggccatcaacatgttatacgccgtatgctgctcagtcccaacgtcatggccgcttgcaatccggaaacgctgcgcaaagatctaccatcttggaggcatgcattccagtgccgctgttatggctgtggcttggtatacgggggccatctgttacaacatcaactccttcgtcaaccagccagaggatcctcttaggccttccgttctaacaataacgctgtcccttctggcttgctcaatcttcatcacaatgattggtctcgcataccccaccctccgcaagaagcaccatgacctcttcgagcgcgtccatcggttcggcgggtgggttgccctcgtgatcatctgggtgcagaccatctcttccattcgagaacagcgcgtcagcagccgctctttgggacatgccatagagtcagagccggccttctggatgctgctcgtcattactctcagcattgcaagctcctggcttttcttgcacagcgttcccgtcgacgcagaagttctctcaaaccacgccgttcgtttgcacttcacatataccgtccccgtaaacgggacgttcatccgactttcgcggcggccgttgctggaatggcactcttttgcggcagttcctgcaccggaggctgtcgatgggcgggaaaggggttacagtcttgtggtgtcgagggccggcgactggacaggaaagcagattgagaaaccacctacccggatttgggtgcgcggaattccaagtgcgtcgtactcttctctgtctcccattattcgtagctgaagaccgtactgatgacaacacagccagcggcgtaatgcgcatctccccgctcttcacccgtctcgtccttctgggaacaggctcaggcatcggcccactgcttggtcacattcaatccccaggcttaagacacaggtgccccgtccgtataatctggtcaaccccgtctcccgtctcgacatttgggcaggaaatcgtcaacgcggtctacgctgctgacgcgggcgctgtcgtccacgacacgaaggtactaggccgaccggaactagtaaaaatatgctgggatgccgtgcaggagtttaaggcggagggcatcgttgtcattagtaatgagaaggtcaccaagaaggttgtttatgggatggagagtcggggcgt

SEQ ID NO: 19877 - DNA, 1360 bp, Emericella nidulans
ccccaaacacgccgcaaaacaactgcggacgcctaacgcagggcagaataccatctcggacctgttgcccctatcaccagggatgcagaattcagtttggcttctaaggagaacagagggggctcgcaaagctctgagtcacctgtgcctgcgcccacaccccatcttcacaccgtccaaaacctgaacgagttcgagtccatcgcaaaggcctgcttgtctccaaacgcctgggcctactacaattctgctgcagactccctcgcgtcttttcacaagaacttgacagactggtccaagatcgctttacggcctcgcatcctgcgaaacgtatccaaggtgtctctgggaaggaccatcatgggccatcgaagtagtctccctgtatttattgcacccactgcgcgcgcaaagctaggtcatccagacggcgaggtgtgtcttgcgcgtgccgctgcgagacataatatcctttacgcggtttcgagctacgcctctattggacatgccgaattagcagaagagttcgtcaaagagaaaactaggttggtccctataagtgcgcggtctgcgcaaggagccctaggtttccagctatacctaccgtatgacaaggaaagaggcggacgggcattgattgcgaaggcaaaggacttggggtttcaagcgctagttgtcactgttgacacgcccgttgtcgggaaacgcgaagctgatgagcgttttcaggcggagctggaggtgatctcttctgaccgtgcagccgtgcaggtcaacgtaccgcgaaaggccgagcctggtggtgacgctcctgttctccgcgggttccattcgtcttcactcgagtgggacgatatcccatggatacgggaggcttggggcccgcagccgctgattatcaaggggattcagacagccgaagatgcgcttcgggcgagcgaggcaggtattgatgggatatacctcagtaaccacggtggccggcagctagactacgcgcccagttcaattcagacactcctcgagattaatcgtttttgtccggaggttctcaaacgagtcgaggtgtacctggacggaggcgtgcgacggggaacagatgttatcaaggcgatttgcctcggtgcgaagggggtagggctgggccggccgctgttgtacgcgctcagcgggtatgggactggcggggtcgataaagcattacagagtgagtccgtctcgtccttaactgggacaatgacactgatggccatagttttgagtgatgaaatcgagaccagtttgcgtcttatgggcgttgttgacgtgtccgagttagatttgtcgtttgtgaacacgactgctctggaaaaggacctgg

SEQ ID NO: 19878 - DNA, 1363 bp, Emericella nidulans
cccggcccatgctcattacgaccctgctgcatacgcatcttaccagcaaggcgctatgcagcaaggttacccgccagcccaggcaatgcagaaggtcaatgcgccacgcagtacggcatgcatgcgcccccaccgccgcagcaacagcaacagcaaatgcaggcaatgcaacagcaagtggctgcgaaagaagatattccccagcaaccgaaggtcaggattggcctggaccacttcaacttccttgctgttctaggaaagggtaactttggtaaggtcatgttggccgagaccaaggctaccaagaaactatatgccatcaaggttttgaagaaggagtttatcattgagaatgacgaagttgagagcacgaaatccgaaaagcgagtcttcctgatcgccaacaaagagcgccacccgttccttctcaacctccacgcctgtttccaaacggaaactcgcgtttactttgttatggagtatatcagtggtggagatctcatgctgcacatccagaggggtcagttcggtctgtagagagcgcagtatgcatccccacctagtttaaatttggcgatacaactgacgtaattttccaggttctatgcggcggaagtgttactggctctgaaatacttccacgagaatggcgttatctaccgtgatttgaaacttgacaacatcctactaactctcgatggccatattaagattggtgattatggtctctgcaaggagaacatgtggtatggatctactacaagcaccttctgtggtactccagaattcatggctcctgaagtatgatcacctcgctcaatttgaattctgggatgctaatgacttgcagattctccttgacaagaagtacggcagggccgtttattggtgggcttttggtgttcttatctatcagatgcttctgcagcagtctccattccgtggagaggacgaagacgagatctacgatgccattcttgcggatgaacctctctaccccattcacatgcctagagactcagtttctatcctgcagaagctgttgacgcgcgaccctgaactgaggctcggttccggccccacggatgcgcaagaagttatgtcccacgcctttttccgaaacatcaactgggatgacatctaccataagcgcgtgccgccaccgttcatgcctactatcagcagcgccacggatactagcaacttcgaccaagagtttaccagcgtcactcctgtgctaactccagtgcaatcaggtaagacacttctaatttttttctcttacttccagatactaatcctcctttttagttctttcccaagcgatgcaagaagagttccgtggtttctcgtacaccgcgga

SEQ ID NO: 19879 - DNA, 1363 bp, Emericella nidulans
catcatgcccgccgatcttgttcccgagacaagggtccttgccattgccagccatgtaagcgtcccctcccctccctctccgcgcccaccatgacagcccacttatcagaatcaaactgacacttccaggtcgtttatgggtatgtcgacccttgtcatatcatgtaccaatctgtatacatcaatgatcagcagctgaactgaaatcaaagccatgtcggcaataaaatggcaaccctcgtcatgcagtctttgggctgtgatgtcgccgccctgaacaccgttcatttcagtcagtatatcttaatattcatacgtccagaactgacagttgcactaggtaaccacactggataccgccaattcaaaggtacaagagccacggcagaggaaatcaggaacctctatgaagggctgtgcatgagcaacctcacagactttgatgtcatgctctccggatacgcccccagcgctgcagccgtcgaggccgtcgggagtattgggatggacttgaaacgcaaagctgcagaccgtcccggttcattcttctggggtgcgccgccgtctctcagtgccatctccagaatctactaacgacgtcgtagtcctggacccagttatgggcgatcaaggtcggctatatgttaatgatgatgtagtgccggcgtacaagaatatcattcagcacgcggacctgattcttcctaaccaattcgaggccgagtattatccccgtcccatcccagcccgtagtcccagagacacgactaacagcacaagggtcctctcgggtatccagataacttcactggaaacactcgcaaaagcaatcaccgccctgcatgaaacctacaacatccctcacgtaataatcacctctgtgcagctctccaagctcctcccatctcccgaaaacccatcgccagactcaacacagaacctcctcactatcattggctcgactacactgtcaacgggtaaaccgcgccttttccgcatcgatgtcccagcaatagactgcttcttcagcggtacaggcgatatgtttgctgcgctaactgtcgcccggctccgagaagccgtatttgcggatgcagatgaaaacctacgatataaaaagtcatggattccagctgatgatgtgaagccgacggagttgccgttggcaaaggcaacggagatggttctggctagtatgcataatgtgctggagaagaccagcgaggcgagagatgcggagcttgcggctactgcggctgctgctgctgctgctggagctgaggagactgaggaaatgaagaagagggaacacttgcgacggacgaaggcagcggagatacggctggtgcggaatgtgcggttt

SEQ ID NO: 19880 - DNA, 1364 bp, Emericella nidulans
tcgagcagactgttacatttggagaaggtaactcgatgcttctccttgggtcgcgtggggcgggtaagacggccatcatagagagtattgtctcctctctgaagcaagagcacaagaacgacttccatgtcgtccggctcaacggctttttacatacagatgatcgactggcgctgcgtgagatatggcggcagcttggtcgggaaacgaatacggaagaggaagcaggaaaggtgaccagttatgcggataccatggccacattgcttgctcttctctcgcaccctgaagaattgcaggcctctgcagacaaccagaacggcacaacgacagccaagtcgatcgtgattgtcctagatgagtttgacctgtttgtcacacatccccgccaaaccctcctttacaacctgtttgatatcgcgcaagcgcgtaaggcccccttagcggtcctcggggtgaccaccaaagtcgacgttaccgagatgctcgagaaacgagttaaaagccgatttagtcacagatctgtctacgtgccgctgccgaggacatttgaggtattttctgatgcctgcttaggcggtttagatctcgaagaatctgaattcgccagcgccgatgatctatgggacgccaagtccgacagctggatgatggccctggatgggtggagagcgtatctacaggtaagaccacaggcttgtttcggcgtcagacttgtctcaaactcttgctcacaccacggccttgctctatagggactgtgggccgatccggccttccaaacacatctgcgcagaatataccacacaaccaaatccgtcggggaattcttcatgagcgcgctgattcccctcacggaacttcatcacagcctggccacttcaccaatcatccccactccgagcaccttttcaacacacgctctctcctgccccgatcccgcccctctccccttcctgccctctctctccacatcaccctcctcagccccatcctcccttcccctctctcttctcctcgccgcaacccgtctgacagccctatacgatccaggctctgctgaaaccgcagcgcaagatctcgccccactcgccctctccttccccgccgcctatgcagaatacgtccgacttctgacctctgcgaagacctctgcctctgtttccggggcgtccgtgacgccggggcgtgtctgggggagggatgtggcacgcgaggcatgggagcgccttgttgcttgggggcttgttagtcccgttggtggtgggagtggcacggctgatgggcggatgttccgcgttgagatcagctttgaggaggtggtggggctggttggtaaaggagggtcccttggacggtggtgg

SEQ ID NO: 19881 - DNA, 1364 bp, Emericella nidulans
tgcccatcccaggtgcctttacgtcctacgctactcgattgattgaccctagtctgggttttgctatgggctggatatactggttctcctgggccatcacctttgcccttgagctgacggcaactggattgattatccagttttggaaccaggatcttaacatagcaatcttcattggtgtcttctgggtcttcattactctattcaacatgcttccagtcagtttctttggtgaactggagttctggttctctagcatcaaagtcctcactgtcataggtagggatgccgctaatagcccaatattactttaactaaccatttgcaggattcatgatcttcggtatatgcattaacgctggtgccggaaaacaaggctatatgggattcgacacctgggtgcatccggggccatttgtggcctacgataatatttcacctgattcgaccgccaaatttgttggtttttgggctgtcctcatccaggctgcattctcttaccaaggaacggaattagttggtattgctgccggtgaaaccgagaatccccgcaaaacagtgccctcggccatccgcaagacgtttttccgtatcctgttttttttcgttttgacgatcttttttatcggcatccttgtgcgcagtgacgacaagcagcttttgaattcttccactgatgcgaatgcctctccgttcgtcatagtggccagaaatgcaggagtcgccgtcctgccggatatcatcaacgcagttctgctgactgtggtgctctctgccgccaattccaacgtctacagcgccagtcgcatactgatcggtcttgcccaagaacgttcgccccccgtttcttcaagaaaacctcgaaggctggtgtgccctattacagtgttgcattcgcctcggcgtttggtctgctaggattcatgaacgtttccaattcaggtgccacggtgttcaactggtttctgaacatctccagtgtggctggtttgatttcatgggcgtccatcttagggtgtcatttagcgttcatgcgtgctctaaaagctcgcaacatttctcgcgaccttctcccttacaaggcgttgtggcagccatggttctcatggtacggccttttcttcaacgttcttatcatcattacccagggattcactgcctggatcccagaattcagcgtgaccgatttcttcgtcgcatacattagcttgattctcttcgtcgttctgtaccttggccacaagattgtctatcgaccatcgttcattcgccctatcgaggcagacatcgacactggccgtattgcgctggaaaatgagtactgggagactacaatctccgacgagaagtggtataagcgggcc

SEQ ID NO: 19882 - DNA, 1368 bp, Emericella nidulans
ttgatgccgagtcgggccacctcccgagccatggagaagacgaaatcgagctggagcgcatcaacacctatcgactccaacagcaggagacagtcgggtcgagccgaagtcggattcctcgagagcaatggctgcctctcggcgctggcaaaccttatcccccggacctacctaatgtcgaggcatatatcgttgagtttgaggggccggacgacctgatgcaccctcaaaattggccaatgacaaggcggtaggtatcctgttacctattcaaccggcttggtgctgatgaaagcagtgtggccctaggttgcatcttaacgtttgccgcgctagttgccgcctatggcagctcggtctttgctactgctactccgggcactatgagtgagtttggttacggacgagaagttgctgcgctcgggacgacgctgtatgtgcttggctttgctgctggaccgacgatatgggcgcccatgtctgagctcatcggccgacgggtgccgttgctggtagggatgctcgggttcgatatcttcattatcgccacggctaccgcaaaggatacgcaaacggtcatgctcacacggttcttctctggactgttcgctgccagtcttattgctttagtaccagctagcctgtcggatctcttcaacagtcaccaccgcggcattgctatcgcggtatataccatgtccgtgttcctagggccgtacacggcaccattcattggaggatacacagcagaaagctatctcggctggaggtggacactgtatgttcctgcgatagtaggcttcttcgctttaggattacttgtcatcttcgcgcaagaaacatacgcccccaccatcctggtgcagaaagcagccatccttcgccgccagacccgcaactggggcattcacgctcgccaggaagaactcgaaatcgacatccgtgaacttcttaccaagaactttacgcggccgttcaggatcctcttcaccgaacccattgccttcctcatgaccctgtacatgtctttcctctatgggctgacctacgccatgctgcaagcattcccgctcgtctttcaaggcgtacatgggatgtcgctcggtgttagcggactaccgtttattggactcatcatcggcgagatcctgggtgcagcgtttgtgctctctttctacaagtcgtatacgcggaagttgatcgcgaataataatgttcccgtcccggaatggcggctaccgccgtgtattgctggtggtattgcgtttgcaggaggactcttctggtatagtcaacctttgtgcttcttacaacagttactaagaatgagaacaggttcggctggaccggcttcagcatatctatcca

SEQ ID NO: 19883 - DNA, 1370 bp, Emericella nidulans
cgcagtatgaaccaaagcgtcgtgtggctggtagtagtgatgacttgagtgaaccgaagaccaccgttcaggttctcgtcctcggggatattggccgcagcccccgcatgcagtatcacgcattaagtatcgctcgcggcggcggacatgtagatattattggatactccggtaagataatcacaaatttcaatcacgcatgctgactcaatttaccgtagagtcggagattcatcctgatgtttcctcccatcccaacatctcagttgtcccgattcctcctcatccgagcgttctacaaacgagcaacaaggtgttgtttctgtttgtcgcgcccctgaaagtacttttccaagttatcgctttatggtggattctcgcataccacacaaagcctgccaaatggcttctcattcaggtttgttattccgcgatctatatttgctggagttgtctaacgtgctgggctgtagaacccgccatccattccaactctggctattgcctcacttgtttgtttcttccgacagaccagacttgttatcgactggcataacttcggttatactattctagcgttgaaacttggggacactcatccgttggtgaaagtctccaagtggtacgagaacgtgttttgcaggtcggctgttgcgcatttctgcgtaaccaatgccatggcctcagtgctgaagaaagagtttgatctccaggcgccaattctaccgctgcatgatcgcccagcaagtcatttccggccgatcctagacgagcaggagcgcaaaagctttctcttatctttacccgaggcagcacctatgcgcaggtcaattgaagaaggaaacacaaaagtaattgtcagttcgacgtcatggacgcctgacgaagacttctcactcctcattgatgctttatgccgttattcagaagtatccagcaccaccaagcctcatctacccgcagtgctcgccatcattaccgggaaaggtcctcagcgcgatatatatgttgagcggatatctagattacaaaaagaggggaaactcagcaaagtcaccatatgcactgcttggttaagtaccggtgactacgcacgtttgttggcatccgcttcgctaggcgtcagtttgcacacgagcagcagcggtgttgatttgcccatgaaggtggttgatatgttcgggtctgggttgcccgtggttgggtggagtaaatttagggcgtggccagaattggtcacggacggcgttaacgggaaaggttttggaagcccaagtgaactggcagaacagcttgttgagctccttgggaaccctgaaaatctgaacatgctgcgtgcaggtgcgcaggatgcaagcgcctttcgctgg

SEQ ID NO: 19884 - DNA, 1374 bp, Emericella nidulans
ctgactggagctatttctggggtaattcaggcaatcgttcatccaccgatgatccaaggcacccaaatcctgccagcgaagatgatgagattgaacctgaccagggcaatggtatgtgcttttctttagctttttacccgttgtacccgtcgtaggttcgcctgggcgcgatgctaaccaagatcccgatcgcaacagtcctgagccacatcatttcccaactccggcctggagcagacctcagtcgggttgtattgcccacgtttattctcgagccccggtctatgctggagcgaatcacgaagtatgtcagcttcggctggacctcttatgtactctagcaggcaaacgactaataggattctagcttcatggcacaccccgaaaccctactacccatgcccacgaacgatgaccctctcgagcgctttgtatccgttgtcaagttctacctgagtgggtggcatatcaagcctccgtacgtcgatcttgattgttccttggagacaaaccgaatctagagggttttctactaacagagcttaggggagtcaagaagccgttgaaccccgtgctcggcgaaacgtacacctgctcctgggaatatccggatggtactcgcggatactatatttcagagcagacctcccatcatccgccgaagtcaagctatttctttatggcacctgagcatcatatccgaattgatggcacactcaaaccgcgaagcaagttccttggtaattccgctgcgagtatgatggagggtatagctatcctacgattcctgaaccgtggaaacgacaaggaacggggagaacgatagtaggtgaaatgtacatggtgctattccacataagggctaacaccatcagcattttgacgcaacctaacatgtacgccaggggtatcctcttcggaaagatgaagtatgagcttggagatcatagcttcgtgagatgtcccgagaacgatcttgtcgcggatatcgaattcaaaaccaaggggtacttttctggaacctacaacgcaattggcggaacaatcaagaatgaaaaaaccggagaagtatactacgagatttctggtctttggaatggcgagatgtatattaagagcgttcacgtatgtctttcatcccttttcttgacgccagcgttgcagattagaactaacccacgtagtcccacgacaaagaacttctcttcagtgctaagaaatccaagccaacattcccgacaacccgcccgattgaacaacaaggcgagcgcgagtcccagcggttgtggcagagcacagtgaaggctattattgcctcaaaccatgaaatggccacggacgagaagactaagatcgaagaccgccaacgcgaag

SEQ ID NO: 19885 - DNA, 1378 bp, Emericella nidulans
cgcgcctgggtccgaaattatgtagacacgcatatcgcaccttacgcgcaagaatgggaagaagctggcgagatcccgcctcatgtatacaaaacacattgcgagcacggattcgccattgtccacccactcaccacaccagaagactctgcgaacctgactttgcccggcggtgtgaaaagggaagaatgggatacatggtgcggactcattgtcgcggatgaactgaaccgacttggtttcgtcggtgtgatctggggccttggtggtggaaactcaatcgggtgtccgcctattgcgcgctttgggacggccgagcaacggcgaaggtggctgccgaagtcgccaagggagagatcaggttttgtttggggattacggagccggatggtatgttcctcttattatattgatctgtgatctttgacatggtggatacgagctgacagtgacggccgatagctggctcggacgtcgcaaatatccgcaccaccgcggtccgtcaaggcgagtactacgtcgtcaatgggtcaaagaagtggattacgaacgggatctgggcggattattgcactgctgctgtgcggactggtggacccggacggggtgggattagcttgctggttatcccactgaaagcggagggagttactaggaggaggatgcataattcgggagtaaatgcgagcggtacgttaaattgagacgtcgggggctctgagggacgagtaagctgaccggagattcgcggctacaggatcaacattcattgaattcgatgatgtgcgtgttcccgtggaccatctcattgggaaagagaacgggggtttcccgctaataatgtcaagtgcgtatcctccatgaccagacccaagtccacctcgacggaacccaggtttgcagtttgcaaaatgcaaggagctaacacatagcagacttcaatcctgagcggctttccctagcctgcgcctccctacgtctcgcgcgtgtctgtgcggaagacgccttcaactacgccacgcaacgctcaacatttggggctcccctgataacccgacaagcgatccaggcaaagattttcaagtttgggctcctaattgagcccgcgtacgcattcatggagcagctggtcaacatcttagagaagacaaagaatgagcctagagatgacgtgagaattggcggaatgacagcgctcttaaaggtcatgtccacgagggcgctcgagaagagtgtgcgcgaagcgcagcagattctcggcggggcggggtataatcgggcagggaaaggggcgagaattgaacagattagccgtgatgccagggttcatgttgtcggaggcgggagtgaggaaatcatgatgggtttggcgctgcag

SEQ ID NO: 19886 - DNA, 1379 bp, Emericella nidulans
caccctcaaaagcgccaaccctagcagtggcgcctccaacaacctatcccttgacgtccctagtatcgtgcgcagtgtgatcgaagacatccggcagaatggcgataaagcactgcgctcgtattcagaaaagttcgacaaatggagccccgatagcttcaaactgtccaaggagcagattgacgagatcgtcagcactgtccccgcacaggtcattgaggatatcaagaccgtgcagcagaacgtgcggacctttgccgaagagcagcgcaagtccatcagggactttgagtatcagattcagccgggggtgtttctggggcagaagaatatccccatctctgcggtcggcgcgtatgtacttacccctgccagacctaataacgttcttgtatggactcgtcttgtgctctcaggtacattcccggcgggcgctaccccctcctcgcctcagcccacatgacaattgtgactgccaaagccgccggtgtttcgcgtgtcattgcctgtacgccccctattcaaggcaaaatcccggcatcgacggtggcggcgatccacctagctggtgcagatgaaatatatatcctcggcggcgtgcaagcgattgcggcaatggcattgggaaccgaatctatcaacaagaccgacttcatcgcaggcccggggaatccgttcgttgcagaggccaagcggcaactcttcggcgagatcgggatcgacctgcccgccggtccgacggaggtgcttattgtagcggacgccaaagccgatccctttgtcgttgcaacagacctgctgtcgcaagcggagcatgggcccgatacgcccgccattctgatcacggattcgagggatgttgcggagaagacgatcaaagaggttgaaagactgctaccgatccttccgactagggcgctggcggcggtttcatgggagaggttcggagaggtacaacttgttgaggatctgaatgaggcgtacaaacttgcagatgagtatgcgagtgagcacgttcagattttgacggagaaccctagggaggcgctggtcaagatgaagaactacggggcgctcttccttggcgagaagacgtgcgtttcgtatggagataaggtatgtctactctcgccgtctaggacgataccaaagttttattcagactgtatggataactgacgaacgccgtagtgtattggaactaaccatgttctgcccactaaaagcgcagcgcgcttcactggcggcctctgggtcggcaaatatctgaagaccgttacctaccaagaggtaacagacgcgaaagccagtggcgaactcggtcgtctgtgtggccgtgctgctcgggcagaggggtttgaaggccatgctcggtctgg

SEQ ID NO: 19887 - DNA, 1379 bp, Emericella nidulans
ataaaactcaagtatatcattcagcagcggctatgatgggcttgaagttaccatttcttctggaagacctcaaattcaacattcccgtgccgtatacgccgcacgtggaccagcaactgctcgaagtgaccaagcaaaaactcgccttagctcgataccccgaagagcagacagattttggagagaaagattggtctcagggagccaaggtctcccgtataaaacagttggcggatttctggaaagaccagtacgattgggaggcggaagaggtgcgttgaagtatcccctcgtggagagctatcgctgattcgaaccctcagcgacgcctgaacgacatcttcaggcatttcctagtcaaggtcgatgtccctggctacggcccgctgatgctgcacttcacccacaaccagtctgccagaccgaatgctataccattgctcttctcccacggctggcccggttcctttgtggaggctattcgggtggtgcttcctttgactgagcccgaggatgccaaagatccagccttccacctcgttgccccgtcaattcctggtttcggtttttcacccgcgccctcaaaatctggcgtcggcccgaatgtggtcgcgcgcgcgtacaagatccttatgacggacgttttggggtacccaaatttgtgaccagggcggcgatttcggctctttcattacacgagccattgccatccagtaccccgcacttgtggcagcacagcacctgaatatgttcccgtgcctcctccgactctctggtccgcaccgtacgcgtacttgcgctggtcgtgtcggcgctgacatactcagagttcgagcacgaggcattgcgtgtgcgccggaactttgagcaagatcagagtggctatctcgaggagcagagaacccggccgcagacgcttgggttcgcgctgggggactcaccactcgggctgcttgcgtggtttgttgagaagctccatgactggggcgacgtgcatgaggcgttcagcgataccgatattattactttggtgatgatgcactggatccaaggcgcgacccctggcctgaggttttaccgggaggctttcggatgcggaaaacgtgaggcggagaagaccttcgagacttatgtgtcggtgccatgtggtgtcagtatgtacgtgaaggaacaactgcatgtgagtcatacgccccgaccttgttgcgcgtgtccaggagcgtactaacatggtaaagtgccctcgtgactgggcagcccaggttgcgaacattcactactggcgggagcatgaccgaggaggccatttttcgtcactggagagaccagatttgtttgtaaatgatcttcgctctttcttctcctcccctgcggtcatg

SEQ ID NO: 19888 - DNA, 1380 bp, Emericella nidulans
cttgcaatgtagcaagaactgattgatggaatagcatactggatctctgacgccttcaacgctgcgacctggcaattcgcctccagcattattgcagtaggcctttcgtggcgcgaatccctcggcatcgtcgccctctctttcttcatcatctccttcgtcatcgcagccaacggcgccgtcggttccatctaccatatccccttccccgtaatcgcgcgcgcttcatggggtttctggggctcctacattgcaatcatctcacgcgtgatcctggccattttctggtttgcgatccagaatgtcaacggtgcaaacgccgtcaaggccatgatcagcgctatctggccctcgttccttagcatgaagaataccatccctcaggaccagggaatcgagacaaatacgatgatcgcgtacatgatcttctggatcgtgcagatgccgttcctctgcatccacccgaataaagtgcgctggctgttcgccaccaagagcgtgcttgtccctgcggcttggattgccatactgatctgggcgttcgtggcagaggggaagggcgcgctctttgagcagagggctactgtgtctggaagtcagtactcgtgggtctggctcgcgagtatgacgagtgtgctggggaattatgccacgcttagtgttaaccaggtactgtatctcgacccttagcctcttaccccaaccctacagtgatggcctgaaactaatatctatatctacagagcgacttttcccgttactcgcgggtctccgcaaaatggcagctcctgtacatccctcttctccctgtgatcttcaccttcatctcattcatcggcatcgccgcctcctctgctggatggacgcggtacaatacgccctccatcccctgggatccaatcgagctgatatcccactgggactcgcgtgcggcgcgcttcttcggcgcgttctccttcgtctcgcatctctaggcgtgaacatcagcgcgaactcgatttccgctgcgaacgacctcatggctctattccccacatatgttgatctgcgtcgcggccagattatatgcggtgttatatcgtgggctctggtcccttggaagattttggagagtgccagcaatttcctgaacttcatgtctgcatatgccattttcctcgggcccattgccgccatcatgctgtgggatttttggctgattaagaaccgaaaatatgataccgttgctttgtatcagcccgacacgccgatctaccggttcaacgcgtggctggtaaattggcgcgctgttgttgcgtttctggttggtgttatcccgtctctgccgggtttgagtaattccgtgaatagccggattcaggttggcgtgggcattcaccc

SEQ ID NO: 19889 - DNA, 1381 bp, Emericella nidulans
cacctgctgggacgccgagtagctctggaatacctgtgcaggcaaccggaaatccgttcgagggataccagctctacgccaacccgtactacagctccgaagttatgactctggctgtcccgtcaatgactggttcattggccgagcaggcgacccatgccgctgagattccatcgttccattggctgtgagttacatcaagtgtatcatcattgacattgacgctgatgaatggattgttcagggatacgacggccaaggttcctaccatgggcgagtatctggcggacatcaaggagcagaatgacgcgggagccaacccaccgattgccggtatttttgttgtttataacttgccagaccgtgactgtgcggccctggccagcaatggagagctttcaattgccgatggaggcgttgagaagtacaaggagtatattgatgctattcgcgcgcatgccgtggagtattccgacaccaacataatccttattattggttagtttgttcttgcaagaccgtgaaactgtgctaatcaaatacagagcctgacagtctggcaaatctggtgaccaacttgaatgtggagaagtgtgccaatgctcaggatgcttacctcgaatgcacaaactacgccattacccagttggatctccccaacgtatctatgtaccttgacgctggtatgtctagaacacatttaaccgctcagtttcgtacctaatgttgcataggtcatgccggatggctgggatggcccgcaaacatcggcccagcagcccagctctttgcgggtgtttaccaggatgctggcgcgcctgcggcactccgtgggctcgcaaccaacgtggctaactacaatgccttcagcatcgacacctgcccttcttatacgtcgcagaatgcggtctgtgacgagaagggctacatcaacagctttgctcctgagctatcagccgcaggctgggatgcccacttcatcgttgacaccggtgtgtatgccgttaaaaattggatagggacataggctaattctatgcaggccgcaatggcaagcagcccacaggccagattgaatggggcgactggtgcaatgttaagggaactggatttggagttcgcccaactaccgacaccggtgacgagttggtcgacgccttcgtttgggtcaagcctggtggtgagagcgatggcacctctgaccagagtgctgagcgttacgacgctcactgtggtgccgctgctgcccttcagccggctcctgaggctggcacctggttccaggtaagttgcagtcatttcgattgagtgagtaccatatactaaccacacgaccaggcctacttcgagcaacttgtggccaacgccaacccgcccctta

SEQ ID NO: 19890 - DNA, 1381 bp, Emericella nidulans
acgggagaggcaccggcttcatcggtcgagcagcacgctgtatcatccgtggcaacatcgggcactacgaagccattgatcaaattgccacggccaaaaattgggcacaaaagccgtacgtcgacgagtcccgaatggcgatctggggctggagctacggcggctttatgacgttgaagactctcgaacaagacgccggcgagacatttcagtacggaatggctgttgcgcctgtcacagactggcggttctatggtaaggcgctcaaacccacccatttcctacttggaccatgtatagtcaactaacccaaagcccaatagattccgtctacacagaacgctacatgcacaccccgcagcacaacccaacaggctatgacaacaccagcatatcggacatggccgcccttcataacaatgtccgcttccttgtcatccacggtgcctcagacgacaacgtccatatccaaaacacgctcaccctaattgataagctggatctcgcgagcgtccagaactatgatgtgcatttctaccctgactccgaccatagcatcttctttcacaatgcccatactatggtttatgaacgtatgtcaccaattttctatccataacaacccctgcccttaacgggttcaagacttcagctaatggttgattgtaaactaggccttgcaagctggcttgtcaacgcgttcaatggcgagtggcatcggacagcaaaccccgttccagacgagtcgatgttgaggcggcttgcgaagagggtttggcctggttttgcgcattgatttgctaaatattggaataggatatctaaacgtgtatatgagtatgaagccggacaacctttaagctttgctttaacagtgatcgttttttacgaaggcgttctttaggaagcgtttcatgtttgttcttaatcttttcaaaacaaatgcgtaacacacgcggtctatatgatcggcaaagtccctaagagagcactatcctcatggcttgaacatcgagaaataactatgtgcaccctccagcctcaagaatgctgtgtatcatcttgttgtggctgattgaatgccgctactttaagggctgctccctcactcatacacactcatgagatgttctttgtgatccggacaaggaggaaaccacctgagtcagatccatcacacttatacagacggagtacacggtatccctcctgcaaacgggtcagtctaatgcaggcccatgaagccaacgagtcgaatccgatttcgtcatccttaaccttgaatctgcagcatagtcagtaaaatagtcaagccatattgcaagtgcaacaacgaacctgacaaacgtcagctcttccactacaccaggcagcgtcggga

SEQ ID NO: 19891 - DNA, 1384 bp, Emericella nidulans
ccacgctgcagacgaccttcaaatccggcaagaccaaggagattgcctggcgcaaatggcagctcaagcagatctggtggctcgttgacgacaacgaggctctgattcaggaggccctcaagaaggacatgaacagacacccattcgagacgacctttaccgagtgcgcgaacgtcaagggcgatgtcatcgagcacctgaagaacatcgacaagtggacggcagaccagaaaccgagcgctggaatgctagggctcatgctcaggccaacggtgcgtccggagccgttgggcgtcgctcttattattgggccctggaatttccctttctccctcctggttcagccgctgattgcggcatcactgccggctgtgcggcgttgctcaaaccgtccgaggtcacatcgtcagtccaacagctgtttgttgatctcgtgcccaagtatctggacactagcgccgtgcgtgtcgtcactgggggcccagcggaaaccggttgcctgctgcagcgcaagttcgaccatatcttcttcaccggctccgttcccgtggcgcgtcatatcgctgctgcagcggccaagcatcttacgccgactgtgctggagctgggcggacagtgtccggctatcgtgaccagttcggcggatgtggacgcggcacgaaaggacattgcctggatcaagtatctcaatgctggacaaatctgtctgtccgtaaaccatgttttcgcacatccttctgtggagcggaactcattgaacgaatggcgttctggcttgatcggttctacaagggtgagaaggatgccatgacgcacatcgtcaatgacaagaactatgctcgtatcaaacagctggcggagaagacgaagggaaagatcgagctggacgggacggcagatgccgaaactaggagtctgccggtgagcatcgtgagcaatgtcgaaatgagcgatcctttgctctccgaagagctctttgggaccgtctgcccggtgataaagggttcgacagacgatgcgatcaagtccatcaacaggtatctggcataacctgctactctacacatgctgactgattagcctgccccgacccctcgctctgtatattttcagtcaggaccagaacgaagtcgagcatagtaagtcgtccctctctcccctggtttacttgtactcattcgtcagtaatatcctccaccctctccggtggcgtctgtgtcaacggcgttctcgtccacgcaatggtccctaatgccccttttggcggagttggcgactccggtcacggcgcctaccacggcgagtacggcttcaagtccttcacccactaccgcacaatcgcccgaccggctccttttttcttcaagatgagcgaatggatgcg

SEQ ID NO: 19892 - DNA, 1384 bp, Emericella nidulans
tccgtccccgcttcctcagacaaatgcaccaccaccatcaacagccgtcttacggcagcggctatcccgggcaggcctaccgtcagcagcagaacccttacccgcaatacggtcacccttcacctcaaccgtaccctccacagaatggttacagtgtatgttggcagaatgagatgaatccaccgtgctgttcgatgttgactttgtattatagcacccatcatcgggctatccgccttcacccgctcctccaaatggcggccagatgtaccacggacggcgtgcgtgactcttctatcgatagtcgcttgatatccatgctgattcctcccagaaccctcatacccgccaaatcaatacccgcctgcgcatgggggcccgacggctccgccaaccaacccgcaggcctttggccatggcgcacctcaaggatataacttccagtactcccgttgcacagggaaaagaaaggctctcttgattggtatcaactatttcggccaaaagggtcaattgcgtggatgcatcaacgatgtgaagaacatgtcgacataccttaaccagaactttggctacgcccgggaggacatggtgatcttgactgacgaccaacaaaaccccatgagccaaccgacgaaggctaacattctgcgcgccatgcactggctggtgaaagatgcacaacccaatgattctctcttcttccattattccggacatggtggtcaaacccccgatttggacggtgacgaagacgacggatatgacgaagttatctatcctgttgatttccgggtagcgggtcacatagtcgacgatgaaatgcatcggatcatggtgaaacctcttcagcctggtgtgcgactgacggcaatcttcgactcgtgtcattcaggttctgctctggatttgccgtacatctactccacacaaggtattctgaaggaacccaaccttgcaaaggaagctggtcaagggttactgggcgtcatatcatcgtacgcgcgcggcgatatgggaggtatgatgtcaacagccgtcgggttcctgaagaaggctgccaagggcgacgaagcctaccagcgaaccaagcagaccaagaccagcccggcagacgttatcatgtggtcaggaagcaaagatgaccaaaccagccaagatgcccaaatcgccggtcaggccactggtgcgatgtcctgggctttcatcaccgccatgcgcaaaaatccgcagcaaagctatgtgcagctgctgaatagcatccgagatgaattgtcgaccagatatacgcagaaaccgcagctgagctccagccaccccttgggtacgccccttatccctcaatgagatgtttttcgtaaaagggcttttctgacggattttt

SEQ ID NO: 19893 - DNA, 1386 bp, Emericella nidulans
cgcatccagaagagcgtggcatctttgccgtcgttgtcgccccgacaaaggagctcgctagccagattgtcaacgaggggaggaagctggcacttggaacaggtgtaaaggtaacgctgatgaagaaggggatgcgggtagtggaacgtgagaacgaagatgaagatgtcctagatgagagtaattcagaatcatcagaatctgagagcgacgaaaggactcccaacaacaagaacaagggacccgttcctattaccaaaagtgacattcttgtttcaacacccttgcaactagtcaatgcgctctccgacaacaagacgaagcctctcgcaaccctaccattggtaaggaacttggttctggatgaagccgatgtcttgttagatcccttgtttcgtgaccagacattggacatctggcgctcctgcactcatccagagctccgtgccagcctttggtccgcgactatgggttctagcatcgaggacatggccaagacaacgatcaaagagcgaaagctgtctttgccgcaaaccaagtcataccccctacttcgacttgtcgtcggcttaaaagactccgctattccgaatattaagcacaagctagtctacgccgccacagagcaaggaaagctcctcggtctcagacagctcatccaccccacagctgcgacaacatcagatgtccgtcttcgaccacccttccttatattcacacagacaattcctcgagctattgcgttacattctgaacttctttacgacattcctcctgaggccggtggctctgcgcgaatcgcagtgcttcattcggacttatcggatacacagagatcagacatcatgaaaggcttccgtaaaggcgagatttggatccttgtcacgacggatttactcgcccgtggtgttgacttccgcggtataaatggggttgtcaactacgatatccctaattccccagctgtctacgttcacagggttggacggaccgggagagctggtcgcgagggtggcgtcgcagtgacctactacacaaaagaggacattccttatgtcaagagcatcgccaacatcatcgatgtcagtgaaaagctacgaggagaaaacggtgaacgatcagtgcagaaatggctactagatgcattgccagatctcagcaagaagaacaagaaggaattaaagaagcacggcgtcaaggctaggcaaacgggtctcaagggtgccacggatgaaaaggagcaacgccggacgagaatcagtaccaagagcgggttcgatcgccgaaaagaatacaacaagaagatgatgattgccgccagccagaagaaaacacaagcccgaaagaacggagctgattccgacagtgctggtgacgacgacgacg

SEQ ID NO: 19894 - DNA, 1387 bp, Emericella nidulans
cccgtcaaagcgccagcctaaatgatctttttgtcgcggccggcaaatcctactttggcacttgctccgaccaggcgctgctgcagaactcgcagaacgaggccattgtggcgtcgcagttcggagtgatcaccccggagaacagcatgaaatgggacgcgcttgaacgtgggtctttccttcagagacggtagattttggcagggctgacggaaatgtgggaacagcgtctcaggggaactttggctggtctggagccgactaccttgtatgttccttggctgtcggggtcgattatttcggctcagccggtgctgaccaggtttaggtcgactacgcgacgcagcataacaagaaggttcgcggacatacgctcggtaggccagctcccacccgtctcaacgtcggggtcactgaccgatccagtctggcactcccagctcccctcttgggtctcgtccatcggcgatgcgaacacactcagatccgtcatgacgaaccacatcaatgaggtcgtcggccggtacaagggcaagatcatgcactgggtatgcctcaccagaacccattcccgccataaacaaagaaagaatgcatgagagagagatcgccttactgagatgagtgcaggacgtcgtcaacgagatcttcaacgaagatggcaccttccgcaacagcgtcttctacaacctcctgggcgaggactttgtgcggattgcgttcgagactgcgcgcgccgcggaccctgatgcgaagctgtacatcaacgactacaagtgagtcaccctgctgctgcttaggaccagctctgatagcggattagcctggactctgcgagctacgccaagacgcaggcgatggcgagctacgtgaagaagtggttggcggagggcgtgcctatcgatggaatcggtgagtggaccttggtctacagtatagcgcaactcgactgacgatcttccaggctcccaggcccactacaggtacgctcggcggtcgtctggctgaccaagtactaacgtatcgcagctcaagccactggtccagcactgaagccgcaggataagttttttccgcccttggatgcactgccgtcacactgacaaccccaaacagcgctgtcctctctcgctaacacgggcgtctccgaggttgccatcaccgagcttgatattgcgggcgcaggctcgtccgactacctgaacgtaagtagtccgatccactggccttccggctcgggctaacgagaatgccgtagttgctcaacgcctgcctcaacgagcagaaatgcgtgggcatcaccgtctggggagtgtccgacaaggactcgtggcgcgcgtccgacagccccttgctgtttgacggcaactaccagcccaaggatgcc

SEQ ID NO: 19895 - DNA, 1388 bp, Emericella nidulans
tccccaagcttgtctggaccgtcaaggaggatgacgagaacctcacatggttctttgacaaggctgatggcagtctaagccgagacggcgaggttctcttctggtacggagttgagagtagtgatgaggtgaagctgttggttcaggaattcactcagcacggtcgccagatgttcggcgacatcaaccttgagtccaggcttcagcgcgctgctcatgcggctgccaatatcggcaagcccctcggtgctgctgctggacagaagcgtactttctccactgcaagcaacgcccttcgttctgcccgtttcggacgcccttcagttcccgttcagactgtccgcacctacgccacaaccaaccctaaccctcctcttggggagaagaacaactccaacactaagccttccaaagtcgccctcatcggagcccgtggtacactggacaggccctgatcaacctcatcaacgcccaccctcacctggatttgcgtcatgtctcttcccgcgagctggctggcaagaagctgcagggttacgacaagcgagagatcatctacgagaacctgagtcccgaggatgtcaagcgcatgtcatccaacggcgacgtcgactgctgggttatggccctccctaacggcgtctgcaagcctttcgttgatgccgttgaccagggtgccaaggatggtaacgtgatcatcgacctgagcgccgactaccgctttgatgagaactgagcctacggtctccctgagctggtcagccgctctaagatcgcccaggcaactcgcatcgccaaccctggttgctatgccaccggaacccaagttgccattgctcctatcgttcctcacctcggtggacaacccaccgtttttggcgtttccggttactctggagctggtaccaagcctagccccaagaacgacgtccagaaccttactaacaacatcatcccttactccttgaccgaccacatccacgagcgggaaattagttctcagctcggtactcccattgccttcatgccccacgttgctgtttggttccagggcatccacctcaccatcaacattcctctgaaggagacaatgtcatctcgtgacattcgcaacatctaccaggaccgttacgctggcgagaagcttgtgaagatcgtcggtgagcctccggttgtcaagaacattgctggtcgtcacggcgtcgaagtcggtggctttgccgtccactccaaggagaaccgtgtcgtcgtttgcgccaccattgacaaccttctcaaaggtgctgccactcaatgcctgcgtaagtccccgcacatatccccatccgccttaggccctactaacatacggcgtacagaaaacatgaacctcgccctcggatacagcg
